(19) United States
(12) Patent Application Publication
(10) Pub. No.: US 2005/0287559 A1
(43) Pub. Date: Dec. 29, 2005

(54) Genetic polymorphisms associated with vascular, methods of detection and uses thereof

(75) Inventors: Michele Cargill, San Francisco, CA (US); James J. Devlin, Lafayette, CA (US); May M. Luke, San Francisco, CA (US)

Correspondence Address: CELERA GENOMICS;ATTN: WAYNE MONTGOMERY, VICE PRES, INTEL PROPERTY, 45 WEST GUDE DRIVE, C2-4#20, ROCKVILLE, MD, 20850, US

(73) Assignee: APPLERA CORPORATION, Norwalk, CT (US)

(21) Appl. No.: 11/124,368

(22) Filed: May 9, 2005

Related U.S. Application Data
(60) Provisional application No. 60/568,845, filed on May 7, 2004.
(60) Provisional application No. 60/625,936, filed on Nov. 9, 2004.

(51) Int. Cl. C12Q 1/68

(52) U.S. Cl. 435/6

(57) ABSTRACT

The present invention is based on the discovery of genetic polymorphisms that are associated with vascular diseases and in particular coronary artery disease and stenosis. In particular, the present invention relates to nucleic acid molecules containing the polymorphisms, variant proteins encoded by such nucleic acid molecules, reagents for detecting the polymorphic nucleic acid molecules and proteins, and methods of using the nucleic acid and proteins as well as methods of using reagents for their detection.

### FIELD OF THE INVENTION

[0001] The present invention is in the field of vascular disease diagnosis and therapy. In particular, the present invention relates to specific single nucleotide polymorphisms (SNPs) in the human genome, and their association with vascular disease and related pathologies, in particular, coronary artery disease (CAD) such as coronary stenosis. Based on differences in allele frequencies in the vascular disease patient population relative to normal individuals, the naturally-occurring SNPs disclosed herein can be used as targets for the design of diagnostic reagents and the development of therapeutic agents, as well as for disease association and linkage analysis. In particular, the SNPs of the present invention are useful for identifying an individual who is at an increased or decreased risk of developing vascular disease and for early detection of the disease, for providing clinically important information for the prevention and/or treatment of vascular disease, and for screening and selecting therapeutic agents. The SNPs disclosed herein are also useful for human identification applications. Methods, assays, kits, and reagents for detecting the presence of these polymorphisms and their encoded products are provided.

### BACKGROUND OF THE INVENTION

[0002] Vascular Diseases

[0003] Vascular diseases are pathological conditions that result from abnormalities in the blood vessels and organs of the circulatory system. As such, vascular diseases encompass a variety of pathologies including cerebrovascular disease, such as stroke, coronary heart disease (CHD), carotid artery disease, peripheral artery disease, aortic aneurysm, and vascular dementia. CHD encompasses the related pathologies affecting the coronary arteries such as coronary artery disease, coronary stenosis, angina, revascularization and myocardial infarction (MI) (heart attack).

[0004] Coronary stenosis is the narrowing of coronary arteries by obstructive atherosclerotic plaques. The coronary arteries supply oxygenated blood flow to the myocardium. Although mild and moderate coronary stenosis do not impede resting coronary flow, coronary stenosis >30-45% starts to restrict maximal coronary flow. Severe coronary stenosis (>70% reduction in luminal diameter) causes stable angina (ischemic chest pain upon exertion). Significant coronary stenosis contributes, along with plaque rupture and thrombus formation, coronary spasm, or inflammation/infection, to unstable angina as well as myocardial infarction. Together with arrhythmia, coronary stenosis is a major factor of sudden cardiac deaths, as evidenced by its presence in two or more major coronary arteries in 90% of adult sudden cardiac death victims.

[0005] Cornoary stenosis is a prevalent disease. Each year in the United States, 440,000 new cases of stable angina and 150,000 new cases of unstable angina occur. This year, an estimated 1.1 million Americans will have a new or recurrent heart attack. These incidences result in over six million individuals in the U.S. living with stable or unstable angina pectoris, a debilitating condition, and over seven million individuals in the U.S. living with a history of myocardial infarction. Coronary stenosis is frequently a deadly disease. It is a major underlying cause of CHD, which is the single largest cause of death in the U.S. Over half a million coronary deaths, including 250,000 sudden cardiac deaths, occur each year in U.S. Coronary stenosis is also a costly disease. It is the major reason for 1.2 million cardiac catheterizations, 0.4 million angioplasties, and 0.6 million bypass surgeries, contributing to the estimated 110 billion dollar total costs of CHD in the U.S. for the year 2002. Still, these statistics underestimate the true prevalence of the l disease since coronary stenosis often remains clinically asymptomatic for decades, and only becomes symptomatic when the disease has progressed to a severe, and sometime fatal, state.

[0006] There is therefore an unmet need in early diagnosis and prognosis of asymptomatic coronary stenosis. This need is particularly significant given that early diagnosis or prognosis results can significantly influence the course of disease by influencing treatment choices (for example, those with genetic risks can be treated to modify risk factors such as hypertension, diabetes, inactivity, dyslipidemia, etc.), thresholds (e.g., lipid levels used to trigger the use of lipid-lowering drugs), and goals (e.g., target blood pressure or lipid levels), and possibly enhance compliance.

[0007] Diagnosis of coronary stenosis currently starts by assessing if the risk profiles (e.g., hypertension, dyslipidemia, family history, diabetes, etc.) and symptoms (e.g., angina) of patients are consistent with CHD, followed most commonly by resting and exercise EKGs. However, risk assessments and EKGs are imperfect diagnostic tests for coronary stenosis since they can be both insensitive (giving false negatives) and non-specific (giving false positives). Coronary arteriography is the definitive test for assessing the severity of coronary stenosis, however, it is not very sensitive in early detection of mild coronary stenosis. It is also an invasive procedure with a small risk of death due to the catheterization procedure and the contrast dye. Because of this risk, it is typically only used at a time when coronary stenosis is considered likely from symptoms or other tests, which is hardly an ideal time to start intervention.

[0008] Coronary stenosis risk is presumed to have a strong genetic component. It is well known that several major risk factors of coronary disease are heritable, e.g. serum lipid levels (Penusse L. et. al. Arterioscler Thromb Vasc Biol (1997): 17(11) 3263-9) and obesity (Rice T. et. al., Int J Obes Relat Metab Disord (1997):21(11) 1024-31). Indeed, several known genetic defects are individually sufficient to cause elevated serum LDL-cholesterol (e.g., familial hypercholesterolemia) leading to premature coronary disease (Goldstein and Brown, Science 292 (2001): 1310-12). In addition, linkage studies in humans have replicated the findings of the link of several chromosomal regions (quantitative trait loci) to CHD and related diseases and risk factors (Pajukanta P. et. al., Am J Hum Genet 67 (2000):1481-93, Francke S. et. al., Human Molecular Genetics (2001): 10 (24) 2751-65). Finally, a family history of premature coronary disease is a significant factor in the risk assessment and diagnosis of coronary disease (Braunwald E., Zipes D. and Libby P., Heart Disease, 6^{th} ed. W.B. Saunders Company, 2001, 28).

[0009] Although many risk factors for coronary stenosis have been identified, including age, diabetes, hypertension, high serum cholesterol, smoking, etc., and genetic factors play significant roles in several of these risk factors, significant genetic risk factors are likely to exist which have not been identified to date. In addition to the anecdotal coronary disease patients that exhibit few traditional risk factors, a study of multiple existing risk factors showed that only half of the “population-attributable risk” was attributable to known risk factors (Change M. et. al., J Clin Epidemiol (2001) 54 (6) 634-44). Therefore, the presently known risk factors are inadequate for predicting coronary stenosis risk in individuals. Given the magnitude of the disease, there is an urgent need for genetic markers that are predictive of coronary stenosis risk. Such genetic markers could increase the prognostic ability of existing risk assessment methods and complement current diagnostic methods such as exercise EKG, especially in early detection of disease when intervention is most effective and should ideally start. These early interventions can include the initiation of modification of statin treatments.

[0010] SNPs

[0011] The genomes of all organisms undergo spontaneous mutation in the course of their continuing evolution, generating variant forms of progenitor genetic sequences (Gusella, Ann. Rev. Biochem. 55, 831-854 (1986)). A variant form may confer an evolutionary advantage or disadvantage relative to a progenitor form or may be neutral. In some instances, a variant form confers an evolutionary advantage to the species and is eventually incorporated into the DNA of many or most members of the species and effectively becomes the progenitor form. Additionally, the effects of a variant form may be both beneficial and detrimental, depending on the circumstances. For example, a heterozygous sickle cell mutation confers resistance to malaria, but a homozygous sickle cell mutation is usually lethal. In many cases, both progenitor and variant forms survive and co-exist in a species population. The coexistence of multiple forms of a genetic sequence gives rise to genetic polymorphisms, including SNPs.

[0012] Approximately 90% of all polymorphisms in the human genome are SNPs. SNPs are single base positions in DNA at which different alleles, or alternative nucleotides, exist in a population. The SNP position (interchangeably referred to herein as SNP, SNP site, SNP locus, SNP marker, or marker) is usually preceded by and followed by highly conserved sequences of the allele (e.g., sequences that vary in less than 1/100 or 1/1000 members of the populations). An individual may be homozygous or heterozygous for an allele at each SNP position. A SNP can, in some instances, be referred to as a “cSNP” to denote that the nucleotide sequence containing the SNP is an amino acid coding sequence.

[0013] A SNP may arise from a substitution of one nucleotide for another at the polymorphic site. Substitutions can be transitions or transversions. A transition is the replacement of one purine nucleotide by another purine nucleotide, or one pyrimidine by another pyrimidine. A transversion is the replacement of a purine by a pyrimidine, or vice versa. A SNP may also be a single base insertion or deletion variant referred to as an “indel” (Weber et al., “Human diallelic insertion/deletion polymorphisms”, Am J Hum Genet October 2002;71(4):854-62).

[0014] A synonymous codon change, or silent mutation/SNP (terms such as “SNP”, “polymorphism”, “mutation”, “mutant”, “variation”, and “variant” are used herein interchangeably), is one that does not result in a change of amino acid due to the degeneracy of the genetic code. A substitution that changes a codon coding for one amino acid to a codon coding for a different amino acid (i.e., a non-synonymous codon change) is referred to as a missense mutation. A nonsense mutation results in a type of non-synonymous codon change in which a stop codon is formed, thereby leading to premature termination of a polypeptide chain and a truncated protein. A read-through mutation is another type of non-synonymous codon change that causes the destruction of a stop codon, thereby resulting in an extended polypeptide product. While SNPs can be bi-, tri-, or tetra-allelic, the vast majority of the SNPs are bi-allelic, and are thus often referred to as “bi-allelic markers”, or “di-allelic markers”.

[0015] As used herein, references to SNPs and SNP genotypes include individual SNPs and/or haplotypes, which are groups of SNPs that are generally inherited together. Haplotypes can have stronger correlations with diseases or other phenotypic effects compared with individual SNPs, and therefore may provide increased diagnostic accuracy in some cases (Stephens et al. Science 293, 489-493, 20 July 2001).

[0016] Causative SNPs are those SNPs that produce alterations in gene expression or in the expression, structure, and/or function of a gene product, and therefore are most predictive of a possible clinical phenotype. One such class includes SNPs falling within regions of genes encoding a polypeptide product, i.e. cSNPs. These SNPs may result in an alteration of the amino acid sequence of the polypeptide product (i.e., non-synonymous codon changes) and give rise to the expression of a defective or other variant protein. Furthermore, in the case of nonsense mutations, a SNP may lead to premature termination of a polypeptide product. Such variant products can result in a pathological condition, e.g., genetic disease. Examples of genes in which a SNP within a coding sequence causes a genetic disease include sickle cell anemia and cystic fibrosis.

[0017] Causative SNPs do not necessarily have to occur in coding regions; causative SNPs can occur in, for example, any genetic region that can ultimately affect the expression, structure, and/or activity of the protein encoded by a nucleic acid. Such genetic regions include, for example, those involved in transcription, such as SNPs in transcription factor binding domains, SNPs in promoter regions, in areas involved in transcript processing, such as SNPs at intron-exon boundaries that may cause defective splicing, or SNPs in mRNA processing signal sequences such as polyadenylation signal regions. Some SNPs that are not causative SNPs nevertheless are in close association with, and therefore segregate with, a disease-causing sequence In this situation, the presence of a SNP correlates with the presence of, or predisposition to, or an increased risk in developing the disease. These SNP, although not causative, are nonetheless also useful for diagnostics, disease predisposition screening, and other uses.

[0018] An association study of a SNP and a specific disorder involves determining the presence or frequency of the SNP allele in biological samples from individuals with the disorder of interest, such as vascular disease and in particular CAD and stenosis, and comparing the information to that of controls (i.e., individuals who do not have the disorder; controls may be also referred to as “healthy” or “normal” individuals) who are preferably of similar age and race. The appropriate selection of patients and controls is important to the success of SNP association studies. Therefore, a pool of individuals with well-characterized phenotypes is extremely desirable.

[0019] A SNP may be screened in diseased tissue samples or any biological sample obtained from a diseased individual, and compared to control samples, and selected for its increased (or decreased) occurrence in a specific pathological condition, such as pathologies related to coronary stenosis. Once a statistically significant association is established between one or more SNP(s) and a pathological condition (or other phenotype) of interest, then the region around the SNP can optionally be thoroughly screened to identify the causative genetic locus/sequence(s) (e.g., causative SNP/mutation, gene, regulatory region, etc.) that influences the pathological condition or phenotype. Association studies may be conducted within the general population and are not limited to studies performed on related individuals in affected families (linkage studies).

[0020] Clinical trials have shown that patient response to treatment with pharmaceuticals is often heterogeneous. There is a continuing need to improve pharmaceutical agent design and therapy. In that regard, SNPs can be used to identify patients most suited to therapy with particular pharmaceutical agents (this is often termed “pharmacogenomics”). Similarly, SNPs can be used to exclude patients from certain treatment due to the patient's increased likelihood of developing toxic side effects or their likelihood of not responding to the treatment. Pharmacogenomics can also be used in pharmaceutical research to assist the drug development and selection process. (Linder et al. (1997), Clinical Chemistry, 43,254; Marshall (1997), Nature Biotechnology, 15, 1249; International Patent Application WO 97/40462, Spectra Biomedical; and Schafer et al. (1998), Nature Biotechnology, 16: 3).

### SUMMARY OF THE INVENTION

[0021] The present invention relates to the identification of novel SNPs, unique combinations of such SNPs, and haplotypes of SNPs that are associated with coronary stenosis and related pathologies. The polymorphisms disclosed herein are directly useful as targets for the design of diagnostic reagents and the development of therapeutic agents for use in the diagnosis and treatment of coronary stenosis and related pathologies.

[0022] Based on the identification of SNPs associated with coronary stenosis, the present invention also provides methods of detecting these variants as well as the design and preparation of detection reagents needed to accomplish this task. The invention specifically provides, for example, novel SNPs in genetic sequences involved in coronary stenosis, isolated nucleic acid molecules (including, for example, DNA and RNA molecules) containing these SNPs, variant proteins encoded by nucleic acid molecules containing such SNPs, antibodies to the encoded variant proteins, computer-based and data storage systems containing the novel SNP information, methods of detecting these SNPs in a test sample, methods of identifying individuals who have an altered (i.e., increased or decreased) risk of developing coronary stenosis based on the presence or absence of one or more particular nucleotides (alleles) at one or more SNP sites disclosed herein or the detection of one or more encoded variant products (e.g., variant mRNA transcripts or variant proteins), methods of identifying individuals who are more or less likely to respond to a treatment (or more or less likely to experience undesirable side effects from a treatment, etc.), methods of screening for compounds useful in the treatment of a disorder associated with a variant gene/protein, compounds identified by these methods, methods of treating disorders mediated by a variant gene/protein, methods of using the novel SNPs of the present invention for human identification, etc.

[0023] In Tables 1-2, the present invention provides gene information, transcript sequences (SEQ ID NOS:1-169), encoded amino acid sequences (SEQ ID NOS:170-338), genomic sequences (SEQ ID NOS:2873-2939), transcript-based context sequences (SEQ ID NOS:339-2872) and genomic-based context sequences (SEQ ID NOS:2940-21112) that contain the SNPs of the present invention,.and extensive SNP information that includes observed alleles, allele frequencies, populations/ethnic groups in which alleles have been observed, information about the type of SNP and corresponding functional effect, and, for cSNPs, information about the encoded polypeptide product. The transcript sequences (SEQ ID NOS:1-169), amino acid sequences (SEQ ID NOS: 170-338), genomic sequences (SEQ ID NOS:2873-2939), transcript-based SNP context sequences (SEQ ID NOS: 339-2872), and genomic-based SNP context sequences (SEQ ID NOS:2940-21112) are also provided in the Sequence Listing.

[0024] In a specific embodiment of the present invention, SNPs which occur naturally in the human genome are provided as isolated nucleic acid molecules. These SNPs are associated with coronary stenosis such that they can have a variety of uses in the diagnosis and/or treatment of coronary stenosis and related pathologies. One aspect of the present invention relates to an isolated nucleic acid molecule comprising a nucleotide sequence in which at least one nucleotide is a SNP disclosed in Tables 3 and/or 4. In an alternative embodiment, a nucleic acid of the invention is an amplified polynucleotide, which is produced by amplification of a SNP-containing nucleic acid template. In another embodiment, the invention provides for a variant protein which is encoded by a nucleic acid molecule containing a SNP disclosed herein.

[0025] In yet another embodiment of the invention, a reagent for detecting a SNP in the context of its naturally-occurring flanking nucleotide sequences (which can be, e.g., either DNA or mRNA) is provided. In particular, such a reagent may be in the form of, for example, a hybridization probe or an amplification primer that is useful in the specific detection of a SNP of interest. In an alternative embodiment, a protein detection reagent is used to detect a variant protein which is encoded by a nucleic acid molecule containing a SNP disclosed herein. A preferred embodiment of a protein detection reagent is an antibody or an antigen-reactive antibody fragment.

[0026] Various embodiments of the invention also provide kits comprising SNP detection reagents, and methods for detecting the SNPs disclosed herein by employing detection reagents. In a specific embodiment, the present invention provides for a method of identifying an individual having an increased or decreased risk of developing coronary stenosis by detecting the presence or absence of one or more SNP alleles disclosed herein. In another embodiment, a method for diagnosis of coronary stenosis by detecting the presence or absence of one or more SNP alleles disclosed herein is provided.

[0027] The nucleic acid molecules of the invention can be inserted in an expression vector, such as to produce a variant protein in a host cell. Thus, the present invention also provides for a vector comprising a SNP-containing nucleic acid molecule, genetically-engineered host cells containing the vector, and methods for expressing a recombinant variant protein using such host cells. In another specific embodiment, the host cells, SNP-containing nucleic acid molecules, and/or variant proteins can be used as targets in a method for screening and identifying therapeutic agents or pharmaceutical compounds useful in the treatment of coronary stenosis.

[0028] An aspect of this invention is a method for treating coronary stenosis in a human subject wherein said human subject harbors a SNP, gene, transcript, and/or encoded protein identified in Tables 1-2, which method comprises administering to said human subject a therapeutically or prophylactically effective amount of one or more agents counteracting the effects of the disease, such as by inhibiting (or stimulating) the activity of the gene, transcript, and/or encoded protein identified in Tables 1-2.

[0029] Another aspect of this invention is a method for identifying an agent useful in therapeutically or prophylactically treating coronary stenosis in a human subject wherein said human subject harbors a SNP, gene, transcript, and/or encoded protein identified in Tables 1-2, which method comprises contacting the gene, transcript, or encoded protein with a candidate agent under conditions suitable to allow formation of a binding complex between the gene, transcript, or encoded protein and the candidate agent and detecting the formation of the binding complex, wherein the presence of the complex identifies said agent.

[0030] Another aspect of this invention is a method for treating coronary stenosis in a human subject, which method comprises:

[0031] (i) determining that said human subject harbors a SNP, gene, transcript, and/or encoded protein identified in Tables 1-2, and

[0032] (ii) administering to said subject a therapeutically or prophylactically effective amount of one or more agents counteracting the effects,of the disease.

[0033] Many other uses and advantages of the present invention will be apparent to those skilled in the art upon review of the detailed description of the preferred embodiments herein. Solely for clarity of discussion, the invention is described in the sections below by way of non-limiting examples.

[0034] Description of the Files Contained on the CDR Names CL001524CDR

[0035] The CD-R named CL001524CDR contains the following five text (ASCII) files:

[0036] 1) File SEQLIST_{—}1524.txt provides the Sequence Listing. The Sequence Listing provides the transcript sequences (SEQ ID NOS:1-169) and protein sequences (SEQ ID NOS:170-338) as shown in Table 1, and genomic sequences (SEQ ID NOS:2873-2939) as shown in Table 2, for each coronary stenosis-associated gene that contains one or more SNPs of the present invention. Also provided in the Sequence Listing are context sequences flanking each SNP, including both transcript-based context sequences as shown in Table 1 (SEQ ID NOS:339-2872) and genomic-based context sequences as shown in Table 2 (SEQ ID NOS:2940-21112). The context sequences generally provide 100 bp upstream (5′) and 100 bp downstream (3′) of each SNP, with the SNP in the middle of the context sequence, for a total of 200 bp of context sequence surrounding each SNP. File SEQLIST_{—}1524.txt is SEQ*SIZE KB in size, and was created on **********.

[0037] 2) File TABLE1_{—}1524.txt provides Table 1. File TABLE1_{—}1524.txt is 2,312 KB in size, and was created on May 6, 2005.

[0038] 3) File TABLE2_{—}1524.txt provides Table 2. File TABLE2_{—}1524.txt is 12,297 KB in size, and was created on May 5, 2005.

[0039] 4) File TABLE3_{—}1524.txt provides Table 3. File TABLE3_{—}1524.txt is 14 KB in size, and was created on May 5, 2005.

[0040] 5) File TABLE4_{—}1524.txt provides Table 4. File TABLE4₌₁₃ 1524.txt is 24 KB in size, and was created on May 5, 2005.

[0041] The material contained on the CD-R labeled CL001524CDR is hereby incorporated by reference pursuant to 37 CFR 1.77(b)(4).

[0042] Description of Table 1 and Table 2

[0043] Table 1 and Table 2 (both provided on the CD-R) disclose the SNP and associated gene/transcript/protein information of the present invention. For each gene, Table 1 and Table 2 each provide a header containing gene/transcript/protein information, followed by a transcript and protein sequence (in Table 1) or genomic sequence (in Table 2), and then SNP information regarding each SNP found in that gene/transcript.

[0044] NOTE: SNPs maybe included in both Table 1 and Table 2; Table 1 presents the SNPs relative to their transcript sequences and encoded protein sequences, whereas Table 2 presents the SNPs relative to their genomic sequences (in some instances Table 2 may also include, after the last gene sequence, genomic sequences of one or more intergenic regions, as well as SNP context sequences and other SNP information for any SNPs that lie within these intergenic regions). SNPs can readily be cross-referenced between Tables based on their hCV (or, in some instances, hDV) identification numbers.

[0045] The gene/transcript/protein information includes:

[0046] a gene number (1 through n, where n=the total number of genes in the Table)

[0047] a Celera hCG and UID internal identification numbers for the gene

[0048] a Celera hCT and UID internal identification numbers for the transcript (Table 1 only)

[0049] a public Genbank accession number (e.g., RefSeq NM number) for the transcript (Table 1 only)

[0050] a Celera hCP and UID internal identification numbers for the protein encoded by the hCT transcript (Table 1 only)

[0051] a public Genbank accession number (e.g., RefSeq NP number) for the protein (Table 1 only)

[0052] an art-known gene symbol

[0053] an art-known gene/protein name

[0054] Celera genomic axis position (indicating start nucleotide position-stop nucleotide position)

[0055] the chromosome number of the chromosome on which the gene is located

[0056] an OMIM (Online Mendelian Inheritance in Man; Johns Hopkins University/NCBI) public reference number for obtaining further information regarding the medical significance of each gene

[0057] alternative gene/protein name(s) and/or symbol(s) in the OMIM entry

[0058] NOTE: Due to the presence of alternative splice forms, multiple transcript/protein entries can be provided for a single gene entry in Table 1; i.e., for a single Gene Number, multiple entries may be provided in series that differ in their transcript/protein information and sequences.

[0059] Following the gene/transcript/protein information is a transcript sequence and protein sequence (in Table 1), or a genomic sequence (in Table 2), for each gene, as follows:

[0060] transcript sequence (Table 1 only) (corresponding to SEQ ID NOS:1-169 of the Sequence Listing), with SNPs identified by their IUB codes (transcript sequences can include 5′ UTR, protein coding, and 3′ UTR regions). (NOTE: If there are differences between the nucleotide sequence of the hCT transcript and the corresponding public transcript sequence identified by the Genbank accession number, the hCT transcript sequence (and encoded protein) is provided, unless the public sequence is a RefSeq transcript sequence identified by an NM number, in which case the RefSeq NM transcript sequence (and encoded protein) is provided. However, whether the hCT transcript or RefSeq NM transcript is used as the transcript sequence, the disclosed SNPs are represented by their IUB codes within the transcript.)

[0061] the encoded protein sequence (Table 1 only) (corresponding to SEQ ID NOS:170-338 of the Sequence Listing)

[0062] the genomic sequence of the gene (Table 2 only), including 6 kb on each side of the gene boundaries (i.e., 6 kb on the 5′ side of the gene plus 6 kb on the 3′ side of the gene) (corresponding to SEQ ID NOS:2873-2939 of the Sequence Listing).

[0063] After the last gene sequence, Table 2 may include additional genomic sequences of intergenic regions (in such instances, these sequences are identified as “Intergenic region:” followed by a numerical identification number), as well as SNP context sequences and other SNP information for any SNPs that lie within each intergenic region (and such SNPs are identified as “INTERGENIC” for SNP type).

[0064] NOTE: The transcript, protein, and transcript-based SNP context sequences are provided in both Table 1 and in the Sequence Listing. The genomic and genomic-based SNP context sequences are provided in both Table 2 and in the Sequence Listing. SEQ ID NOS are indicated in Table 1 for each transcript sequence (SEQ ID NOS:1-169), protein sequence (SEQ ID NOS:170-338), and transcript-based SNP context sequence (SEQ ID NOS:339-2872), and SEQ ID NOS are indicated in Table 2 for each genomic sequence (SEQ ID NOS:2873-2939), and genomic-based SNP context sequence (SEQ ID NOS:2940-21112).

[0065] The SNP information includes:

[0066] context sequence (taken from the transcript sequence in Table 1, and taken from the genomic sequence in Table 2) with the SNP represented by its IUB code, including 100 bp upstream (5′) of the SNP position plus 100 bp downstream (3′) of the SNP position (the transcript-based SNP context sequences in Table 1 are provided in the Sequence Listing as SEQ ID NOS:339-2872; the genomic-based SNP context sequences in Table 2 are provided in the Sequence Listing as SEQ ID NOS:2940-21112).

[0067] Celera hCV internal identification number for the SNP (in some instances, an “hDV” number is given instead of an “hCV” number)

[0068] SNP position [position of the SNP within the given transcript sequence (Table 1) or within the given genomic sequence (Table 2)]

[0069] SNP source (may include any combination of one or more of the following five codes, depending on which internal sequencing projects and/or public databases the SNP has been observed in: “Applera”=SNP observed during the re-sequencing of genes and regulatory regions of 39 individuals, “Celera”=SNP observed during shotgun sequencing and assembly of the Celera human genome sequence, “Celera Diagnostics”=SNP observed during re-sequencing of nucleic acid samples from individuals who have a disease, “dbSNP”=SNP observed in the dbSNP public database, “HGBASE”=SNP observed in the HGBASE public database, “HGMD”=SNP observed in the Human Gene Mutation Database (HGMD) public database, “HapMap”=SNP observed in the International HapMap Project public database, “CSNP”=SNP observed in an internal Applied Biosystems (Foster City, Calif.) database of coding SNPS (cSNPs)) (NOTE: multiple “Applera” source entries for a single SNP indicate that the same SNP was covered by multiple overlapping amplification products and the re-sequencing results (e.g., observed allele counts) from each of these amplification products is being provided)

[0070] Population/allele/allele count information in the format of [population1(first_allele,count|second_allele,count)population2(first_allele,count|second_allele,count) total (first_allele,total count|second_allele,total count)]. The information in this field includes populations/ethnic groups in which particular SNP alleles have been observed (“cau”=Caucasian, “his”=Hispanic, “chn”=Chinese, and “afr”=African-American, “jpn”=Japanese, “ind”=Indian, “mex”=Mexican, “ain”=“American Indian, “cra”=Celera donor, “no_pop”=no population information available), identified SNP alleles, and observed allele counts (within each population group and total allele counts), where available [“-” in the allele field represents a deletion allele of an insertion/deletion (“indel”) polymorphism (in which case the corresponding insertion allele, which may be comprised of one or more nucleotides, is indicated in the allele field on the opposite side of the “|”); “-” in the count field indicates that allele count information is not available]. For certain SNPs from the public dbSNP database, population/ethnic information is indicated as follows (this population information is publicly available in dbSNP): “HISP1”=human individual DNA (anonymized samples) from 23 individuals of self-described HISPANIC heritage; “PAC1”=human individual DNA (anonymized samples) from 24 individuals of self-described PACIFIC RIM heritage; “CAUC1”=human individual DNA (anonymized samples) from 31 individuals of self-described CAUCASIAN heritage; “AFR1”=human individual DNA (anonymized samples) from 24 individuals of self-described AFRICAN/AFRICAN AMERICAN heritage; “P1”=human individual DNA (anonymized samples) from 102 individuals of self-described heritage; “PA130299515”; “SC_{—}12_A”=SANGER 12 DNAs of Asian origin from Corielle cell repositories, 6 of which are male and 6 female; “SC_{—}12_C”=SANGER 12 DNAs of Caucasian origin from Corielle cell repositories from the CEPH/UTAH library. Six male and 6 female; “SC_{—}12_AA”=SANGER 12 DNAs of African-American origin from Corielle cell repositories 6 of which are male and 6 female; “SC_{—}95_C”=SANGER 95 DNAs of Caucasian origin from Corielle cell repositories from the CEPH/UTAH library; and “SC_{—}12_CA”=Caucasians—12 DNAs from Corielle cell repositories that are from the CEPH/UTAH library. Six male and 6 female.

[0071] NOTE: For SNPs of “Applera” SNP source, genes/regulatory regions of 39 individuals (20 Caucasians and 19 African Americans) were re-sequenced and, since each SNP position is represented by two chromosomes in each individual (with the exception of SNPs on X and Y chromosomes in males, for which each SNP position is represented by a single chromosome), up to 78 chromosomes were genotyped for each SNP position. Thus, the sum of the African-American (“afr”) allele counts is up to 38, the sum of the Caucasian allele counts (“cau”) is up to 40, and the total sum of all allele counts is up to 78.

[0072] (NOTE: semicolons separate population/allele/count information corresponding to each indicated SNP source; i.e., if four SNP sources are indicated, such as “Celera”, “dbSNP”, “HGBASE”, and “HGMD”, then population/allele/count information is provided in four groups which are separated by semicolons and listed in the same order as the listing of SNP sources, with each population/allele/count information group corresponding to the respective SNP source based on order; thus, in this example, the first population/allele/count information group would correspond to the first listed SNP source (Celera) and the third population/allele/count information group separated by semicolons would correspond to the third listed SNP source (HGBASE); if population/allele/count information is not available for any particular SNP source, then a pair of semicolons is still inserted as a place-holder in order to maintain correspondence between the list of SNP sources and the corresponding listing of population/allele/count information)

[0073] SNP type (e.g., location within gene/transcript and/or predicted functional effect) [“MIS-SENSE MUTATION”=SNP causes a change in the encoded amino acid (i.e., a non-synonymous coding SNP); “SILENT MUTATION”=. SNP does not cause a change in the encoded amino acid (i.e., a synonymous coding SNP); “STOP CODON, MUTATION”=SNP is located in a stop codon; “NONSENSE MUTATION”=SNP creates or destroys a stop codon; “UTR 5”=SNP is located in a 5′ UTR of a transcript; “UTR 3”=SNP is located in a 3′ UTR of a transcript; “PUTATIVE UTR 5”=SNP is Located in a putative 5′ UTR; “PUTATIVE UTR 3”=SNP is located in a putative 3′ UTR; “DONOR SPLICE SITE”=SNP is located in a donor splice site (5′ intron boundary); “ACCEPTOR SPLICE SITE”=SNP is located in an acceptor splice site (3′ intron boundary); “CODING REGION”=SNP is located in a protein-coding region of the transcript; “EXON”=SNP is located in an exon; “INTRON”=SNP is located in an intron; “hmCS”=SNP is located in a human-mouse conserved segment; “TFBS”=SNP is located in a transcription factor binding site; “UNKNOWN”=SNP type is not defined; “INTERGENIC”=SNP is intergenic, i.e., outside of any gene boundary]

[0074] Protein coding information (Table 1 only), where relevant, in the format of [protein SEQ ID NO:#, amino acid position, (amino acid-1, codon1) (amino acid-2, codon2)]. The information in this field includes SEQ ID NO of the encoded protein sequence, position of the amino acid residue within the protein identified by the SEQ ID NO that is encoded by the codon containing the SNP, amino acids (represented by one-letter amino acid codes) that are encoded by the alternative SNP alleles (in the case of stop codons, “X” is used for the one-letter amino acid code), and alternative codons containing the alternative SNP nucleotides which encode the amino acid residues (thus, for example, for missense mutation-type SNPs, at least two different amino acids and at least two different codons are generally indicated; for silent mutation-type SNPs, one amino acid and at least two different codons are generally indicated, etc.). In instances where the SNP is located outside of a protein-coding region (e.g., in a UTR region), “None” is indicated following the protein SEQ ID NO.

[0075] Description of Table 3 and Table 4

[0076] Tables 3 and 4 (both provided on the CD-R) provide a list of a subset of SNPs from Table 1 (in the case of Table 3) or Table 2 (in the case of Table 4) for which the SNP source falls into one of the following three categories: 1) SNPs for which the SNP source is only “Applera” and none other, 2) SNPs for which the SNP source is only “Celera Diagnostics” and none other, and 3) SNPs for which the SNP source is both “Applera” and “Celera Diagnostics” but none other.

[0077] These SNPs have not been observed in any of the public databases (dbSNP, HGBASE, and HGMD), and were also not observed during shotgun sequencing and assembly of the Celera human genome sequence (i.e., “Celera” SNP source). Tables 3. and 4 provide the hCV identification number (or hDV identification number for SNPs having “Celera Diagnostics” SNP source) and the SEQ ID NO of the context sequence for each of these SNPs.

[0078] Description of Table 5

[0079] Table 5 provides sequences of primers that have been synthesized and used in the laboratory to carry out allele-specific PCR reactions in order to assay the SNPs disclosed in Tables 6-8 during the course of association studies to verify the association of these SNPs with coronary stenosis.

[0080] Table 5 provides the following:

[0081] the column labeled “Marker” provides an hCV identification number for each SNP site

[0082] the column labeled “Alleles” designates the two alternative alleles at the SNP site identified by the hCV identification number that are targeted by the allele-specific primers (the allele-specific primers are shown as “Sequence A” and “Sequence B”) [NOTE: Alleles may be presented in Table 5 based on a different orientation (i.e., the reverse complement) relative to how the same alleles are presented in Tables 1, 2, 6, 7, and 8].

[0083] the column labeled “Sequence A (allele-specific primer)” provides an allele-specific primer that is specific for an allele designated in the “Alleles” column

[0084] the column labeled “Sequence B (allele-specific primer)” provides an allele-specific primer that is specific for the other allele designated in the “Alleles” column

[0085] the column labeled “Sequence C (common primer)” provides a common primer that is used in conjunction with each of the allele-specific primers (the “Sequence A” primer and the “Sequence B” primer) and which hybridizes at a site away from the SNP position.

[0086] All primer sequences are given in the 5′ to 3′ direction. Each of the nucleotides designated in the “Alleles” column matches or is the reverse complement of (depending on the orientation of the primer relative to the designated allele) the 3′ nucleotide of the allele-specific primer (either “Sequence A” or “Sequence B”) that is specific for that allele.

[0087] Description of Tables 6-8

[0088] Tables 6-8 provide results of statistical analyses for SNPs disclosed in Tables 1-4 (SNPs can be cross-referenced between tables based on their hCV identification numbers), and the association of these SNPs with coronary stenosis. The statistical results shown in Tables 6-8 provide support for the association of these SNPs with stenosis and CAD. For example, the statistical results provided in Tables 6 show that the association of these SNPs with stenosis is supported by p-values <0.2 in an allelic association test.

[0089] Tables 6-8 present statistical associations of SNPs with various trial endpoints. The column labeled “hCV#” presents each SNP as identified by its unique identifier number. The column labeled “Gene Name” presents the common gene name of the gene containing the SNP. In cases where the gene name is not known or the SNP is found in an intergenic region, the word “none” is present. The column labeled “Sample Set” identifies the study from which patient and control samples were obtained. CCF1 means the samples were obtained from a first study performed at the Cleveland Clinic. This sample set contains samples obtained from patients that had a variety of vascular diseases (i.e., myocardial infarction, coronary artery disease, etc.) including stenosis. In the analysis performed here, only those patients that had confirmed coronary stenosis based on angiography were included in the case populations. CCF2 means the samples were obtained from a second study performed at the Cleveland Clinic. As above, patient samples had a variety of vascular diseases but the case samples were only obtained from patients who had coronary stenosis confirmed by angiography. UCSF means the samples were obtained from a study performed at the University of California, San Francisco (UCSF). These samples were obtained from patients that had a variety of vascular diseases including coronary stenosis. Case samples were limited to patients that had confirmed stenosis as demonstrated by angiography. To perform the statistical analysis for the association of the SNPs with coronary stenosis, controls from the CCF1 and 2 and UCSF samples were used. Samples identified as CCF1/UCSF or CCF2/UCSF were a combination of the samples obtained from patients in either the CCF1 or CCF2 sample sets and the UCSF sample set, all of whom had a confirmed stenosis compared to non-stenosis controls. The column labeled “p value” indicates the results of either the chi-square test (Rec or Dom) or the Fisher Exact test (Allelic) to determine if the qualitative phenotype is a function of,the SNP genotype. The column labeled “OR” (Odds Ratio) indicates an approximation of the relative risk for an individual for the defined endpoint associated with the SNP. ORs less than 1 indicate the risk allele is protective for the defined endpoint, and ORs greater than 1 indicate the risk allele increases the risk of having the defined endpoint. In cases where the OR is missing, the OR could not be counted because of too few control samples. The columns labeled “Case Freq.” and “Control Freq.” present the frequency of the risk allele in the case or control samples. The column labeled “Mode” indicates that the association of the SNP with the phenotype is observed either in pooled samples (allelic) or, if the association is observed in individually genotyped samples, 2 copies of the SNP (recessive, “Rec”) or, 1 or 2 copies of the SNP (dominant, “Dom”) are required to see the association. The column labeled “Risk allele” presents the risk allele for each of the identified SNPs. Note that the risk allele maybe presented in Tables 6-8 based on a different orientation (i.e., the reverse complement) relative to how the same allele is presented in Tables 1-5. The column labeled “strata” indicates the group of individuals in which the association was observed. “All” indicates that the association was observed in all individuals. The column labeled “Design” presents the vascular disease endpoints that a particular SNP is associated with. In design “A”, coronary stenosis cases were compared to patients that had no or low coronary stenosis and no MI as controls. In design “B”, coronary stenosis cases are compared to controls that had no coronary stenosis or MI. In design “C”, coronary stenosis cases are compared to controls that did not have any evidence of MI. In design “D” (Table 8), cases included CCF1 and UCSF females that are less than 63 years old (<63) and are compared to controls from the UCSF sample set that were >75 years old and without coronary stenosis. In design “E”, younger CAD cases (less than or equal to [<=] 59 are compared to controls that had no coronary stenosis and were greater than (>75) 75 years old.

[0090] NOTE: SNPs can be cross-referenced between all tables herein based on the hCV identification number of each SNP.

### DEPOSITION OF THE FIGURE

[0091] FIG. 1 provides a diagrammatic representation of a computer-based discovery system containing the SNP information of the present invention in computer readable form.

### DETAILED DESCRIPTION OF THE INVENTION

[0092] The present invention provides SNPs associated with coronary stenosis, nucleic acid molecules containing SNPs, methods and reagents for the detection of the SNPs disclosed herein, uses of these SNPs for the development of detection reagents, and assays or kits that utilize such reagents. The coronary stenosis-associated SNPs disclosed herein are useful for diagnosing, screening for, and evaluating predisposition to coronary stenosis and related pathologies in humans. Furthermore, such SNPs and their encoded products are useful targets for the development of therapeutic agents.

[0093] A large number of SNPs have been identified from re-sequencing DNA from 39 individuals, and they are indicated as “Applera” SNP source in Tables 1-2. Their allele frequencies observed in each of the Caucasian and African-American ethnic groups are provided. Additional SNPs included herein were previously identified during shotgun sequencing and assembly of the human genome, and they are indicated as “Celera” SNP source in Tables 1-2. Furthermore, the information provided in Table 1-2, particularly the allele frequency information obtained from 39 individuals and the identification of the precise position of each SNP within each gene/transcript, allows haplotypes (i.e., groups of SNPs that are co-inherited) to be readily inferred. The present invention encompasses SNP haplotypes, as well as individual SNPs.

[0094] Thus, the present invention provides individual SNPs associated with coronary stenosis, as well as combinations of SNPs and haplotypes in genetic regions associated with coronary stenosis, polymorphic/variant transcript sequences (SEQ ID NOS: 1-169) and genomic sequences (SEQ ID NOS:2873-2939) containing SNPs, encoded amino acid sequences (SEQ ID NOS: 170-338), and both transcript-based SNP context sequences (SEQ ID NOS: 339-2872) and genomic-based SNP context sequences (SEQ ID NOS:2940-21112) (transcript sequences, protein sequences, and transcript-based SNP context sequences are provided in Table 1 and the Sequence Listing; genomic sequences and genomic-based SNP context sequences are provided in Table 2 and the Sequence Listing), methods of detecting these polymorphisms in a test sample, methods of determining the risk of an individual of having or developing coronary stenosis, methods of screening for compounds useful for treating disorders associated with a variant gene/protein such as coronary stenosis, compounds identified by these screening methods, methods of using the disclosed SNPs to select a treatment strategy, methods of treating a disorder associated with a variant gene/protein (i.e., therapeutic methods), and methods of using the SNPs of the present invention for human identification.

[0095] The present invention provides novel SNPs associated with coronary stenosis, as well as SNPs that were previously known in the art, but were not previously known to be associated with coronary stenosis. Accordingly, the present invention provides novel compositions and methods based on the novel SNPs disclosed herein, and also provides novel methods of using the known, but previously unassociated, SNPs in methods relating to coronary stenosis (e.g., for diagnosing coronary stenosis, etc.). In Tables 1-2, known SNPs are identified based on the public database in which they have been observed, which is indicated as one or more of the following SNP types: “dbSNP”=SNP observed in dbSNP, “HGBASE”=SNP observed in HGBASE, and “HGMD”=SNP observed in the Human Gene Mutation Database (HGMD). Novel SNPs for which the SNP source is only “Applera” and none other, i.e., those that have not been observed in any public databases and which were also not observed during shotgun sequencing and assembly of the Celera human genome sequence (i.e., “Celera” SNP source), are indicated in Tables 3-4.

[0096] Particular SNP alleles of the present invention can be associated with either an increased risk of having or developing coronary stenosis, or a decreased risk of having for developing coronary stenosis. SNP alleles that are associated with a decreased risk of having or developing coronary-stenosis may be referred to as “protective” alleles, and SNP alleles that are associated with an increased risk of having or developing coronary stenosis may be referred to as “susceptibility” alleles, “risk” alleles, or “risk factors”. Thus, whereas certain SNPs (or their encoded products) can be assayed to determine whether an individual possesses a SNP allele that is indicative of an increased risk of having or developing coronary stenosis (i.e., a susceptibility allele), other SNPs (or their encoded products) can be assayed to determine whether an individual possesses a SNP allele that is indicative of a decreased risk of having or developing coronary steonsis (i.e., a protective allele). Similarly, particular SNP alleles of the present invention can be associated with either an increased or decreased likelihood of responding to a particular treatment or therapeutic compound, or an increased or decreased likelihood of experiencing toxic effects from a particular treatment or therapeutic compound. The term “altered” may be used herein to encompass either of these two possibilities (e.g. an increased or a decreased risk/likelihood).

[0097] Those skilled in the art will readily recognize that nucleic acid molecules may be double-stranded molecules and that reference to a particular site on one strand refers, as well, to the corresponding site on a complementary strand. In defining a SNP position, SNP allele, or nucleotide sequence, reference to an adenine, a thymine (uridine), a cytosine, or a guanine at a particular site on one strand of a nucleic acid molecule also defines the thymine (uridine), adenine, guanine, or cytosine (respectively) at the corresponding site on a complementary strand of the nucleic acid molecule. Thus, reference may be made to either strand in order to refer to a particular SNP position, SNP allele, or nucleotide sequence. Probes and primers, may be designed to hybridize to either strand and SNP genotyping methods disclosed herein may generally target either strand. Throughout the specification, in identifying a SNP position, reference is generally made to the protein-encoding strand, only for the purpose of convenience.

[0098] References to variant peptides, polypeptides, or proteins of the present invention include peptides, polypeptides, proteins, or fragments thereof, that contain at least one amino acid residue that differs from the corresponding amino acid sequence of the art-known peptide/polypeptide/protein (the art-known protein may be interchangeably referred to as the “wild-type”, “reference”, or “normal”protein). Such variant peptides/polypeptides/proteins can result from a codon change caused by a nonsynonymous nucleotide substitution at a protein-coding SNP position (i.e., a missense mutation) disclosed by the present invention. Variant peptides/polypeptides/proteins of the present invention can also result from a nonsense mutation, i.e., a SNP that creates a premature stop codon, a SNP that generates a read-through mutation by abolishing a stop codon, or due to any SNP disclosed by the present invention that otherwise alters the structure, function/activity, or expression of a protein, such as SNP in a regulatory region (e.g. a promoter or enhancer) or a SNP that leads to alternative or defective splicing, such as a SNP in an intron or a SNP at an exon/intron boundary. As used herein, the terms “polypeptide”, “peptide”, and “protein” are used interchangeably.

[0099] Isolated Nucleic Acid Molecules and SNP Detection Reagents & Kits

[0100] Tables 1 and 2 provide a variety of information about each SNP of the present invention that is associated with coronary stenosis, including the transcript sequences (SEQ ID NOS:1-169), genomic sequences (SEQ ID NOS:2873-2939), and protein sequences (SEQ ID NOS:170-338) of the encoded gene products (with the SNPs indicated by IUB codes in the nucleic acid sequences). In addition, Tables 1 and 2 include SNP context sequences, which generally include 100 nucleotide upstream (5′) plus 100 nucleotides downstream (3′) of each SNP position (SEQ ID NOS:339-2872 correspond to transcript-based SNP context sequences disclosed in Table 1, and SEQ ID NOS:2940-21112 correspond to genomic-based context sequences disclosed in Table 2), the alternative nucleotides (alleles) at each SNP position, and additional information about the variant where relevant, such as SNP type (coding, missense, splice site, UTR, etc.), human populations in which the SNP was observed, observed allele frequencies, information about the encoded protein, etc.

[0101] Isolated Nucleic Acid Molecules.

[0102] The present invention provides isolated nucleic acid molecules that contain one or more SNPs disclosed Table 1 and/or Table 2. Preferred isolated nucleic acid molecules contain one or more SNPs identified in Table 3 and/or Table 4. Isolated nucleic acid molecules containing one or more SNPs disclosed in at least one of Tables 1-4 may be interchangeably referred to throughout the present text as “SNP-containing nucleic, acid molecules”. Isolated nucleic acid molecules may optionally encode a full-length variant protein or fragment thereof. The isolated nucleic acid molecules of the present invention also include probes and primers (which are described in greater detail below in the section entitled “SNP Detection Reagents”), which may be used for assaying the disclosed SNPs, and isolated full-length genes, transcripts cDNA molecules, and fragments thereof, which may be used for such purposes as expressing an encoded protein.

[0103] As used herein, an “isolated nucleic acid molecule” generally is one that contains a SNP of the present invention or one that hybridizes to such molecule such as a nucleic acid with a complementary sequence, and is separated from most other nucleic acids present in the natural source of the nucleic acid molecule. Moreover, an “isolated” nucleic acid molecule, such as a cDNA molecule containing a SNP of the present invention, can be substantially free of other cellular material, or culture medium when produced by recombinant techniques, or chemical precursors or other chemicals when chemically synthesized. A nucleic acid molecule can be fused to other coding or regulatory sequences and still be considered “isolated”. Nucleic acid molecules present in non-human transgenic animals, which do not naturally occur in the animal, are also considered “isolated”. For example, recombinant DNA molecules contained in a vector are considered “isolated”. Further examples of“isolated” DNA molecules include recombinant DNA molecules maintained in heterologous host cells, and purified (partially or substantially) DNA molecules in solution. Isolated RNA molecules include in vivo or in vitro RNA transcripts of the isolated SNP-containing DNA molecules of the present invention. Isolated nucleic acid molecules according to the present invention further include such molecules produced synthetically.

[0104] Generally, an isolated SNP-containing nucleic acid molecule comprises one or more SNP positions disclosed by the present invention with flanking nucleotide sequences on either side of the SNP positions. A flanking sequence can include nucleotide residues that are naturally associated with the SNP site and/or heterologous nucleotide sequences. Preferably the flanking sequence is up to about 500, 300, 100, 60, 50, 30, 25, 20, 15, 10, 8, or 4 nucleotides (or any other length in-between) on either side of a SNP position, or as long as the full-length gene or entire protein-coding sequence (or any portion thereof such as an exon), especially if the SNP-containing nucleic acid molecule is to be used to produce a protein or protein fragment.

[0105] For full-length genes and entire protein-coding sequences, a SNP flanking sequence can be, for example, up to about 5 KB, 4 KB, 3 KB, 2 KB, 1 KB on either side of the SNP. Furthermore, in such instances, the isolated nucleic acid molecule comprises exonic sequences (including protein-coding and/or non-coding exonic sequences), but may also include intronic sequences. Thus, any protein coding sequence may be either contiguous or separated by introns. The important point is that the nucleic acid is isolated from remote and unimportant flanking sequences and is of appropriate length such that it can be subjected to the specific manipulations or uses described herein such as recombinant protein expression, preparation of probes and primers for assaying the SNP position, and other uses specific to the SNP-containing nucleic acid sequences.

[0106] An isolated SNP-containing nucleic acid molecule can comprise, for example, a full-length gene or transcript, such as a gene isolated from genomic DNA (e.g., by cloning or PCR amplification), a cDNA molecule, or an mRNA transcript molecule. Polymorphic transcript sequences are provided in Table 1 and in the Sequence Listing (SEQ ID NOS: 1-169), and polymorphic genomic sequences are provided in Table 2 and in the Sequence Listing (SEQ ID NOS:2873-2939). Furthermore, fragments of such full-length genes and transcripts that contain one or more SNPs disclosed herein are also encompassed by the present invention, and such fragments may be used, for example, to express any part of a protein, such as a particular functional domain or an antigenic epitope.

[0107] Thus, the present invention also encompasses fragments of the nucleic acid sequences provided in Tables 1-2 (transcript sequences are provided in Table 1 as SEQ ID NOS:1-169, genomic sequences are provided in Table 2 as SEQ ID NOS:2873-2939, transcript-based SNP context sequences are provided in Table 1 as SEQ ID NO:339-2872, and genomic-based SNP context sequences are provided in Table 2 as SEQ ID NO:2940-21112) and their complements. A fragment typically comprises a contiguous nucleotide sequence at least about 8 or more nucleotides, more preferably at least about 12 or more nucleotides, and even more preferably at least about 16 or more nucleotides. Further, a fragment could comprise at least about 18, 20, 22, 25, 30, 40, 50, 60, 80, 100, 150, 200, 250 or 500 (or any other number in-between) nucleotides in length. The length of the fragment will be based on its intended use. For example, the fragment can encode epitope-bearing regions of a variant peptide or regions of a variant peptide that differ from the normal/wild-type protein, or can be useful as a polynucleotide probe or primer. Such fragments can be isolated using the nucleotide sequences provided in Table 1 and/or Table 2 for the synthesis of a polynucleotide probe. A labeled probe can then be used, for example, to screen a cDNA library, genomic DNA library, or mRNA to isolate nucleic acid corresponding to the coding region. Further, primers can be used in amplification reactions, such as for purposes of assaying one or more SNPs sites or for cloning specific regions of a gene.

[0108] An isolated nucleic acid molecule of the present invention further encompasses a SNP-containing polynucleotide that is the product of any one of a variety of nucleic acid amplification methods, which are used to increase the copy numbers of a polynucleotide of interest in a nucleic acid sample. Such amplification methods are well known in the art, and they include but are not limited to, polymerase chain reaction (PCR) (U.S. Pat. Nos. 4,683,195; and 4,683,202; PCR Technology: Principles and Applications for DNA Amplification, ed. H. A. Erlich, Freeman Press, NY, N.Y., 1992), ligase chain reaction (LCR) (Wu and Wallace, Genomics 4:560, 1989; Landegren et al., Science 241:1077, 1988), strand displacement amplification (SDA) (U.S. Pat. Nos. 5,270,184; and 5,422,252), transcription-mediated amplification (TMA) (U.S. Pat. No. 5,399,491), linked linear amplification (LLA) (U.S. Pat. No. 6,027,923), and the like, and isothermal amplification methods such as nucleic acid sequence based amplification (NASBA), and self-sustained sequence replication (Guatelli et al., Proc. Natl. Acad. Sci. USA 87: 1874, 1990). Based on such methodologies, a person skilled in the art can readily design primers in any suitable regions 5′ and 3′ to a SNP disclosed herein. Such primers may be used to amplify DNA of any length so long that it contains the SNP of interest in its sequence.

[0109] As used herein, an “amplified polynucleotide” of the invention is a SNP-containing nucleic acid molecule whose amount has been increased at least two fold by any nucleic acid amplification method performed in vitro as compared to its starting amount in a test sample. In other preferred embodiments, an amplified polynucleotide is the result of at least ten fold, fifty fold, one hundred fold, one thousand fold, or even ten thousand fold increase as compared to its starting amount in a test sample. In a typical PCR amplification, a polynucleotide of interest is often amplified at least fifty thousand fold in amount over the unamplified genomic DNA, but the precise amount of amplification needed for an assay depends on the sensitivity of the subsequent detection method used.

[0110] Generally, an amplified polynucleotide is at least about 16 nucleotides in length. More typically, an amplified polynucleotide is at least about 20 nucleotides in length. In a preferred embodiment of the invention, an amplified polynucleotide is at least about 30 nucleotides in length. In a more preferred embodiment of the invention, an amplified polynucleotide is at least about 32, 40, 45, 50, or,60 nucleotides in length. In yet another preferred embodiment of the invention, an amplified polynucleotide is at least about 100, 200, 300, 400, or 500 nucleotides in length. While the total length of an amplified polynucleotide of the invention can be as long as an exon, an intron or the entire gene where the SNP of interest resides, an amplified product is typically up to about 1,000 nucleotides in length (although certain amplification methods may generate amplified products greater than 1000 nucleotides in length). More preferably, an amplified polynucleotide is not greater than about 600-700 nucleotides in length. It is understood that irrespective of the length of an amplified polynucleotide, a SNP of interest may be located anywhere along its sequence.

[0111] In a specific embodiment of the invention, the amplified product is at least about 201 nucleotides in length, comprises one of the transcript-based context sequences or the genomic-based context sequences shown in Tables 1-2. Such a product may have additional sequences on its 5′ end or 3′ end or both. In another embodiment, the amplified product is about 101 nucleotides in length, and it contains a SNP disclosed herein. Preferably, the SNP is located at the middle of the amplified product (e.g., at position 101 in an amplified product that is 201 nucleotides in length, or at position 51 in an amplified product that is 101 nucleotides in length), or within 1, 2, 3, 4, 5, 6, 7, 8, 9, 10, 12, 15, or 20 nucleotides from the middle of the amplified product,(however, as indicated above, the SNP of interest may be located anywhere along the length of the amplified product).

[0112] The present invention provides isolated nucleic acid molecules that comprise, consist of, or consist essentially of one or more polynucleotide sequences that contain one or more SNPs disclosed herein, complements thereof, and SNP-containing fragments thereof

[0113] Accordingly, the present invention provides nucleic acid molecules that consist of any of the nucleotide sequences shown in Table 1 and/or Table 2 (transcript sequences are provided in Table 1 as SEQ ID NOS:1-169, genomic sequences are provided in Table 2 as SEQ ID NOS:2873-2939, transcript-based SNP context sequences are provided in Table 1 as SEQ ID NO:339-2872, and genomic-based SNP context sequences are provided in Table 2 as SEQ ID NO:2940-21112), or any nucleic acid molecule that encodes any of the variant proteins provided in Table 1 (SEQ ID NOS: 170-338). A nucleic acid molecule consists of a nucleotide sequence when the nucleotide sequence is the complete nucleotide sequence of the nucleic acid molecule.

[0114] The present invention further provides nucleic acid molecules that consist essentially of any of the nucleotide sequences shown in Table 1 and/or Table 2 (transcript sequences are provided in Table 1: as SEQ ID NOS:1-169, genomic sequences are provided in Table 2 as SEQ ID NOS:2873-2939, transcript-based SNP context sequences are provided in Table 1 as SEQ ID NO:339-2872, and genomic-based SNP context sequences are provided in Table 2 as SEQ ID NO:2940-21112), or any nucleic acid molecule that encodes any of the variant proteins provided in Table 1 (SEQ ID NOS:170-338). A nucleic acid molecule consists essentially of a nucleotide sequence when such a nucleotide sequence is present with only a few additional nucleotide residues in the final nucleic acid molecule.

[0115] The present invention further provides nucleic acid molecules that comprise any of the nucleotide sequences shown in Table 1 and/or Table 2 or a SNP-containing fragment thereof (transcript sequences are provided in Table 1 as SEQ ID NOS:1-169, genomic sequences are provided in Table 2 as SEQ ID NOS:2873-2939, transcript-based SNP context sequences are provided in Table 1 as SEQ ID NO:339-2872, and genomic-based SNP context sequences are provided in Table 2 as SEQ ID NO:2940-21112), or any nucleic acid molecule that encodes any of the variant proteins provided in Table 1 (SEQ ID NOS:170-338). A nucleic acid molecule comprises a nucleotide sequence when the nucleotide sequence is at least part of the final nucleotide sequence of the nucleic acid molecule. In such a fashion, the nucleic acid molecule can be only the nucleotide sequence or have additional nucleotide residues, such as residues that are naturally associated with it or heterologous nucleotide sequences. Such a nucleic acid molecule can have one to a few additional nucleotides or can comprise many more additional nucleotides. A brief description of how various types of these nucleic acid molecules can he readily made and isolated is provided below, and such techniques are well known to those of ordinary skill in the art (Sambrook and Russell, 2000, Molecular Cloning: A Laboratory Manual, Cold Spring Harbor Press, NY).

[0116] The isolated nucleic acid molecules can encode mature proteins plus additional amino or carboxyl-terminal amino acids or both, or amino acids interior to the mature peptide (when the mature form has more than one peptide chain, for instance). Such sequences may play a role in processing of a protein from precursor to a mature form, facilitate protein trafficking, prolong or shorten protein half-life, or facilitate manipulation of a protein for assay or production. As generally is;the case in situ, the additional amino acids may be processed away from the mature protein by cellular enzymes.

[0117] Thus, the isolated nucleic acid molecules include, but are not limited to, nucleic acid molecules having a sequence encoding a peptide alone, a sequence encoding a mature peptide and additional coding sequences such as a leader or secretory sequence (e.g., a pre-pro or pro-protein sequence), a sequence encoding a mature peptide with or without additional coding sequences, plus additional non-coding sequences, for example introns and non-coding 5′ and 3′ sequences such as transcribed but untranslated sequences that play a role in, for example, transcription, mRNA processing (including splicing and polyadenylation signals), ribosome binding, and/or stability of mRNA. In addition, the nucleic acid molecules may be fused to heterologous marker sequences encoding, for example, a peptide that facilitates purification.

[0118] Isolated nucleic acid molecules can be in the form of RNA, such as mRNA, or in the form DNA, including cDNA and genomic DNA, which may be obtained, for example, by molecular cloning or produced by chemical synthetic techniques or by a combination thereof :(Sambrook and Russell, 2000, Molecular Cloning: A Laboratory Manual, Cold Spring Harbor Press, NY). Furthermore, isolated nucleic acid molecules, particularly SNP detection reagents such as probes and primers, can also be partially or completely in the form of one or more types of nucleic acid analogs, such as peptide nucleic acid (PNA) (U.S. Pat. Nos. 5,539,082; 5,527,675; 5,623,049; 5,714,331). The nucleic acid, especially DNA, can be double-stranded or single-stranded. Single-stranded nucleic acid can be the coding strand (sense strand) or the complementary non-coding; from fragments of the human genome (in the case of DNA or RNA) or single nucleotides, short oligonucleotide linkers, or from a series of oligonucleotides, to provide a synthetic nucleic acid molecule. Nucleic acid molecules can be readily synthesized using the sequences provided herein as a reference; oligonucleotide and PNA oligomer synthesis techniques are well-known in the art (see, e.g., Corey, “Peptide nucleic acids: expanding the scope of nucleic acid recognition”, Trends Biotechnol. June 1997;15(6):224-9, and Hyrup et al., “Peptide nucleic acids (PNA): synthesis, properties and potential applications”, Bioorg Med Chem. January 1996;4(1):5-23). Furthermore, large-scale automated oligonucleotide/PNA synthesis (including synthesis on an array or bead surface or other solid support) can readily be accomplished using commercially available nucleic acid synthesizers, such as the Applied Biosystems (Foster City, Calif.) 3900 High-Throughput DNA Synthesizer or Expedite 8909 Nucleic Acid Synthesis System, and the sequence information provided herein.

[0119] The present invention encompasses nucleic acid analogs that contain modified, synthetic, or non-naturally occurring nucleotides or structural elements or other alternative/modified nucleic acid chemistries known in the art. Such nucleic acid analogs are useful, for example, as detection reagents (e.g., primers/probes) for detecting one or more SNPs identified in Table 1 and/or Table 2. Furthermore, kits/systems (such as beads, arrays, etc.) that include these analogs are also encompassed by the present invention. For example, PNA oligomers that are based on the polymorphic sequences of the present invention are specifically contemplated. PNA oligomers are analogs of DNA in which the phosphate backbone is replaced with a peptide-like backbone (Lagriffoul et al., Bioorganic & Medicinal Chemistry Letters, 4: 1081-1082 (1994), Petersen et al., Bioorganic & Medicinal Chemistry Letters, 6: 793-796 (1996), Kumar et al., Organic Letters 3(9): 1269-1272:(2001), W096/04000). PNA hybridizes to complementary RNA or DNA with higher affinity and specificity than conventional oligonucleotides and oligonucleotide analogs. The properties of PNA enable novel molecular biology and biochemistry applications unachievable with traditional oligonucleotides and peptides.

[0120] Additional examples of nucleic acid modifications that improve the binding properties and/or stability of a nucleic acid include the use of base analogs such as Pat. No. 5,801,115). Thus, references herein to nucleic acid molecules, SNP-containing nucleic acid molecules, SNP detection reagents (e.g., probes and primers), oligonucleotides/polynucleotides include PNA oligomers and other nucleic acid analogs. Other examples of nucleic acid analogs and alternative/modified nucleic acid chemistries known in the art are described in Current Protocols in Nucleic Acid Chemistry, John Wiley & Sons, N.Y. (2002).

[0121] The present invention further provides nucleic acid molecules that encode fragments of the variant polypeptides disclosed herein as well as nucleic acid molecules that encode obvious variants of such variant polypeptides. Such nucleic acid molecules may be naturally occurring, such as paralogs (different locus) and orthologs (different organism), or may be constructed by recombinant DNA methods or by chemical synthesis. Non-naturally occurring variants may be made by mutagenesis techniques, including those applied to nucleic acid molecules, cells, or organisms. Accordingly, the variants can contain nucleotide substitutions, deletions, inversions and insertions (in addition to the SNPs disclosed in Tables 1-2). Variation can occur in either or both the coding and non-coding regions. The variations can produce conservative and/or non-conservative amino acid substitutions.

[0122] Further variants of the nucleic acid molecules disclosed in Tables 1-2, such as naturally occurring allelic variants (as well as orthologs and paralogs) and synthetic variants produced by mutagenesis techniques, can be identified and/or produced using methods well known in the art. Such further variants can comprise a nucleotide sequence that shares at least 70-80%, 80-85%, 85-90%, 91%, 92%, 93%, 94%, 95%, 96%, 97%, 98%, or 99% sequence identity with a nucleic acid sequence disclosed in Table 1 and/or Table 2 (or a fragment thereof) and that includes a novel SNP allele disclosed in Table 1 and/or Table 2. Further, variants can comprise a nucleotide sequence that encodes a polypeptide that shares at least 70-80%, 80-85%, 85-90%, 91%, 92%, 93%, 94%, 95%, 96%, 97%, 98%, or 99% sequence identity with a polypeptide sequence disclosed in Table 1. (or a fragment thereof) and that includes a novel SNP allele disclosed in Table 1 and/or Table 2. Thus, an aspect of the present invention that is specifically contemplated are isolated nucleic acid molecules that have a certain degree of sequence variation compared with the sequences shown in Tables 1-2, but that contain a novel SNP allele disclosed herein. In other words, as long as an isolated nucleic acid molecule contains a novel SNP allele disclosed herein, other portions of the nucleic acid molecule that flank the novel SNP allele can vary to some degree from the specific transcript, genomic, and context sequences shown in Tables 1-2, and can encode a polypeptide that varies to some degree from the specific polypeptide sequences shown in Table 1.

[0123] To determine the percent identity of two amino acid sequences or two nucleotide sequences of two molecules that share sequence homology, the sequences are aligned for optimal comparison purposes (e.g., gaps can be introduced in one or both of a first and a second amino acid or nucleic acid sequence for optimal alignment and non-homologous sequences can be disregarded for comparison purposes). In a preferred embodiment, at least 30%, 40%, 50%, 60%, 70%, 80%, or 90% or more of the length of a reference sequence is aligned for comparison purposes. The amino acid residues or nucleotides at corresponding amino acid positions or nucleotide positions are then compared. When a position in the first sequence is occupied by the same amino acid residue or nucleotide as the corresponding position in the second sequence, then the molecules are identical at that position (as used herein, amino acid or nucleic acid “identity” is equivalent to amino acid or nucleic acid “homology”). The percent identity between the two sequences is a function of the number of identical positions shared by the sequences, taking into account the number of gaps, and the length of each gap, which need to be introduced for optimal alignment of the two sequences.

[0124] The comparison of sequences and determination of percent identity between two sequences can be accomplished using a mathematical algorithm. (Computational Molecular Biology, Lesk, A. M., ed., Oxford University Press, New York, 1988; Biocomputing: Informatics and Genome Projects, Smith, D. W., ed., Academic Press, New York, 1993; Computer Analysis of Sequence Data, Part 1, Griffin, A. M., and Griffin, H. G., eds., Humana Press, New Jersey, 1994; Sequence Analysis in Molecular Biology, von Heinje, G., Academic Press, 1987; and Sequence Analysis Primer, Gribskov, M. and Devereux, J., eds., M Stockton Press, New York, 1991). In a preferred embodiment, the percent identity between two amino acid sequences is determined using the Needleman and Wunsch algorithm (J. Mol. Biol. (48):444-453 (1970)) which has been incorporated into the GAP program in the GCG software package, using either a Blossom 62 matrix or a PAM250 matrix, and a gap weight of 16, 14, 12, 10, 8, 6, or 4 and a length weight of 1, 2, 3, 4, 5,or 6.

[0125] In yet another preferred embodiment, the percent identity between two nucleotide sequences is determined using the GAP program in the GCG software package (Devereux, J., et al., Nucleic Acids Res. 12(1):387 (1984)), using a NWSgapdna.CMP matrix and a gap weight of 40, 50, 60, 70, or 80 and a length weight of 1, 2, 3, 4, 5, or 6. In another embodiment, the percent identity between two amino acid or nucleotide sequences is determined using the algorithm of E. Myers and W. Miller (CABIOS, 4:11-17 (1989)) which has been incorporated into the ALIGN program (version 2.0), using a PAM120 weight residue table, a gap length penalty of 12, and a gap penalty of 4.

[0126] The nucleotide and amino acid sequences of the present invention can further be used as a “query sequence” to perform a search against sequence databases to, for example, identify other family members or related sequences. Such searches can be performed using the NBLAST and XBLAST programs (version 2.0) of Altschul, et al. (J. Mol. Biol. 215:403-10 (1990)). BLAST nucleotide searches can be performed with the NBLAST program, score=100, wordlength=12 to obtain nucleotide sequences homologous to the nucleic acid molecules of the invention. BLAST protein searches can be performed with the XBLAST program, score=50, wordlength=3 to obtain amino acid sequences homologous to the proteins of the invention. To obtain gapped alignments for comparison purposes, Gapped BLAST can be utilized as described in Altschul et al. (Nucleic Acids Res. 25(17):3389-3402 (1997)). When utilizing BLAST and gapped BLAST programs, the default parameters of the respective programs (e.g. XBLAST and NBLAST) can be used. In addition to BLAST, examples of other search and sequence comparison programs used in the art include, but are not limited to, FASTA (Pearson, Methods Mol. Biol. 25, 365-389 (1994)) and KERR (Dufresne et al., Nat Biotechnol December 2002;20(12):1269-71). For further information regarding bioinformatics techniques, see Current Protocols in Bioinformatics, John Wiley & Sons, Inc., N.Y.

[0127] The present invention further provides non-coding fragments of the nucleic acid molecules disclosed in Table 1 and/or Table 2. Preferred non-coding fragments include, but are not limited to, promoter sequences, enhancer sequences, intronic sequences, 5′ untranslated regions (UTRs), 3′ untranslated regions, gene modulating sequences and gene termination sequences. Such fragments are useful, for example, in controlling heterologous gene expression and in developing screens to identify gene-modulating agents.

[0128] SNP Detection Reagents

[0129] In a specific aspect of the present invention, the SNPs disclosed in Table 1 and/or Table 2, and their associated transcript sequences (provided in Table 1 as SEQ ID NOS:1-169), genomic sequences (provided in Table 2 as SEQ ID NOS:2873-2939), and context sequences (transcript-based context sequences are provided in Table 1 as SEQ ID NOS:339-2872; genomic-based context sequences are provided in Table 2 as SEQ ID NOS:2940-21112), can be used for the design of SNP detection reagents. As used herein, a “SNP detection reagent” is a reagent that specifically detects a specific target SNP position disclosed herein, and that is preferably specific for a particular nucleotide (allele) of the target SNP position (i.e., the detection reagent preferably can differentiate between different alternative nucleotides at a target SNP position, thereby allowing the identity of the nucleotide present at the target SNP position to be determined). Typically, such detection reagent hybridizes to a target SNP-containing nucleic acid molecule by complementary base-pairing in a sequence specific manner, and discriminates the target variant sequence from other nucleic acid sequences such as an art-known form in a test sample. An example of a detection reagent is a probe that hybridizes to a target nucleic acid containing one or more of the SNPs provided in Table 1 and/or Table 2. In a preferred embodiment, such a probe can differentiate between nucleic acids having a particular nucleotide (allele) at a target SNP position from other nucleic acids that have a different nucleotide at the same target SNP position. In addition, a detection reagent may hybridize to a specific region 5′, and/or 3′ to a SNP position, particularly a region corresponding to the context sequences provided in Table 1 and/or Table 2 (transcript-based context sequences are provided in Table 1 as SEQ ID NOS:339-2872; genomic-based context sequences are provided in Table 2 as SEQ ID NOS:2940-21112). Another example of a detection reagent is a primer which acts as an initiation point of nucleotide extension along a complementary strand of a target polynucleotide. The SNP sequence information provided herein is also useful for designing primers, e.g. allele-specific primers, to amplify (e.g. using PCR) any SNP of we present invention.

[0130] In one preferred embodiment of the invention, a SNP detection reagent is an isolated or synthetic DNA or RNA polynucleotide probe or primer or PNA oligomer, or a combination of DNA, RNA and/or PNA, that hybridizes to a segment of a target nucleic acid molecule containing a SNP identified in Table 1 and/or Table 2. A detection reagent in the form of a polynucleotide may optionally contain modified base analogs, intercalators or minor groove binders. Multiple detection reagents such as probes may be, for example, affixed to a solid support (e.g., arrays or beads) or supplied in solution (e.g., probe/primer sets for enzymatic reactions such as PCR, RT-PCR, TaqMan assays, or primer-extension reactions) to form a SNP detection kit.

[0131] A probe or primer typically is a substantially purified oligonucleotide or PNA oligomer. Such oligonucleotide typically comprises a region of complementary nucleotide sequence that hybridizes under stringent conditions to at least about 8, 10, 12, 16, 18, 20, 22, 30, 25, 30, 40, 50, 55, 60, 65, 70, 80, 90, 100, 120 (or any other number in-between) or more consecutive nucleotides in a target nucleic acid molecule. Depending on the particular assay, the consecutive nucleotides can either include the target SNP position, or be a specific, region in close enough proximity 5′ and/or 3′ to the SNP-position to carry out the desired assay.

[0132] Other preferred primer and probe sequences can readily be determined using the transcript sequences (SEQ ID NOS:1-169), genomic sequences (SEQ ID NOS;2873-2939), and SNP context sequences (transcript-based context sequences are provided in Table 1 as SEQ ID NOS:339-2872; genomic-based context sequences are provided in Table 2 as SEQ ID NOS:2940-21112) disclosed in the Sequence Listing and in Tables 1-2. It will be apparent to one of skill in the art that such primers and probes are directly useful as reagents for genotyping the SNPs of the present invention, and can be incorporated into any kit/system format.

[0133] In order to produce a probe or primer specific for a target SNP-containing sequence, the gene/transcript and/or context sequence surrounding the SNP of interest is typically examined using a computer algorithm which starts at the 5′ or at the 3′ end of the nucleotide sequence. Typical algorithms will then identify oligomers of defined length that are unique to the gene/SNP context sequence, have a GC content within a range suitable for hybridization, lack predicted secondary structure that may interfere with hybridization, and/or possess other desired characteristics or that lack other undesired characteristics.

[0134] A primer or probe of the present invention is typically at least about 8 nucleotides in length. In one embodiment of the invention, a primer or a probe is at least about 10 nucleotides in length. In a preferred embodiment, a primer or a probe is at least about 12 nucleotides in length. In a more preferred embodiment, a primer or probe is at least about 16, 17, 18, 19, 20, 21, 22, 23, 24 or 25 nucleotides in length. While the maximal length of a probe can be as long as the target sequence to be detected, depending on the type of assay in which it is employed, it is typically less than about 50, 60, 65, or 70 nucleotides in length. In the case of a primer, it is typically less than about 30 nucleotides in length. In a specific preferred embodiment of the invention, a primer or a probe is within the length of about 18 and about 28 nucleotides. However, in other embodiments, such as nucleic acid arrays and other embodiments in which probes are affixed to a substrate, the probes can be longer, such as on the order of 30-70, 75, 80, 90, 100, or more nucleotides in length (see the section below entitled “SNP Detection Kits and Systems”).

[0135] For analyzing SNPs, it may be appropriate to use oligonucleotides specific for alternative SNP alleles. Such oligonucleotides which detect single nucleotide variations in target sequences may be referred to by such terms as “allele-specific oligonucleotides”, “allele-specific probes”, or “allele-specific primers”. The design and use of allele-specific probes for analyzing polymorphisms is described in, e.g. Mutation Detection A Practical Approach, ed. Cotton et al. Oxford University Press, 1998; Saiki et al., Nature 324, 163-166 (1986); Dattagupta, EP235,726; and Saiki, WO 89/11548.

[0136] While the design of each allele-specific primer or probe depends on variables such as the precise composition of the nucleotide sequences flanking a SNP position in a target nucleic acid molecule, and the length of the primer or probe, another factor in the use of primers and probes is the stringency of the condition under which the hybridization between the probe or primer and the target sequence is performed. Higher stringency conditions utilize buffers with lower ionic strength and/or a higher reaction temperature, and tend to require a more perfect match between probe/primer and a target sequence in order to form a stable duplex. If the stringency is too high, however, hybridization may not occur at all. In contrast, lower stringency conditions utilize buffers with higher ionic strength and/or a lower reaction temperature, and permit the formation of stable duplexes with more mismatched bases between a probe/primer and a target sequence. By way of example and not limitation, exemplary conditions for high stringency hybridization conditions using an allele-specific probe are as follows: Prehybridization with a solution containing 5× standard saline phosphate EDTA (SSPE), 0.5% NaDodSO₄ (SDS) at 55° C., and incubating probe with target nucleic acid molecules in the same solution at the same temperature, followed by washing with a solution containing 2× SSPE, and 0.1% SDS at 55° C. or room temperature.

[0137] Moderate stringency hybridization conditions may be used for allele-specific primer extension reactions with a solution containing, e.g., about 50 mM KCl at about 46° C. Alternatively, the reaction may be carried out at an elevated temperature such as 60° C. In another embodiment, a moderately stringent hybridization condition suitable for oligonucleotide ligation assay (OLA) reactions wherein two probes are ligated if they are completely complementary to the target sequence may utilize a solution of about 100 mM KCl at a temperature of 46° C.

[0138] In a hybridization-based assay, allele-specific probes can be designed that hybridize to a segment of target DNA from one individual but do not hybridize to the corresponding segment from another individual due to the presence of different polymorphic forms (e.g., alternative SNP alleles/nucleotides) in the respective DNA segments from the two individuals. Hybridization conditions should be sufficiently, stringent that there is a significant detectable difference in hybridization intensity between alleles, and preferably an essentially binary response, whereby a probe hybridizes to only one of the alleles or significantly more strongly to one allele. While a probe may be designed to hybridize to a target sequence that contains a SNP site such that the SNP site aligns anywhere along the sequence of the probe, the probe is preferably designed to hybridize to a segment of the target sequence such that the SNP site aligns with a central position of the probe (e.g., a position within the probe that is at least three nucleotides from either end of the probe). This design of probe generally achieves good

[0139] In another embodiment, a probe or primer may be designed to hybridize to a segment of target DNA such that the SNP aligns with either the 5′ most end or the 3′ most end of the probe or primer. In a specific preferred embodiment which is particularly suitable for use in a oligonucleotide ligation assay (U.S. Pat. No.4,988,617), the 3′ most nucleotide of the probe aligns with the SNP position in the target sequence.

[0140] Oligonucleotide probes and primers may be prepared by methods well known in the art. Chemical synthetic methods include, but are limited to, the phosphotriester method described by Narang et al., 1979, Methods in Enzymology 68:90; the phosphodiester method described by Brown et al., 1979, Methods in Enzymology 68:109, the diethylphosphoamidate method described by Beaucage et al., 1981, Tetrahedron Letters 22:1859; and the solid support method described in U.S. Pat. No. 4,458,066.

[0141] Allele-specific probes are often used in pairs (or, less commonly, in sets of 3 or 4, such as if a SNP position is known to have 3 or 4 alleles, respectively, or to assay both strands of a nucleic acid molecule for a target SNP allele), and such pairs may be identical except for a one nucleotide mismatch that represents the allelic variants at the SNP position. Commonly, one member of a pair perfectly matches a reference form of a target sequence that has a more common SNP allele (i.e., the allele that is more frequent in the target population) and the other member of the pair perfectly matches a form of the target sequence that has a less common SNP allele (i.e., the allele that is rarer in the target population). In the case of an array, multiple pairs of probes can be immobilized on the same support for simultaneous analysis of multiple different polymorphisms.

[0142] In one type of PCR-based assay, an allele-specific primer hybridizes to a region on a target nucleic acid molecule that overlaps a SNP position and only primes amplification of an allelic form to which the primer exhibits perfect complementarity (Gibbs, 1989, Nucleic Acid Res. 17 2427-2448). Typically, the primer's 3′-most nucleotide is aligned with and complementary to the SNP position of the target nucleic acid molecule. This primer is used in conjunction with a second primer that hybridizes at a distal site. Amplification proceeds from the two primers, producing a detectable product that indicates which allelic form is present in the test sample. A control is usually performed with a second pair of primers, one of which shows a single base mismatch at the polymorphic site and the other of which exhibits perfect complementarity to a distal site. The single-base mismatch prevents amplification or substantially reduces amplification efficiency, so that either no detectable product is formed or it is formed in lower amounts or at a slower pace. The method generally works most effectively when the mismatch is at the 3′-most position of the oligonucleotide (i.e., the 3′-most position of the oligonucleotide aligns with the target SNP position) because this position is most destabilizing to elongation from the primer (see, e.g., WO 93/22456). This PCR-based assay can be utilized as part of the TaqMan assay, described below.

[0143] In a specific embodiment of the invention, a primer of the invention contains a sequence substantially complementary to a segment of a target SNP-containing nucleic acid molecule except that the primer has a mismatched nucleotide in one of the three nucleotide positions at the 3′-most end of the primer, such that the mismatched nucleotide does not base pair with a particular allele at the SNP site. In a preferred embodiment, the mismatched nucleotide in the primer is the second from the last nucleotide at the 3′-most position of the primer. In a more preferred embodiment, the mismatched nucleotide in the primer is the last nucleotide at the 3′-most position of the primer.

[0144] In another embodiment of the invention, a SNP detection reagent of the invention is labeled with a fluorogenic reporter dye that emits a detectable signal. While the preferred reporter dye is a fluorescent dye, any reporter dye that can be attached to a detection reagent such as an oligonucleotide probe or primer is suitable for use in the invention. Such dyes include, but are not limited to, Acridine, AMCA, BODIPY, Cascade Blue, Cy2, Cy3, Cy5, Cy7, Dabcyl, Edans, Eosin, Erythrosin, Fluorescein, 6-Fam, Tet, Joe, Hex, Oregon Green, Rhodamine, Rhodol Green, Tamra, Rox, and Texas Red.

[0145] In yet another embodiment of the invention, the detection reagent may be further labeled with a quencher dye such as Tamra, especially when the reagent is used as a self-quenching probe such as a TaqMan (U.S. Pat. Nos. 5,210,015 and 5,538,848) or Molecular Beacon probe (U.S. Pat. Nos. 5,118,801 and 5,312,728), or other stemless or linear beacon probe (Livak et al., 1995, PCR Method Appl. 4:357-362; Tyagi et al., 1996, Nature Biotechnology 14: 303-308; Nazarenko et al., 1997, Nucl. Acids Res. 25:2516-2521; U.S. Pat. Nos. 5,866,336 and 6,117,635).

[0146] The detection reagents of the invention may also contain other labels, including but not limited to, biotin for streptavidin binding, hapten for antibody binding, and oligonucleotide for binding to another complementary oligonucleotide such as pairs of zipcodes.

[0147] The present invention also contemplates reagents that do not contain (or that are complementary to) a SNP nucleotide identified herein but that are used to assay one or more SNPs disclosed herein. For example, primers that flank, but do not hybridize directly to a target SNP position provided herein are useful in primer extension reactions in which the primers hybridize to a region adjacent to the target SNP position (i.e., within one or more nucleotides from the target SNP site). During the primer extension reaction, a primer is typically not able to extend past a target SNP site if a particular nucleotide (allele) is present at that target SNP site, and the primer extension product can be detected in order to determine which SNP allele is present at the target SNP site. For example, particular ddNTPs are typically used in the primer extension reaction to terminate primer extension once a ddNTP is incorporated into the extension product (a primer extension product which includes a ddNTP at the 3′-most end of the primer extension product, and in which the ddNTP is a nucleotide of a SNP disclosed herein, is a composition that is specifically contemplated by the present invention). Thus, reagents that bind to a nucleic acid molecule in a region adjacent to a SNP site and that are used for assaying the SNP site, even though the bound sequences do not necessarily include the SNP site itself, are also contemplated by the present invention.

[0148] SNP Detection Kits and Systems

[0149] A person skilled in the art will recognize that, based on the SNP and associated sequence information disclosed herein, detection reagents can be developed and used to assay any SNP of the present invention individually or in combination, and such detection reagents can be readily incorporated into one of the established kit or system formats which are well known in the art. The terms “kits” and “systems”, as used herein in the context of SNP detection reagents, are intended to refer to such things as combinations of multiple SNP detection reagents, or one or more SNP detection reagents in combination with one or more other types of elements or components (e.g., other types of biochemical reagents, containers, packages such as packaging intended for commercial sale, substrates to which SNP detection reagents are attached, electronic hardware components, etc.). Accordingly, the present invention further provides SNP detection kits and systems, including but not limited to, packaged probe and primer sets (e.g., TaqMan probe/primer sets), arrays/microarrays of nucleic acid molecules, and beads that contain one or more probes, primers, or other detection reagents for detecting one or more SNPs of the present invention. The kits/systems can optionally include various electronic hardware components; for example, arrays (“DNA chips”) and microfluidic systems (“lab-on-a-chip” systems) provided by various manufacturers typically comprise hardware components. Other kits/systems (e.g., probe/primer sets) may not include electronic hardware components, but may be comprised of, for example, one or more SNP detection reagents (along with, optionally, other biochemical reagents) packaged in one or more containers.

[0150] In some embodiments, a SNP detection kit typically contains one or more detection reagents and other components (e.g., a buffer, enzymes such as DNA polymerases or ligases, chain extension nucleotides such as deoxynucleotide triphosphates, and in the case of Sanger-type DNA sequencing reactions, chain terminating nucleotides, positive control sequences, negative control sequences, and the like) necessary to carry out an assay or reaction, such as amplification and/or detection of a SNP-containing nucleic acid molecule. A kit may further contain means for determining the amount of a target nucleic acid, and means for comparing the amount with a standard, and can comprise instructions for using the kit to detect the SNP-containing nucleic acid molecule of interest. In one embodiment of the present invention, kits are provided which contain the necessary reagents to carry out one or more assays to detect one or more SNPs disclosed herein. In a preferred embodiment of the present invention, SNP detection kits/systems are in the form of nucleic acid arrays, or compartmentalized kits, including microfluidic/lab-on-a-chip systems.

[0151] SNP detection kits/systems may contain, for example, one or more probes, or pairs of probes, that hybridize to a nucleic acid molecule at or near each target SNP position. Multiple pairs of allele-specific probes may be included in the kit/system to simultaneously assay large numbers of SNPs, at least one of which is a SNP of the present invention. In some kits/systems, the allele-specific probes are immobilized to a substrate such as an array or bead. For example, the same substrate can comprise allele-specific probes for detecting at least 1; 10; 100; 1000; 10,000; 100,000 (or any other number in-between) or substantially all of the SNPs shown in Table 1 and/or Table 2.

[0152] The terms “arrays”, “microarrays”, and “DNA chips” are used herein interchangeably to refer to an array of distinct polynucleotides affixed to a substrate, such as glass, plastic, paper, nylon or other type of membrane, filter, chip, or any other suitable solid support. The polynucleotides can be synthesized directly on the substrate, or synthesized separate from the substrate and then affixed to the substrate. In one embodiment, the microarray is prepared and used according to the methods described in U.S. Pat. No. 5,837,832, Chee et al., PCT application W095/11995 (Chee et al.), Lockhart, D. J. et al. (1996; Nat. Biotech. 14: 1675-1680) and Schena, M. et al. (1996; Proc. Natl. Acad. Sci. 93: 10614-10619), all of which are incorporated herein in their entirety by reference. In other embodiments, such arrays are produced by the methods described by Brown et al., U.S. Pat. No. 5,807,522.

[0153] Nucleic acid arrays are reviewed in the following references: Zammatteo et al., “New chips for molecular biology and diagnostics”, Biotechnol Annu Rev. 2002;8:85-101; Sosnowski et al., “Active microelectronic array system for DNA hybridization, genotyping and pharmacogenomic applications”, Psychiatr Genet. December 2002;12(4):181-92; Heller, “DNA microarray technology: devices, systems, and applications”; Annu Rev Biomed Eng. 2002;4: 129-53. Epub Mar. 22, 2002; Kolchinsky et al., “Analysis of SNPs and other genomic variations using gel-based chips”, Hum Mutat. April 2002;19(4):343-60; and McGall et al., “High-density genechip oligonucleotide probe arrays”, Adv Biochem Eng Biotechnol. 2002;77:21-42.

[0154] Any number of probes, such as allele-specific probes, may be implemented in an array, and each probe or pair of probes can hybridize to a different SNP position. In the case of polynucleotide probes, they can be synthesized at designated areas (or synthesized separately and then affixed to designated areas) on a substrate using a light-directed chemical process. Each DNA chip can contain, for example, thousands to millions of individual synthetic polynucleotide probes arranged in a grid-like pattern and miniaturized (e.g., to the size of a dime). Preferably, probes are attached to a solid support in an ordered, addressable array.

[0155] A microarray can be composed of a large number of unique, single-stranded polynucleotides, usually either synthetic antisense polynucleotides or fragments of cDNAs, fixed to a solid support. Typical polynucleotides are preferably about 6-60 nucleotides in length, more preferably about 15-30 nucleotides in length, and most preferably about 18-25 nucleotides in length. For certain types of microarrays or other detection kits/systems, it may be preferable to use oligonucleotides that are only about 7-20 nucleotides in length. In other types of arrays, such as arrays used in conjunction with chemiluminescent detection technology, preferred probe lengths can be, for example, about 15-80 nucleotides in length, preferably about 50-70-nucleotides in length, more preferably about 55-65 nucleotides in length, and most preferably about 60 nucleotides in length. The microarray or detection kit can contain polynucleotides that cover the known 5′ or 3′ sequence of a gene/transcript or target SNP site, sequential polynucleotides that cover the full-length sequence of a gene/transcript; or unique polynucleotides selected from particular areas along the length of a target gene/transcript sequence, particularly areas corresponding to one or more SNPs disclosed in Table 1 and/or Table 2. Polynucleotides used in the microarray or detection kit can be specific to a SNP or SNPs of interest (e.g., specific to a particular SNP allele at a target SNP site, or specific to particular SNP alleles at multiple different SNP sites), or specific to a polymorphic gene/transcript or genes/transcripts of interest.

[0156] Hybridization assays based on polynucleotide arrays rely on the differences in hybridization stability of the probes to perfectly matched and mismatched target sequence variants. For SNP genotyping, it is generally preferable that stringency conditions used in hybridization assays are high enough such that nucleic acid molecules that differ from one another at as little as a single SNP position can be differentiated (e.g., typical SNP hybridization assays are designed so that hybridization will occur only if one particular nucleotide is present at a SNP position, but will not occur if an alternative nucleotide is present at that SNP position). Such high stringency conditions may be preferable when using, for example, nucleic acid arrays of allele-specific probes for SNP detection. Such high stringency conditions are described in the preceding section, and are well known to those skilled in the art and can be found in, for example, Current Protocols in Molecular Biology, John Wiley & Sons, N.Y. (1989), 6.3.1-6.3.6.

[0157] In other embodiments, the arrays are used in conjunction with chemiluminescent detection technology. The following patents and patent applications, which are all hereby incorporated by reference, provide additional information pertaining to chemiluminescent detection: U.S. patent application Ser. Nos. 10/620332 and 10/620333 describe chemiluminescent approaches for microarray detection; U.S. Pat. Nos. 6,124,478, 6,107,024, 5,994,073, 5,981,768, 5,871,938, 5,843,681, 5,800,999, and 5,773,628 describe methods and compositions of dioxetane for performing chemiluminescent detection; and U.S. Published application US2002/0110828 discloses methods and compositions for microarray controls.

[0158] In one embodiment of the invention, a nucleic acid array can comprise an array of probes of about 15-25 nucleotides in length. In further embodiments, a nucleic acid array can comprise any number of probes, in which at least one probe is capable of detecting one or more SNPs disclosed in Table 1 and/or Table 2, and/or at least one,probe comprises a fragment of one of the sequences selected from the group consisting of those disclosed in Table 1, Table 2, the Sequence Listing, and sequences complementary thereto, said fragment comprising at least about 8 consecutive nucleotides, preferably 10, 12, 15, 16, 18, 20, more preferably 22, 25, 30, 40, 47, 50, 55, 60, 65, 70, 80, 90, 100, or more consecutive nucleotides (or any other number in-between) and containing (or being complementary to) a novel SNP allele disclosed in Table 1 and/or Table 2. In some embodiments, the nucleotide complementary to the SNP site is within 5, 4, 3, 2, or 1 nucleotide from the center of the probe, more preferably at the center of said probe.

[0159] A polynucleotide probe can be synthesized on the surface of the substrate by using a chemical coupling procedure and an ink jet application apparatus, as described in PCT application W095/251116 (Baldeschweiler et al.) which is incorporated herein in its entirety by reference. In another aspect, a “gridded” array analogous to a dot (or slot) blot may be used to arrange and link cDNA fragments or oligonucleotides to the surface of a substrate using a vacuum system, thermal, UV, mechanical or chemical bonding procedures. An array, such as those described above, may be produced by hand or by using available devices (slot blot or dot blot apparatus), materials (any suitable solid support), and machines (including robotic instruments), and may contain 8, 24, 96, 384, 1536, 6144 or more polynucleotides, or any other, number which lends itself to the efficient use of commercially available instrumentation.

[0160] Using such arrays or other kits/systems, the present invention provides methods of identifying the SNPs disclosed herein in a test sample. Such methods typically involve incubating a test sample of nucleic acids with an array comprising one or more probes corresponding to at least one SNP position of the present invention, and assaying for binding of a nucleic acid from the test sample with one or more of the probes. Conditions for incubating a SNP detection reagent (or a kit/system that employs one or more such SNP detection reagents) with a test sample vary. Incubation conditions depend on such factors as the format employed in the assay, the detection methods employed, and the type and nature of the detection reagents used in the assay. One skilled in the art will recognize that any one of the commonly available hybridization, amplification and array assay formats can readily be adapted to detect the SNPs disclosed herein.

[0161] A SNP detection kit/system of the present invention may include components that are used to prepare nucleic acids from a test sample for the subsequent amplification and/or detection of a SNP-containing nucleic acid molecule. Such sample preparation components can be used to produce nucleic acid extracts (including DNA and/or RNA), proteins or membrane extracts from any bodily fluids (such as blood, serum, plasma, urine, saliva, phlegm, gastric juices, semen, tears, sweat, etc.), skin, hair, cells (especially nucleated cells), biopsies, buccal swabs or tissue specimens. The test samples used in the above-described methods will vary based on such factors as the assay format, nature of the detection method, and the specific tissues, cells or extracts used as the test sample to be assayed. Methods of preparing nucleic acids, proteins, and cell extracts are well known in the art and can be readily adapted to obtain a sample that is compatible with the system utilized. Automated sample preparation systems for extracting nucleic acids from a test sample are commercially available, and examples are Qiagen's BioRobot 9600, Applied Biosystems' PRISM™ 6700 sample preparation system, and Roche Molecular Systems' COBAS AmpliPrep System.

[0162] Another form of kit contemplated by the present invention is a compartmentalized kit. A compartmentalized kit includes any kit in which reagents are contained in separate containers. Such containers include, for example, small glass containers, plastic containers, strips of plastic, glass or paper, or arraying material such as silica. Such containers allow one to efficiently transfer reagents from one compartment to another compartment such that the test samples and reagents are not cross-contaminated, or from one container to another vessel not included in the kit, and the agents or solutions of each container can be added in a quantitative fashion from one compartment to another or to another vessel. Such containers may include, for example, one or more containers which will accept the test sample, one or more containers which contain at least one probe or other SNP detection reagent for detecting one or more SNPs of the present invention, one or more containers which contain wash reagents (such as phosphate buffered saline, Tris-buffers, etc.), and one or more containers which contain the reagents used to reveal the presence of the bound probe or other SNP detection reagents. The kit can optionally further comprise compartments and/or reagents for, for example, nucleic acid amplification or other enzymatic reactions such as primer extension reactions, hybridization, ligation, electrophoresis (preferably capillary electrophoresis), mass spectrometry, and/or laser-induced fluorescent detection. The kit may also include instructions for using the kit. Exemplary compartmentalized kits include microfluidic devices known in the art (see, e.g., Weigl et al., “Lab-on-a-chip for drug development”, Adv Drug Deliv Rev. Feb. 24, 2003;55(3):349-77). In such microfluidic devices, the containers may be referred to as, for example, microfluidic “compartments”, “chambers”, or “channels”.

[0163] Microfluidic devices, which may also be referred to as “lab-on-a-chip” systems, biomedical micro-electro-mechanical systems (bioMEMs), or multicomponent integrated systems, are exemplary kits/systems of the present invention for analyzing SNPs. Such systems miniaturize and compartmentalize processes such as probe/target hybridization, nucleic acid amplification, and capillary electrophoresis reactions in a single functional device. Such microfluidic devices typically utilize detection reagents in at least one aspect of the system, and such detection reagents may be used to detect one or more SNPs of the present invention. One example of a microfluidic system is disclosed in U.S. Pat. No. 5,589,136, which describes the integration of PCR amplification and capillary electrophoresis in chips. Exemplary microfluidic systems comprise a pattern of microchannels designed onto a glass, silicon, quartz, or plastic wafer included on a microchip. The movements of the samples may be controlled by electric, electroosmotic or hydrostatic forces applied across different areas of the microchip to create functional microscopic valves and pumps with no moving parts. Varying the voltage can be used as a means to control the liquid flow at intersections between the micro-machined channels and to change the liquid flow rate for pumping across different sections of the microchip. See, for example, U.S. Pat. Nos. 6,153,073, Dubrow et al., and 6,156,181, Parce et al.

[0164] For genotyping SNPs, an exemplary microfluidic system may integrate, for example, nucleic acid amplification, primer extension, capillary electrophoresis, and a detection method such as laser induced fluorescence detection. In a first step of an exemplary process for using such an exemplary system, nucleic acid samples are amplified, preferably by PCR. Then, the amplification products are subjected to automated primer extension reactions using ddNTPs (specific fluorescence for each ddNTP) and the appropriate oligonucleotide primers to carry out primer extension reactions which hybridize just upstream of the targeted SNP. Once the extension at the 3′ end is completed, the primers are separated from the unincorporated fluorescent ddNTPs by capillary electrophoresis. The separation medium used in capillary electrophoresis can be, for example, polyacrylamide, polyethyleneglycol or dextran. The incorporated ddNTPs in the single nucleotide primer extension products are identified by laser-induced fluorescence detection. Such an exemplary microchip can be used to process, for example, at least 96 to 384 samples, or more, in parallel.

[0165] Uses of Nucleic and Molecules

[0166] The nucleic acid molecules of the present invention have a variety of uses, especially in the diagnosis and treatment of coronary stenosis. For example, the nucleic acid molecules are useful as hybridization probes, such as for genotyping SNPs in messenger RNA, transcript, cDNA, genomic DNA, amplified DNA or other nucleic acid molecules, and for isolating full-length cDNA and genomic clones encoding the variant peptides disclosed in Table 1 as well as their orthologs.

[0167] A probe can hybridize to any nucleotide sequence along the entire length of a nucleic acid molecule provided in Table 1 and/or Table 2. Preferably, a probe of the present invention hybridizes to a region of a target sequence that encompasses a SNP position indicated in Table 1 and/or Table 2. More preferably, a probe hybridizes to a SNP-containing target sequence in a sequence-specific manner such that it distinguishes the target sequence from other nucleotide sequences which vary, from the target sequence only by which nucleotide is present at the SNP site. Such a probe is particularly useful for detecting the presence of a SNP-containing nucleic acid in a test sample, or for determining which nucleotide (allele) is present at a particular SNP site (i.e., genotyping the SNP site).

[0168] A nucleic acid hybridization probe may be used for determining the presence, level, form, and/or distribution of nucleic acid expression. The nucleic acid whose level is determined can be DNA or RNA. Accordingly, probes specific for the SNPs described herein can be used to assess the presence, expression and/or gene copy number in a given cell, tissue, or organism. These uses are relevant for diagnosis of disorders involving an increase or decrease in gene expression relative to normal levels. In vitro techniques for detection of mRNA include, for example, Northern blot hybridizations and in situ hybridizations. In vitro techniques for detecting DNA include Southern blot hybridizations and in situ hybridizations (Sambrook and Russell, 2000, Molecular Cloning: A Laboratory Manual, Cold Spring Harbor Press, Cold Spring Harbor, N.Y.).

[0169] Probes can be used as part of a diagnostic test kit for identifying cells or tissues in which a variant protein is expressed, such as by measuring the level of a variant protein-encoding nucleic acid (e.g., mRNA) in a sample of cells from a subject or determining if a polynucleotide contains a SNP of interest.

[0170] Thus, the nucleic acid molecules of the invention can be used as hybridization probes to detect the SNPs disclosed herein, thereby determining whether an individual with the polymorphisms is at risk for coronary stenosis or has developed early stage coronary stenosis. Detection of a SNP associated with a disease phenotype provides a diagnostic tool for an active disease and/or genetic predisposition to the disease.

[0171] Furthermore, the nucleic acid molecules of the invention are therefore useful for detecting a gene (gene information is disclosed in Table 2, for example) which contains a SNP disclosed herein and/or products of such genes, such as expressed mRNA transcript molecules (transcript information is disclosed in Table 1, for example), and are thus useful for detecting gene expression. The nucleic acid molecules can optionally be implemented in, for example, an array or kit format for use in detecting gene expression given region of a nucleic acid molecule, particularly a region containing a SNP identified in Table 1 and/or Table 2.

[0172] The nucleic acid molecules of the invention are also useful for constructing recombinant vectors (described in greater detail below). Such vectors include expression vectors that express a portion of, or all of, any of the variant peptide sequences provided in Table 1. Vectors also include insertion vectors, used to integrate into another nucleic acid molecule sequence, such as into the cellular genome, to alter in situ expression of a gene and/or gene product. For example, an endogenous coding sequence can be replaced via homologous recombination with all or part of the coding region containing one or more specifically introduced SNPs.

[0173] The nucleic acid molecules of the invention are also useful for expressing antigenic portions of the variant proteins, particularly antigenic portions that contain a variant amino acid sequence (e.g., an amino acid substitution) caused by a SNP disclosed 30 in Table 1 and/or Table 2.

[0174] The nucleic acid molecules of the invention are also useful for constructing vectors containing a gene regulatory region of the nucleic acid molecules of the present invention.

[0175] The nucleic acid molecules of the invention are also useful for designing ribozymes corresponding to all, or a part, of an mRNA molecule expressed from a SNP-containing nucleic acid molecule described herein.

[0176] The nucleic acid molecules of the invention are also useful for constructing host cells expressing a part, or all, of the nucleic acid molecules and variant peptides.

[0177] The nucleic acid molecules of the invention are also useful for constructing transgenic animals expressing all, or a part, of the nucleic acid molecules and variant peptides. The production of recombinant cells and transgenic animals having nucleic acid molecules which contain the SNPs disclosed in Table 1 and/or Table 2 allow, for example, effective clinical design of treatment compounds and dosage regimens.

[0178] The nucleic acid molecules of the invention are also useful in assays for drug screening to identify compounds that, for example, modulate nucleic acid expression.

[0179] The nucleic acid molecules of the invention are also useful in gene therapy in patients whose cells have aberrant gene expression. Thus recombinant cells, which include a patient's cells that have been engineered ex vivo and returned to the patient, can be introduced into an individual where the recombinant cells produce the desired protein to treat the individual.

[0180] SNP Genotyping Methods

[0181] The process of determining which specific nucleotide (i.e., allele) is present at each of one or more SNP positions, such as a SNP position in a nucleic acid molecule disclosed in Table 1 and/or Table 2, is referred to as SNP genotyping. The present invention provides methods of SNP genotyping, such as for use in screening for coronary stenosis or related pathologies, or determining predisposition thereto, or determining responsiveness to a form of treatment, or in genome mapping or SNP association analysis, etc.

[0182] Nucleic acid samples can be genotyped to determine which allele(s) is/are present at any given genetic region (e.g., SNP position) of interest by methods well-known in the art. The neighboring sequence can be used to design SNP detection reagents such as oligonucleotide probes, which may optionally be implemented in a kit format. Exemplary SNP genotyping methods are described in Chen et al., “Single nucleotide polymorphism genotyping: biochemistry, protocol, cost and throughput”, Pharmacogenomics J. 2003;3(2):77-96; Kwok et al., “Detection of single nucleotide polymorphisms”, Curr Issues Mol Biol. Apr. 5, 2003 (2):43-60; Shi, “Technologies for individual genotyping: detection of genetic polymorphisms in drug targets and disease genes”, Am J Pharmacogenomics. 2002;2(3):197-205; and Kwok, “Methods for genotyping single nucleotide polymorphisms”, Annu Rev Genomics Hum Genet 2001 ;2:235-58. Exemplary techniques for high-throughput SNP genotyping are described in Marnellos, “High-throughput SNP analysis for genetic association studies”, Curr Opin Drug Discov Devel. May 2003;6(3):317-21. Common SNP genotyping methods include, but are not limited to, TaqMan assays, molecular beacon assays, nucleic acid arrays, allele-specific primer extension, allele-specific PCR, arrayed primer extension, homogeneous primer extension assays, primer extension with detection by mass spectrometry, pyrosequencing, multiplex primer extension sorted on genetic arrays, ligation with rolling circle amplification, homogeneous ligation, OLA (U.S. Pat. No. 4,988,167), multiplex ligation reaction sorted on genetic arrays, restriction-fragment length polymorphism, single base extension-tag assays, and the Invader assay. Such methods may be used in combination with detection mechanisms such as, for example, luminescence or chemiluminescence detection, fluorescence detection, time-resolved fluorescence detection, fluorescence resonance energy transfer, fluorescence polarization, mass spectrometry, and electrical detection.

[0183] Various methods for detecting polymorphisms include, but are not limited to, methods in which protection from cleavage agents is used to detect mismatched bases in RNA/RNA or RNA/DNA duplexes (Myers et al., Science 230:1242 (1985); Cotton et al., PNAS 85:4397 (1988); and Saleeba et al., Meth. Enzymol. 217:286-295 (1992)), comparison of the electrophoretic mobility of variant and wild type nucleic acid molecules (Orita et al., PNAS 86:2766 (1989); Cotton et al., Mutat. Res. 285:125-144 (1993); and Hayashi et al., Genet. Anal. Tech. Appl. 9:73-79 (1992)), and assaying the movement of polymorphic or wild-type fragments in polyacrylamide gels containing a gradient of denaturant using denaturing gradient gel electrophoresis (DGGE) (Myers et al., Nature 313:495 (1985)). Sequence variations at specific locations can also be assessed by nuclease protection assays such as RNase and S1 protection or chemical cleavage methods.

[0184] In a preferred embodiment, SNP genotyping is performed using the TaqMan assay, which is also known as the 5′ nuclease assay (U.S. Pat. Nos. 5,210,015 and 538,848). The TaqMan assay detects the accumulation of a specific amplified product during PCR. The TaqMan assay utilizes an oligonucleotide probe labeled with a fluorescent reporter dye and a quencher dye. The reporter dye is excited by irradiation at an appropriate wavelength, it transfers energy to the quencher dye in the same probe via a process called fluorescence, resonance energy transfer (FRET). When attached to the probe, the excited reporter dye does not emit a signal. The proximity of the quencher dye to the reporter dye in the intact probe maintains a reduced fluorescence for the reporter. The reporter dye and quencher dye may be at the 5′ most and the 3′ most ends, respectively, or vice versa; Alternatively, the reporter dye may be at the 5′ or 3′ most end while the quencher dye is attached to an internal nucleotide, or vice versa. In yet another embodiment, both the reporter and the quencher may be attached to internal nucleotides at a distance from each other such that fluorescence of the reporter is reduced.

[0185] During PCR, the 5′ nuclease activity of DNA polymerase cleaves the probe, thereby separating the reporter dye and the quencher dye and resulting in increased fluorescence of the reporter. Accumulation of PCR product is detected directly by monitoring the increase in fluorescence of the reporter dye. The DNA polymerase cleaves the probe between the reporter dye and the quencher dye only if the probe hybridizes to the target SNP-containing template which is amplified during PCR, and the probe is designed to hybridize to the target SNP site only if a particular SNP allele is present.

[0186] Preferred TaqMan primer and probe sequences can readily be determined using the SNP and associated nucleic acid sequence information provided herein. A number of computer programs, such as Primer Express (Applied Biosystems, Foster City, Calif.), can be used to rapidly obtain optimal primer/probe sets. It will be apparent to one of skill in the art that such primers and probes for detecting the SNPs of the present invention are useful in diagnostic assays for coronary stenosis and related pathologies, and can be readily incorporated into a kit format. The present invention also includes modifications of the Taqman assay well known in the art such as the use of Molecular Beacon probes (U.S. Pat. Nos. 5,118,801 and 5,312,728) and other variant formats (U.S. Pat. Nos. 5,866,336 and 6,117,635).

[0187] Another preferred method for genotyping the SNPs of the present invention is the use of two oligonucleotide probes in an OLA (see, e.g., U.S. Pat. No. 4,988,617). In this method, one probe hybridizes to a segment of a target nucleic acid with its 3′ most end aligned with the SNP site. A second probe hybridizes to an adjacent segment of the target nucleic acid molecule directly 3′ to the first probe. The two juxtaposed probes hybridize to the target nucleic acid molecule, and are ligated in the presence of a linking agent such as a ligase if there is perfect complementarity between the 3′ most nucleotide of the first probe with the SNP site. If there is a mismatch, ligation would not occur. After the reaction, the ligated probes are separated from the target nucleic acid molecule, and detected as indicators of the presence of a SNP.

[0188] The following patents, patent applications, and published international patent applications, which are all,hereby incorporated by reference, provide additional information pertaining to techniques for carrying out various types of OLA: U.S. Pat. Nos.6,027,889, 6,268,148, 5,494,810, 5,830,711, and 6,054,564 describe OLA strategies for performing SNP detection; WO 97/31256 and WO 00/56927 describe OLA strategies for performing SNP detection using universal arrays, wherein a zipcode sequence can be introduced into one of the hybridization probes, and the resulting product, or amplified product, hybridized to a universal zip code array; U.S. application US01/17329 (and 09/584,905) describes OLA (or LDR) followed by PCR, wherein zipcodes are incorporated into OLA probes, and amplified PCR products are determined by electrophoretic or universal zipcode array readout; U.S. application Ser. Nos. 60/427818, 60/445636, and 60/445494 describe SNPlex methods and software for multiplexed SNP detection using OLA followed by PCR, wherein zipcodes are incorporated into OLA probes, and amplified PCR products are hybridized with a zipchute reagent, and the identity of the SNP determined from electrophoretic readout of the zipchute. In some embodiments, OLA is carried out prior to PCR (or another method of nucleic acid amplification). In other embodiments, PCR (or another method of nucleic acid amplification) is carried out prior to OLA.

[0189] Another method SNP genotyping is based on mass spectrometry. Mass spectrometry takes advantage of the unique mass of each of the four nucleotides of DNA. SNPs can be unambiguously genotyped by mass spectrometry by measuring the differences in the mass of nucleic acids having alternative SNP alleles. MALDI-TOF (Matrix Assisted Laser Desorption Ionization-Time of Flight) mass spectrometry technology is preferred for extremely precise determinations of molecular mass, such as SNPs. Numerous approaches to SNP analysis have been developed based on mass spectrometry. Preferred mass spectrometry-based methods of SNP genotyping include primer extension assays, which can also be utilized in combination with other approaches, such as traditional gel-based formats and microarrays.

[0190] Typically, the primer extension assay involves designing and annealing a primer to a template PCR amplicon upstream (5′) from a target SNP position. A mix of dideoxynucleotide triphosphates (ddNTPs) and/or deoxynucleotide triphosphates (dNTPs) are added to a reaction mixture containing template (e.g., a SNP-containing nucleic acid molecule which has typically been amplified, such as by PCR), primer, and DNA polymerase. Extension of the primer terminates at the first position in the template where a nucleotide complementary to one of the ddNTPs in the mix occurs. The primer can be either immediately adjacent (i.e., the nucleotide at the 3′ end of the primer hybridizes to the nucleotide next to the target SNP site) or two or more nucleotides removed from the SNP position. If the primer is several nucleotides removed from the target SNP position, the only limitation is that the template sequence between the 3′ end of the primer and the SNP position cannot contain a nucleotide of the same type as the one to be detected, or this will cause premature termination of the extension primer. Alternatively, if all four ddNTPs alone, with no dNTPs, are added to the reaction mixture, the primer will always be extended by only one nucleotide, corresponding to the target SNP position. In this instance, primers are designed to bind one nucleotide upstream from the SNP position (i.e., the nucleotide at the 3′ end of the primer hybridizes to the nucleotide that is immediately adjacent to the target SNP site on the 5′ side of the target SNP site). Extension by only one nucleotide is preferable, as it minimizes the overall mass of the extended primer, thereby increasing the resolution of mass differences between alternative SNP nucleotides. Furthermore, mass-tagged ddNTPs can be employed in the primer extension reactions in place of unmodified ddNTPs. This increases the mass difference between primers extended with these ddNTPs, thereby providing increased sensitivity and accuracy, and is particularly useful for typing heterozygous base positions. Mass-tagging also alleviates the need for intensive sample-preparation procedures and decreases the necessary resolving power of the mass spectrometer.

[0191] The extended primers can be purified and analyzed by MALDI-TOF mass spectrometry to determine the identity of the nucleotide present at the target SNP position. In one method of analysis, the products from the primer extension reaction are combined with light absorbing crystals that form a matrix. The matrix is then hit with an energy source such as a laser to ionize and desorb the nucleic acid molecules into the gas-phase. The ionized molecules are then ejected into a flight tube and accelerated down the tube towards a detector. The time between the ionization event, such as a laser pulse, and collision of the molecule with the detector is the time of flight of that molecule. The time of flight is precisely correlated with the mass-to-charge ratio (m/z) of the ionized molecule. Ions with smaller m/z travel down the tube faster than ions with larger m/z and therefore the lighter ions reach the detector before the heavier ions. The time-of-flight is then converted into a corresponding, and highly precise, m/z. In this manner, SNPs can be identified based on the slight differences in mass, and the corresponding time of flight differences, inherent in nucleic acid molecules having different nucleotides at a single base position. For further information regarding the use of primer extension assays in conjunction with MALDI-TOF mass spectrometry for SNP genotyping, see, e.g., Wise et al., “A standard protocol for single nucleotide primer extension in the human genome using matrix-assisted laser desorption/ionization time-of-flight mass spectrometry”, Rapid Commun Mass Spectrom. 2003;17(11):1195-202.

[0192] The following references provide further information describing mass spectrometry-based methods for SNP genotyping: Bocker, “SNP and mutation discovery using base-specific cleavage and MALDI-TOF mass spectrometry”, Bioinformatics. July 2003; 19 Suppl 1:144-I53; Storm et al., “MALDI-TOF mass spectrometry-based SNP genotyping”, Methods Mol Biol. 2003;212:241-62; Jurinke et al., “The use of Mass ARRAY technology for high throughput genotyping”, Adv Biochem Eng Biotechnol. 2002;77:57-74; and Jurinke et al., “Automated genotyping using the DNA MassArray technology”, Methods Mol Biol. 2002;187:179-92.

[0193] SNPs can also be scored by direct DNA sequencing. A variety of automated sequencing procedures can be utilized ((1995) Biotechniques 19:448), including sequencing by mass spectrometry (see, e.g., PCT International Publication No. WO94/16101; Cohen et al., Adv. Chromatogr. 36:127-162 (1996); and Griffin et al., Appl. Biochem. Biotechnol. 38:147-159 (1993)). The nucleic acid sequences of the present invention enable one of ordinary skill in the art to readily design sequencing primers for such automated sequencing procedures. Commercial instrumentation, such as the Applied Biosystems 377, 3100, 3700, 3730, and 3730xl DNA Analyzers (Foster City, Calif.), is commonly used in the art for automated sequencing.

[0194] Other methods that can be used to genotype the SNPs of the present invention include single-strand conformational polymorphism (SSCP), and denaturing gradient gel electrophoresis (DGGE) (Myers et al., Nature 313:495 (1985)). SSCP identifies base differences by alteration in electrophoretic migration of single stranded PCR products, as described in Orita et at., Proc. Nat. Acad. Single-stranded PCR products can be generated by heating or otherwise denaturing double stranded PCR products. Single-stranded nucleic acids may refold or form secondary structures that are partially dependent on the base sequence. The different electrophoretic mobilities of single-stranded amplification products are related to base-sequence differences at SNP positions. DGGE differentiates SNP alleles based on the different sequence-dependent stabilities and melting properties inherent in polymorphic DNA and the corresponding differences in electrophoretic migration patterns in a denaturing gradient gel (Erlich, ed., PCR Technology, Principles and Applications for DNA Amplification, W.H. Freeman and Co, New York, 1992, Chapter 7).

[0195] Sequence-specific ribozymes (U.S. Pat. No. 5,498,531) can also be used to score SNPs based on the development or loss of a ribozyme cleavage site. Perfectly matched sequences can be distinguished from mismatched sequences by nuclease cleavage digestion assays or by differences in melting temperature. If the SNP affects a restriction enzyme cleavage site, the SNP can be identified by alterations in restriction enzyme digestion patterns, and the corresponding changes in nucleic acid fragment lengths determined by gel electrophoresis

[0196] SNP genotyping can include the steps of, for example, collecting a biological sample from a human subject (e.g., sample of tissues, cells, fluids, secretions, etc.), isolating nucleic acids (e.g., genomic DNA, mRNA or both) from the cells of the sample, contacting the nucleic acids with one or more primers which specifically hybridize to a region of the isolated nucleic acid containing a target SNP under conditions such that hybridization and amplification of the target nucleic acid region occurs, and determining the nucleotide present at the SNP position of interest, or, in some assays, detecting the presence or absence of an amplification product (assays can be designed so that hybridization and/or amplification will only occur if a particular SNP allele is present or absent). In some assays, the size of the amplification product is detected and compared to the length of a control sample; for example, deletions and insertions can be detected by a change in size of the amplified product compared to a normal genotype.

[0197] SNP genotyping is useful for numerous practical applications, as described below. Examples of such applications include, but are not limited to, SPN disease association analysis, disease predisposition screening, disease diagnosis, disease prognosis, disease progression monitoring, determining therapeutic strategies based on an individual's genotype (“pharmacogenomics”), developing therapeutic agents based on SNP genotypes associated with a disease or likelihood of responding to a drug, stratifying a patient population for clinical trial for a treatment regimen, predicting the likelihood that an individual will experience toxic side effects from a therapeutic agent, and human identification applications such as forensics.

[0198] Analysis of Genetic Association Between SNPs and Phenotypic Traits

[0199] SNP genotyping for disease diagnosis, disease predisposition screening, disease prognosis, determining drug responsiveness (pharmacogenomics), drug toxicity screening, and other uses described herein, typically relies on initially establishing a genetic association between one or more specific SNPs and the particular phenotypic traits of interest.

[0200] Different study designs may be used for genetic association studies (Modern Epidemiology, Lippincott Williams & Wilkins (1998), 609-622). Observational studies are most frequently carried out in which the response of the patients is not interfered with. The first type of observational study identifies a sample of persons in whom the suspected cause of the disease is present and another sample of persons in whom the suspected cause is absent, and then the frequency of development of disease in the two samples is compared. These sampled populations are called cohorts, and the study is a prospective study. The other type of observational study is case-control or a retrospective study. In typical case-control studies, samples are collected from individuals with the phenotype of interest (cases) such as certain manifestations of a disease, and from individuals without the phenotype (controls) in a population (target population), that conclusions are to be drawn from. Then the possible causes of the disease are investigated retrospectively. As the time and costs of collecting samples in case-control studies are considerably less than those for prospective, studies, case-control studies are the more commonly used study design in genetic association studies, at least during the exploration and discovery stage.

[0201] In both types of observational studies, there may be potential confounding factors that should be taken into consideration. Confounding factors are those that are associated with both the real cause(s) of the disease and the disease itself, and they include demographic information such as age, gender, ethnicity as well as environmental factors. When confounding factors are not matched in cases and controls in a study; and are not controlled properly, spurious association results can arise. If potential confounding factors are identified, they should be controlled for by analysis methods explained below.

[0202] In a genetic association study, the cause of interest to be tested is a certain allele or a SNP or a combination of alleles or a haplotype from several SNPs. Thus, tissue specimens (e.g., whole blood) from the sampled individuals may be collected and genomic DNA genotyped for the SNP(s) of interest. In addition to the phenotypic trait of interest, other information such as demographic (e.g., age, gender, ethnicity, etc.), clinical, and environmental information that may influence the outcome of the trait can be collected to further characterize and define the sample set. In many cases, these factors are known to be associated with diseases and/or SNP allele frequencies. There are likely gene-environment and/or gene-gene interactions as well. Analysis methods to address gene-environment and gene-gene interactions (for example, the effects of the presence of both susceptibility alleles at two different genes can be greater than the effects of the individual alleles at two genes combined) are discussed below.

[0203] After all the relevant phenotypic and genotypic information has been obtained, statistical analyses are carried out to determine if there is any significant correlation between the presence of an allele or a genotype with the phenotypic characteristics of an individual. Preferably, data inspection and cleaning are first performed before carrying out statistical tests for genetic association. Epidemiological and clinical data of the samples can be summarized by descriptive statistics with tables and graphs. Data validation is preferably performed to check for data completion, inconsistent entries, and outliers. Chi-squared tests and t-tests (Wilcoxon rank-sum tests if distributions are not normal) may then be used to check for significant differences between cases and controls for discrete and continuous variables, respectively. To ensure genotyping quality, Hardy-Weinberg disequilibrium tests can be performed on cases and controls separately. Significant deviation form Hardy-Weinberg equilibrium (HWE) in both cases and controls for individual markers can be indicative of genotyping errors. If HWE is violated in a majority of markers, it is indicative of population substructure that should be further investigated. Moreover, Hardy-Weinberg disequilibrium in cases only can indicate genetic association of the markers with the disease (Genetic Data Analysis, Weir B., Sinauer (1990)).

[0204] To test whether an allele of a single SNP is associated with the case or control status of a phenotypic trait; one skilled in the art can compare allele frequencies in cases and controls. Standard chi-squared tests and Fisher exact tests can be carried out on a 2×2 table (2 SNP alleles×2 outcomes in the categorical trait of interest). To test whether genotypes of a SNP are associated, chi-squared tests can be carried out on a 3×2 table (3 genotypes×2 outcomes). Score tests are also carried out for genotypic association to contrast the three genotypic frequencies (major homozygotes, heterozygotes and minor homozygotes) in cases and controls, and to look for trends using 3 different modes of inheritance, namely dominant (with contrast coefficients 2, −1, −1), additive (with contrast coefficients 1, 0, −1) and recessive (with contrast coefficients 1, 1, −2). Odds ratios for minor versus major alleles, and odds ratios for heterozygote and homozygote variants versus the wild type genotypes are calculated with the desired confidence limits, usually 95%.

[0205] In order to control for confounders and to test for interaction and effect modifiers, stratified analyses may be performed using stratified factors that are likely to be confounding, including demographic information such as age, ethnicity, and gender, or an interacting element or effect modifier, such as a known major gene (e.g., APOE for Alzheimer's disease or HLA genes for autoimmune diseases), or environmental factors such as smoking in lung cancer. Stratified association tests may be carried out using Cochran-Mantel-Haenszel tests that take into account the ordinal nature of genotypes with 0, 1, and 2 variant alleles. Exact tests by StatXact may also be performed when computationally possible. Another way to adjust for confounding effects and test for interactions is to perform stepwise multiple logistic regression analysis using statistical packages such as SAS or R. Logistic regression is a model-building technique in which the best fitting and most parsimonious model is built to describe the relation between the dichotomous outcome (for instance, getting a certain disease or not) and a set of independent variables (for instance, genotypes of different associated genes, and the associated demographic and environmental factors). The most common model is one in which the logit transformation of the odds ratios is expressed as a linear combination of the variables (main effects) and their cross-product terms (interactions) (Applied Logistic Regression, Hosmer and Lemeshow, Wiley (2000)). To test whether a certain variable or interaction is significantly associated with the outcome, coefficients in the model are first estimated and then tested for statistical significance of their departure from zero.

[0206] In addition to performing association tests one marker at a time, haplotype association analysis may also be performed to study a number of markers that are closely linked together. Haplotype association tests can have better power than genotypic or allelic association tests when the tested markers are not the disease-causing mutations themselves but are in linkage disequilibrium with such mutations. The test will even be more powerful if the disease is indeed caused by a combination of alleles on a haplotype (e.g., APOE is a haplotype formed by 2 SNPs that are very close to each other). In order to perform haplotype association effectively, marker-marker linkage disequilibrium measures, both D′ and R², are typically calculated for the markers within a gene to elucidate the haplotype structure. Recent studies (Daly et al, Nature Genetics, 29, 232-235, 2001) in linkage disequilibrium indicate that SNPs within a gene are organized in block pattern, and a high degree of linkage disequilibrium exists within blocks and very little linkage disequilibrium exists between blocks. Haplotype association with the disease status can be performed using such blocks once they have been elucidated.

[0207] Haplotype association tests can be carried out in a similar fashion as the allelic and genotypic association tests. Each haplotype in a gene is analogous to an allele in a multi-allelic marker. One skilled in the art can either compare the haplotype frequencies in cases and controls or test genetic association with different pairs of haplotypes. It has been proposed (Schaid et al, Am. J. Hum. Genet., 70, 425-434, 2002) that score test can be done on haplotypes using the program “haplo.score”. In that method, haplotypes are first inferred by EM algorithm and score tests are carried out with a generalized linear model (GLM) framework that allows the adjustment of other factors.

[0208] An important decision in the performance of genetic association tests is the determination of the significance level at which significant association can be declared when the p-value of the tests reaches that level. In an exploratory analysis where positive hits will be followed up in subsequent confirmatory testing, an unadjusted p-value <0.2 (a significance level on the lenient side), for example, may be used for generating hypotheses for significant association of a SNP with certain phenotypic characteristics of a disease. It is preferred that a p-value <0.05 (a significance level traditionally used in the art) is achieved in order for a SNP to be considered to have an association with a disease. It is more preferred that a p-value <0.0 1 (a significance level on the stringent side) is achieved for an association to be declared. When hits are followed up in confirmatory analyses in more samples of the same source or in different samples from different sources, adjustment for multiple testing will be performed as to avoid excess number of hits while maintaining the experiment-wise error rates at 0.05. While there are different methods to adjust for multiple testing to control for different kinds of error rates, a commonly used but rather conservative method is Bonferroni correction to control the experiment-wise or family-wise error rate (Multiple comparisons and multiple tests, Westfall et al, SAS Institute (1999)). Permutation tests to control for the false discovery rates, FDR, can be more powerful (Benjamini and Hochberg, Journal of the Royal. Statistical Society, Series B 57, 1289-1300, 1995, Resampling-based Multiple Testing, Westfall and Young, Wiley (1993)). Such methods to control for multiplicity would be preferred when the tests are dependent and controlling for false discovery rates is sufficient as opposed to controlling for the experiment-wise error rates.

[0209] In replication studies using samples from different populations after statistically significant markers have been identified in the exploratory stage, meta-analyses can then be performed by combining evidence of different studies (Modern Epidemiology, Lippincott Williams & Wilkins, 1998, 643-673). If available, association results known in the art for the same SNPs can be included in the meta-analyses.

[0210] Since both genotyping and disease status classification can involve errors, sensitivity analyses may be performed to see how odds ratios and p-values would change upon various estimates on genotyping and disease classification error rates.

[0211] It has been well known that subpopulation-based sampling bias between cases and controls can lead to spurious results in case-control association studies (Ewens and Spielman, Am. J. Hum. Genet. 62, 450-458, 1995) when prevalence of the disease is associated with different subpopulation groups. Such bias can also lead to a loss of statistical power in genetic association studies. To detect population stratification, Pritchard and Rosenberg (Pritchard et al. Am. J Hum. Gen. 1999, 65:220-228) suggested typing markers that are unlinked to the disease and using results of association tests on those markers to determine whether there is any population stratification. When stratification is detected, the genomic control (GC) method as proposed by Devlin and Roeder (Devlin et al. Biometrics 1999, 55:997-1004) can be used to adjust for the inflation of test statistics due to population stratification. GC method is robust to changes in population structure levels as well as being applicable to DNA pooling designs (Devlin, et al. Genet. Epidem. 20001, 21:273-284).

[0212] While Pritchard's method recommended using 15-20 unlinked microsatellite markers, it suggested using more than 30 biallelic markers to get enough power to detect population stratification. For the GC method, it has been shown (Bacanu et al. Am. J. Hum. Genet. 2000, 66:1933-1944) that about 60-70 biallelic markers are sufficient to estimate the inflation factor for the test statistics due to population stratification. Hence, 70 intergenic SNPs can be chosen in unlinked regions as indicated in a genome scan (Kehoe et al. Hum. Mol. Genet. 1999, 8:237-245).

[0213] Once individual risk factors, genetic or non-genetic, have been found for the predisposition to disease, the next step is to set up a classification/prediction scheme to predict the category (for instance, disease or no-disease) that an individual will be in depending on his genotypes of associated SNPs and other non-genetic risk factors. Logistic regression for discrete trait and linear regression for continuous trait are standard techniques for such tasks (Applied Regression Analysis, Draper and Smith, Wiley (1998)). Moreover, other techniques can also be used for setting up classification. Such techniques include, but are not limited to, MART, CART, neural network, and discriminant analyses that are suitable for use in comparing the performance of different methods (The Elements of Statistical Learning, Hastie, Tibshirani & Friedman, Springer (2002)).

[0214] Disease Diagnosis and Predisposition Screening

[0215] Information on association/correlation between genotypes and disease-related phenotypes can be exploited in several ways. For example, in the case of a highly statistically significant association between one or more SNPs with predisposition to a disease for which treatment is available, detection of such a genotype pattern in an individual may justify immediate administration of treatment, or at least the institution of regular monitoring of the individual. Detection of the susceptibility alleles associated with serious disease in a couple contemplating having children may also be valuable to the couple in their reproductive decisions. In the case of a weaker but still statistically significant association between a SNP and a human disease, immediate therapeutic intervention or monitoring may not be justified after detecting the susceptibility allele or SNP. Nevertheless, the subject can be motivated to begin simple life-style changes (e.g., diet, exercise) that can be accomplished at little or no cost to the individual but would confer potential benefits in reducing the risk of developing conditions for which that individual may have an increased risk by virtue of having the susceptibility allele(s).

[0216] The SNPs of the invention may contribute to coronary stenosis in an individual in different ways. Some polymorphisms occur within a protein coding sequence and contribute to disease phenotype by affecting protein structure. Other polymorphisms occur in noncoding regions but may exert phenotypic effects indirectly via influence on, for example, replication, transcription, and/or translation. A single SNP may affect more than one phenotypic trait. Likewise, a single phenotypic trait may be affected by multiple SNPs in different genes.

[0217] As used herein, the terms “diagnose”, “diagnosis”, and “diagnostics” include, but are not limited to any of the following: detection of coronary stenosis that an individual may presently have, predisposition/susceptibility screening (i.e., determining the increased risk of an individual in developing coronary stenosis in the future, or determining whether an individual has a decreased risk of developing coronary stenosis in the future), determining a particular type or subclass of coronary stenosis in an individual known to have coronary stenosis, confirming or reinforcing a previously made diagnosis of stenosis, pharmacogenomic evaluation of an individual to determine which therapeutic strategy that individual is most likely to positively respond to or to predict whether a patient is likely to respond to a particular treatment, predicting whether a patient is likely to experience toxic effects from a particular treatment or therapeutic compound, and evaluating the future prognosis of an individual having coronary stenosis. Such diagnostic uses are based on the SNPs individually or in a unique combination or SNP haplotypes of the present invention.

[0218] Haplotypes are particularly useful in that, for example, fewer SNPs can be genotyped to determine if a particular genomic region harbors a locus that influences a particular phenotype, such as in linkage disequilibrium-based SNP association analysis.

[0219] Linkage disequilibrium (LD) refers to the co-inheritance of alleles (e.g., alternative nucleotides) at two or more different SNP sites at frequencies greater than would be expected from the separate frequencies of occurrence of each allele in a given population. The expected frequency of co-occurrence of two alleles that are inherited independently is the frequency of the first allele multiplied by the frequency of the second allele. Alleles that co-occur at expected frequencies are said to be in “linkage equilibrium”. In contrast, LD refers to any non-random genetic association between allele(s) at two or more different SNP sites, which is generally due to the physical proximity of the two loci along a chromosome. LD can occur when two or more SNPs sites are in close physical proximity to each other on a given chromosome and therefore alleles at these SNP sites will tend to remain unseparated for multiple generations with the consequence that a particular nucleotide (allele) at one SNP site will show a non-random association with a particular nucleotide (allele) at a different SNP-site located nearby. Hence, genotyping one of the SNP sites will give almost the same information as genotyping the other SNP site that is in LD.

[0220] Various degrees of LD can be encountered between two or more SNPs with the result being that some SNPs are more closely associated (i.e., in stronger LD) than others. Furthermore, the physical distance over which LD extends along a chromosome differs between different regions of the genome, and therefore the degree of physical separation between two or more SNP sites necessary for LD to occur can differ between different regions of the genome.

[0221] For diagnostic purposes and similar uses, if a particular SNP site is found to be useful for diagnosing coronary stenosis (e.g., has a significant statistical association with the condition and/or is recognized as a causative polymorphism for the condition), then the skilled artisan would recognize that other SNP sites which are in LD with this SNP site would also be useful for diagnosing the condition. Thus, polymorphisms (e.g., SNPs and/or haplotypes) that are not the actual disease-causing (causative) polymorphisms, but are in LD with such causative polymorphisms, are also useful. In such instances, the genotype of the polymorphism(s) that is/are in LD with the causative polymorphism is, predictive of the genotype of the causative polymorphism and, consequently, predictive of the phenotype (e.g., coronary stenosis) that is influenced by the causative SNP(s). Therefore, polymorphic markers that are in LD with causative polymorphisms are useful as diagnostic markers, and are particularly useful when the actual causative polymorphism(s) is/are unknown.

[0222] Examples of polymorphisms that can be in LD with one or more causative polymorphisms (and/or in LD with one or more polymorphisms that have a significant statistical association with a condition) and therefore useful for diagnosing the same condition that the causative/associated SNP(s) is used to diagnose, include, for example, other SNPs in the same gene, protein-coding, or mRNA transcript-coding region as the causative/associated SNP, other SNPs in the same exon or same intron as the causative/associated SNP, other SNPs in the same haplotype block as the causative/associated SNP, other SNPs in the same intergenic region as the causative/associated SNP, SNPs that are outside but near a gene (e.g., within 6 kb on either side, 5′ or 3′, of a gene boundary) that harbors a causative/associated SNP, etc. Such useful LD SNPs can be selected from among the SNPs disclosed in Tables 1-2, for example.

[0223] Linkage disequilibrium in the human genome is reviewed in: Wall et. al., “Haplotype blocks and linkage disequilibrium in the human genome”, Nat Rev Genet. August 2003;4(8):587-97; Garner et al., “On selecting markers for association studies: patterns of linkage disequilibrium between two and three diallelic loci”, Genet Epidemiol. January 2003;24(1):57-67; Ardlie et al., “Patterns of linkage disequilibrium in the human genome”, Nat Rev Genet. April 2002;3(4):299-309 (erratum in Nat Rev Genet July 2002; 3(7):566); and Remm et al., “High-density genotyping and linkage disequilibrium in the human genome using chromosome 22 as a model”; Curr Opin Chem Biol. February 2002; 6(1):24-30.

[0224] The contribution or association of particular SNP and/or SNP haplotype with disease phenotypes, such as coronary stenosis, enables the SNPs of the present invention to be used to develop superior diagnostic tests capable of identifying individuals who express a detectable trait, such as coronary stenosis, as the result of a specific genotype, or individuals whose genotype places them at an increased or decreased risk of developing a detectable trait at a subsequent time as compared to individuals who do not have that genotype. As described herein, diagnostics may be based on a single SNP or a group of SNPs. Combined detection of a plurality of SNPs (for example, 2, 3, 4, 5, 6, 7, 8, 9, 10, 11, 12, 13, 14, 15, 16, 17, 18, 19, 20, 24, 25, 30, 32, 48, 50, 64, 96, 100, or any other number in-between, or more, of the SNPs provided in Table 1 and/or Table 2) typically increases the probability of an accurate diagnosis. For example, the presence of a single SNP known to correlate with coronary stenosis might indicate a probability of 20% that an individual has or is at risk of developing coronary stenosis, whereas detection of five SNPs, each of which correlates with coronary stenosis, might indicate a probability of 80% that an individual has or is at risk of developing coronary stenosis. To further increase the accuracy of diagnosis or predisposition screening, analysis of the SNPs of the present invention can be combined with that of other polymorphisms or other risk factors of coronary stenosis, such as disease symptoms, pathological characteristics, family history, diet, environmental factors or lifestyle factors.

[0225] It will, of course, be understood by practitioners skilled in the treatment or diagnosis of coronary stenosis that the present invention generally does not intend to provide an absolute identification of individuals who are at risk (or less at risk) of developing coronary stenosis, and/or pathologies related to coronary stenosis, but rather to indicate a certain increased (or decreased) degree or likelihood of developing the disease based on statistically significant association results. However, this information is extremely valuable as it can be used to, for example, initiate preventive treatments or to allow an individual carrying one or more significant SNPs or SNP haplotypes to foresee warning signs such as minor clinical symptoms, or to have regularly scheduled physical exams to monitor for appearance of a condition in order to identify and begin treatment of the condition at an early stage. Particularly with diseases that are extremely debilitating or fatal if not treated on time, the knowledge of a potential predisposition, manner to treatment efficacy.

[0226] The diagnostic techniques of the present invention may employ a variety of methodologies to determine whether a test subject has a SNP or a SNP pattern associated with an increased or decreased risk of developing a detectable trait or whether the individual suffers from a detectable trait as a result of a particular polymorphism/mutation, including, for example, methods which enable the analysis of individual chromosomes for haplotyping, family studies, single sperm DNA analysis, or somatic hybrids. The trait analyzed using the diagnostics of the invention may be any detectable trait that is commonly observed in pathologies and disorders related to coronary stenosis.

[0227] Another aspect of the present invention relates to a method of determining whether an individual is at risk (or less at risk) of developing one or more traits or whether an individual expresses one or more traits as a consequence of possessing a particular trait-causing or trait-influencing allele. These methods generally involve obtaining a nucleic acid sample from an individual and assaying the nucleic acid sample to determine which nucleotide(s) is/are present at one or more SNP positions, wherein the assayed nucleotide(s) is/are indicative of an increased or decreased risk of developing the trait or indicative that the individual expresses the trait as a result of possessing a particular trait-causing or trait-influencing allele.

[0228] In another embodiment, the SNP detection reagents of the present invention are used to determine whether an individual has one or more SNP allele(s) affecting the level (e.g., the concentration of mRNA or protein in a sample, etc.) or pattern (e.g., the kinetics of expression, rate of decomposition, stability profile, Km, Vmax, etc.) of gene expression (collectively, the “gene response” of a cell or bodily fluid). Such a determination can be accomplished by screening for mRNA or protein expression (e.g., by using nucleic acid arrays, RT-PCR, TaqMan assays, or mass spectrometry), identifying genes having altered expression in an individual, genotyping SNPs disclosed in Table 1 and/or Table 2 that could affect the expression of the genes having altered expression (e.g., SNPs that are in and/or around the gene(s) having altered expression, SNPs in regulatory/control regions, SNPs in and/or around other genes that are involved in pathway that could affect the expression of the gene(s) having altered expression, or all SNPs could be genotyped), and correlating SNP genotypes with altered gene expression. In this manner, specific SNP alleles at particular SNP sites can be identified that affect gene expression.

[0229] Pharmacogenomics and Therapeutics/Drug Development

[0230] The present invention provides methods for assessing the pharmacogenomics of a subject harboring particular SNP alleles or haplotypes to a particular therapeutic agent or pharmaceutical compound, or to a class of such compounds. Pharmacogenomics deals with the roles which clinically significant hereditary variations (e.g., SNPs) play in the response to drugs due to altered drug disposition and/or abnormal action in affected persons. See, e.g., Roses, Nature 405, 857-865 (2000); Gould Rothberg, Nature Biotechnology 19, 209-211 (2001); Eichelbaum, Clin. Exp. Pharmacol. Physiol. 23(10-11):983-985 (1996); and Linder, Clin. Chem. 43(2):254-266 (1997). The clinical outcomes of these variations can result in severe toxicity of therapeutic drugs in certain individuals or therapeutic failure of drugs in certain individuals as a result of individual variation in metabolism. Thus, the SNP genotype of an individual can determine the way a therapeutic compound acts on the body or the way the body metabolizes the compound for example, SNPs in drug metabolizing enzymes can affect the activity of these enzymes, which in turn can affect both the intensity and duration of drug action, as well as drug metabolism and clearance.

[0231] The discovery of SNPs in drug metabolizing enzymes, drug transporters, proteins for pharmaceutical agents, and other drug targets has explained why some patients do not obtain the expected drug effects, show an exaggerated drug effect, or experience serious toxicity from standard drug dosages. SNPs can be expressed in the phenotype of the extensive metabolizer and in the phenotype of the poor metabolizer. Accordingly, SNPs may lead to allelic variants of a protein in which one or more of the protein functions in one population are different from those in another population. SNPs and the encoded variant peptides thus provide targets to ascertain a genetic predisposition that can affect treatment modality. For example, in a ligand-based treatment, SNPs may give rise to amino terminal extracellular domains and/or other ligand-binding regions of a receptor that are more or less active in ligand binding, thereby affecting subsequent protein activation. Accordingly, ligand dosage would necessarily be modified to maximize the therapeutic effect within a given population containing particular SNP alleles or haplotypes.

[0232] As an alternative to genotyping, specific variant proteins containing variant amino acid sequences encoded by alternative SNP alleles could be identified. Thus, pharmacogenomic characterization of an individual permits the selection of effective compounds and effective dosages of such compounds for prophylactic or therapeutic uses based on the individual's SNP genotype, thereby enhancing and optimizing the effectiveness of the therapy. Furthermore, the production of recombinant cells and transgenic animals containing particular SNPs/haplotypes allow effective clinical design and testing of treatment compounds and dosage regimens. For example, transgenic animals can be produced that differ only in specific SNP alleles in a gene that is orthologous to a human disease susceptibility gene.

[0233] Pharmacogenomic uses of the SNPs of the present invention provide several significant advantages for patient care, particularly in treating coronary stenosis. Pharmacogenomic characterization of an individual, based on an individual's SNP genotype, can identify those individuals unlikely to respond to treatment with a particular medication and thereby allows physicians to avoid prescribing the ineffective medication to those individuals. On the other hand, SNP genotyping of an individual may enable physicians to select the appropriate medication and dosage regimen that will be most effective based on an individual's SNP genotype. This information increases a physician's confidence in prescribing medications and motivates patients to comply with their drug regimens. Furthermore, pharmacogenomics may identify patients predisposed to toxicity and adverse reactions to particular drugs or drug dosages. Adverse drug reactions lead to more than 100,000 avoidable deaths per year in the United States alone and therefore represent a significant cause of hospitalization and death, as well as a significant economic burden on the healthcare system (Pfost et. al., Trends in Biotechnology, August 2000.). Thus, pharmacogenomics based on the SNPs disclosed herein has the potential to both save lives and reduce healthcare costs substantially.

[0234] Pharmacogenomics in general is discussed further in Rose et al., “Pharmacogenetic analysis of clinically relevant genetic polymorphisms”, Methods Mol. Med. 2003;85:225-37. Pharmacogenomics as it relates to Alzheimer's disease and other neurodegenerative disorders is discussed in Cacbelos, “Pharmacogenomics for the treatment of dementia”, Ann Med. 2002;34(5):357-79, Maimone et al., “Pharmacogenomics of neurodegenerative diseases”, Eur J Pharmacol. Feb. 9, 2001;413(1):11-29, and Poirier, “Apolipoprotein E: a pharmacogenetic target for the treatment of Alzheimer's disease”, Mol Diagn. December 1999;4(4):335-41. Pharmacogenomics as it relates to cardiovascular disorders is discussed in Siest et al., “Pharmacogenomics of drugs affecting the cardiovascular system”, Clin Chem Lab Med. April 2003;41(4):590-9, Mukheijee et al., “Pharmacogenomics in cardiovascular diseases”, Prog Cardiovasc Dis. May-June 2002;44(6):479-98, and Mooser et al., “Cardiovascular pharmacogenetic in the SNP era”, J Thromb Haemost. July 2003; 1(7):1398-402. Pharmacogenomics as it relates to cancer is discussed in McLeod et al., “Cancer pharmacogenomics: SNPs, chips, and the individual patient”, Cancer Invest. 2003;21(4):630-40 and Watters et al., “Cancer pharmacogenomics: current and future applications”, Biochim Biophys Acta. Mar. 17, 2003;1603(2):99-111.

[0235] The SNPs of the present invention also can be used to identify novel therapeutic targets for coronary stenosis. For example, genes containing the disease-associated variants (“variant genes”) or their products, as well as genes or their products that are directly or indirectly regulated by or interacting with these variant genes or their products, can be targeted for the development of therapeutics that, for example, treat the disease or prevent or delay disease onset. The therapeutics may be composed of, for example, small molecules, proteins, protein fragments or peptides, antibodies, nucleic acids, or their derivatives or mimetics which modulate the functions or levels of the target genes or gene products.

[0236] The SNP-containing nucleic acid molecules disclosed herein, and their complementary nucleic acid molecules, may be used as antisense constructs to control gene expression in cells, tissues, and organisms. Antisense technology is well established in the art and extensively reviewed in Antisense Drug Technology: Principles, Strategies, and Applications, Crooke (ed.), Marcel Dekker, Inc.: New York (2001). An antisense nucleic acid molecule is generally designed to be complementary to a region of mRNA expressed by a gene so that the antisense molecule hybridizes to the mRNA and thereby blocks translation of mRNA into protein. Various classes of antisense oligonucleotides are used in the art, two of which are cleavers and blockers. Cleavers by binding to target RNAs, activate intracellular nucleases (e.g., RNaseH or RNase L) that cleave the target RNA. Blockers, which also bind to target RNAs, inhibit protein translation through steric hindrance of ribosomes. Exemplary blockers include peptide nucleic acids, morpholinos, locked nucleic acids, and methylphosphonates (see, e.g., Thompson, Drug Discovery Today, 7 (17): 912-917 (2002)). Antisense oligonucleotides are directly useful as therapeutic agents, and are also useful for determining and validating gene function (e.g., in gene knock-out or knock-down experiments).

[0237] Antisense technology is further reviewed in: Lavery et al., “Antisense and RNAi: powerful tools in drug target discovery and validation”, Curr Opin Drug Discov Devel. July 2003;6(4):561-9; Stephens et al., “Antisense oligonucleotide therapy in cancer”, Curr Opin Mol Ther. April 2003;5(2):118-22; Kurreck, “Antisense technologies. Improvement through novel chemical modifications”, Eur J Biochem. April 2003;270(8):1628-44; Dias et al., “Antisense oligonucleotides: basic concepts and mechanisms”, Mol Cancer Ther. March 2002;1(5):347-55; Chen, “Clinical development of antisense oligonucleotides as anti-cancer therapeutics”, Methods Mol Med. 2003;75:621-36; Wang et al., “Antisense anticancer oligonucleotide therapeutics”, Curr Cancer Drug Targets. November 2001;1(3):177-96; and Bennett, “Efficiency of antisense oligonucleotide drug discovery”, Antisense Nucleic Acid Drug Dev. June 2002;12(3):215-24.

[0238] The SNPs of the present invention are particularly useful for designing antisense reagents that are specific for particular nucleic acid variants. Based on the SNP information disclosed herein, antisense oligonucleotides can be produced that specifically target mRNA molecules that contain one or more particular SNP nucleotides. In this manner, expression of mRNA molecules that contain one or more undesired polymorphisms (e.g., SNP nucleotides that lead to a defective protein such as an amino acid substitution in a catalytic domain) can be inhibited or completely blocked. Thus, antisense oligonucleotides can be used to specifically bind a particular polymorphic form (e.g., a SNP allele that encodes a defective protein), thereby inhibiting translation of this form, but which do not bind an alternative polymorphic form (e.g., an alternative SNP nucleotide that encodes a protein having normal function).

[0239] Antisense molecules can be used to inactivate mRNA in order to inhibit gene expression and production of defective proteins. Accordingly, these molecules ran be used to treat a disorder, such as coronary stenosis, characterized by abnormal or undesired gene expression or expression of certain defective proteins. This technique can involve cleavage by means of ribozymes containing nucleotide sequences complementary to one or more regions in the mRNA that attenuate the ability of the mRNA to be translated. Possible mRNA regions include, for example, protein-coding regions and particularly protein-coding regions corresponding to catalytic activities, substrate/ligand binding, or other functional activities of a protein.

[0240] The SNPs of the present invention are also useful for designing RNA interference reagents that specifically target nucleic acid molecules having particular SNP variants. RNA interference (RNAi), also referred to as gene silencing, is based on using double-stranded RNA (dsRNA) molecules to turn genes off. When introduced into a cell, dsRNAs are processed by the cell into short fragments (generally about 21, 22, or 23 nucleotides in length) known as small interfering RNAs (siRNAs) which the cell uses in a sequence-specific manner to recognize and destroy complementary RNAs (Thompson, Drug Discovery Today, 7 (17): 912-917 (2002)). Accordingly, an aspect of the present invention specifically contemplates isolated nucleic acid molecules that are about 18-26 nucleotides in length, preferably 19-25 nucleotides in length, and more preferably 20, 21, 22, or 23 nucleotides in length, and the use of these nucleic acid molecules for RNAi. Because RNAi molecules, including siRNAs, act in a sequence-specific manner, the SNPs of the present invention can be used to design RNAi reagents that recognize and destroy nucleic acid molecules having specific SNP alleles/nucleotides (such as deleterious alleles that lead to the production of defective proteins), while not affecting nucleic acid molecules having alternative SNP alleles (such as alleles that encode proteins having normal function). As with antisense reagents, RNAi reagents may be directly useful as therapeutic agents (e.g., for turning off defective, disease-causing genes), and are also useful for characterizing and validating gene function (e.g., in gene knock-out-or knock-down experiments).

[0241] The following references provide a further review of RNAi: Reynolds et al., “Rational siRNA design for RNA interference”, Nat Biotechnol. March 2004;22(3):326-30. Epub Feb. 1, 2004; Chi et al., “Genomewide view of gene silencing by small interfering RNAs”,PNAS 100(11):6343-6346, 2003; Vickers et al., “Efficient Reduction of Target RNAs by Small Interfering RNA and RNase H-dependent Antisense Agents”, J. Biol. Chem. 278: 7108-7118, 2003; Agami, “RNAi and related mechanisms and their potential use for therapy”, Curr Opin Chem Biol. December 2002;6(6):829-34; Lavery et al., “Antisense and RNAi: powerful tools in drug target discovery and validation”, Curr Opin Drug Discov Devel. July 2003;6(4):561-9; Shi, “Mammalian RNAi for the masses”, Trends Genet January 2003;19(1):9-12), Shuey et al., “RNAi: gene-silencing in therapeutic intervention”, Drug Discovery Today October 2002;7(20):1040-1046; McManus et al., Nat Rev Genet October 2002;3(10):737-47; Xia et al., Nat Biotechnol October 2002;20(10):1006-10; Plasterk et al., Curr Opin Genet Dev October 2000;10(5):562-7; Bosher et al., Nat Cell Biol February 2000;2(2):E31-6; and Hunter, Curr Biol Jun. 17, 1999;9(12):R440-2). :

[0242] A subject suffering from a pathological condition, such as coronary stenosis, ascribed to a SNP may be treated so as to correct the genetic defect (see Kren et al., Proc. Natl. Acad. Sci. USA 96:10349-10354 (1999)). Such a subject can be identified by any method that can detect the polymorphism in a biological sample drawn from the subject. Such a genetic defect may be permanently corrected by administering to such a subject a nucleic acid fragment incorporating a repair sequence that supplies the normal/wild-type nucleotide at the position of the SNP. This site-specific repair sequence can encompass an RNA/DNA oligonucleotide that operates to promote endogenous repair of a subject's genomic DNA. The site-specific repair sequence is administered in an appropriate vehicle, such as a complex with polyethylenimine, encapsulated in anionic liposomes, a viral vector such as an adenovirus, or other pharmaceutical composition that promotes intracellular uptake of the administered nucleic acid. A genetic defect leading to an inborn pathology may then be overcome, as the chimeric oligonucleotides induce incorporation of the normal sequence into the subject's genome. Upon incorporation, the normal gene product is expressed, and the replacement is propagated, thereby engendering a permanent repair and therapeutic enhancement of the clinical condition of the subject.

[0243] In cases in which a cSNP results in a variant protein that is ascribed to be the cause of, or a contributing factor to, a pathological condition, a method of treating such a condition can include administering to a subject experiencing the pathology the wild-type/normal cognate of the variant protein. Once administered in an effective dosing regimen, the wild-type cognate provides complementation or remediation of the pathological condition.

[0244] The invention further provides a method for identifying a compound or agent that can be used to treat coronary stenosis. The SNPs disclosed herein are useful as targets for the identification and/or development of therapeutic agents. A method for identifying a therapeutic agent or compound typically includes assaying the ability of the agent or compound to modulate the activity and/or expression of a SNP-containing nucleic acid or the encoded product and thus identifying an agent or a compound that can be used to treat a disorder characterized by undesired activity or expression of the SNP-containing nucleic acid or the encoded product. The assays can be performed in cell-based and cell-free systems. Cell-based assays can include cells naturally expressing the nucleic acid molecules of interest or recombinant cells genetically engineered to express certain nucleic acid molecules.

[0245] Variant gene expression in a coronary stenosis patient can include, for example, either expression of a SNP-containing nucleic acid sequence (for instance, a gene that contains a SNP can be transcribed into an mRNA transcript molecule containing the SNP, which can in turn be translated into a variant protein) or altered expression of a normal/wild-type nucleic acid sequence due to one or more SNPs (for instance, a regulatory/control region can contain a SNP that affects the level or pattern of expression of a normal transcript).

[0246] Assays for variant gene expression can involve direct assays of nucleic acid levels (e.g., mRNA levels), expressed protein levels, or of collateral compounds involved in a signal pathway. Further, the expression of genes that are up- or down-regulated in response to the signal pathway can also be assayed. In this embodiment, the regulatory regions of these genes can be operably linked to a reporter gene such as luciferase.

[0247] Modulators of variant gene expression can be identified in a method wherein, for example, a cell is contacted with a candidate compound/agent and the expression of mRNA determined. The level of expression of mRNA in the presence of the candidate compound is compared to the level of expression of mRNA in the absence of the candidate compound. The candidate compound can then be identified as a modulator of variant gene expression based on this comparison and be used to treat a disorder such as that is coronary stenosis caracterized by variant gene expression (e.g., either expression of a SNP-containing nucleic acid or altered expression of a normal/wild-type nucleic acid molecule due to one or more SNPs that affect expression of the nucleic acid molecule) due to one or more SNPs of the present invention. When expression of mRNA is statistically significantly greater in the presence of the candidate compound than in its absence, the candidate compound is identified as a stimulator of nucleic acid expression. When nucleic acid expression is statistically significantly less in the presence of the candidate compound than in its absence, the candidate compound is identified as an inhibitor of nucleic acid expression.

[0248] The invention further provides methods of treatment, with the SNP or associated nucleic acid domain (e.g., catalytic domain, ligand/substrate-binding domain, regulatory/control region, etc.) or gene, or the encoded mRNA transcript, as a target, using a compound identified through drug screening as a gene modulator to modulate variant nucleic acid expression. Modulation can include either up-regulation (i.e., activation or agonization) or down-regulation (i.e., suppression or antagonization) of nucleic acid expression.

[0249] Expression of mRNA transcripts and encoded proteins, either wild type or variant, may be altered in individuals with a particular SNP allele in a regulatory/control element, such as a promoter or transcription factor binding domain, that regulates expression. In this situation, methods of treatment and compounds can be identified, as discussed herein, that regulate or overcome the variant regulatory/control element, thereby generating normal, or healthy, expression levels of either the wild type or variant protein.

[0250] The SNP-containing nucleic acid molecules of the present invention are also useful for monitoring the effectiveness of modulating compounds on the expression or activity of a variant gene, or encoded product, in clinical trials or in a treatment regimen. Thus, the gene expression pattern can serve as an indicator for the continuing effectiveness of treatment with the compound, particularly with compounds to which a patient can develop resistance, as well as an indicator for toxicities. The gene expression pattern can also serve as a marker indicative of a physiological response of the affected cells to the compound. Accordingly, such monitoring would allow either increased administration of the compound or the administration of alternative compounds to which the patient has not become resistant. Similarly, if the level of nucleic acid expression falls below a desirable level, administration of the compound could be commensurately decreased.

[0251] In another aspect of the present invention, there is provided a pharmaceutical pack comprising a therapeutic agent (e.g., a small molecule drug, antibody, peptide, antisense or RNAi nucleic acid molecule, etc.) and a set of instructions for administration of the therapeutic agent to humans diagnostically tested for one or more SNPs or SNP haplotypes provided by the present invention.

[0252] The SNPs/haplotypes of the present invention are also useful for improving many different aspects of the drug development process. For instance, an aspect of the present invention includes selecting individuals for clinical trials based on their SNP genotype. For example, individuals with SNP genotypes that indicate that they are likely to positively respond to a drug can be included in the trials, whereas those individuals whose SNP genotypes indicate that they are less likely to or would not respond to the drug, or who are at risk for suffering toxic effects or other adverse reactions, can be excluded from the clinical trials. This not only can improve the safety of clinical trials, but also can enhance the chances that the trial will demonstrate statistically significant efficacy. Furthermore, the SNPs of the present invention may explain why certain previously developed drugs performed poorly in clinical trials and may help identify a, subset of the population that would benefit from a drug that had previously performed poorly in clinical trials, thereby “rescuing” previously developed drugs, and enabling the drug to be made available to a particular coronary stenosis patient population that can benefit from it.

[0253] SNPs have many important uses in drug discovery, screening, and development. A high probability exists that, for any gene/protein selected as a potential drug target, variants of that gene/protein will exist in a patient population. Thus, determining the impact of gene/protein variants on the selection and delivery of a therapeutic agent should be an integral aspect of the drug discovery and development process. (Jazwinska, A Trends Guide to Genetic Variation and Genomic Medicine, March 2002; S30-S36).

[0254] Knowledge of variants (e.g., SNPs and any, corresponding amino acid polymorphisms) of a particular therapeutic target (e.g., a gene, mRNA transcript, or protein) enables parallel screening of the variants in order to identify therapeutic candidates (e.g., small molecule compounds, antibodies, antisense or RNAi nucleic acid compounds, etc.) that demonstrate efficacy across variants (Rothberg, Nat Biotechnol March 2001;19(3):209-1 1). Such therapeutic candidates would be expected to show equal efficacy across a larger segment of the patient population, thereby leading to a larger potential market for the therapeutic candidate.

[0255] Furthermore, identifying variants of a potential therapeutic target enables the most common form of the target to be used for selection of therapeutic candidates, thereby helping to ensure that the experimental activity that is observed for the selected candidates reflects the real activity expected in the largest proportion of a patient population (Jazwinska, A Trends Guide to Genetic Variation and Genomic Medicine, March 2002; S30-S36).

[0256] Additionally, screening therapeutic candidates against all known variants of a target can enable the early identification of potential toxicities and adverse reactions relating to particular variants. For example, variability in drug absorption, distribution, metabolism and excretion (ADME) caused by, for example, SNPs in therapeutic targets or drug metabolizing genes, can be identified, and this information can be utilized during the drug development process to minimize variability in drug disposition and develop therapeutic agents that are safer across a wider range of a patient population. The SNPs of the present invention, including the variant proteins and encoding polymorphic nucleic acid molecules provided in Tables 1-2, are useful in conjunction with a variety of toxicology methods established in the art, such as those set forth in Current Protocols in Toxicology, John Wiley & Sons, Inc., N.Y.

[0257] Furthermore, therapeutic agents that target any art-known proteins (or nucleic acid molecules, either RNA or DNA) may cross-react with the variant proteins (or polymorphic nucleic acid molecules) disclosed in Table 1, thereby significantly affecting the pharmacokinetic properties of the drug. Consequently, the protein variants and the SNP-containing nucleic acid molecules disclosed in Tables 1-2 are useful in developing, screening, and evaluating therapeutic agents that target corresponding art-known protein forms (or nucleic acid molecules). Additionally, as discussed above, knowledge of all polymorphic forms of a particular drug target enables the design of therapeutic agents, that are effective against most or all such polymorphic forms of the drug target.

[0258] Pharmaceutical Compositions and Administration thereof

[0259] Any of the coronary stenosis-associated proteins, and encoding nucleic acid molecules, disclosed herein can be used as therapeutic targets (or directly used themselves as therapeutic compounds) for treating coronary stenosis and related pathologies, and the present disclosure enables therapeutic compounds (e.g., small molecules, antibodies,: therapeutic proteins, RNAi and antisense molecules, etc.) to be developed that target (or are comprised of) any of these therapeutic targets.

[0260] In general, a therapeutic compound will be administered in a therapeutically, effective amount by any of the accepted modes of administration for agents that serve similar utilities. The actual amount of the therapeutic compound of this invention, i.e., the active ingredient, will depend upon numerous factors such as the severity of the disease to be treated, the age and relative health of the subject, the potency of the compound used, the route and form of administration, and other factors.

[0261] Therapeutically effective amounts of therapeutic compounds may range from, for example, approximately 0.01-50 mg per kilogram body weight of the recipient per day; preferably about 0.1-20 mg/kg/day. Thus, as an example, for administration to a 70 kg person, the dosage range would most preferably be about 7 mg to 1.4 g per day.

[0262] In general, therapeutic compounds will be administered as pharmaceutical compositions by any one of the following routes: oral, systemic (e.g., transdermal, intranasal, or by suppository), or parenteral (e.g., intramuscular, intravenous, or subcutaneous) administration. The preferred manner of administration is oral or parenteral using a convenient daily dosage regimen, which can be adjusted according to the degree of affliction. Oral compositions can take the form of tablets, pills, capsules, semisolids, powders, sustained release formulations, solutions, suspensions, elixirs, aerosols, or any other appropriate compositions.

[0263] The choice of formulation depends on various factors such as the mode of drug administration (e.g., for oral administration, formulations in the form of tablets, pills, or capsules are preferred) and the bioavailability of the drug substance. Recently, pharmaceutical formulations have, been developed especially for drugs that show poor bioavailability based upon the principle that bioavailability can be increased by increasing the surface area, i.e., decreasing particle size. For example U.S. Pat. No. 4,107,288 describes a pharmaceutical formulation having particles in the size range from 10 to 1,000 nm in which the active material is supported on a cross-linked matrix of macromolecules. U.S. Pat. No. 5,145,684 describes the production of a pharmaceutical formulation in which the drug substance is pulverized to nanoparticles (average particle size of 400 nm) in the presence of a surface modifier and then dispersed in a liquid medium to give a pharmaceutical formulation that exhibits remarkably high bioavailability.

[0264] Pharmaceutical compositions are comprised of, in general, a therapeutic compound in combination with at least one pharmaceutically acceptable excipient. Acceptable excipients are non-toxic, aid administration, and do not adversely affect the therapeutic benefit of the therapeutic compound. Such excipients may be any solid, liquid, semi-solid or, in the case of an aerosol composition, gaseous excipient that is generally available to one skilled in the art.

[0265] Solid pharmaceutical excipients include starch, cellulose, talc, glucose, lactose, sucrose, gelatin, malt, rice, flour, chalk, silica gel, magnesium stearate, sodium stearate, glycerol monostearate, sodium chloride, dried skim milk and the like. Liquid and semisolid excipients may be selected from glycerol, propylene glycol, water, ethanol and various oils, including those of petroleum, animal, vegetable or synthetic origin, e.g., peanut oil, soybean oil, mineral oil, sesame oil, etc. Preferred liquid carriers, particularly for injectable solutions, include water, saline, aqueous dextrose, and glycols.

[0266] Compressed gases may be used to disperse a compound of this invention in aerosol form. Inert gases suitable for this purpose are nitrogen, carbon dioxide,. etc.

[0267] Other suitable pharmaceutical excipients and their formulations are described in Remington's Pharmaceutical Sciences, edited by E. W. Martin (Mack Publishing Company, 18^{th} ed., 1990).

[0268] The amount of the therapeutic compound in a formulation can vary within the full range employed by those skilled in the art. Typically, the formulation will contain, on a weight percent (wt %) basis, from about 0.01-99.99 wt % of the therapeutic compound based on the total formulation, with the balance being one or more suitable pharmaceutical excipients. Preferably, the compound is present at a level of about 1-80 wt %.

[0269] Therapeutic compounds can be administered alone or in combination with other therapeutic compounds or in combination with one or more other active ingredient(s). For example, an inhibitor or stimulator of a coronary stenosis-associated protein can be administered in combination with another agent that inhibits or stimulates the activity of the same or a different coronary stenosis-associated protein to thereby counteract the affects of coronary stenosis.

[0270] For further information regarding pharmacology, see Current Protocols in Pharmacology, John Wiley & Sons, Inc., N.Y.

[0271] Human Identification Applications

[0272] In addition to their diagnostic and therapeutic uses in coronary stenosis and related pathologies, the SNPs provided by the present invention are also useful as human identification markers for such applications as forensics, paternity testing, and biometrics (see, e.g., Gill, “An assessment of the utility of single nucleotide polymorphisms (SNPs) for forensic purposes”, Int J Legal Med. 2001;114(4-5):204-10). Genetic variations in the nucleic acid sequences between individuals can be used as genetic markers to identify individuals and to associate a biological sample with an individual. Determination of which nucleotides occupy a set of SNP positions in an individual identifies a set of SNP markers that distinguishes the individual. The more SNP positions that are analyzed, the lower the probability that the set of SNPs in one individual is the same as that in an unrelated individual. Preferably, if multiple sites are analyzed, the sites are unlinked (i.e., inherited independently). Thus, preferred sets of SNPs can be selected from among the SNPs disclosed herein, which may include SNPs on different chromosomes, SNPs on different chromosome arms, and/or SNPs that are dispersed over substantial distances along the same chromosome arm.

[0273] Furthermore, among the SNPs disclosed herein, preferred SNPs for use in certain forensic/human identification applications include SNPs located at degenerate codon positions (i.e., the third position in certain codons which can be one of two or more alternative nucleotides and still encode the same amino acid), since these SNPs do not affect the encoded protein. SNPs that do not affect the encoded protein are expected to be under less selective pressure and are therefore expected to be more polymorphic in a population, which is typically an advantage for forensic/human identification applications. However, for certain forensics/human identification applications, such as predicting phenotypic characteristics (e.g., inferring ancestry or inferring one or more physical characteristics of an individual) from a DNA sample, it may be desirable to utilize SNPs that affect the encoded protein.

[0274] For many of the SNPs disclosed in Tables 1-2 (which are identified as “Applera” SNP source), Tables 1-2 provide SNP allele frequencies obtained by re-sequencing the DNA of chromosomes from 39 individuals (Tables 1-2 also provide allele frequency information for “Celera” source SNPs and, where available, public SNPs from dbEST, HGBASE, and/or HGMD). The allele frequencies provided in Tables 1-2 enable these SNPs to be readily used for human identification applications. Although any SNP disclosed in Table 1 and/or Table 2 could be used for human identification, the closer that the frequency of the minor allele at a particular SNP site is to 50%, the greater the ability of that SNP to discriminate between different individuals in a population since it becomes increasingly likely that two randomly selected individuals would have different alleles at that SNP site. Using the SNP allele frequencies provided in Tables 1-2, one of ordinary skill in the art could readily select a subset of SNPs for which the frequency of the minor allele is, for example, at least 1%, 2%,5%,10%, 20%,25%,30%,40%,45%, or 50%, or any other frequency in-between. Thus, since Tables 1-2 provide allele frequencies based on the re-sequencing of the chromosomes from 39 individuals, a subset of SNPs could readily be selected for human identification in which the total allele count of the minor allele at a particular SNP site is; for example, at least 1, 2, 4, 8, 10, 16, 20, 24, 30, 32, 36, 38, 39, 40, or any other number in-between.

[0275] Furthermore, Tables 1-2 also provide population group (interchangeably referred herein as ethnic or racial groups) information coupled with the extensive allele frequency information. For example, the group of 39 individuals whose DNA was re-sequenced was made-up of 20 Caucasians and 19 African-Americans. This population group information enables further refinement of SNP selection for human identification. For example, preferred SNPs for human identification can be selected from Tables 1-2 that have similar allele frequencies in both the Caucasian and African-American populations; thus, for example, SNPs can be selected that have equally high discriminatory power in both populations. Alternatively, SNPs can be selected for which there is a statistically significant difference in allele frequencies between the Caucasian and African-American populations (as an extreme example, a particular allele may be observed only in either the Caucasian or the African-American population group but not observed in the other population group); such SNPs are useful, for example, for predicting the race/ethnicity of an unknown perpetrator from a biological sample such as a hair or blood stain recovered at a crime scene. For a discussion of using SNPs to predict ancestry from a DNA sample, including statistical methods, see Frudakis et al., “A Classifier for the SNP-Based Inference of Ancestry”, Journal of Forensic Sciences 2003; 48(4):771-782.

[0276] SNPs have numerous advantages over other types of polymorphic markers, such as short tandem repeats (STRs). For example, SNPs can be easily scored and are amenable to automation, making SNPs the markers of choice for large-scale forensic databases. SNPs are found in much greater abundance throughout the genome than repeat polymorphisms. Population frequencies of two polymorphic forms can usually be determined with greater accuracy than those of multiple polymorphic forms at multi-allelic loci. SNPs are mutationaly more stable than repeat polymorphisms. SNPs are not susceptible to artefacts such as stutter bands that can hinder analysis. Stutter bands are frequently encountered when analyzing repeat polymorphisms, and are particularly troublesome when analyzing samples such as crime scene samples that may contain mixtures of DNA from multiple sources. Another significant advantage of SNP markers over STR markers is the much shorter length of nucleic acid needed to score a SNP. For example, STR markers are generally several hundred base pairs in length. A SNP, on the other hand, comprises a single nucleotide, and generally a short conserved region on either side of the SNP position for primer and/or probe binding. This makes SNPs more amenable to typing in highly degraded or aged biological samples that are frequently encountered in forensic casework in which DNA may be fragmented into short pieces.

[0277] SNPs also are not subject to microvariant and “off-ladder” alleles frequently encountered when analyzing STR loci. Microvariants are deletions or insertions within a repeat unit that change the size of the amplified DNA product so that the amplified product does not migrate at the same rate as reference alleles with normal sized repeat units. When separated by size, such as by electrophoresis on a polyacrylamide gel, microvariants do not align with a reference allelic ladder of standard sized repeat units, but rather migrate between the reference alleles. The reference allelic ladder is used for precise sizing of alleles for allele classification; therefore alleles that do not align with the reference allelic ladder lead to substantial analysis problems. Furthermore, when analyzing multi-allelic repeat polymorphisms, occasionally an allele is found that consists of more or less repeat units than has been previously seen in the population, or more or less repeat alleles than are included in a reference allelic ladder. These alleles will migrate outside the size range of known alleles in a reference allelic ladder, and therefore are referred to as “off-ladder” alleles. In extreme cases, the allele may contain so few or so many repeats that it migrates well out of the range of the reference allelic ladder. In this situation, the allele may not even be observed, or, with multiplex analysis, it may migrate within or close to the size range for another locus, further confounding analysis.

[0278] SNP analysis avoids the problems of microvariants and off-ladder alleles encountered in STR analysis. Importantly, microvariants and off-ladder alleles may provide significant problems, and may be completely missed, when using analysis methods such as oligonucleotide hybridization arrays, which utilize oligonucleotide probes specific for certain known alleles. Furthermore, off-ladder alleles and microvariants encountered with STR analysis, even when correctly typed, may lead to improper statistical analysis, since their frequencies in the population are generally unknown or poorly characterized, and therefore the statistical significance of a matching genotype may be questionable. All these advantages of SNP analysis are considerable in light of the consequences of most DNA identification cases, which may lead to, life imprisonment for an individual, or re-association of remains to the family of a deceased individual.

[0279] DNA can be isolated from biological samples such as blood, bone, hair, saliva, or semen, and compared with the DNA from a reference source at particular SNP positions.

[0280] Multiple SNP markers can be assayed simultaneously in order to increase the power of discrimination and the statistical significance of a matching genotype. For example, oligonucleotide arrays can be used to genotype a large number of SNPs simultaneously. The SNPs provided by the present invention can be assayed in combination with other polymorphic genetic markers, such as other SNPs known in the art or STRs, in order to identify an individual or to associate an individual with a particular biological sample.

[0281] Furthermore, the SNPs provided by the present invention can be genotyped for inclusion in a database of DNA genotypes, for example, a criminal DNA databank such as the FBI's Combined DNA Index System (CODIS) database. A genotype obtained from a biological sample of unknown source can then be queried against the database to find a matching genotype, with the SNPs of the present invention providing nucleotide positions at which to compare the known and unknown DNA sequences for identity. Accordingly, the present invention provides a database comprising novel SNPs or SNP alleles of the present invention (e.g., the database can comprise information indicating which alleles are possessed by individual members of a population at one or more novel SNP sites of the present invention), such as for use in forensics, biometrics, or other human identification applications. Such a database typically comprises a computer-based system in which the SNPs or SNP alleles of the present invention are recorded on a computer readable medium (see the section of the present specification entitled “Computer-Related Embodiments”).

[0282] The SNPs of the present invention can also be assayed for use in paternity testing. The object of paternity testing is usually to determine whether a male is the father of a child. In most cases, the mother of the child is known and thus, the mother's contribution to the child's genotype can be traced. Paternity testing investigates whether the part of the child's genotype not attributable to the mother is consistent with that of the putative father. Paternity testing can be performed by analyzing sets of polymorphisms in the putative father and the child, with the SNPs of the present invention providing nucleotide positions at which to compare the putative father's and child's DNA sequences for identity. If the set of polymorphisms in the child attributable to the father does not match the set of polymorphisms of the putative father, it can be concluded, barring experimental error, that the putative father is not the father of the child. If the set of polymorphisms in the child attributable to the father match the set of polymorphisms of the putative father, a statistical calculation can be performed to determine the probability of coincidental biological father of the child.

[0283] In addition to paternity testing, SNPs are also useful for other types of kinship testing, such as for verifying familial relationships for immigration purposes, or for cases in which an individual alleges to be related to a deceased individual in order to claim an inheritance from the deceased individual, etc. For further information regarding the utility of SNPs for paternity testing and other types of kinship testing, including methods for statistical analysis, see Krawczak, “Informativity assessment for biallelic single nucleotide polymorphisms”, Electrophoresis June 1999;20(8):1676-81.

[0284] The use of the SNPs of the present invention for human identification further extends to various authentication systems, commonly referred to as biometric systems, which typically convert physical characteristics of humans (or other organisms) into digital data. Biometric systems include various technological devices that measure such unique anatomical or physiological characteristics as finger, thumb, or palm prints; hand geormetry; vein patterning on the back of the hand; blood vessel patterning of the retina and color and texture of the iris; facial characteristics; voice patterns; signature and typing dynamics; and DNA. Such physiological measurements can be used to verify identity and, for example, restrict or allow access based on the identification. Examples of applications for biometrics include physical area security, computer and network security, aircraft passenger check-in and boarding, financial transactions, medical records access, government benefit distribution, voting, law enforcement, passports, visas and immigration, prisons, various military applications, and for restricting access to expensive or dangerous items, such as automobiles or guns (see, for example, O'Connor, Stanford Technology Law Review and U.S. Pat. No. 6,119,096).

[0285] Groups of SNPs, particularly the SNPs provided by the present invention, can be typed to uniquely identify an individual for biometric applications such as those described above. Such SNP typing can readily be accomplished using, for example, DNA chips/arrays. Preferably, a minimally invasive means for obtaining a DNA sample is utilized. For example PCR amplification enables sufficient quantities of DNA for analysis to be obtained from buccal swabs or fingerprints, which contain DNA-containing skin cells and oils that are naturally transferred during contact.

[0286] Further information regarding techniques for using SNPs in forensic/human identification applications can be found in, for example, Current Protocols in Human Genetics, John Wiley & Sons, N.Y. (2002), 14.1-14.7.

[0287] Variant Proteins, Antibodies, Vectors & Host Cells, & Uses thereof

[0288] Variant Proteins Encoded by SNP-Containing Nucleic Acid Molecules

[0289] The present invention provides SNP-containing nucleic acid molecules, many of which encode proteins having variant amino acid sequences as compared to the art-known (i.e., wild-type) proteins. Amino acid sequences encoded by the polymorphic nucleic acid molecules of the present invention are provided as SEQ ID NOS:170-338 in Table 1 and the Sequence Listing. These variants will generally be referred to herein as variant proteins/peptides/polypeptides, or polymorphic proteins/peptides/polypeptides of the present invention. The terms “protein”, “peptide”, and “polypeptide” are used herein interchangeably.

[0290] A variant protein of the present invention maybe encoded by, for example, a nonsynonymous nucleotide substitution at any one of the cSNP positions disclosed herein. In addition, variant proteins may also include proteins whose expression, structure, and/or function is altered by a SNP disclosed herein, such as a SNP that creates or destroys a stop codon, a SNP that affects splicing, and a SNP in control/regulatory elements, e.g. promoters, enhancers, or transcription factor binding domains.

[0291] As used herein, a protein or peptide is said to be “isolated” or “purified” when it is substantially free of cellular material or chemical precursors or other chemicals. The, variant proteins of the present invention can be purified to homogeneity or other lower degrees of purity. The level of purification will be based on the intended use. The key feature is that the preparation allows for the desired function of the variant protein, even if in the presence of considerable amounts of other components.

[0292] As used herein, “substantially free of cellular material” includes preparations of the variant protein having less than about 30% (by dry weight) other proteins (i.e., contaminating protein), less than about 20% other proteins, less than about 10% other proteins, or less than about 5% other proteins. When the variant protein is recombinantly produced, it can also be substantially free of culture medium, i.e., culture medium represents less than about 20% of the volume of the protein preparation.

[0293] The language “substantially free of chemical precursors or other chemicals” includes preparations of the variant protein in which it is separated from chemical precursors or other chemicals that are involved in its synthesis. In one embodiment, the language “substantially free of chemical precursors or other chemicals” includes preparations of the variant protein having less than about 30% (by dry weight) chemical precursors or other chemicals, less than about 20% chemical precursors or other chemicals, less than about 10% chemical precursors or other chemicals, or less than about 5% chemical precursors or other chemicals.

[0294] An isolated variant protein may be purified from cells that naturally express it, purified from cells that have been altered to express it (recombinant host cells), or synthesized using known protein synthesis methods. For example, a nucleic acid molecule containing SNP(s) encoding the variant protein can be cloned into an expression vector, the expression vector introduced into a host cell, and the variant protein expressed in the host cell. The variant protein can then be isolated from the cells by any appropriate purification scheme using standard protein purification techniques. Examples of these techniques are described in detail below (Sambrook and Russell, 2000, Molecular Cloning: A Laboratory Manual, Cold Spring Harbor Laboratory Press, Cold Spring Harbor, N.Y.).

[0295] The present invention provides isolated variant proteins that comprise, consist of or consist essentially of amino acid sequences that contain one or more variant amino acids encoded by one or more codons which contain a SNP of the present invention.

[0296] Accordingly, the present invention provides variant proteins that consist of amino acid sequences that contain one or more amino acid polymorphisms (or truncations or extensions due to creation or destruction of a stop codon, respectively) encoded by the SNPs provided in Table 1 and/or Table 2. A protein consists of an amino acid sequence when the amino acid sequence is the entire amino acid sequence of the protein.

[0297] The present invention further provides variant proteins that consist essentially of amino acid sequences that contain one or more amino acid polymorphisms (or truncations or extensions due to creation or destruction of a stop codon, respectively) encoded by the SNPs provided in Table 1 and/or Table 2. A protein consists essentially of an amino acid sequence when such an amino acid sequence is present with only a few additional amino acid residues in the final protein.

[0298] The present invention further provides variant proteins that comprise amino acid sequences that contain one or more amino acid polymorphisms (or truncations or extensions due to creation or destruction of a stop codon, respectively) encoded by the SNPs provided in Table 1 and/or Table 2. A protein comprises an amino acid sequence when the amino acid sequence is at least part of the final amino acid sequence of the protein. In such a fashion, the protein may contain only the variant amino acid sequence or have additional amino acid residues, such as a contiguous encoded sequence that is naturally associated with it or heterologous amino acid residues. Such a protein can have a few additional amino acid residues or can comprise many more additional amino acids. A brief description of how various types of these proteins can be made and isolated is provided below.

[0299] The variant proteins of the present invention can be attached to heterologous sequences to form chimeric or fusion proteins. Such chimeric and fusion proteins comprise a variant protein operatively linked to a heterologous protein having an amino acid sequence not substantially homologous to the variant protein. “Operatively linked” indicates that the coding sequences for the variant protein and the heterologous protein are ligated in-frame. The heterologous protein can be fused to the N-terminus or C-terminus of the variant protein. In another embodiment, the fusion protein is encoded by a fusion polynucleotide that is synthesized by conventional techniques including automated DNA synthesizers. Alternatively, PCR amplification of gene fragments can be carried out using anchor primers which give rise to complementary overhangs between two consecutive gene fragments which can subsequently be annealed and re-amplified to generate a chimeric gene sequence (see Ausubel et al., Current Protocols in Molecular Biology, 1992). Moreover, many expression vectors are commercially available that already encode a fusion moiety (e.g., a GST protein). A variant protein-encoding nucleic acid can be cloned into such an expression vector such that the fusion moiety is linked in-frame to the variant protein.

[0300] In many uses, the fusion protein does not affect the activity of the variant protein. The fusion protein can include, but is not limited to, enzymatic fusion proteins, for example, beta-galactosidase fusions, yeast two-hybrid GAL fusions, poly-His fusions, MYC-tagged, HI-tagged and Ig fusions. Such fusion proteins, particularly poly-His fusions, can facilitate their purification following recombinant expression. In certain host cells (e.g., mammalian host cells), expression and/or secretion of a protein can be increased by using a heterologous signal sequence. Fusion proteins are further described in, for example, Terpe, “Overview of tag protein fusions: from molecular and biochemical fundamentals to commercial systems”, Appl Microbiol Biotechnol. January 2003;60(5):523-33. Epub Nov. 7, 2002; Graddis et al., “Designing proteins that work using recombinant technologies”, Curr Pharm Biotechnol. December 2002;3(4):285-97; and Nilsson et al., “Affinity fusion strategies for detection, purification, and immobilization of recombinant proteins”, Protein Expr Purif. October 1997; 11(1):1-16.

[0301] The present invention also relates to further obvious variants of the variant polypeptides of the present invention, such as naturally-occurring mature forms (e.g., allelic variants), non-naturally occurring recombinantly-derived variants, and orthologs and paralogs of such proteins that share sequence homology. Such variants can readily be generated using art-known techniques in the fields of recombinant nucleic acid technology and protein biochemistry. It is understood, however, that variants exclude those known in the prior art before the present invention.

[0302] Further variants of the variant polypeptides disclosed in Table 1 can comprise an amino acid sequence that shares at least 70-80%, 80-85%, 85-90%, 91%, 92%, 93%, 94%, 95%, 96%, 97%, 98%, or 99% sequence identity with an amino acid sequence disclosed in Table 1 (or a fragment thereof) and that includes a novel amino acid residue (allele) disclosed in Table 1 (which is encoded by a novel SNP allele). Thus, an aspect of the present invention that is specifically contemplated are polypeptides that have a certain degree of sequence variation-compared with the polypeptide sequences shown :in Table 1, but that contain a novel amino acid residue (allele) encoded by a novel SNP allele disclosed herein. In other words, as long as a polypeptide contains a novel amino acid residue disclosed herein, other portions of the polypeptide that flank the novel amino acid residue can vary to some degree from the polypeptide sequences shown in Table 1.

[0303] Full-length pre-processed forms, as well as mature processed forms, of proteins that comprise one of the amino acid sequences disclosed herein can readily be identified as having complete sequence identity to one of the variant proteins of the present invention as well as being encoded by the same genetic locus as the variant proteins provided herein.

[0304] Orthologs of a variant peptide can readily be identified as having some degree of significant sequence homology/identity to at least a portion of a variant peptide as well as being encoded by a gene from another organism. Preferred orthologs will be isolated from non-human mammals, preferably primates, for the development of human therapeutic targets and agents. Such orthologs can be encoded by a nucleic acid sequence that hybridizes to a variant peptide-encoding nucleic acid molecule under moderate to stringent conditions depending on the degree of relatedness of the two organisms yielding the homologous proteins.

[0305] Variant proteins include, but are not limited to, proteins containing deletions, additions and substitutions in the amino acid sequence caused by the SNPs of the present invention. One class of substitutions is conserved amino acid substitutions in which a given amino acid in a polypeptide is substituted for another amino acid of like characteristics. Typical conservative substitutions are replacements, one for another, among the aliphatic amino acids Ala, Val, Leu, and Ile; interchange of the hydroxyl residues Ser and Thr, exchange of the acidic residues Asp and Glu; substitution between the amide residues Asn and Gln; exchange of the basic residues Lys and Arg; and replacements among the aromatic residues Phe and Tyr. Guidance concerning which amino acid changes are likely to be phenotypically silent are found in, for example, Bowie et al., Science 247:1306-1310 (1990).

[0306] Variant proteins can be fully functional or can lack function in one or more activities, e.g. ability to bind another molecule, ability to catalyze a substrate, ability to mediate signaling, etc. Fully functional variants typically contain only conservative variations or variations in non-critical residues or in non-critical regions. Functional variants can also contain substitution of similar amino acids that result in no change or an insignificant change in function. Alternatively, such substitutions may positively or negatively affect function to some degree. Non-functional variants typically contain one or more non-conservative amino acid substitutions, deletions, insertions, inversions, truncations or extensions, or a substitution, insertion, inversion, or deletion of a critical residue or in a critical region.

[0307] Amino acids that are essential for function of a protein can be identified by methods known in the art, such as site-directed mutagenesis or alanine-scanning mutagenesis (Cunningham et al., Science 244:1081-1085 (1989)), particularly using the amino acid sequence and polymorphism information provided in Table 1. The latter procedure introduces single alanine mutations at every residue in the molecule. The resulting mutant molecules are then tested for biological activity such as enzyme activity or in assays such as an in vitro proliferative activity. Sites that are critical for binding partner/substrate binding can also be determined by structural analysis such as crystallization, nuclear magnetic resonance or photoaffinity labeling (Smith et al., J Mol. Biol. 224:899-904 (1992); de Vos et al. Science 255:306-312 (1992)).

[0308] Polypeptides can contain amino acids other than the 20 amino acids commonly referred to as the 20 naturally occurring amino acids. Further, many amino acids, including the terminal amino acids, may be modified by natural processes, such as processing and other post-translational modifications, or by chemical modification techniques well known in the art. Accordingly, the variant proteins of the present invention also encompass derivatives or analogs in which a substituted amino acid residue is not one encoded by the genetic code, in which a substituent group is included, in which the mature polypeptide is fused with another compound, such as a compound to increase the half-life of the polypeptide (e.g., polyethylene glycol), or in which additional amino acids are fused to the mature polypeptide, such as a leader or secretory sequence or a sequence for purification of the mature polypeptide or a pro-protein sequence.

[0309] Known protein modifications include, but are not limited to, acetylation, acylation, ADP-ribosylation, amidation, covalent attachment of flavin, covalent attachment of a heme moiety, covalent attachment of a nucleotide or nucleotide derivative, covalent attachment of a lipid or lipid derivative, covalent attachment of phosphotidylinositol, cross-linking, cyclization, disulfide bond formation, demethylation, formation of covalent crosslinks, formation of cystine, formation of pyroglutamate, formylation, gamma carboxylation, glycosylation, GPI anchor formation, hydroxylation, iodination, methylation, myristoylation, oxidation, proteolytic processing, phosphorylation, prenylation, racemization, selenoylation, sulfation, transfer-RNA mediated addition of amino acids to proteins such as arginylation, and ubiquitination.

[0310] Such protein modifications are well known to those of skill in the art and have been described in great detail in the scientific literature. Several particularly common modifications, glycosylation, lipid attachment, sulfation, gamma-carboxylation of glutamic acid residues, hydroxylation and ADP-ribosylation, for instance, are described in most basic texts, such as Proteins—Structure and Molecular Properties, 2nd Ed., T. E. Creighton, W. H. Freeman and Company, New York (1993); Wold, F., Posttranslational Covalent Modification of Proteins, B. C. Johnson, Ed., Academic Press, New York 1-12 (1983); Seifter et al., Meth. Enzymol. 182: 626-646 (1990); and Rattan et al., Ann. N.Y Acad. Sci. 663:48-62 (1992).

[0311] The present invention further provides fragments of the variant proteins in which the fragments contain one or more amino acid sequence variations (e.g., substitutions, or truncations or extensions due to creation or destruction of a stop codon) encoded by one or more SNPs disclosed herein. The fragments to which the invention pertains, however, are not to be construed as encompassing fragments that have been disclosed in the prior art before the present invention.

[0312] As used herein, a fragment may comprise at least about 4,8, 10, 12, 14, 16, 18, 20, 25, 30, 50, 100 (or any other number in-between) or more contiguous amino acid residues from a variant protein, wherein at least one amino acid residue is affected by a SNP of the present invention, e.g., a variant amino acid residue encoded by a nonsynonymous nucleotide substitution at a cSNP position provided by the present invention. The variant amino acid encoded by a cSNP may occupy any residue position along the sequence of the fragment. Such fragments can be chosen based on the ability to retain one or more of the biological activities of the variant protein or the ability to perform a function, e.g., act as an immunogen. Particularly important fragments are biologically active fragments. Such fragments will typically comprise a domain or motif of a variant protein of the present invention, e.g., active site, transmembrane domain, or ligand/substrate binding domain. Other fragments include, but are not limited to, domain or motif-containing fragments, soluble peptide fragments, and fragments containing immunogenic structures. Predicted domains and functional sites are readily identifiable by computer programs well known to those of skill in the art (e.g., PROSITE analysis) (Current Protocols in Protein Science, John Wiley & Sons, N.Y. (2002)).

[0313] Uses of Variant Proteins

[0314] The variant proteins of the present invention can be used in a variety of ways, including but not limited to, in assays to determine the biological activity of a variant protein, such as in a panel of multiple proteins for high-throughput screening; to raise antibodies or to elicit another type of immune response; as a reagent (including the labeled reagent) in assays designed to quantitatively determine levels of the variant protein (or its binding partner) in biological fluids; as a marker for cells or tissues in which it is preferentially expressed (either constitutively or at a particular stage of tissue differentiation or development or in a disease state); as a target for screening for a therapeutic agent; and as a direct therapeutic agent to be administered into a human subject. Any of the variant proteins disclosed herein may be developed into reagent grade or kit format for commercialization as research products. Methods for performing the uses listed above are well known to those skilled in the art (see, e.g. Molecular Cloning: A Laboratory Manual, Cold Spring Harbor Laboratory Press, Sambrook and Russell, 2000, and Methods in Enzymology: Guide to Molecular Cloning Techniques, Academic Press, Berger, S. L. and A. R. Kimmel eds., 1987).

[0315] In a specific embodiment of the invention, the methods of the present invention include detection of one or more variant proteins disclosed herein. Variant proteins are disclosed in Table I and in the Sequence Listing as SEQ ID NOS: 170-338. Detection of such proteins can be accomplished using, for example, antibodies, small molecule compounds, aptamers, ligands/substrates, other proteins or protein fragments, or other protein-binding agents. Preferably, protein detection agents are specific for a variant protein of the present invention and can therefore discriminate between a variant protein of the present invention and the wild-type protein or another variant form. This can generally be accomplished by, for example, selecting or designing detection agents that bind to the region of a protein that differs between the variant and wild-type protein, such as a region of a protein that contains one or more amino acid substitutions that is/are encoded by a non-synonymous cSNP of the present invention, or a region of a protein that follows a nonsense mutation-type SNP that creates a stop codon thereby leading to a shorter polypeptide, or a region of a protein that follows a read-through mutation-type SNP that destroys a stop codon thereby leading to a longer polypeptide in which a portion of the polypeptide is present in one version of the polypeptide but not the other.

[0316] In another specific aspect of the invention, the variant proteins of the present invention are used as targets for diagnosing coronary stenosis or for determining predisposition to coronary stenosis in a human. Accordingly, the invention provides methods for detecting the presence of, or levels of, one or more variant proteins of the present invention in a cell, tissue, or organism. Such methods typically involve contacting a test sample with an agent (e.g., an antibody, small molecule compound, or peptide) capable of interacting with the variant protein such that specific binding of the agent to the variant protein can be detected. Such an assay can be provided in a single detection format or a multi-detection format such as an array, for example, an antibody or aptamer array (arrays for protein detection may also be referred to as “protein chips”). The variant protein of interest can be isolated from a test sample and assayed for the presence of a variant amino acid sequence encoded by one or more SNPs disclosed by the present invention. The SNPs may cause changes to the protein and the corresponding protein function/activity, such as through non-synonymous substitutions in protein coding regions that can lead to amino acid substitutions, deletions, insertions, and/or rearrangements; formation or destruction of stop codons; or alteration of control elements such as promoters. SNPs may also cause inappropriate post-translational modifications.

[0317] One preferred agent for detecting a variant protein in a sample is an antibody capable of selectively binding to a variant form of the protein (antibodies are described in greater detail in the next section). Such samples include, for example, tissues, cells, and *biological fluids isolated from a subject, as well as tissues, cells and fluids present within a subject.

[0318] In vitro methods for detection of the variant proteins associated with coronary stenosis that are disclosed herein and fragments thereof include, but are not limited to, enzyme linked immunosorbent assays (ELISAs), radioimmunoassays (RIA), Western blots, immunoprecipitations, immunofluorescence, and protein arrays/chips (e.g., arrays of antibodies or aptamers). For further information regarding immunoassays and, related protein detection methods, see Current Protocols in Immunology, John Wiley & Sons, N.Y., and Hage, “Immunoassays”, Anal Chem. Jun. 15, 1999;71(12):294R-304R.

[0319] Additional analytic methods of detecting amino acid variants include, but are not limited to, altered electrophoretic mobility, altered tryptic peptide digest, altered protein activity in cell-based or cell-free assay, alteration in ligand or antibody-binding pattern, altered isoelectric point, and direct amino acid sequencing.

[0320] Alternatively, variant proteins can be detected in vivo in a subject by introducing into the subject a labeled antibody (or other type of detection reagent) specific for a variant protein. For example, the antibody can be labeled with a radioactive marker whose presence and location in a subject can be detected by standard imaging techniques.

[0321] Other uses of the variant peptides of the present invention are based on the class or action of the protein. For example, proteins isolated from humans and their mammalian orthologs serve as targets for identifying agents (e.g., small molecule drugs or antibodies) for use in therapeutic applications, particularly for modulating a biological or pathological response in a cell or tissue that expresses the protein. Pharmaceutical agents can be developed that modulate protein activity.

[0322] As an alternative to modulating gene expression, therapeutic compounds can be developed that modulate protein function. For example, many SNPs disclosed herein affect the amino acid sequence of the encoded protein (e.g., non-synonymous cSNPs and nonsense mutation-type SNPs). Such alterations in the encoded amino acid sequence may affect protein function, particularly if such amino acid sequence variations occur in functional protein domains, such as catalytic domains, ATP-binding domains, or ligand/substrate binding domains. It is well established in the art that variant proteins having amino acid sequence variations in functional domains can cause or influence pathological conditions. In such instances, compounds (e.g., small molecule drugs or antibodies) can be developed that target the variant protein and modulate (e.g. up- or down-regulate) protein function/activity.

[0323] The therapeutic methods of the present invention further include methods that target one or more variant proteins of the present invention. Variant proteins can be targeted using, for example, small molecule compounds, antibodies, aptamers, ligands/substrates, other proteins, or other protein-binding agents. Additionally, the acid molecules) disclosed in Table 1 may themselves be directly used as therapeutic agents by acting as competitive inhibitors of corresponding art-known proteins (or nucleic acid molecules, such as mRNA molecules).

[0324] The variant proteins of the present invention are particularly useful in drug screening assays, in cell-based or cell-free systems. Cell-based systems can utilize cells that naturally express the protein, a biopsy specimen, or cell cultures. In one embodiment, cell-based assays involve recombinant host cells expressing the variant protein. Cell-free assays can be used to detect the ability of a compound to directly bind to a variant protein or to the corresponding SNP-containing nucleic acid fragment that encodes the variant protein.

[0325] A variant protein of the present invention, as well as appropriate fragments thereof, can be used in high-throughput screening assays to test candidate compounds for the ability to bind and/or modulate the activity of the variant protein. These candidate compounds can be further screened against a protein having normal function (e.g., a wild-type/non-variant protein) to further determine the effect of the compound on the protein activity. Furthermore, these compounds can be tested in animal or invertebrate systems to determine in vivo activity/effectiveness. Compounds can be identified that activate (agonists) or inactivate (antagonists) the variant protein, and different compounds can be identified that cause various degrees of activation or inactivation of the variant protein.

[0326] Further, the variant proteins can be used to screen a compound for the ability to stimulate or inhibit interaction between the variant protein and a target molecule that normally interacts with the protein. The target can be a ligand, a substrate or a binding partner that the protein normally interacts with (for example, epinephrine or norepinephrine). Such assays typically include the steps of combining the variant protein with a candidate compound under conditions that allow the variant protein, or fragment thereof, to interact with the target molecule, and to detect the formation of a complex between the protein and the target or to detect the biochemical consequence of the interaction with the variant protein and the target, such as any of the associated effects of signal transduction.

[0327] Candidate compounds include, for example, 1) peptides such as soluble peptides, including Ig-tailed fusion peptides and members of random peptide libraries (see, e.g., Lam et al. , Nature 354:82-84 (1991); Houghten et al., Nature 354:84-86 (1991)) and combinatorial chemistry-derived molecular libraries made of D- and/or L-configuration amino acids; 2) phosphopeptides (e.g., members of random and partially degenerate, directed phosphopeptide libraries, see, e.g., Songyang et al., Cell 72:767-778 (1993)); 3) antibodies (e.g., polyclonal, monoclonal, humanized, anti-idiotypic, chimeric, and single chain antibodies as well as Fab, F(ab′)₂, Fab expression library fragments, and epitope-binding fragments of antibodies); and 4) small organic and inorganic molecules (e.g. molecules obtained from combinatorial and natural product libraries).

[0328] One candidate compound is a soluble fragment of the variant protein that competes for ligand binding. Other candidate compounds include mutant proteins or appropriate fragments containing mutations that affect variant protein function and thus compete for ligand. Accordingly, a fragment that competes for ligand, for example with a higher affinity, or a fragment that binds ligand but does not allow release, is encompassed by the invention.

[0329] The invention further includes other end point assays to identify compounds that modulate (stimulate or inhibit) variant protein activity. The assays typically involve an assay of events in the signal transduction pathway that indicate protein activity. Thus, the expression of genes that are up or down-regulated in response to the variant protein dependent signal cascade can be assayed. In one embodiment, the regulatory region of such genes can be operably linked to a marker that is easily detectable, such as luciferase. Alternatively, phosphorylation of the variant protein, or a variant protein target, could also be measured. Any of the biological or biochemical functions mediated by the variant protein can be used as an endpoint assay. These include all of the biochemical or biological events described herein, in the references cited herein, incorporated by reference for these endpoint assay targets, and other functions known to those of ordinary skill in the art.

[0330] Binding and/or activating compounds can also be screened by using chimeric variant proteins in which an amino terminal extracellular domain or parts thereof, an entire transmembrane domain or subregions, and/or the carboxyl terminal intracellular domain or parts thereof, can be replaced by heterologous domains or subregions. For example, a substrate-binding region can be used that interacts with a different substrate than that which is normally recognized by a variant protein. Accordingly, a different set of signal transduction components is available as an end-point assay for activation. This allows for assays to be performed in other than the specific host cell from which the variant protein is derived.

[0331] The variant proteins are also useful in competition binding assays in methods designed to discover compounds that interact with the variant protein. Thus, a compound can be exposed to a variant protein under conditions that allow the compound to bind or to otherwise interact with the variant protein. A binding partner, such as ligand, that normally interacts with the variant protein is also added to the mixture. If the test compound interacts with the variant protein or its binding partner, it decreases the amount of complex formed or activity from the variant protein. This type of assay is particularly useful in screening for compounds that interact with specific regions of the variant protein (Hodgson, Bio/technology, Sep. 10, 1992, (9), 973-80).

[0332] To perform cell-free drug screening assays, it is sometimes desirable to immobilize either the variant protein or a fragment thereof, or its target molecule, to facilitate separation of complexes from uncomplexed forms of one or both of the proteins, as well as to accommodate automation of the assay. Any method for immobilizing proteins on matrices can be used in drug screening assays. In one embodiment, a fusion protein containing an added domain allows the protein to be bound to a matrix. For example, glutathione-S-transferase/¹²⁵I fusion proteins can be adsorbed onto glutathione sepharose beads (Sigma Chemical, St. Louis, Mo.) or glutathione derivatized microtitre plates, which are then combined with the cell lysates (e.g., ³⁵S-labeled) and a candidate compound, such as a drug candidate, and the mixture incubated under conditions conducive to complex formation (e.g., at physiological conditions for salt and pH). Following incubation, the beads can be washed to remove any unbound label, and the matrix immobilized and radiolabel determined directly, or in the supernatant after the complexes are dissociated. Alternatively, the complexes can be dissociated from the matrix, separated by SDS-PAGE, and the level of bound material found in the bead fraction quantitated from the gel using standard electrophoretic techniques.

[0333] Either the variant protein or its target molecule can be immobilized utilizing conjugation of biotin and streptavidin. Alternatively, antibodies reactive with the variant protein but which do not interfere with binding of the variant protein to its target molecule can be derivatized to the wells of the plate, and the variant protein trapped in the wells by antibody conjugation. Preparations of the target molecule and a candidate compound are incubated in the variant protein-presenting wells and the amount of complex trapped in the well can be quantitated. Methods for detecting such complexes, in addition to those described above for the GST-immobilized complexes, include immunodetection of complexes using antibodies reactive with the protein target molecule, or which are reactive with variant protein and compete with the target molecule, and enzyme-linked assays that rely on detecting an enzymatic activity associated with the target molecule.

[0334] Modulators of variant protein activity identified according to these drug screening assays can be used to treat a subject with a disorder mediated by the protein pathway, such as coronary stenosis. These methods of treatment typically include the steps of administering the modulators of protein activity in a pharmaceutical composition to a subject in need of such treatment.

[0335] The variant proteins, or fragments thereof, disclosed herein can themselves be directly used to treat a disorder characterized by an absence of, inappropriate, or unwanted expression or activity of the variant protein. Accordingly, methods for treatment include the use of a variant protein disclosed herein or fragments thereof.

[0336] In yet another aspect of the invention, variant proteins can be used as “bait proteins” in a two-hybrid assay or three-hybrid assay (see, e.g., U.S. Pat. No. 5,283,317; Zervos et al. (1993) Cell 72:223-232; Madura et al. (1993) J. Biol. Chem. 268:12046-12054; Bartel et al. (1993) Biotechniques 14:920-924; Iwabuchi et al. (1993) Oncogene,8:1693-1696; and Brent WO(94/10300) to identify other proteins that bind to or interact with the variant protein and are involved in variant protein activity. Such variant protein-binding proteins are also likely to be involved in the propagation of signals by the variant proteins or variant protein targets as, for example, elements of a protein-mediated signaling pathway. Alternatively, such variant protein-binding proteins are inhibitors of the variant protein.

[0337] The two-hybrid system is based on the modular nature of most transcription factors, which typically consist of separable DNA-binding and activation domains. Briefly, the assay typically utilizes two different DNA constructs. In one construct, the gene that codes for a variant protein is bused to a gene encoding the DNA binding domain of a known transcription factor (e.g., GAL-4). In the other construct, a DNA sequence, from a library of DNA sequences, that encodes an unidentified protein (“prey” or “sample”) is fused to a gene that codes for the activation domain of the known transcription factor. If the “bait” and the “prey” proteins are able to interact, in vivo, forming a variant protein-dependent complex, the DNA-binding and activation domains of the transcription factor are brought into close proximity. This proximity allows transcription of a reporter gene (e.g., LacZ) that is operably linked to a transcriptional regulatory site responsive to the transcription factor. Expression of the reporter gene can be detected, and cell colonies containing the functional transcription factor can be isolated and used to obtain the cloned gene that encodes the protein that interacts with the variant protein.

[0338] Antibodies Directed to Variant Proteins

[0339] The present invention also provides antibodies that selectively bind to the variant proteins disclosed herein and fragments thereof Such antibodies may be used to quantitatively or qualitatively detect the variant proteins of the present invention. As used herein, an antibody selectively binds a target variant protein when it binds the variant protein and does not significantly bind to non-variant proteins, i.e., the antibody does not significantly bind to normal, wild-type, or art-known proteins that do not contain a variant amino acid sequence due to one or more SNPs of the present invention (variant amino acid sequences may be due to, for example, nonsynonymous cSNPs, nonsense SNPs that create a stop codon, thereby causing a truncation of a polypeptide or SNPs that cause read-through mutations resulting in an extension of a polypeptide).

[0340] As used herein, an antibody is defined in terms consistent with that recognized, in the art: they are multi-subunit proteins produced by an organism in response to an antigen challenge. The antibodies of the present invention include both monoclonal antibodies and polyclonal antibodies, as well as antigen-reactive proteolytic fragments of such antibodies, such as Fab, F(ab)′₂, and Fv fragments. In addition, an antibody of the present invention further includes any of a variety of engineered antigen-binding molecules such as a chimeric antibody (U.S. Pat. Nos. 4,816,567 and 4,816,397; Morrison et al., Proc. Natl. Acad. Sci. USA, 81 :6851, 1984; Neuberger et al, Nature 312:604; 1984) a humanized antibody (U.S. Pat. Nos. 5,693,762; 5,585,089; and 5,565,332), a single-chain Fv (U.S. Pat. No. 4,946,778; Ward et al., Nature 334:544, 1989), a bispecific antibody with two binding specificities (Segal et al., J. Immunol. Methods 248:1, 2001; Carter, J. Immunol. Methods 248:7,2001), a diabody, a triabody, and a tetrabody (Todorovska et al., J. Immunol. Methods, 248:47, 2001), as well as a Fab conjugate (dimer or trimer), and a minibody.

[0341] Many methods are known in the art for generating and/or identifying antibodies to a given target antigen (Harlow, Antibodies, Cold Spring Harbor Press, (1989)). In general, an isolated peptide (e.g., a variant protein of the present invention) is used as an immunogen and is administered to a mammalian organism, such as a rat, rabbit, hamster or mouse. Either a full-length protein, an antigenic peptide fragment (e.g., a peptide fragment containing a region that varies between a variant protein and a corresponding wild-type protein), or a fusion protein can be used. A protein used as an immunogen may be naturally-occurring, synthetic or recombinantly produced, and may be administered in combination with an adjuvant, including but not limited to, Freund's (complete and incomplete), mineral gels such as aluminum hydroxide, surface active substance such as lysolecithin, pluronic polyols, polyanions, peptides, oil emulsions, keyhole limpet hemocyanin, dinitrophenol, and the like.

[0342] Monoclonal antibodies can be produced by hybridoma technology (Kohler and Milstein, Nature, 256:495, 1975), which immortalizes cells secreting a specific monoclonal antibody. The immortalized cell lines can be created in vitro by fusing two different cell types, typically lymphocytes, and tumor cells. The hybridoma cells may be cultivated in vitro or in vivo. Additionally, fully human antibodies can be generated by transgenic animals (He et al., J. Immunol., 169:595, 2002). Fd phage and Fd phagemid technologies may be used to generate and select recombinant antibodies in vitro (Hoogenboom and Chames, Immunol. Today 21:371,2000; Liu et al., J. Mol. Biol. 315:1063,2002). The complementarity-determining regions of an antibody can be identified, and synthetic peptides corresponding to such regions may be used to mediate antigen binding (U.S. Pat. No. 5,637,677).

[0343] Antibodies are preferably prepared against regions or discrete fragments of a variant protein containing a variant amino acid sequence as compared to the corresponding wild-type protein (e.g., a region of a variant protein that includes an amino acid encoded by a nonsynonymous cSNP, a region affected by truncation caused by a nonsense SNP that creates a 'stop codon, or a region resulting from the destruction of a stop codon due to read-through mutation caused by a SNP). Furthermore, preferred regions will include those involved in function/activity and/or protein/binding partner interaction. Such fragments can be selected on a physical property, such as fragments corresponding to regions that are located on the surface of the protein, e.g., hydrophilic regions, or can be selected based on sequence uniqueness, or based on the position of the variant amino acid residue(s) encoded by the SNPs provided by the present invention. An antigenic fragment will typically comprise at least about 8-10 contiguous amino acid residues in which at least one of the amino acid residues is an amino acid affected by a SNP disclosed herein. The antigenic peptide can comprise, however, at least 12, 14, 16, 20, 25, 50, 100 (or any other number in-between) or more amino acid residues, provided that at least one amino acid is affected by a SNP disclosed herein.

[0344] Detection of an antibody of the present invention can be facilitated by coupling (i.e., physically linking) the antibody or an antigen-reactive fragment thereof to a detectable substance. Detectable substances include, but are not limited to, various enzymes, prosthetic groups, fluorescent materials, luminescent materials, bioluminescent materials, and radioactive materials. Examples of suitable enzymes include horseradish peroxidase, alkaline phosphatase, β-galactosidase, or acetylcholinesterase; examples of suitable prosthetic group complexes include streptavidin/biotin and avidin/biotin; examples of suitable fluorescent materials include umbelliferone, fluorescein, fluorescein isothiocyanate, rhodamine, dichlorotriazinylarnine fluorescein, dansyl chloride or phycoerythrin; an example of a luminescent material includes luminol; examples of bioluminescent materials include luciferase, luciferin, and aequorin, and examples of suitable radioactive material include ¹²⁵I, ¹³¹I, ³⁵S or ³H.

[0345] Antibodies, particularly the use of antibodies as therapeutic agents, are reviewed in: Morgan, “Antibody therapy for Alzheimer's disease”, Expert Rev Vaccines. February 2003; 2(1):53-9; Ross et al., “Anticancer antibodies”, Am J Clin Pathol. April 2003; 119(4):472-85;Goldenberg, “Advancing role of radiolabeled antibodies in the therapy of cancer”, Cancer Immunol Immunother. May 2003;52(5):281-96. Epub Mar. 11, 2003; Ross et al., “Antibody-based therapeutics in oncology”, Expert Rev Anticancer Ther. Feb. 2003; 3(1):107-21; Cao et al., “Bispecific antibody conjugates in therapeutics”, Adv Drug Deliv Rev. Feb. 10, 2003;55(2):171-97; von Mehren et al., “Monoclonal antibody therapy for cancer”, Annu Rev Med. 2003;54:343-69. Epub Dec. 03, 2001; Hudson et al., “Engineered antibodies”, Nat Med. January 2003;9(1):129-34; Brekke et al., “Therapeutic antibodies for human diseases at the dawn of the twenty-first century”, Nat Rev Drug Discov. January 2003; 2(1):52-62 (Erratum in: Nat Rev Drug Discov. March 2003;2(3):240); Houdebine, “Antibody manufacture in transgenic animals and comparisons with other systems”, Curr Opin Biotechnol. December 2002;13(6):625-9; Andreakos et al., “Monoclonal antibodies in immune and inflammatory diseases“, Curr Opin Biotechnol. December 2002;13(6):615-20; Kellermann et al., “Antibody discovery: the use of transgenic mice to generate human monoclonal antibodies for therapeutics”, Curr Opin Biotechnol. December 2002;13(6):593-7; Pini et al., “Phage display and colony filter screening for high-throughput selection of antibody libraries”, Comb Chem High Throughput Screen. November 2002;5(7):503-10; Batra et al., “Pharmacokinetics and biodistribution of genetically engineered antibodies”, Curr Opin Biotechnol. December 2002;13(6):603-8; and Tangri et al., “Rationally engineered proteins or antibodies with absent or reduced immunogenicity”, Curr Med Chem. December 2002; 9(24):2191-9.

[0346] Uses of Antibodies

[0347] Antibodies can be used to isolate the variant proteins of the present invention from a natural cell source or from recombinant host cells by standard techniques, such as affinity chromatography or immunoprecipitation. In addition, antibodies are useful for detecting the presence of a variant protein of the present invention in cells or tissues to determine the pattern of expression of the variant protein among various tissues in an organism and over the course of normal development or disease progression. Further, antibodies can be used to detect variant protein in situ, in vitro, in a bodily fluid, or in a cell lysate or supernatant in order to evaluate the amount and pattern of expression. Also, antibodies can be used to assess abnormal tissue distribution, abnormal expression during development, or expression in an abnormal condition, such as coronary stenosis. Additionally, antibody detection of circulating fragments of the full-length variant protein can be used to identify turnover.

[0348] Antibodies to the variant proteins of the present invention are also useful in pharmacogenomic analysis. Thus, antibodies against variant proteins encoded by alternative SNP alleles can be used to identify individuals that require modified treatment modalities.

[0349] Further, antibodies can be used to assess expression of the variant protein in disease states such as in active stages of the disease or in an individual with a predisposition to a disease related to the protein's function, particularly coronary stenosis. Antibodies specific for a variant protein encoded by a SNP-containing nucleic acid molecule of the present invention can be used to assay for the presence of the variant protein, such as to screen for predisposition to coronary stenosis as indicated by the presence of the variant protein.

[0350] Antibodies are also useful as diagnostic tools for evaluating the variant proteins in conjunction with analysis by electrophoretic mobility, isoelectric point, tryptic peptide digest, and other physical assays well known in the art.

[0351] Antibodies are also useful for tissue typing. Thus, where a specific variant protein has been correlated with expression in a specific tissue, antibodies that are specific for this protein can be used to identify a tissue type.

[0352] Antibodies can also be used to assess aberrant subcellular localization of a variant protein in cells in various tissues. The diagnostic uses can be applied, not only in genetic testing, but also in monitoring a treatment modality. Accordingly, where treatment is ultimately aimed at correcting the expression level or the presence of variant protein or aberrant tissue distribution or developmental expression of a variant protein, antibodies directed against the variant protein or relevant fragments can be used to monitor therapeutic efficacy.

[0353] The antibodies are also useful for inhibiting variant protein function, for example, by blocking the binding of a variant protein to a binding partner. These uses can also be applied in a therapeutic context in which treatment involves inhibiting a variant protein's function. An antibody can be used, for example, to block or competitively inhibit binding, thus modulating (agonizing or antagonizing) the activity of a variant protein. Antibodies can be prepared against specific variant protein fragments containing sites required for function or against an intact variant protein that is associated with a cell or cell membrane. For in vivo administration, an antibody may be linked with an additional therapeutic payload such as a radionuclide, an enzyme, an immunogenic epitope, or a cytotoxic agent. Suitable cytotoxic agents include, but are not limited to, bacterial toxin such as diphtheria, and plant toxin such as ricin. The in vivo half-life of an antibody or a fragment thereof may be lengthened by pegylation through conjugation to polyethylene glycol (Leong et al., Cytokine 16:106, 2001).

[0354] The invention also encompasses kits for using antibodies, such as kits for detecting the presence of a variant protein in a test sample. An exemplary kit can comprise antibodies such as a labeled or labelable antibody and a compound or agent for detecting variant proteins in a biological sample; means for determining the amount, or presence/absence of variant protein in the sample; means for comparing the amount of variant protein in the sample with a standard; and instructions for use.

[0355] Vectors and Host Cells

[0356] The present invention also provides vectors containing the SNP-containing nucleic acid molecules described herein. The term “vector” refers to a vehicle, preferably a nucleic acid molecule, which can transport a SNP-containing nucleic acid molecule. When the vector is a nucleic acid molecule, the SNP-containing nucleic acid molecule can be covalently linked to the vector nucleic acid. Such vectors include, but are not limited to, a plasmid, single or double stranded phage, a single or double stranded RNA or DNA viral vector, or artificial chromosome, such as a BAC, PAC, YAC, or MAC.

[0357] A vector can be maintained in a host cell as an extrachromosomal element where it replicates and produces additional copies of the SNP-containing nucleic acid molecules. Alternatively, the vector may integrate into the host cell genome and produce additional copies of the SNP-containing nucleic acid molecules when the host cell replicates.

[0358] The invention provides vectors for the maintenance (cloning vectors) or vectors for expression (expression vectors) of the SNP-containing nucleic acid molecules. The vectors can function in prokaryotic or eukaryotic cells or in both (shuttle vectors).

[0359] Expression vectors typically contain cis-acting regulatory regions that are operably linked in the vector to the SNP-containing nucleic acid molecules such that transcription of the SNP-containing nucleic acid molecules is allowed in a host cell. The SNP-containing nucleic acid molecules can also be introduced into the host cell with a separate nucleic acid molecule capable of affecting transcription. Thus, the second nucleic acid molecule may provide a trans-acting factor interacting with the cis-regulatory control region to allow transcription of the SNP-containing nucleic acid molecules from the vector. Alternatively, a trans-acting factor may be supplied by the host cell. Finally, a trans-acting factor can be produced from the vector itself. It is understood, however, that in some embodiments, transcription and/or translation of the nucleic acid molecules can occur in a cell-free system.

[0360] The regulatory sequences to which the SNP-containing nucleic acid molecules described herein can be operably linked include promoters for directing mRNA transcription. These include, but are not limited to, the left promoter from bacteriophage λ, the lac, TRP, and TAC promoters from E. coli, the early and late promoters from SV40, the CMV immediate early promoter, the adenovirus early and late promoters, and retrovirus long-terminal repeats.

[0361] In addition to control regions that promote transcription, expression vectors may also include regions that modulate transcription, such as repressor binding sites and enhancers. Examples include the SV40 enhancer, the cytomegalovirus immediate early enhancer, polyoma enhancer, adenovirus enhancers, and retrovirus LTR enhancers.

[0362] In addition to containing sites for transcription initiation and control, expression vectors can also contain sequences necessary for transcription termination and, in the transcribed region, a ribosome-binding site for translation. Other regulatory control elements for expression include initiation and termination codons as well as polyadenylation signals. A person of ordinary skill in the art would be aware of the numerous regulatory sequences that are useful in expression vectors (see, e.g., Sambrook and Russell, 2000, Molecular Cloning: A Laboratory Manual, Cold Spring Harbor Laboratory Press, Cold Spring Harbor, N.Y.).

[0363] A variety of expression vectors can be used to express a SNP-containing nucleic acid molecule. Such vectors include chromosomal, episomal, and virus-derived vectors, for example, vectors derived from bacterial plasmids, from bacteriophage, from yeast episomes, from yeast chromosomal elements, including yeast artificial chromosomes, from viruses such as baculoviruses, papovaviruses such as SV40, Vaccinia viruses, adenoviruses, poxviruses, pseudorabies viruses, and retroviruses. Vectors can also be derived from combinations of these sources such as those derived from plasmid and bacteriophage genetic elements, e.g., cosmids and phagemids. Appropriate cloning and expression vector for prokaryotic and eukaryotic hosts are described in Sambrook and Russell, 2000, Molecular Cloning: A Laboratory Manual, Cold Spring Harbor Laboratory Press, Cold Spring Harbor, N.Y.

[0364] The regulatory sequence in a vector may provide constitutive expression in one or more host cells (e.g., tissue specific expression) or may provide for inducible expression in one or more cell types such as by temperature, nutrient additive, or exogenous factor, e.g., a hormone or other ligand. A variety of vectors that provide constitutive or inducible expression of a nucleic acid sequence in prokaryotic and eukaryotic host cells are well known to those of ordinary skill in the art.

[0365] A SNP-containing nucleic acid molecule can be inserted into the vector by methodology well-known in the art. Generally, the SNP-containing nucleic acid molecule that will ultimately be expressed is joined to an expression vector by cleaving the SNP-containing nucleic acid molecule and the expression vector with one or more restriction enzymes and then ligating the fragments together. Procedures for restriction enzyme digestion and ligation are well known to those of ordinary skill in the art.

[0366] The vector containing the appropriate nucleic acid molecule can be introduced into an appropriate host cell for propagation or expression using well-known techniques. Bacterial host cells include, but are not limited to, E. coli, Streptomyces, and Salmonella typhimurium. Eukaryotic host cells include, but are not limited to, yeast, insect cells such as Drosophila, animal cells such as COS and CHO cells, and plant cells.

[0367] As described herein, it may be desirable to express the variant peptide as a fusion protein. Accordingly, the invention provides fusion vectors that allow for the production of the variant peptides. Fusion vectors can, for example, increase the expression of a recombinant protein, increase the solubility of the recombinant protein, and aid in the purification of the protein by acting, for, example, as a ligand for affinity purification. A proteolytic cleavage site may be introduced at the junction of the fusion moiety so that the desired variant peptide can ultimately be separated from the fusion moiety. Proteolytic enzymes suitable for such use include, but are not limited to, factor Xa thrombin, and enterokinase. Typical fusion expression vectors include pGEX (Smith et al., Gene 67:31-40 (1988)), pMAL (New England Biolabs, Beverly, Mass.) and pRIT5 (Pharmacia, Piscataway, N.J.) which fuse giutathione S-transferase (GST), maltose E binding protein, or protein A, respectively, to the target recombinant protein. Examples of suitable inducible non-fusion E. coli expression vectors include pTrc (Amann et al., Gene 69:301-315 (1988)) and pET 11 d (Studier et al., Gene Expression Technology: Methods in Enzymology 185:60-89 (1990)).

[0368] Recombinant protein expression can be maximized in a bacterial host by providing a genetic background wherein the host cell has an impaired capacity to proteolytically cleave the recombinant protein (Gottesman, S., Gene Expression Technology: Methods in Enzymology 185, Academic Press, San Diego, Calif. (1990) 119-128). Alternatively, the sequence of the SNP-containing nucleic acid molecule of interest can be altered to provide preferential codon usage for a specific host cell, for example, E. coli (Wada et al., Nucleic Acids Res. 20:2111-2118 (1992)).

[0369] The SNP-containing nucleic acid molecules can also be expressed by expression vectors that are operative in yeast. Examples of vectors for expression in yeast (e.g., S. cerevisiae) include pYepSec1 (Baldari, et al., EMBO J. 6:229-234 (1987)), pMFa (Kujan et al., Cell 30:933-943(1982)), pJRY88 (Schultz et al., Gene 54:113-123 (1987)), and pYES2 (Invitrogen Corporation, San Diego, Calif.).

[0370] The SNP-containing nucleic acid molecules can also be expressed in insect cells using, for example; baculovirus expression vectors. Baculovirus vectors available for expression of proteins in cultured insect cells (e.g., Sf 9 cells) include the pAc series (Smith et al., Mol. Cell Biol. 3:2156-2165 (1983)) and the pVL series (Lucklow et al., Virology 170:31-39 (1989)).

[0371] In certain embodiments of the invention, the SNP-containing nucleic acid molecules described herein are expressed in mammalian cells using mammalian expression vectors. Examples of mammalian expression vectors include pCDM8 (Seed, B. Nature 329:840(1987)) and pMT2PC (Kaufman et al., EMBO J. 6:187-195.(1987)).

[0372] The invention also encompasses vectors in which the SNP-containing nucleic acid molecules described herein are cloned into the vector in reverse orientation, but operably linked to a regulatory sequence that permits transcription of antisense RNA. Thus, an antisense transcript can be produced to the SNP-containing nucleic acid sequences described herein, including both coding and non-coding” regions. Expression of this antisense RNA is subject to each of the parameters described above in relation to expression of the sense RNA (regulatory sequences, constitutive or inducible expression, tissue-specific expression).

[0373] The invention also relates to recombinant host cells containing the vectors described herein. Host cells therefore include, for example, prokaryotic cells, lower eukaryotic cells such as yeast, other eukaryotic cells such as insect cells, and higher eukaryotic cells such as mammalian cells.

[0374] The recombinant host cells can be prepared by introducing the vector constructs described herein into the cells by techniques readily available to persons of ordinary skill in the art. These include, but are not limited to, calcium phosphate transfection, DEAE-dextran-mediated transfection, cationic lipid-mediated transfection, electroporation, transduction, infection, lipofection, and other techniques such as those described in Sambrook and Russell, 2000, Molecular Cloning: A Laboratory Manual, Cold Spring Harbor Laboratory, Cold Spring Harbor Laboratory Press, Cold Spring Harbor, N.Y.).

[0375] Host cells can contain more than one vector. Thus, different SNP-containing nucleotide sequences can be introduced in different vectors into the same cell. Similarly, the SNP-containing nucleic acid molecules can be introduced either alone or with other nucleic acid molecules that are not related to the SNP-containing nucleic acid molecules, such as those providing trans-acting factors for expression vectors. When more than one vector is introduced into a cell, the vectors can be introduced independently, co-introduced, or joined to the nucleic acid molecule vector.

[0376] In the case of bacteriophage and viral vectors, these can be introduced into cells as packaged or encapsulated virus by standard procedures for infection and transduction. Viral vectors can be replication-competent or replication-defective. In the case in which viral replication is defective, replication can occur in host cells that provide functions that complement the defects.

[0377] Vectors generally include selectable markers that enable the selection of the subpopulation of cells that contain the recombinant vector constructs. The marker can be inserted in the same vector that contains the SNP-containing nucleic acid molecules described herein or may be in a separate vector. Markers include, for example, tetracycline or ampicillin-resistance genes for prokaryotic host cells, and dihydrofolate reductase or neomycin resistance genes for eukaryotic host cells. However, any marker that provides selection for a phenotypic trait can be effective.

[0378] While the mature variant proteins can be produced in bacteria, yeast, mammalian cells, and other cells under the control of the appropriate regulatory sequences, cell-free transcription and translation systems can also be used to produce these variant proteins using RNA derived from the DNA constructs described herein.

[0379] Where secretion of the variant protein is desired, which is difficult to achieve with multi-transmembrane domain containing proteins such as G-protein-coupled receptors (GPCRs), appropriate secretion signals can be incorporated into the vector. The signal sequence can be endogenous to the peptides or heterologous to these peptides.

[0380] Where the variant protein is not secreted into the medium, the protein can be isolated from the host cell by standard disruption procedures, including freeze/thaw, sonication, mechanical disruption, use of lysing agents, and the like. The variant protein can then be recovered and purified by well-known purification methods including, for example, ammonium sulfate-precipitation, acid extraction, anion or cationic exchange chromatography, phosphocellulose chromatography, hydrophobic-interaction chromatography, affinity chromatography, hydroxylapatite chromatography, lectin chromatography, or high performance liquid chromatography.

[0381] It is also understood that, depending upon the host cell in which recombinant production of the variant proteins described herein occurs, they can have various glycosylation patterns, or may be non-glycosylated, as when produced in bacteria. In addition, the variant proteins may include an initial modified methionine in some cases as a result of a host-mediated process.

[0382] For further information regarding vectors and host cells, see Current Protocols in Molecular Biology, John Wiley & Sons, N.Y.

[0383] Uses of Vectors and Host Cells, and Transgenic Animals

[0384] Recombinant host cells that express the variant proteins described herein have a variety of uses. For example, the cells are useful for producing a variant protein that can be further purified into a preparation of desired amounts of the variant protein or fragments thereof. Thus, host cells containing expression vectors are useful for variant protein production.

[0385] Host cells are also useful for conducting cell-based assays involving the variant protein or variant protein fragments, such as those described above as well as other formats known in the art. Thus, a recombinant host cell expressing a variant protein is useful for assaying compounds that stimulate or inhibit variant protein function. Such an ability of a compound to modulate variant protein function may not be apparent from assays of the compound on the native/wild-type protein, or from cell-free assays of the compound. Recombinant host cells are also useful for assaying functional alterations in the variant proteins as compared with a known function.

[0386] Genetically-engineered host cells can be further used to produce non-human transgenic animals. A transgenic animal is preferably a non-human mammal, for example, a rodent, such as a rat or mouse, in which one or more of the cells of the animal include a transgene. A transgene is exogenous DNA containing a SNP of the present invention which is integrated into the genome of a cell from which a transgenic animal develops and which remains in the genome of the mature animal in one or more of its cell types or tissues. Such animals are useful for studying the function of a variant protein in vivo, and identifying and evaluating modulators of variant protein activity. Other examples of transgenic animals include, but are not limited to, non-human primates, sheep, dogs, cows, goats, chickens, and amphibians. Transgenic non-human mammals such as cows and goats can be used to produce variant proteins which can be secreted in the animal's milk and then recovered.

[0387] A transgenic animal can be produced by introducing a SNP-containing nucleic acid molecule into the male pronuclei of a fertilized oocyte, e.g., by microinjection or retroviral infection, and allowing the oocyte to develop in a pseudopregnant female foster animal Any nucleic acid molecules that contain one or more SNPs of the present invention can potentially be introduced as a transgene into the genome of a non-human animal

[0388] Any of the regulatory or other sequences useful in expression vectors can form part of the transgenic sequence. This includes intronic sequences and polyadenylation signals, if not already included. A tissue-specific regulatory sequence(s) can be operably linked to the transgene to direct expression of the variant protein in particular cells or tissues.

[0389] Methods for generating transgenic animals via embryo manipulation and microinjection, particularly animals such as mice, have become conventional in the art and are described in, for example, U.S. Pat. No 4,736,866 and 4,870,009, both by Leder et al., U.S. Pat. No. 4,873,191 by Wagner et al., and in Hogan, B., Manipulating the Mouse Embryo, (Cold Spring Harbor, Laboratory Press, Cold Spring Harbor, N.Y., 1986). Similar methods are used for production of other transgenic animals. A transgenic founder animal can be identified based upon the presence of the transgene in its genome and/or expression of transgenic mRNA in tissues or cells of the animals. A transgenic founder animal can then be used to breed additional animals carrying the transgene. Moreover, transgenic animals carrying a transgene can further be bred to other transgenic animals carrying other transgenes. A transgenic animal also includes a non-human animal in which the entire animal or tissues in the animal have been produced using the homologously recombinant host cells described herein.

[0390] In another embodiment, transgenic non-human animals can be produced which contain selected systems that allow for regulated expression of the transgene. One example of such a system is the cre/loxP recombinase system of bacteriophage P1 (Lakso et al. PNAS 89:6232-6236 (1992)). Another example of a recombinase system is the FLP recombinase system of S. cerevisiae (O'Gorman et al. Science 251:1351-1355 (1991)). If a cre/loxP recombinase system is used to regulate expression of the transgene, animals containing transgenes encoding both the Cre recombinase and a selected protein are generally needed. Such animals can be provided through the construction of “double” transgenic animals, e.g., by mating two transgenic animals, one containing a transgene encoding a selected variant protein and the other containing a transgene encoding a recombinase.

[0391] Clones of the non-human transgenic animals described herein can also be produced according to the methods described in, for example, Wilmut, I. et al. Nature 385:810-813: (1997) and PCT International Publication Nos. WO 97/07668 and WO 97/07669. In brief, a cell (e.g., a somatic cell) from the transgenic animal can be isolated and induced to exit the growth cycle and enter Gₒ phase. The quiescent cell can then be fused, e.g., through the use of electrical pulses, to an enucleated oocyte from an animal of the same species from which the quiescent cell is isolated. The reconstructed oocyte is then cultured such that it develops to morula or blastocyst and then transferred to pseudopregnant female foster animal. The offspring born of this female foster animal will be a clone of the animal from which the cell (e.g., a somatic cell) is isolated.

[0392] Transgenic animals containing recombinant cells that express the variant protein described herein are useful for conducting the assays described herein in an in vivo context. Accordingly, the various physiological factors that are present in vivo and that could influence ligand or substrate binding, variant protein activation, signal transduction, or other processes or interactions, may not be evident from in vitro cell-free or cell-based assays. Thus, non-human transgenic animals of the present invention may be used to assay in vivo variant protein function as well as the activities of a therapeutic agent or compound that modulates variant protein function/activity or expression. Such animals are also suitable for assessing the effects of null mutations (i.e., mutations that substantially or completely eliminate one or more variant protein functions).

[0393] For further information regarding transgenic animals, see Houdebine, “Antibody manufacture in transgenic animals and comparisons with other systems”, Curr Opin Biotechnol. December 2002;13(6):625-9; Petters et al., “Transgenic animals as models for human disease”, Transgenic Res. 2000;9(4-5):347-51; discussion 345-6; Wolf et al., “Use of transgenic animals in understanding molecular mechanisms of toxicity”, J Pharm Pharmacol. June 1998;50(6):567-74; Echelard, “Recombinant protein production in transgenic animals”, Curr Opin Biotechnol. October 1996;7(5):536-40; Houdebine, “Transgenic animal bioreactors”, Transgenic Res. 2000;9(4-5):305-20; Pirity et al., “Embryonic stem cells, creating transgenic animals”, Methods Cell Biol. 1998;57:279-93; and Robl et al., “Artificial chromosome vectors and expression of complex proteins in transgenic animals”, Theriogenology. January 1, 2003;59(1):107-13.

[0394] Computer-Related Embodiments

[0395] The SNPs provided in the present invention may be “provided” in a variety of mediums to facilitate use thereof As used in this section, “provided” refers to a manufacture, other than an isolated nucleic acid molecule, that contains SNP information of the present invention. Such a manufacture provides the SNP information in a form that allows a skilled artisan to examine the manufacture using means not directly applicable to examining the SNPs or a subset thereof as they exist in nature or in purified form. The SNP information that may be provided in such a form includes any of the SNP information provided by the present invention such as, for example, polymorphic nucleic acid and/or amino acid sequence information such as SEQ ID NOS:1-169, SEQ ID NOS:170-338, SEQ ID NOS:2873-2939, SEQ ID NOS:339-2872, and SEQ ID NOS:2940-21112; information about observed SNP alleles, alternative codons, populations, allele frequencies, SNP types, and/or affected proteins; or any other information provided by the present invention in Tables 1-2 and/or the Sequence Listing.

[0396] In one application of this embodiment, the SNPs of the present invention can be recorded on a computer readable medium. As used herein, “computer-readable medium” refers to any medium that can be read and accessed directly by a computer. Such media include, but are not limited to: magnetic storage media, such as floppy discs, hard disc storage medium, and magnetic tape; optical storage media such as CD-ROM; electrical storage media such as RAM and ROM; and hybrids of these categories such as magnetic/optical storage media. A skilled artisan can readily appreciate how any of the presently known computer readable media can be used to create a manufacture comprising computer readable medium having recorded thereon a nucleotide sequence of the present invention. One such medium is provided with the present application, namely, the present application contains computer readable medium (CD-R) that has nucleic acid sequences (and encoded protein sequences) containing SNPs provided/recorded thereon in ASCII text format in a Sequence Listing along with accompanying Tables that contain detailed SNP and sequence information (transcript sequences are provided as SEQ ID NOS:1-169, protein sequences are provided as SEQ ID NOS:170-338, genomic sequences are provided as SEQ ID NOS:2873-2939, transcript-based context sequences are provided as SEQ ID NOS:339-2872, and genomic-based context sequences are provided as SEQ ID NOS:2940-211:12).

[0397] As used herein, “recorded” refers to a process for storing information on computer readable medium. A skilled artisan can readily adopt any of the presently known methods for recording information on computer readable medium to generate manufactures comprising the SNP information of the present invention.

[0398] A variety of data storage structures are available to a skilled artisan for creating a computer readable medium having recorded thereon a nucleotide or amino acid sequence of the present invention. The choice of the data storage structure will generally be based on the means chosen to access the stored information. In addition, a variety of data processor programs and formats can be used to store the nucleotide/amino acid sequence information of the present invention on computer readable medium. For example, the sequence information can be represented in a word processing text file, formatted in commercially-available software such as WordPerfect and Microsoft Word, represented in the form of an ASCII file, or stored in a database application, such as OB2, Sybase, Oracle, or the like. A skilled artisan can readily adapt any number of data processor structuring formats (e.g., text file or database) in order to obtain computer readable medium having recorded thereon the SNP information of the present invention.

[0399] By providing the SNPs of the present invention in computer readable form, a skilled artisan can routinely access the SNP information for a variety of purposes. Computer software is publicly available which allows a skilled artisan to access sequence information provided in a computer readable medium. Examples of publicly available computer software include BLAST (Altschul et al., J Mol. Biol. 215:403-410 (1990)) and BLAZE (Brutlag et al., Comp. Chem. 17:203-207 (1993)) search algorithms.

[0400] The present invention further provides systems, particularly computer-based systems, which contain the SNP information described herein. Such systems may be designed to store and/or analyze information on, for example, a large number of SNP positions, or information on SNP genotypes from a large number of individuals. The SNP information of the present invention represents a valuable information source. The SNP information of the present invention stored/analyzed in a computer-based system may be used for such computer-intensive applications as determining or analyzing SNP allele frequencies in a population, mapping disease genes, genotype-phenotype association studies, grouping SNPs into haplotypes, correlating SNP haplotypes with response to particular drugs, or for various other bioinformatic, pharmacogenomic, drug development, or human identification/forensic applications.

[0401] As used herein, “a computer-based system”, refers to the hardware means, software means, and data storage means used to analyze the SNP information of the present invention. The minimum hardware means of the computer-based systems of the present invention typically comprises a central processing unit (CPU), input means, output means, and data storage means. A skilled artisan can readily appreciate that any one of the currently available computer-based systems are suitable for use in the present invention. Such a system can be changed into a system of the present invention by utilizing the SNP information provided on the CD-R, or a subset thereof, without any experimentation.

[0402] As stated above, the computer-based systems of the present invention comprises a data storage means having stored therein SNPs of the present invention and the necessary hardware means and software means for supporting and implementing a search means. As used herein, “data storage means” refers to memory which can store SNP information of the present invention, or a memory access means which can access manufactures having recorded thereon the SNP information of the present invention.

[0403] As used herein, “search means” refers to one or more programs or algorithms that are implemented on the computer-based system to identify or analyze SNPs in a target sequence based on the SNP information stored within the data storage means. Search means can be used to determine which nucleotide is present at a particular SNP position in the target sequence. As used herein, a “target sequence” can be any DNA sequence containing the SNP position(s) to be searched or queried.

[0404] As used herein, “a target structural motif,” or “target motif,” refers to any rationally selected sequence or combination of sequences containing a SNP position in which the sequence(s) is chosen based on a three-dimensional configuration that is formed upon the folding of the target motif. There are a variety of target motifs known in the art. Protein target motifs include, but are not limited to, enzymatic active sites and signal sequences. Nucleic acid target motifs include, but are not limited to, promoter sequences, hairpin structures, and inducible expression elements (protein binding sequences).

[0405] A variety of structural formats for the input and output means can be used to input and output the information in the computer-based systems of the present invention. An exemplary format for an output means is a display that depicts the presence or absence of specified nucleotides (alleles) at particular SNP positions of interest. Such presentation can provide a rapid, binary scoring system for many SNPs simultaneously.

[0406] One exemplary embodiment of a computer-based system comprising SNP information of the present invention is provided in FIG. 1. FIG. 1 provides a block diagram of a computer system 102 that can be used to implement the present invention. The computer system 102 includes a processor 106 connected to a bus 104. Also connected to the bus 104 are a main memory 108 (preferably implemented as random access memory, RAM) and a variety of secondary storage devices 110, such as a hard drive 112 and a removable medium storage device 114. The removable medium storage device 114 may represent, for example, a floppy disk drive, a CD-ROM drive, a magnetic tape drive, etc. A removable storage medium 116 (such as a floppy disk, a compact disk, a magnetic tape, etc.) containing control logic and/or data recorded therein may be inserted into the removable medium storage device 114. The computer system 102 includes appropriate software for reading the control logic and/or the data from the removable storage medium 116 once inserted in the removable medium storage device 114.

[0407] The SNP information of the present invention may be stored in a well-known manner in the main memory 108, any of the secondary storage devices 110, and/or a removable storage medium 116. Software for accessing and processing the SNP information (such as SNP scoring tools, search tools, comparing tools, etc.) preferably resides in main memory 108 during execution.

### EXAMPLES

[0408] The following examples are offered to illustrate, but not to limit the claimed invention.

[0409] Statistical Analysis of SNP Allele Association with Coronary Stenosis

[0410] A case-control genetic study to determine the association of SNPs in the human genome with coronary stenosis was carried out using genomic DNA extracted from three independently collected sample sets. A sample set from the University of California, San Francisco (UCSF), consisted of DNA obtained from 1,654 Caucasian individuals. All individuals, except for certain elderly controls, had varying degrees of cardiovascular disease, such as stenosis as evidenced by coronary angiography. A subset of these patients were diagnosed with coronary stenosis ranging from mild stenosis to severe stenosis and may have also had other vascular diseases. The severity of stenosis is based on a score obtained by angiography. The stenosis score is based on the percent of stenosis observed in 10 segments of the coronary artery, the left main, and the proximal, medial, and distal segments of each of left anterior descending, left circumflex, and right coronary arteries. The patients were divided into cases and controls depending on the study design (see Tables 6-8). Another sample set was obtained from the Cleveland Clinic (CCF1) consisted of DNA from 1,501 Caucasian individuals. All individuals, except for certain elderly controls, had varying degrees of cardiovascular disease, such as stenosis as evidenced by coronary angiography. A subset of these patients were diagnosed with coronary stenosis ranging from mild to severe stenosis and may have also had other vascular diseases. The severity of stenosis is based on a score obtained by angiography. The stenosis score is based on the percent of stenosis observed in 10 segments of the coronary artery, the left main, and the proximal, medial, and distal segments of each of left anterior descending, left circumflex, and right coronary arteries. These samples were divided into cases and controls depending on the study design (see Tables 6-8). A second sample set obtained from the Cleveland Clinic (CCF2) consisted of DNA from 1,160 Caucasian individuals, with CAD/stenosis. These samples were also divided into cases and controls depending on the study design (see Tables 6-8). All individuals, except for certain elderly controls, had varying degrees of cardiovascular disease, such as stenosis as evidenced by coronary angiography. A subset of these patients were diagnosed with coronary stenosis ranging from mild stenosis to severe stenosis and may have also had other vascular diseases. The severity of stenosis is based on a score obtained by angiography. The stenosis score is based on the percent of stenosis observed in 10 segments of the coronary artery, the left main, and the proximal, medial, and distal segments of each of left anterior descending, left circumflex, and right coronary arteries. All individuals included in each sample set had signed a written informed consent form. The study protocols were approved by the respective Internal Review Boards (IRB).

[0411] DNA was extracted from blood samples at CCF or UCSF using conventional DNA extraction methods or commercially available kits according to the manufacturer's suggested conditions, such as the QIA-amp kit from Qiagen (Valencia, Calif.). SNP as those presented in Table 5. While some samples were individually genotyped, the same samples were also used for pooling studies, in which DNA samples from about 50 individuals were pooled and allele frequencies were obtained using a PRISM® 7900HT Sequence Detection System (Applied Biosystems, Foster City, Calif.) by kinetic allele-specific PCR, similar to the method described by Germer et al., Genome Research 10:258-266 (2000). Alternatively, the sample genotypes were obtained by performing an oligonucleotide ligation assay (OLA). Briefly, the genomic regions containing the SNPs of interest were amplified from DNA obtained from patient samples using PCR primers. Then the individual samples were genotyped by ligating the allele specific probes and a ligation specific probe. Each allele specific probe is attached to a Luminex® bead that has a specific fluorescence. The ligated products are then detected in a Luminex®100™. fluorimeter (Luminex Corporation, Austin, Tex.).

[0412] Genotype or allele frequency results of 49 SNPs in the UCSF, CCF1 and CCF2 samples presented in Tables 6-8 were analyzed for association with coronary stenosis based on comparison of cases and controls in different study designs (see Tables). No multiple testing corrections were made.

[0413] Several tests of association were calculated for both unstratified and stratified settings: 1) Fisher's exact test for allelic association (“Allelic”), and 2) asymptotic chi-square test of genotype association of two different modes of inheritance: dominant (“Dom”).

[0414] Effect sizes were estimated through genotype or allelic odds ratios. The reported allele or genotype may be under-represented in cases (ORs<1) (with a lower frequency in cases than in controls, indicating that the reported allele or genotype is associated with a decreased risk and the other allele or genotype is a risk factor for disease) or over represented in cases (ORs>1) (indicating that the reported allele or genotype is a risk factor for disease).

[0415] Replicated coronary stenosis markers are reported in Tables 6 and 8. The difference between the markers presented in Tables 6 and 8 is simply the study design. A SNP is considered a replicated marker if the association analyses in two sample sets showed that the risk allele was the same, the p-values were each less than or equal to 0.2. The p-value of 0.2 was used as a cutoff for significance because the low power of the sample sets to show association due to the limited number of coronary stenosis cases in the sample sets.

[0416] An example of a replicated marker, where the homozygous reported allele is associated with an increased risk for coronary stenosis is hCV15878451 (Table 6). Individuals with 2 copies of the reported allele of hCV15878451 (inheritance mode “Rec”) showed significant association (p-values 0.0365 and 0.1692) with increased risk (odds ratios of 5.80 and 2.4 times of the reference) when compared to those carrying one or no copies of the reported allele (heterozygotes and homozygotes of the non risk allele) in both the CCF2 and UCSF sample sets.

[0417] An example of a replicated marker where the reported allele is associated with a decreased risk of coronary stenosis is hCV25473769 (Table 6). Among the study population, all carriers of the reported allele (inheritance mode “Allelic”) of hCV25473769 showed significant association (p-values of 0.0980 and 0.0706) with coronary stenosis with a decreased risk (OR of 0.73 and 0.78) compared with those carrying the non-reported alleles in both the CCF2 and UCSF samples.

[0418] Tripicated coronary stenosis markers are reported in Table 7. A SNP is considered a triplicated marker if the association analyses in three sample sets showed that the risk allele was the same, the p-values were each less than or equal to 0.2. The p-value of 0.2 was used as a cutoff for significance because the low power of the sample sets to show association was due to the limited number of coronary stenosis cases in the sample sets.

[0419] An example of a triplicated marker, where the homozygous reported allele is associated with an increased risk for coronary stenosis is hCV25651109 (Table 7). Individuals with 2 copies of the reported allele of hCV25651109 (inheritance mode “Rec”) showed significant association (p-values 0.0369, 0.0122 and 0.0.0181) with increased risk (odds ratios of 1.54, 1.91 and 1.67 times of the reference) when compared to those carrying one or no copies of the reported allele (heterozygotes and homozygotes of the non risk allele) in the CCF1, UCSF and CCF2 sample sets. There are no examples of a triplicated marker with a decreased risk of coronary stenosis this data table.

[0420] Since coronary stenosis is a form of CAD which is a key underlying cause of CHD, the SNPs presented in Tables 6-8 as associated with coronary stenosis is may also be used to determine risk associated with the development of CHD such as MI (heart attack) and other vascular diseases such as cerebrovascular disease, carotid artery disease, peripheral artery disease, aortic aneurysm, vascular dementia. In addition the SNPs disclosed herein may be used as well to predict an individual's suitability for drug therapy, particularly statin treatment.

[0421] All publications and patents cited in this specification are herein incorporated by reference in their entirety. Various modifications and variations of the described compositions, methods and systems of the invention will be apparent to those skilled in the art without departing from the scope and spirit of the invention. Although the invention has been described in connection with specific preferred embodiments and certain working examples, it should be understood that the invention as claimed should not be unduly limited to such specific embodiments. Indeed, various modifications of the above-described modes for carrying out the invention that are obvious to those skilled in the field of molecular biology, genetics and related fields are intended to be within the scope of the following claims.

TABLE 5

| | | | | |
|---|---|---|---|---|
| Marker | Alleles | Sequence A (allele-specific primer) | Sequence B (allele-specific primer) | Sequence C (common primer) |

| | | | | | | | |
|---|---|---|---|---|---|---|---|
| hCV11405568 | A/G | CGGCTCGAGGTTTCAT | (SEQ ID NO: 21113) | CGGCTCGAGGTTTCAC | (SEQ ID NO: 21114) | ACTGGGCCTGGAGTGTAGT | (SEQ ID NO: 21115) |
| hCV11450563 | G/T | TAAAGAATGCATAAATT | (SEQ ID NO: 21116) | TTAAAGAATGCATAAATTAGTGTGT | (SEQ ID NO: 21117) | GATCCTATTGGATTTGAAGACTTA | (SEQ ID NO: 21118) |
| | | AGTGTGG | | | | | |
| hCV11474611 | G/T | ATCGCCCATGTGCTG | (SEQ ID NO: 21119) | CATCGCCCATGTGCTT | (SEQ ID NO: 21120) | TCAAACCAGGAACCCTATCT | (SEQ ID NO: 21121) |
| hCV11546054 | A/G | GCAGGCTTTCAGGCAAT | (SEQ ID NO: 21122) | GCAGGCTTTCAGGCAAC | (SEQ ID NO: 21123) | AGTCACCAGCCAGGATCTT | (SEQ ID NO: 21124) |
| hCV1329260 | A/G | TAGTGCAATATTGCTGA | (SEQ ID NO: 21125) | TGCAATATTGCTGAAAATACC | (SEQ ID NO: 21126) | TTGGTTGAACTCCTGAAACTTAT | (SEQ ID NO: 21127) |
| | | AAATACT | | | | | |
| hCV15854171 | C/T | TTGGTGTTTCCTTGTGA | (SEQ ID NO: 21128) | TTGGTGTTTCCTTGTGACAT | (SEQ ID NO: 21129) | CCTAGTGTTTGCAATCTCATTTATC | (SEQ ID NO: 21130) |
| | | CAC | | | | | |
| hCV15859291 | A/G | TGAAGACCACTTGCCAG | (SEQ ID NO: 21131) | TGAAGACCACTTGCCAGAC | (SEQ ID NO: 21132) | CGGGAACCGTCACTCAT | (SEQ ID NO: 21133) |
| | | AT | | | | | |
| hCV15878451 | A/G | CCTGGGAACAACAGCAA | (SEQ ID NO: 21134) | CCTGGGAACAACAGCAG | (SEQ ID NO: 21135) | CACCTTACCCTGAAGAGTTAAAAC | (SEQ ID NO: 21136) |
| hCV15884906 | G/T | GGGTGATTCGAAGTGTA | (SEQ ID NO: 21137) | GGGTGATTCGAAGTGTAAAT | (SEQ ID NO: 21138) | TAGGGCGTCCAGCTATAAA | (SEQ ID NO: 21139) |
| | | AAG | | | | | |
| hCV16180323 | G/T | CACTCGGCGTGCTAGAG | (SEQ ID NO: 21140) | CACTCGGCGTGCTAGAT | (SEQ ID NO: 21141) | CAAACCCAGGCGAAAAG | (SEQ ID NO: 21142) |
| hCV1624173 | G/T | TGGACAACAGCACCTTA | (SEQ ID NO: 21143) | TGGACAACAGCACCTTAC | (SEQ ID NO: 21144) | TTCCAGAGGTTCCTTCAATC | (SEQ ID NO: 21145) |
| | | T | | | | | |
| hCV1801146 | A/G | GAACACCTACAAAATGA | (SEQ ID NO: 21146) | GAACACCTACAAAATGACTTCTC | (SEQ ID NO: 21147) | TTTCCACAGGTAGCTTCTGTATA | (SEQ ID NO: 21148) |
| | | TGCTTC | | | | | |
| hCV1801163 | C/G | TGGCAGCAGGAGACG | (SEQ ID NO: 21149) | ATTGGCAGCAGGAGACA | (SEQ ID NO: 21150) | GCTTTGGAGCGCTTGTAA | (SEQ ID NO: 21151) |
| hCV1801172 | C/T | CATGAGGGCCGACTGT | (SEQ ID NO: 21152) | ATGAGGGCCGACTGC | (SEQ ID NO: 21153) | CCACCCACACTTAGTTTCTTTC | (SEQ ID NO: 21154) |
| hCV1913911 | A/G | CTAGCAAAGCACACAAA | (SEQ ID NO: 21155) | CTAGCAAAGCACACAAATGAG | (SEQ ID NO: 21156) | GGATGAAGTTTTTGAAACACAC | (SEQ ID NO: 21157) |
| | | TGAC | | | | | |
| hCV1920613 | C/G | ACCACGGACACATCTGC | (SEQ ID NO: 21158) | TACCACGGACACATCTGG | (SEQ ID NO: 21159) | GGTGTGCTGGAGAACAAAC | (SEQ ID NO: 21160) |
| hCV2199708 | G/T | AAAACTGTATACGTGTT | (SEQ ID NO: 21161) | AAAAACTGTATACGTGTTTTGTCA | (SEQ ID NO: 21162) | ACCAGCATTCAAGATACTGTTTAC | (SEQ ID NO: 21163) |
| | | TTGTCC | | | | | |
| hCV22272386 | A/G | GCCTTCTGTCCCTCCG | (SEQ ID NO: 21164) | AGCCTTCTGTCCCTCCA | (SEQ ID NO: 21165) | CCAGGCCAGGTCCATAT | (SEQ ID NO: 21166) |
| hCV2494035 | A/C | TTATTTGCTTGATGGTT | (SEQ ID NO: 21167) | ATTATTTGCTTGATGGTTTAGAAC | (SEQ ID NO: 21168) | ATCAGCTCATCTTCACTCATTAGT | (SEQ ID NO: 21169) |
| | | TAGAAA | | | | | |
| hCV25472511 | C/T | GCAGCAAAAGACAGCTA | (SEQ ID NO: 21170) | GCAGCAAAAGACAGCTACAA | (SEQ ID NO: 21171) | GGAGAGTCGCAGGGTATTT | (SEQ ID NO: 21172) |
| | | CAG | | | | | |
| hCV25472858 | C/T | CAATGCTTTGATGCCTT | (SEQ ID NO: 21173) | CAATGCTTTGATGCCTTTAT | (SEQ ID NO: 21174) | GCAGAAGGTACAAGTATAAGAAGA | (SEQ ID NO: 21175) |
| | | TAC | | | | | |
| hCV25473769 | C/T | GTTTGGTTTCTTCTTTT | (SEQ ID NO: 21176) | GTGGTTTCTTCTTTGCAT | (SEQ ID NO: 21177) | GGCTCACGCAAACATCA | (SEQ ID NO: 21178) |
| | | GCAC | | | | | |
| hCV25594325 | A/T | CGAGCCACCTCTGGAT | (SEQ ID NO: 21179) | CGAGCCACCTCTGGAA | (SEQ ID NO: 21180) | TGGATGGCCGAGAATG | (SEQ ID NO: 21181) |
| hCV25594835 | A/G | AAGGCTCAGTGCTTGAG | (SEQ ID NO: 21182) | AAGGCTCAGTGCTTGAGAG | (SEQ ID NO: 21183) | TTCTTCCTTGACAACAAGATCA | (SEQ ID NO: 21184) |
| | | AA | | | | | |
| hCV25609975 | A/C | CTTTGAACCTTTTCACC | (SEQ ID NO: 21185) | TTTGAACCTTTTCACCACC | (SEQ ID NO: 21186) | GAGTGAGGAGGGAGAAAGTAAG | (SEQ ID NO: 21187) |
| | | ACA | | | | | |
| hCV25637605 | A/G | GCGGCTCTGCACAT | (SEQ ID NO: 21188) | GCGGCTCTGCACAC | (SEQ ID NO: 21189) | GCGGGTGGCTCCTTTAA | (SEQ ID NO: 21190) |
| hCV25644769 | A/T | CATATTTACTTAAAGCT | (SEQ ID NO: 21191) | ATATTTACTTAAAGCTCCACTC | (SEQ ID NO: 21192) | TTGCTTACCCAGTACATATTAAATC | (SEQ ID NO: 21193) |
| | | CCACTCTTTA | | TTTT | | | |
| hCV25651109 | C/G | GGTCCTGCTTGATGCG | (SEQ ID NO: 21194) | AGGTCCTGCTTGATGCC | (SEQ ID NO: 21195) | CGACCATGGACATTCACAT | (SEQ ID NO: 21196) |
| hCV25745786 | C/T | GCATCTTGCTCTGCACA | (SEQ ID NO: 21197) | GCATCTTGCTCTGCACAA | (SEQ ID NO: 21198) | GCTGCAGGATCTCAGACAG | (SEQ ID NO: 21199) |
| | | G | | | | | |
| hCV25761292 | C/G | GGGCAGCTCACCTCTCT | (SEQ ID NO: 21200) | GGGCAGCTCACCTCTCTAC | (SEQ ID NO: 21201) | GAGTGACTGCCAGAATTGTCT | (SEQ ID NO: 21202) |
| | | AG | | | | | |
| hCV25930271 | C/T | GAATCTCATGTTCAGGA | (SEQ ID NO: 21203) | CGAATCTCATGTTCAGGAAATA | (SEQ ID NO: 21204) | GCCATGGCCCATAAAAC | (SEQ ID NO: 21205) |
| | | AATG | | | | | |
| hCV26135643 | C/G | TGCCGGGCTGACG | (SEQ ID NO: 21206) | TTGCCGGGCTGACA | (SEQ ID NO: 21207) | AAATTAACCCAGCATCCTATTC | (SEQ ID NO: 21208) |
| hCV2651834 | C/T | GCAGTAATACGTGGTTC | (SEQ ID NO: 21209) | CTGCAGTAATACGTGGTTCATA | (SEQ ID NO: 21210) | CCAGACCTTGCTCTGATGT | (SEQ ID NO: 21211) |
| | | ATG | | | | | |
| hCV27473851 | A/G | GTAGGGAGCCTGGGAAC | (SEQ ID NO: 21212) | GGGAGCCTGGGAACC | (SEQ ID NO: 21213) | GGTCTATTTCTTTGTTAAGTCGT | (SEQ ID NO: 21214) |
| | | T | | | | | |
| hCV2930693 | A/C | CGAAGAAGTACAACCCA | (SEQ ID NO: 21215) | CGAAGAAGTACAACCCACAG | (SEQ ID NO: 21216) | GACACATGTAAGTTCCACTCATATG | (SEQ ID NO: 21217) |
| | | CAT | | | | | |
| hCV2956364 | A/G | GGAGATCCTCATCTTCA | (SEQ ID NO: 21218) | GAGATCCTCATCTTCACGG | (SEQ ID NO: 21219) | TGCTGACTGCAAGGTCTTAT | (SEQ ID NO: 21220) |
| | | CGA | | | | | |
| hCV3034366 | C/T | GAGCTTCCCTTGCAGAA | (SEQ ID NO: 21221) | GAGCTTCCCTTGCAGAATAT | (SEQ ID NO: 21222) | TTTAGCGGTATGTATTCATTTGTAC | (SEQ ID NO: 21223) |
| | | TAC | | | | | |
| hCV3056870 | C/G | ACAGGCGAGGAGTAGTA | (SEQ ID NO: 21224) | CAGGCGAGGAGTAGTAGTTG | (SEQ ID NO: 21225) | CATGAAATGACCTGTGACAATACT | (SEQ ID NO: 21226) |
| | | GTTC | | | | | |
| hCV3070574 | G/T | GGTTCCCTTCCCACCG | (SEQ ID NO: 21227) | TGGTTCCCTTCCCACCT | (SEQ ID NO: 21228) | GCATGGAGGAGATGTTGGAAATAAGAG | (SEQ ID NO: 21229) |
| hCV3130332 | A/G | AGTTTATCTGTGCTCCC | (SEQ ID NO: 21230) | AGTTTATCTGTGCTCCCTAATTAG | (SEQ ID NO: 21231) | CCTGCTCCTTGCTGATG | (SEQ ID NO: 21232) |
| | | TAATTAA | | | | | |
| hCV3200162 | A/G | CAAATCAGATTCAGAGT | (SEQ ID NO: 21233) | CAAATCAGATTCAGAGTTAAAC | (SEQ ID NO: 21234) | ACGTTATATGGCTCTATCTCTACAAC | (SEQ ID NO: 21235) |
| | | TAAACAA | | AG | | | |
| hCV3232720 | G/T | CAGCTCCTCACAGTTCA | (SEQ ID NO: 21236) | CAGCTCCTCACAGTTCAAAT | (SEQ ID NO: 21237) | GAGAATTCCTCGCACATATATATC | (SEQ ID NO: 21238) |
| | | AAG | | | | | |
| hCV393632 | A/G | GATTTAGAATTATGGAC | (SEQ ID NO: 21239) | GATTTAGAATTATGGACACAAA | (SEQ ID NO: 21240) | TTTTGTTGCCCATATGATCTAT | (SEQ ID NO: 21241) |
| | | ACAAACAT | | CAC | | | |
| hCV447698 | A/T | TCAGTTTGACATCTTCT | (SEQ ID NO: 21242) | TTCAGTTTGACATCTTCTTTTGT | (SEQ ID NO: 21243) | CATTCTTGGTTTTTGTCTTAGAGA | (SEQ ID NO: 21244) |
| | | TTTGA | | | | | |
| hCV7440075 | G/T | CAAGGTGTCCCACACAT | (SEQ ID NO: 21245) | TCAAGGTGTCCCACACATTA | (SEQ ID NO: 21246) | CCCCCAAGCATTGAAGA | (SEQ ID NO: 21247) |
| | | TC | | | | | |
| hCV904489 | A/C | CAAGGCTAGGACTTGAG | (SEQ ID NO: 21248) | CAAGGCTAGGACTTGAGAGAAG | (SEQ ID NO: 21249) | GGCTTGCGTGTCTGATTC | (SEQ ID NO: 21250) |
| | | AGAAT | | | | | |
| hCV9093711 | C/T | GCTCACTCACCGAGGTA | (SEQ ID NO: 21251) | GCTCACTCACCGAGGTATC | (SEQ ID NO: 21252) | CAGCAGCTGGGTCTAAGAG | (SEQ ID NO: 21253) |
| | | TG | | | | | |
| hCV928121 | C/G | TTATGTGATTGTCTTTT | (SEQ ID NO: 21254) | TTTATGTGATTGTCTTTTTTCTTTC | (SEQ ID NO: 21255) | ATACCTCTCTCCAATCTTGTATGA | (SEQ ID NO: 21256) |
| | | TTCTTTG | | | | | |
| hCV9473458 | A/C | AGGCTATTGCCAGACAC | (SEQ ID NO: 21257) | GGCTATTGCCAGACACAG | (SEQ ID NO: 21258) | TGATGATCAGTGCAGAACCT | (SEQ ID NO: 21259) |
| | | AT | | | | | |

[0422] TABLE 6

| hCV# | Gene Name | Sample Set | p value | OR | Case freq. | Control freq. | Mode | Risk allele | Strata | Design |
|---|---|---|---|---|---|---|---|---|---|---|
| hCV11450563 | none | CCF1 | 0.03492 | 1.57 | 0.456 | 0.419 | Dom. | G | All | B |
| hCV11450563 | none | UCSF | 0.04404 | 1.57 | 0.467 | 0.413 | Dom. | G | All | C |
| hCV11474611 | CALM1 | CCF1 | 0.01186 | 1.67 | 0.052 | 0.032 | Allelic | G | All | A |
| hCV11474611 | CALM1 | UCSF | 0.03131 | 1.77 | 0.061 | 0.036 | Allelic | G | All | C |
| hCV15854171 | ABCG2 | CCF1 | 0.02063 | 1.60 | 0.969 | 0.951 | Allelic | C | All | A |
| hCV15854171 | ABCG2 | UCSF | 0.0401 | 1.63 | 0.959 | 0.936 | Allelic | C | All | C |
| hCV1624173 | CENPE | CCF1 | 0.04651 | 1.39 | 0.045 | 0.018 | Dom. | A | All | B |
| hCV1624173 | CENPE | UCSF | 0.04651 | 1.36 | 0.049 | 0.037 | Dom. | A | All | C |
| hCV25594325 | HAP1 | CCF1 | 0.00322 | 1.34 | 0.832 | 0.786 | Allelic | T | All | A |
| hCV25594325 | HAP1 | UCSF | 0.01967 | 1.36 | 0.827 | 0.778 | Allelic | T | All | C |
| hCV25637605 | FSTL4 | CCF1 | 0.01816 | 1.34 | 0.786 | 0.732 | Allelic | G | All | B |
| hCV25637605 | FSTL4 | UCSF | 0.04845 | 1.28 | 0.779 | 0.734 | Allelic | G | All | C |
| hCV25644769 | AP3B1 | CCF1 | 0.01015 | 1.50 | 0.944 | 0.918 | Allelic | T | All | A |
| hCV25644769 | AP3B1 | UCSF | 0.03908 | 1.51 | 0.934 | 0.903 | Allelic | T | All | C |
| hCV2930693 | FSTL4 | CCF1 | 0.03056 | 1.21 | 0.767 | 0.730 | Allelic | A | All | A |
| hCV2930693 | FSTL4 | UCSF | 0.02143 | 1.32 | 0.769 | 0.715 | Allelic | A | All | C |
| hCV3130332 | K6IRS4 | CCF1 | 0.03499 | 1.32 | 0.258 | 0.208 | Allelic | A | All | B |
| hCV3130332 | K6IRS4 | UCSF | 0.04163 | 1.28 | 0.278 | 0.231 | Allelic | A | All | C |
| hCV11546054 | TRIP | CCF1 | 0.06975 | 1.20 | 0.831 | 0.803 | Allelic | A | All | A |
| hCV11546054 | TRIP | UCSF | 0.04332 | 1.33 | 0.840 | 0.797 | Allelic | A | All | A |
| hCV3034366 | none | CCF1 | 0.04304 | 1.26 | 0.638 | 0.584 | Allelic | T | All | B |
| hCV3034366 | none | CCF2 | 0.09469 | 1.21 | 0.655 | 0.612 | Allelic | T | All | A |
| hCV904489 | XYLB | CCF1 | 0.06139 | 1.24 | 0.646 | 0.596 | Allelic | C | All | B |
| hCV904489 | XYLB | UCSF | 0.02706 | 1.34 | 0.655 | 0.587 | Allelic | C | All | B |
| hCV1329260 | DNM3 | CCF1 | 0.15501 | 1.17 | 0.479 | 0.441 | Allelic | A | All | B |
| hCV1329260 | DNM3 | UCSF | 0.05074 | 1.29 | 0.455 | 0.393 | Allelic | A | All | B |
| hCV15859291 | CHRM3 | CCF2/UCSF | 0.12353 | 2.00 | 0.986 | 0.972 | Allelic | G | All | B |
| hCV15859291 | CHRM3 | UCSF | 0.09145 | 2.16 | 0.987 | 0.972 | Allelic | G | All | B |
| hCV1913911 | none | CCF2 | 0.16829 | 1.17 | 0.629 | 0.592 | Allelic | G | All | A |
| hCV1913911 | none | UCSF | 0.02596 | 1.33 | 0.614 | 0.545 | Allelic | G | All | B |
| hCV26135643 | ABCG8 | CCF1 | 0.07887 | 1.33 | 0.941 | 0.923 | Allelic | G | All | A |
| hCV26135643 | ABCG8 | CCF2 | 0.02423 | 2.00 | 0.958 | 0.919 | Allelic | G | All | B |
| hCV11405566 | LGALS8 | CCF1 | 0.13173 | 1.20 | 0.720 | 0.683 | Allelic | G | All | B |
| hCV11405566 | LGALS8 | CCF2 | 0.01297 | 1.35 | 0.758 | 0.698 | Allelic | G | All | A |
| hCV15878451 | POU2F3 | CCF2 | 0.03649 | 5.80 | 0.015 | 0.000 | Rec. | A | All | A |
| hCV15878451 | POU2F3 | UCSF | 0.16924 | 2.40 | 0.024 | 0.010 | Rec. | A | All | A |
| hCV1801146 | MKI67 | CCF2 | 0.11734 | 1.36 | 0.827 | 0.779 | Allelic | G | All | B |
| hCV1801146 | MKI67 | UCSF | 0.0723 | 1.27 | 0.817 | 0.778 | Allelic | G | All | A |
| hCV25472511 | MKI67 | CCF2 | 0.09847 | 1.37 | 0.827 | 0.777 | Allelic | C | All | B |
| hCV25472511 | MKI67 | UCSF | 0.0717 | 1.28 | 0.818 | 0.779 | Allelic | C | All | A |
| hCV25745786 | none | CCF2 | 0.17887 | 1.39 | 0.911 | 0.880 | Dom. | C | All | A |
| hCV25745786 | none | UCSF | 0.07858 | 1.51 | 0.907 | 0.866 | Dom. | C | All | A |
| hCV3232720 | C14orf93 | CCF1 | 0.07667 | 1.21 | 0.178 | 0.151 | Allelic | T | All | A |
| hCV3232720 | C14orf93 | CCF2 | 0.02705 | 1.41 | 0.177 | 0.133 | Allelic | T | All | A |
| hCV928121 | none | CCF2 | 0.13895 | 1.18 | 0.618 | 0.579 | Allelic | C | All | A |
| hCV928121 | none | UCSF | 0.12664 | 1.18 | 0.632 | 0.592 | Allelic | C | All | A |
| hCV25473769 | MKI67 | CCF2 | 0.09802 | 0.73 | 0.825 | 0.775 | Allelic | C | All | B |
| hCV25473769 | MKI67 | UCSF | 0.07062 | 0.78 | 0.820 | 0.781 | Allelic | C | All | A |

A coronary stenosis cases vs. no or low coronary stenosis, no MI controls
B coronary stenosis cases vs. no coronary stenosis, no MI controls
C coronary stenosis cases vs. no MI controls

[0423] TABLE 7

| hCV# | Gene Name | Sample Set | p value | OR | Case freq. | Control freq. | Mode | Risk allele | Strata | Design |
|---|---|---|---|---|---|---|---|---|---|---|
| hCV2199708 | CHCHD3 | CCF1 | 0.0414 | 1.25 | 0.562 | 0.507 | Allelic | G | All | B |
| hCV2199708 | CHCHD3 | UCSF | 0.0497 | 1.23 | 0.582 | 0.531 | Allelic | G | All | C |
| hCV2199708 | CHCHD3 | CCF2 | 0.0003 | 1.42 | 0.580 | 0.493 | Allelic | G | All | A |
| hCV25651109 | SLC39A7 | CCF1 | 0.0369 | 1.54 | 0.938 | 0.908 | Rec. | G | All | A |
| hCV25651109 | SLC39A7 | UCSF | 0.0122 | 1.91 | 0.936 | 0.884 | Rec. | G | All | C |
| hCV25651109 | SLC39A7 | CCF2 | 0.0181 | 1.67 | 0.929 | 0.887 | Rec. | G | All | A |
| hCV25930271 | LPA | CCF1 | 0.0000 | 3.80 | 0.036 | 0.010 | Allelic | C | All | A |
| hCV25930271 | LPA | UCSF | 0.0325 | 2.11 | 0.039 | 0.019 | Allelic | C | All | C |
| hCV25930271 | LPA | CCF2 | 0.0789 | 1.92 | 0.028 | 0.015 | Allelic | C | All | A |
| hCV15884906 | none | CCF1 | 0.0636 | 1.26 | 0.128 | 0.104 | Allelic | G | All | A |
| hCV15884906 | none | CCF2/UCSF | 0.0966 | 1.49 | 0.126 | 0.088 | Allelic | G | All | B |
| hCV15884906 | none | UCSF | 0.0039 | 1.65 | 0.137 | 0.087 | Allelic | G | All | A |
| hCV16180323 | NFIB | CCF1 | 0.1307 | 1.34 | 0.102 | 0.078 | Allelic | A | All | B |
| hCV16180323 | NFIB | CCF2/UCSF | 0.0492 | 1.38 | 0.122 | 0.091 | Allelic | A | All | A |
| hCV16180323 | NFIB | UCSF | 0.0002 | 2.08 | 0.121 | 0.062 | Allelic | A | All | A |
| hCV1801163 | MKI67 | CCF1 | 0.1989 | 1.20 | 0.829 | 0.802 | Allelic | T | All | B |
| hCV1801163 | MKI67 | CCF2 | 0.1000 | 1.36 | 0.825 | 0.777 | Allelic | T | All | B |
| hCV1801163 | MKI67 | UCSF | 0.0506 | 1.30 | 0.821 | 0.778 | Allelic | T | All | C |
| hCV1801172 | MKI67 | CCF1 | 0.0758 | 1.16 | 0.715 | 0.683 | Allelic | G | All | A |
| hCV1801172 | MKI67 | CCF2 | 0.0656 | 1.25 | 0.733 | 0.687 | Allelic | G | All | A |
| hCV1801172 | MKI67 | UCSF | 0.0931 | 1.22 | 0.716 | 0.675 | Allelic | G | All | A |
| hCV25472858 | MKI67 | CCF1 | 0.1764 | 1.21 | 0.830 | 0.802 | Allelic | T | All | B |
| hCV25472858 | MKI67 | CCF2 | 0.1206 | 1.35 | 0.825 | 0.777 | Allelic | T | All | B |
| hCV25472858 | MKI67 | UCSF | 0.0612 | 1.29 | 0.820 | 0.779 | Allelic | T | All | A |
| hCV25761292 | QSCN6 | CCF1 | 0.1573 | 1.16 | 0.173 | 0.153 | Allelic | C | All | A |
| hCV25761292 | QSCN6 | CCF2/UCSF | 0.1060 | 1.38 | 0.174 | 0.133 | Allelic | C | All | B |
| hCV25761292 | QSCN6 | UCSF | 0.1059 | 1.29 | 0.170 | 0.137 | Allelic | C | All | C |
| hCV27473851 | LGALS9 | CCF1 | 0.1176 | 1.17 | 0.799 | 0.773 | Allelic | G | All | A |
| hCV27473851 | LGALS9 | CCF2/UCSF | 0.1535 | 1.26 | 0.779 | 0.738 | Allelic | G | All | B |
| hCV27473851 | LGALS9 | UCSF | 0.0244 | 1.35 | 0.818 | 0.769 | Allelic | G | All | A |
| hCV2956364 | TGM6 | CCF1 | 0.0584 | 1.35 | 0.084 | 0.064 | Allelic | A | All | A |
| hCV2956364 | TGM6 | CCF2 | 0.0064 | 3.60 | 0.061 | 0.018 | Allelic | A | All | B |
| hCV2956364 | TGM6 | UCSF | 0.0472 | 1.53 | 0.089 | 0.060 | Allelic | A | All | A |
| hCV3056870 | ARTS-1 | CCF1 | 0.0691 | 1.18 | 0.750 | 0.718 | Allelic | C | All | A |
| hCV3056870 | ARTS-1 | CCF2 | 0.0765 | 1.34 | 0.736 | 0.676 | Allelic | C | All | B |
| hCV3056870 | ARTS-1 | UCSF | 0.0977 | 1.22 | 0.737 | 0.697 | Allelic | C | All | A |
| hCV3070574 | none | CCF1 | 0.0806 | 1.16 | 0.338 | 0.305 | Allelic | G | All | A |
| hCV3070574 | none | CCF2/UCSF | 0.1524 | 1.17 | 0.327 | 0.294 | Allelic | G | All | A |
| hCV3070574 | none | UCSF1 | 0.1259 | 1.19 | 0.338 | 0.300 | Allelic | G | All | A |
| hCV447698 | VAV3 | CCF1 | 0.1008 | 1.15 | 0.705 | 0.674 | Allelic | A | All | A |
| hCV447698 | VAV3 | CCF2/UCSF | 0.0126 | 1.42 | 0.694 | 0.615 | Allelic | A | All | B |
| hCV447698 | VAV3 | UCSF | 0.0614 | 1.28 | 0.693 | 0.638 | Allelic | A | All | B |
| hCV9473458 | none | CCF1 | 0.0828 | 1.20 | 0.538 | 0.492 | Allelic | A | All | B |
| hCV9473458 | none | CCF2 | 0.1474 | 1.17 | 0.530 | 0.490 | Allelic | A | All | A |
| hCV9473458 | none | UCSF | 0.0243 | 1.33 | 0.530 | 0.458 | Allelic | A | All | B |
| hCV1920613 | DFNB31 | CCF1 | 0.1904 | 1.25 | 0.779 | 0.738 | Rec. | G | All | B |
| hCV1920613 | DFNB31 | CCF2/UCSF | 0.1527 | 1.37 | 0.803 | 0.748 | Rec. | G | All | B |
| hCV1920613 | DFNB31 | UCSF | 0.0700 | 1.37 | 0.790 | 0.733 | Rec. | G | All | A |
| hCV393632 | none | CCF1 | 0.1272 | 1.30 | 0.893 | 0.865 | Rec. | G | All | A |
| hCV393632 | none | CCF2/UCSF | 0.0467 | 1.50 | 0.890 | 0.844 | Rec. | G | All | A |
| hCV393632 | none | UCSF | 0.1907 | 1.34 | 0.885 | 0.853 | Rec. | G | All | A |
| hCV7440075 | APG4B | CCF1 | 0.0520 | 1.66 | 0.138 | 0.088 | Rec. | T | All | B |
| hCV7440075 | APG4B | CCF2/UCSF | 0.0785 | 1.47 | 0.140 | 0.100 | Rec. | T | All | A |
| hCV7440075 | APG4B | UCSF | 0.0277 | 2.10 | 0.121 | 0.062 | Rec. | T | All | B |
| hCV25594835 | EGF | CCF1 | 0.0150 | 9.87 | 0.999 | 0.986 | Dom. | G | All | B |
| hCV25594835 | EGF | CCF2 | 0.0524 | 7.60 | 0.998 | 0.982 | Dom. | G | All | B |
| hCV25594835 | EGF | UCSF | 0.0304 | 4.72 | 1.000 | 0.990 | Dom. | G | All | A |
| hCV22272386 | CRYBB3 | CCF1 | 0.0616 | 1.48 | 0.885 | 0.839 | Rec. | G | All | B |
| hCV22272386 | CRYBB3 | CCF2 | 0.1950 | 1.39 | 0.916 | 0.887 | Rec. | G | All | A |
| hCV22272386 | CRYBB3 | UCSF | 0.0203 | 1.74 | 0.916 | 0.863 | Rec. | G | All | A |
| hCV25609975 | WDR31 | CCF1 | 0.0078 | 3.69 | 0.993 | 0.975 | Rec. | A | All | A |
| hCV25609975 | WDR31 | CCF2 | 0.1595 | 2.83 | 0.990 | 0.973 | Rec. | A | All | B |
| hCV25609975 | WDR31 | UCSF | 0.1451 | 2.23 | 0.985 | 0.966 | Rec. | A | All | B |
| hCV3200162 | CYBRD1 | CCF1 | 0.1327 | 1.18 | 0.458 | 0.417 | Rec. | A | All | A |
| hCV3200162 | CYBRD1 | CCF2 | 0.1607 | 1.36 | 0.457 | 0.382 | Rec. | A | All | B |
| hCV3200162 | CYBRD1 | UCSF | 0.0020 | 1.76 | 0.467 | 0.331 | Rec. | A | All | B |
| hCV9093711 | NDUFA10 | CCF1 | 0.1893 | 1.23 | 0.630 | 0.581 | Dom. | C | All | B |
| hCV9093711 | NDUFA10 | CCF2/UCSF | 0.1556 | 1.22 | 0.624 | 0.575 | Dom. | C | All | A |
| hCV9093711 | NDUFA10 | UCSF | 0.0818 | 1.38 | 0.685 | 0.612 | Dom. | C | All | B |
| hCV2494035 | none | CCF1 | 0.1917 | 1.15 | 0.550 | 0.514 | Dom. | A | All | A |
| hCV2494035 | none | CCF2 | 0.1449 | 1.37 | 0.551 | 0.473 | Dom. | A | All | B |
| hCV2494035 | none | UCSF | 0.0647 | 1.32 | 0.586 | 0.517 | Dom. | A | All | C |

A coronary stenosis cases vs. no or low coronary stenosis, no MI controls
B coronary stenosis cases vs. no coronary stenosis, no MI controls
C coronary stenosis cases vs. no MI controls

[0424] TABLE 8

| hCV# | Gene Name | Sample Set | p value | OR | Case Freq. | Control Freq. | mode | Risk allele | Strata | Design |
|---|---|---|---|---|---|---|---|---|---|---|
| hCV2651834 | CDH20 | CCF1/UCSF | 0.0010 | 1.79 | 0.65 | 0.51 | Allelic | T | All | D |
| hCV2651834 | CDH20 | UCSF | 0.0114 | 1.47 | 0.61 | 0.52 | Allelic | T | All | E |

D CCF Younger female cases (<=63) vs. UCSF GT 75 female no coronary stenosis controls
E Younger case (<=59) vs. GT75 no coronary stenosis controls

1. A method for identifying an individual who has an altered risk for developing coronary stenosis, comprising detecting a single nucleotide polymorphism (SNP) in any one of the nucleotide sequences of SEQ ID NOS:1-169 and 339-21112 in said individual's nucleic acids, wherein the presence of the SNP is correlated with an altered risk for coronary stenosis in said individual.

2. The method of claim 1 in which the altered risk is an increased risk.

3. The method of claim 1 in which the altered risk is a decreased risk.

4. The method of claim 1, wherein the SNP is selected from the group consisting of the SNPs set forth in Tables 6-8.

5. The method of claim 1, in which detection is carried out by a process selected from the group consisting of: allele-specific probe hybridization, allele-specific primer extension, allele-specific amplification, sequencing, 5′ nuclease digestion, molecular beacon assay, oligonucleotide ligation assay, size analysis, and single-stranded conformation polymorphism.

6. An isolated nucleic acid molecule comprising at least 8 contiguous nucleotides wherein one of the nucleotides is a single nucleotide polymorphism (SNP) selected from any one of the nucleotide sequences in SEQ ID NOS: 1-169 and 339-21112, or a complement thereof.

7. The isolated nucleic acid molecule of claim 6, wherein the SNP is selected from the group consisting of the SNPs set forth in Tables 3 and 4.

8. An isolated nucleic acid molecule that encodes any one of the amino acid sequences in SEQ ID NOS:170-338.

9. An isolated polypeptide comprising an amino acid sequence selected from the group consisting of SEQ ID NOS:170-338.

10. An antibody that specifically binds to a polypeptide of claim 9, or an antigen-binding fragment thereof.

11. An amplified polynucleotide containing a single nucleotide polymorphism (SNP) selected from any one of the nucleotide sequences of SEQ ID NOS:1-169 and 339-21112, or a complement thereof, wherein the amplified polynucleotide is between about 16 and about 1,000 nucleotides in length.

12. An isolated polynucleotide which specifically hybridizes to a nucleic acid molecule containing a single nucleotide polymorphism (SNP) in any one of the nucleotide sequences in SEQ ID NOS: 1-169 and 339-21112.

13. The polynucleotide of claim 12, which is an allele-specific probe.

14. The polynucleotide of claim 12, which is an allele-specific primer.

15. The polynucleotide of claim 12, wherein the polynucleotide comprises a nucleotide sequence selected from the group consisting of the primer sequences set forth in Table 5.

16. A kit for detecting a single nucleotide polymorphism (SNP) in a nucleic acid, comprising the polynucleotide of claim 14, a buffer, and an enzyme.

17. A method for identifying an agent useful in therapeutically or prophylactically treating coronary stenosis, comprising contacting the polypeptide of claim 9 with a candidate agent under conditions suitable to allow formation of a binding complex between the polypeptide and the candidate agent, and detecting the formation of the binding complex, wherein the presence of the complex identifies said agent.

18. A method for identifying an individual who has an altered risk for developing coronary heart disease (CHD) such as myocardial infarction, comprising detecting a single nucleotide polymorphism (SNP) in any one of the nucleotide sequences of SEQ ID NOS:1-169 and 339-21112 in said individual's nucleic acids, wherein the presence of the SNP is correlated with an altered risk for CHD such as MI in said individual.

19. A method for stratifying a patient population for treatment of coronary stenosis, wherein said population has an altered risk for developing coronary stenosis due to the presence of a single nucleotide polymorphism (SNP) in any one of the nucleotide sequences of SEQ ID NOS: 1-169 and 339-21112 in an individual's nucleic acids from said population, comprising detecting the SNP, wherein the presence of the SNP is correlated with an altered risk for coronary stenosis in said individual thereby indicating said individual should receive treatment for coronary stenosis.

20. The method of claim 19, where in said treatment is statin treatment.

The application's sequence listing, which the Patent Office published only in electronic form, follows.

SEQUENCE LISTING (21112 sequences)

SEQ ID NO: 1 - DNA, 1517 bp, Homo sapiens
gtcacgggctccggtcccggcggcagaaatagggcagccgcggcggcggtggcacagcagcgggcagcggcggctcagggagctggagcctcaacagcctccagcgagcccgggacccgccgacagcccgagaaaccagccgaaggacgcggggcggggtcgccgccgccgccacggggtgctccctccctcccgcccaagtccggccacctggtcttcccctcggccccggccgtctcagactcatcaaaatgaaaccaggaggcttttggctgcatctcacactgctcggagcctccctgccggctgcgctgggatggatggacccaggaaccagcagaggcccggatgtgggtgtgggggagtcacaggcagaggagcccagaagctttgaagtcacaagaagagaagggctttccagccacaacgagctgctggcctcctgcgggaagaagttctgcagccgagggagccggtgcgtgctcagcaggaagacaggggagcccgaatgccagtgcctggaggcatgcaggcccagctacgtgcctgtgtgcggctctgatgggaggttttatgaaaaccactgtaagctccaccgtgctgcttgcctcctgggaaagaggatcaccgtcatccacagcaaggactgtttcctcaaaggtgacacgtgcaccatggccggctacgcccgcttgaagaatgtccttctggcactccagacccgtctgcagccactccaagaaggagacagcagacaagaccctgcctcccagaagcgcctcctggtggaatctctgttcagggacttagatgcagatggcaatggccacctcagcagctccgaactggctcagcatgtgctgaagaagcaggacctggatgaagacttacttggttgctcaccaggtgacctcctccgatttgacgattacaacagtgacagctccctgaccctccgcgagttctacatggccttccggcagaaatgctgaaaacattcatttgtcaaaactttgaaagccacaggactgagccaacaaggagagaagcaatcaggactttgtcatcagaggaggcggactgcccccacgtcctatcaaatttagtccggaatgtattttgccattattgtaactatgcccttcagctgccacgccgtttcaggaacggagcgctaatacattctgtggcacagtctctttatggggaggaaaggatcccagtgccccttgacagagagagaataatagcataatgcaacagaacatttttgaaatgctaatacacgctctccgcaacttaattttatttttttcttattggcttttttatatgacatttcacagtcctgtagcctcaatagctagatctgcatcgtaaaaatgacaacacggtgatttaaggaggagagtccatcagagcgaaatgggtggtgtgcttttaaagtatcagtttagcacctcttacctgggatcaatgttcattctcaatacatcattaaagcatcctgttaaatc

SEQ ID NO: 2 - DNA, 3407 bp, Homo sapiens
gtcacgggctccggtcccggcggcagaaatagggcagccgcggcggcggtggcacagcagcgggcagcggcggctcagggagctggagcctcaacagcctccagcgagcccgggacccgccgacagcccgagaaaccagccgaaggacgcggggcggggtcgccgccgccgccacggggtgctccctccctcccgcccaagtccggccacctggtcttcccctcggccccggccgtctcagactcatcaaaatgaaaccaggaggcttttggctgcatctcacactgctcggagcctccctgccggctgcgctgggatggatggacccaggaaccagcagaggcccggatgtgggtgtgggggagtcacaggcagaggagcccagaagctttgaagtcacaagaagagaagggctttccagccacaacgagctgctggcctcctgcgggaagaagttctgcagccgagggagccggtgcgtgctcagcaggaagacaggggagcccgaatgccagtgcctggaggcatgcaggcccagctacgtgcctgtgtgcggctctgatgggaggttttatgaaaaccactgtaagctccaccgtgctgcttgcctcctgggaaagaggatcaccgtcatccacagcaaggactgtttcctcaaaggtgacacgtgcaccatggccggctacgcccgcttgaagaatgtccttctggcactccagacccgtctgcagccactccaagaaggagacagcagacaagaccctgcctcccagaagcgcctcctggtggaatctctgttcagggacttagatgcagatggcaatggccacctcagcagctccgaactggctcagcatgtgctgaagaagcaggacctggatgaagacttacttggttgctcaccaggtgacctcctccgatttgacgattacaacagtgacagctccctgaccctccgcgagttctacatggccttccaagtggttcagctcagcctcgcccccgaggacagggtcagtgtgaccacagtgaccgtggggctgagcacagtgctgacctgcgccgtccatggagacctgaggccaccaatcatctggaagcgcaacgggctcaccctgaacttcctggacttggaagacatcaatgactttggagaggatgattccctgtacatcaccaaggtgaccaccatccacatgggcaattacacctgccatgcttccggccacgagcagctgttccagacccacgtcctgcaggtgaatgtgccgccagtcatccgtgtctatccagagagccaggcacaggagcctggagtggcagccagcctaagatgccatgctgagggcattcccatgcccagaatcacttggctgaaaaacggcgtggatgtctcaactcagatgtccaaacagctctcccttttagccaatgggagcgaactccacatcagcagtgttcggtatgaagacacaggggcatacacctgcattgccaaaaatgaagtgggtgtggatgaagatatctcctcgctcttcattgaagactcagctagaaagacccttgcaaacatcctgtggcgagaggaaggcctcagcgtgggaaacatgttctatgtcttctccgacgacggtatcatcgtcatccatcctgtggactgtgagatccagaggcacctcaaacccacggaaaagattttcatgagctatgaagaaatctgtcctcaaagagaaaaaaatgcaacccagccctgccagtgggtatctgcagtcaatgtccggaaccggtacatctatgtggcccagccagcactgagcagagtccttgtggtcgacatccaagcccagaaagtcctacagtccataggtgtggaccctctgccggctaagctgtcctatgacaagtcacatgaccaagtgtgggtcctgagctggggggacgtgcacaagtcccgaccaagtctccaggtgatcacagaagccagcaccggccagagccagcacctcatccgcacaccctttgcaggagtggatgatttcttcattcccccaacaaacctcatcatcaaccacatcaggtttggcttcatcttcaacaagtctgatcctgcagtccacaaggtggacctggaaacaatgatgcccctcaagaccatcggcctgcaccaccatggctgcgtgccccaggccatggcacacacccacctgggcggctacttcttcatccagtgccgacaggacagccccgcctctgctgcccgacagctgctcgttgacagtgtcacagactctgtgcttggccccaatggtgatgtaacaggcaccccacacacatcccccgacgggcgcttcatagtcagtgctgcagctgacagcccctggctgcacgtgcaggagatcacagtgcggggcgagatccagaccctgtatgacctgcaaataaactcgggcatctcagacttggccttccagcgctccttcactgaaagcaatcaatacaacatctacgcggctctgcacatggagccggacctgctgttcctggagctgtccacggggaaggtgggcatgctgaagaacttaaaggagccacccgcagggccagctcagccctgggggggtacccacagaatcatgagggacagtgggctgtttggacagtacctcctcacaccagcccgagagtcactgttcctcatcaatgggagacaaaacacgctgcggtgtgaggtgtcaggtataaagggggggaccacagtggtgtgggtgggtgaggtatgaagggcccagagcagagccctgggccaaggaacaccccctagtcctgacactgcagcctcaagcaggtacgctgtacatttttacagacaaaagcaaaaacctgtactcgctttgtggttcaacactggtctccttgcaagtttcctagtataaggtatgcgctgctaccaagattggggttttttcgttaggaagtatgatttatgccttgagctacgatgagaacatatgctgctgtgtaaagggatcatttctgtgccaagctgcacaccgagtgacctggggacatcatggaaccaagggatcctgctctccaagcagacacctctgtcagttgccttcacatagtcattgtcccttactgccagacccagccagactttgccctgacggagtggcccggaagcagaggccgaccaggagcaggggcctccctcccgaactgaaagcccatccgtcctcgcgtgggaccgcatcttctccctcgcagctgcttcttgcttttctttccatttgacttgctgtaagcctgagggagagccaacaagacttactgcatcttgggggatggggaaatcactcactttattttggaaatttttgattaaaaaaaaattttataatctc

SEQ ID NO: 3 - DNA, 1229 bp, Homo sapiens
gggcgcccgggcgcccgaggcttcccggtgcgctccgccaggtcagtcatcgctagagggttattattgacatttactcatcataaaatgtgatgtcagcctaccagctcggagtgcagttcctggtttccagtttacaacattgaccagttgctaacatgttatctctgaggaacttggaatgataaatacagccatacttaaatagaagattcttggccgtgtagataaggaaaataagataaggcaatatttttgaactattctataatagaaatgaggatatatacacaaaatgacccagtgctgttttcttagggtgcatcctttgtttttctggttttggtcttttcatcacaggatggcattagctctgtgtctgcaggtgctgtgcagcctgtgtggctggctctcgctctatatttctttctgccacctgaataagcaccgaagctatgagtggagctgccgcctggtcaccttcacccatggagtcctctctataggcctctccgcttatattggcttcattgatggcccatggccttttacccacccaggctcacccaatacacctctccaagttcatgtcctgtgtctcaccttgggctacttcatcttcgacttgggctggtgcgtctactttcagtctgagggtgccttgatgctggctcatcacacattgagtatcttgggcattatcatggcccttgtgcttggggagtctggcacagaggtcaatgcagtcctctttggaagtgagcttaccaaccccttgctacagatgcgctggtttctccgggaaacagggcactatcacagtttcactggagatgtagtggacttcctctttgtggctctgttcacaggagtgaggattggtgtgggagcttgcctccttttctgtgaaatggtctcccccacgcctaagtggtttgtgaaggctgggggagtagcgatgtatgctgtgtcttggtgtttcatgtttagcatctggcgctttgcatggaggaagagcatcaagaagtaccatgcttggagaagcaggcggagtgaggaacggcagctgaaacacaacggacatctcaaaatacactagccaaggcttgctccagattatggattgggttaagtcagccatgggaaccaggttggaaatatgactgttacataattacacttataacaaacttaggtttcaataaagggctaaatgtattgatcaattt

SEQ ID NO: 4 - DNA, 2989 bp, Homo sapiens
ggggcccccagctgacagagggcgtggggggttaaggcattaacccctcccagcctcttcctgaagaaaccacccagccttggcgcggcgctgggtgacttcgcgtagcaggcagggaactggccgcggcgagcgggactggccattggagtgctccgctgcggagggaggggaccccgactcgagtaagtttgcgagagcactacgcagtcagtcgggggcagcagcaagatgcgaagcgagccgtacagatcccgggctctccgaacgcaacttcgccctgcttgagcgaggctgcggtttccgaggccctctccagccaaggaaaagctacacaaaaagcctggatcactcatcgaaccacccctgaagccagtgaaggctctctcgcctcgccctctagcgttcgtccggagtagcgccaccccggcttcctggggacacagggttggcaccatggggcccaccagcgtcccgctggtcaaggcccaccgcagctcggtctctgactacgtcaactatgatatcatcgtccggcattacaactacacgggaaagctgaatatcagcgcggacaaggagaacagcattaaactgacctcggtggtgttcattctcatctgctgctttatcatcctggagaacatctttgtcttgctgaccatttggaaaaccaagaaattccaccgacccatgtactattttattggcaatctggccctctcagacctgttggcaggagtagcctacacagctaacctgctcttgtctggggccaccacctacaagctcactcccgcccagtggtttctgcgggaagggagtatgtttgtggccctgtcagcctccgtgttcagtctcctcgccatcgccattgagcgctatatcacaatgctgaaaatgaaactccacaacgggagcaataacttccgcctcttcctgctaatcagcgcctgctgggtcatctccctcatcctgggtggcctgcctatcatgggctggaactgcatcagtgcgctgtccagctgctccaccgtgctgccgctctaccacaagcactatatcctcttctgcaccacggtcttcactctgcttctgctctccatcgtcattctgtactgcagaatctactccttggtcaggactcggagccgccgcctgacgttccgcaagaacatttccaaggccagccgcagctctgagaagtcgctggcgctgctcaagaccgtaattatcgtcctgagcgtcttcatcgcctgctgggcaccgctcttcatcctgctcctgctggatgtgggctgcaaggtgaagacctgtgacatcctcttcagagcggagtacttcctggtgttagctgtgctcaactccggcaccaaccccatcatttacactctgaccaacaaggagatgcgtcgggccttcatccggatcatgtcctgctgcaagtgcccgagcggagactctgctggcaaattcaagcgacccatcatcgccggcatggaattcagccgcagcaaatcggacaattcctcccacccccagaaagacgaaggggacaacccagagaccattatgtcttctggaaacgtcaactcttcttcctagaactggaagctgtccacccaccggaagcgctctttacttggtcgctggccaccccagtgtttggaaaaaaatctctgggcttcgactgctgccagggaggagctgctgcaagccagagggaggaagggggagaatacgaacagcctggtggtgtcgggtgttggtgggtagagttagttcctgtgaacaatgcactgggaagggtggagatcaggtcccggcctggaatatattttctacccccctggagctttgattttgcactgagccaaaggtctagcattgtcaagctcctaaagggttcatttggcccctcctcaaagactaatgtccccatgtgaaagcgtctctttgtctggagctttgaggagatgttttccttcactttagtttcaaacccaagtgagtgtgtgcacttctgcttctttagggatgccctgtacatcccacaccccaccctcccttcccttcatacccctcctcaacgttcttttactttatactttaactacctgagagttatcagagctggggttgtggaatgatcgatcatctatagcaaataggctatgttgagtacgtaggctgtgggaagatgaagatggtttggaggtgtaaaacaatgtccttcgctgaggccaaagtttccatgtaagcgggatccgttttttggaatttggttgaagtcactttgatttctttaaaaaacatcttttcaatgaaatgtgttaccatttcatatccattgaagccgaaatctgcataaggaagcccactttatctaaatgatattagccaggatccttggtgtcctaggagaaacagacaagcaaaacaaagtgaaaaccgaatggattaacttttgcaaaccaagggagatttcttagcaaatgagtctaacaaatatgacatctgtctttggcacttttgttgatgtttatttcagaatgttgtgtgattcatttcaagcaacaacatggttgtattttgttgtgttaaaagtacttttcttgatttttgaatgtatttgtttcagcagaagtcattttattggatttttctaacccgtgttaacaccattgaatgtgtatttcttaagaaaataccaccctcttgtgcccttaaaagcattactttaactggtagggaacgccagaaacttttcagtccagctattcattagatagtaattgaagatatgtataaatattacaaagaataaaaatatattactgtctctttagtatggttttcagtgcaattaaaccgagagatgtcttgtttttttaaaaagaatagtatttaataggtttctgacttttgtggatcattttgcacatagctttatcaacttttaaacattaataaactgatttttttaaag

SEQ ID NO: 5 - DNA, 2979 bp, Homo sapiens
ggggcccccagctgacagagggcgtggggggttaaggcattaacccctcccagcctcttcctgaagaaaccacccagccttggcgcggcgctgggtgacttcgcgtagcaggcagggaactggccgcggcgagcgggactggccattggagtgctccgctgcggagggaggggaccccgactcgagtaagtttgcgagagcactacgcagtcagtcgggggcagcagcaagatgcgaagcgagccgtacagatcccgggctctccgaacgcaacttcgccctgcttgagcgaggctgcggtttccgaggccctctccagccaaggaaaagctacacaaaaagcctggatcactcatcgaaccacccctgaagccagtgaaggctctctcgcctcgccctctagcgttcgtccggagtagcgccaccccggcttcctggggacacagggttggcaccatggggcccaccagcgtcccgctggtcaaggcccaccgcagctcggtctctgactacgtcaactatgatatcatcgtccggcattacaactacacgggaaagctgaatatcagcgcggacaaggagaacagcattaaactgacctcggtggtgttcattctcatctgctgctttatcatcctggagaacatctttgtcttgctgaccatttggaaaaccaagaaattccaccgacccatgtactattttattggcaatctggccctctcagacctgttggcaggagtagcctacacagctaacctgctcttgtctggggccaccacctacaagctcactcccgcccagtggtttctgcgggaagggagtatgtttgtggccctgtcagcctccgtgttcagtctcctcgccatcgccattgagcgctatatcacaatgctgaaaatgaaactccacaacgggagcaataacttccgcctcttcctgctaatcagcgcctgctgggtcatctccctcatcctgggtggcctgcctatcatgggctggaactgcatcagtgcgctgtccagctgctccaccgtgctgccgctctaccacaagcactatatcctcttctgcaccacggtcttcactctgcttctgctctccatcgtcattctgtactgcagaatctactccttggtcaggactcggagccgccgcctgacgttccgcaagaacatttccaaggccagccgcagctctgagaagtcgctggcgctgctcaagaccgtaattatcgtcctgagcgtcttcatcgcctgctgggcaccgctcttcatcctgctcctgctggatgtgggctgcaaggtgaagacctgtgacatcctcttcagagcggagtacttcctggtgttagctgtgctcaactccggcaccaaccccatcatttacactctgaccaacaaggagatgcgtcgggccttcatccggatcatgtcctgctgcaagtgcccgagcggagactctgctggcaaattcaagcgacccatcatcgccggcatggaattcagccgcagcaaatcggacaattcctcccacccccagaaagacgaaggggacaacccagagaccattatgtcttctggaaacgtcaactcttcttcctagaactggaagctgtccacccaccggaagcgctctttacttggtcgctggccaccccagtgtttggaaaaaaatctctgggcttcgactgctgccagggaggagctgctgcaagccagagggaggaagggggagaatacgaacagcctggtggtgtcgggtgttggtgggtagagttagttcctgtgaacaatgcactgggaagggtggagatcaggtcccggcctggaatatattttctacccccctggagctttgattttgcactgagccaaaggtctagcattgtcaagctcctaaagggttcatttggcccctcctcaaagactaatgtccccatgtgaaagcgtctctttgtctggagctttgaggagatgttttccttcactttagtttcaaacccaagtgagtgtgtgcacttctgcttctttagggatgccctgtacatcccacaccccaccctcccttcccttcatacccctcctcaacgttcttttactttatactttaactacctgagagttatcagagctggggttgtggaatgatcgatcatctatagcaaataggctatgttgagtacgtaggctgtgggaagatgaagatggtttggaggtgtaaaacaatgtccttcgctgaggccaaagtttccatgtaagcgggatccgttttttggaatttggttgaagtcactttgatttctttaaaaaacatcttttcaatgaaatgtgttaccatttcatatccattgaagccgaaatctgcataaggaagcccactttatctaaatgatattagccaggatccttggtgtcctaggagaaacagacaagcaaaacaaagtgaaaaccgaatggattaacttttgcaaaccaagggagatttcttagcaaatgagtctaacaaatatgacatctgtctttggcacttttgttgatgtttatttcagaatgttgtgtgattcatttcaagcaacaacatggttgtattttgttgtgttaaaagtacttttcttgatttttgaatgtatttgtttcagcagaagtcattttattggatttttctaacccgtgttaatgtgtatttcttaagaaaataccaccctcttgtgcccttaaaagcattactttaactggtagggaacgccagaaacttttcagtccagctattcattagatagtaattgaagatatgtataaatattacaaagaataaaaatatattactgtctctttagtatggttttcagtgcaattaaaccgagagatgtcttgtttttttaaaaagaatagtatttaataggtttctgacttttgtggatcattttgcacatagctttatcaacttttaaacattaataaactgatttttttaaag

SEQ ID NO: 6 - DNA, 864 bp, Homo sapiens
agacaggcgagtctgcagacggccgtggctcctctgttcttcccgaggctacagcaacagccagaggtgttcctggggagatggcggaacagcacggagcacccgaacaggctgcagctggcaagagccatggagaccttgggggcagctacaaggtgatcttgtacgaactagagaacttccaaggcaaacgctgcgagctctcggccgagtgccccagcctgaccgacagcctgctggagaaggtgggctccatccaagtggagtccgggccgtggctggcatttgagtccagggccttccgcggggagcagtttgttctggagaagggggattatcctcgctgggatgcctggtccaacagccgtgatagtgacagccttctgtccctccggcctctgaatattgatagtccagatcacaagctgcatctgtttgagaacccagctttcagtggccgcaagatggagatagtggatgatgacgtgcccagcctgtgggctcatggcttccaggaccgtgtggcgagtgtccgtgccatcaacgggacgtgggttggctatgagttccccggctaccgtgggcgccagtacgtgtttgagcggggcgagtaccgccactggaatgagtgggacgccagccagccgcagctgcagtctgtgcgccgcatccgtgaccagaagtggcacaagcggggccgcttccccagcagctgaaaggcacccagacttcaaggacccagacccaccctggggggctgcaagggcaagaagaggaggctccagggttggggcgagggccgacctgtccacccttccctggaatctgctcaataaagcctggggttggtcccccacccgccac

SEQ ID NO: 7 - DNA, 837 bp, Homo sapiens
cgtggctcctctgttcttcccgaggctacagcaacagaggtgttcctggggagatggcggaacagcacggagcacccgaacaggctgcagctggcaagagccatggagaccttgggggcagctacaaggtgatcttgtacgaactagagaacttccaaggcaaacgctgcgagctctcggccgagtgccccagcctgaccgacagcctgctggagaaggtgggctccatccaagtggagtccgggccgtggctggcatttgagtccagggccttccgcggggagcagtttgttctggagaagggggattatcctcgctgggatgcctggtccaacagccgtgatagtgacagccttctgtccctccggcctctgaatattgatagtccagatcacaagctgcatctgtttgagaacccagctttcagtggccgcaagatggagatagtggatgatgacgtgcccagcctgtgggctcatggcttccaggaccgtgtggcgagtgtccgtgccatcaacgggacgtgggttggctatgagttccccggctaccgtgggcgccagtacgtgtttgagcggggcgagtaccgccactggaatgagtgggacgccagccagccgcagctgcagtctgtgcgccgcatccgtgaccagaagtggcacaagcggggccgcttccccagcagctgaaaggcacccagacttcaaggacccagacccaccctggggggctgcaagggcaagaagaggaggctccagggttggggcgagggccgacctgtccacccttccctggaatctgctcaataaagcctggggttggtcccccacccgccac

SEQ ID NO: 8 - DNA, 2756 bp, Homo sapiens
ctactctgacctacgacactctccggtttgctgagtttgaagattttcctgagacctcagagcccgtttggatactgggtagaaaatacagcattttcacagaaaaggacgagatcttgtctgatgtggcatctagactttggtttacatacaggaaaaactttccagccattggggggacaggccccacctcggacacaggctggggctgcatgctgcggtgtggacagatgatctttgcccaagccctggtgtgccggcacctaggccgagattggaggtggacacaaaggaagaggcagccagacagctacttcagcgtcctcaacgcattcatcgacaggaaggacagttactactccattcaccagatagcgcaaatgggagttggcgaaggcaagtccataggccagtggtacgggcccaacactgtcgcccaggtcctgaagaagcttgctgtcttcgatacgtggagctccttggcggtccacattgcaatggacaacactgttgtgatggaggaaatcagaaggttgtgcaggaccagcgttccctgtgcaggcgccactgcgtttcctgcagattccgaccggcactgcaacggattccctgccggagctgaggtcaccaacaggccgtcgccatggagacccctggtacttctcattcccctgcgcctggggctcacggacatcaacgaggcctacgtggagacgctgaagcactgcttcatgatgccccagtccctgggcgtcatcggagggaagcccaacagcgcccactacttcatcggctacgttggtgaggagctcatctacctggacccccacaccacgcagccagccgtggagcccactgatggctgcttcatcccggacgagagcttccactgccagcacccgccgtgccgcatgagcatcgcggagcttgacccgtccatcgctgtggggtttttctgtaagactgaagatgacttcaatgattggtgccagcaagtcaaaaagctgtctctgcttggaggtgccctgcccatgtttgagctggtggagcagcagccttcacatctggcctgccccgacgtcctgaacctgtccctagattcttctgatgtagagcgactggaaagattcttcgactcagaagatgaagactttgaaatcctgtccctttgaaaatcctggggtcgggggtggcacctgtgagagcctggggctcctggtgccgctgcgtttcatccatcccgcccgctcgcctgccgagggctgcgccccgtgctgcctccccccagagggccacccgctgtgctcgtggactgaggctgcgctgcccgggaggccttactgcttggtgtcagactgcccagctcagagtgcccgtcagggcctgtgcatccgcacgcggagccgtctgttaggagcttccagagcgttctctcgacactgccagccccgtgttagcacctgggcctcagtcccacttgctcccaggcgccggttctgtggttggtttggaattaaagtcctgtttgaagttgtcagacacagacatgaatttctggggcgctccctgagtcagagtctcagaagacctgtgcaggctggcgtgagaggagcggcagccacactgcggccccacgcccaaggactgggctgctctcgaggggggcgcgcccaccgctgtgtcctctctgcccagcctggcttaccaagggctacctcagtgggagatgaggttggaggaacgaaggcgaggttcctccttgctttggggagaaaagtattcaggaagtgggtgtgtgggaaacctgaagatggcgtgcacaggacacagcgtgggcggcctgggcagaagggcggctggctgtcctggagctgctgctggagcctgccctcagagtgtccctttccagtgctgtggcattctgtggcagcttccccaggtgtggtgacggggggggcggggcctccacctgtgacagtcaggcttgagggtggacggcgtgcctctcccaggagccttccccatgtccttgccttgctgagaattgccctcccatgccgctgaggtgttaggtggtttagggccaaaaggggaaaaccacttgagtcttgtggtgtgtggtgggcagacaccacagggtggcatcacctggtggcatttccagaacctcagccccgattccagcacccaccaccgcctgaccctgtgtaacctgctgtcccgggtcccagagtgcactctgccccactgctctgctgcctgtcctgggaaagtagctttgccccactaggaaatgtaaacaggagggcttggggagcgtgggcacttttctcatgagcagctactgcggcgttggcaggactcgctgctgctgctgctgcttgtgtaggtcggggagccggagatccccgaggacgcgcgccggacagtcggcactgaccggcccacctggtagcagaggacacccccagccccccaagcattgaagacatagtgtatttcctcgtatcctttctcccttgggtgtagttggggtggggaagcagggaaggctggtgcgatctccattccttgggctccgcgtccgagttcatggtgcgccgctgtgctgggagctgcagtgggaatgtgtgggacaccttgaccaaaggggagctttgtctcgtgtgttttgaaaaaggcttaatgaagagaatgttgttcattcttagtagtatagtttgcaattcttaatggcaaataataagtttcagtag

SEQ ID NO: 9 - DNA, 2362 bp, Homo sapiens
ttgctggcccgtcggagcgacgccgctcgggtcagtcggcggccggactgggaagatggacgcagctactctgacctacgacactctccggtttgctgagtttgaagattttcctgagacctcagagcccgtttggatactgggtagaaaatacagcattttcacagaaaaggacgagatcttgtctgatgtggcatctagactttggtttacatacaggaaaaactttccagccattggggggacaggccccacctcggacacaggctggggctgcatgctgcggtgtggacagatgatctttgcccaagccctggtgtgccggcacctaggccgagattggaggtggacacaaaggaagaggcagccagacagctacttcagcgtcctcaacgcattcatcgacaggaaggacagttactactccattcaccagatagcgcaaatgggagttggcgaaggcaagtccataggccagtggtacgggcccaacactgtcgcccaggtcctgaagaagcttgctgtcttcgatacgtggagctccttggcggtccacattgcaatggacaacactgttgtgatggaggaaatcagaaggttgtgcaggaccagcgttccctgtgcaggcgccactgcgtttcctgcagattccgaccggcactgcaacggattccctgccggagctgaggtcaccaacaggccgtcgccatggagacccctggtacttctcattcccctgcgcctggggctcacggacatcaacgaggcctacgtggagacgctgaagcactgcttcatgatgccccagtccctgggcgtcatcggagggaagcccaacagcgcccactacttcatcggctacgttggtgaggagctcatctacctggacccccacaccacgcagccagccgtggagcccactgatggctgcttcatcccggacgagagcttccactgccagcacccgccgtgccgcatgagcatcgcggagcttgacccgtccatcgctgtggggtttttctgtaagactgaagatgacttcaatgattggtgccagcaagtcaaaaagctgtctctgcttggaggtgccctgcccatgtttgagctggtggagcagcagccttcacatctggcctgccccgacgtcctgaacctgtccctaggtgagagctgccaagtccaggtggggtccctcggaggtacgatctgtgcccttgcttccccagtcctggcccccttggttttgaccattaaggtgtgtgtgagcctgagccgtgagcacttggcagtggttcgcctgtgagaccaggtatggagtggagcgtcccctcctccaagcttgcgcccagcagcccaggacccacctcgtcttccccaccagcgctgcctgcccgggcgctgtggagctgggcgtgctaccatggagtcctcaggggtctggagcagacagaacatgcaggctctgtggtgacgcagtcctgggtgggggactggttcacttgggcaccactggccatgggtggcgtagacccctcggaccatggccagcgtgccgcaggagccggcctgggctcgtgcagtgaagtgagtggccgtgagcgcgtcctcctcatctctgtctccctgtgggaaactctacaaacaaggcaatggcaatggaaccactcctgatgaccacgagggtcagacgcgggacagaggcccctcaggcctgagattgtgccggccgccccctgccctcctcaccctgccctgctcctcttctctgctccctccccccatattcgcaggtctgcacaacccccggacctgttcacacccgcatggggacagctgtctgtgggctgcagagcaggcactgctcagtctgccccacgccaagggcccttgactcacacccaggtggcccacccaagatgcctgatgcgctatgtcctgttccttctagattcttctgatgtagagcgactggaaagattcttcgactcagaagatgaagactttgaaatcctgtccctttgaaaatcctggggtcgggggtggcacctgtgagagcctggggctcctggtgccgctgcgtttcatccatcccgcccgctcgcctgccgagggctgcgccccgtgctgcctccccccagagggccacccgctgtgctcgtggactgaggctgcgctgcccgggaggccttactgcttggtgtcagactgcccagctcagagtgcccgtcagggcctgtgcatccgcacgcggagccgtctgttaggagcttccagagcgttctctcgacactgccagccccgtgttagcacctgggcctcagtcccacttgctcccaggcgccggttctgtggttggtttgga

SEQ ID NO: 10 - DNA, 2920 bp, Homo sapiens
ttgctggcccgtcggagcgacgccgctcgggtcagtcggcggccggactgggaagatggacgcagctactctgacctacgacactctccggtttgctgagtttgaagattttcctgagacctcagagcccgtttggatactgggtagaaaatacagcattttcacagaaaaggacgagatcttgtctgatgtggcatctagactttggtttacatacaggaaaaactttccagccattggaggttgtcgggacatttcactctccagtaaatgtggcccttggcgttactgagtcctaagaggggggacaggccccacctcggacacaggctggggctgcatgctgcggtgtggacagatgatctttgcccaagccctggtgtgccggcacctaggccgagattggaggtggacacaaaggaagaggcagccagacagctacttcagcgtcctcaacgcattcatcgacaggaaggacagttactactccattcaccagatagcgcaaatgggagttggcgaaggcaagtccataggccagtggtacgggcccaacactgtcgcccaggtcctgaagaagcttgctgtcttcgatacgtggagctccttggcggtccacattgcaatggacaacactgttgtgatggaggaaatcagaaggttgtgcaggaccagcgttccctgtgcaggcgccactgcgtttcctgcagattccgaccggcactgcaacggattccctgccggagctgaggtcaccaacaggccgtcgccatggagacccctggtacttctcattcccctgcgcctggggctcacggacatcaacgaggcctacgtggagacgctgaagcactgcttcatgatgccccagtccctgggcgtcatcggagggaagcccaacagcgcccactacttcatcggctacgttggtgaggagctcatctacctggacccccacaccacgcagccagccgtggagcccactgatggctgcttcatcccggacgagagcttccactgccagcacccgccgtgccgcatgagcatcgcggagcttgacccgtccatcgctgtggggtttttctgtaagactgaagatgacttcaatgattggtgccagcaagtcaaaaagctgtctctgcttggaggtgccctgcccatgtttgagctggtggagcagcagccttcacatctggcctgccccgacgtcctgaacctgtccctaggtgagagctgccaagtccaggtggggtccctcggagattcttctgatgtagagcgactggaaagattcttcgactcagaagatgaagactttgaaatcctgtccctttgaaaatcctggggtcgggggtggcacctgtgagagcctggggctcctggtgccgctgcgtttcatccatcccgcccgctcgcctgccgagggctgcgccccgtgctgcctccccccagagggccacccgctgtgctcgtggactgaggctgcgctgcccgggaggccttactgcttggtgtcagactgcccagctcagagtgcccgtcagggcctgtgcatccgcacgcggagccgtctgttaggagcttccagagcgttctctcgacactgccagccccgtgttagcacctgggcctcagtcccacttgctcccaggcgccggttctgtggttggtttggaattaaagtcctgtttgaagttgtcagacacagacatgaatttctggggcgctccctgagtcagagtctcagaagacctgtgcaggctggcgtgagaggagcggcagccacactgcggccccacgcccaaggactgggctgctctcgaggggggcgcgcccaccgctgtgtcctctctgcccagcctggcttaccaagggctacctcagtgggagatgaggttggaggaacgaaggcgaggttcctccttgctttggggagaaaagtattcaggaagtgggtgtgtgggaaacctgaagatggcgtgcacaggacacagcgtgggcggcctgggcagaagggcggctggctgtcctggagctgctgctggagcctgccctcagagtgtccctttccagtgctgtggcattctgtggcagcttccccaggtgtggtgacggggggggcggggcctccacctgtgacagtcaggcttgagggtggacggcgtgcctctcccaggagccttccccatgtccttgccttgctgagaattgccctcccatgccgctgaggtgttaggtggtttagggccaaaaggggaaaaccacttgagtcttgtggtgtgtggtgggcagacaccacagggtggcatcacctggtggcatttccagaacctcagccccgattccagcacccaccaccgcctgaccctgtgtaacctgctgtcccgggtcccagagtgcactctgccccactgctctgctgcctgtcctgggaaagtagctttgccccactaggaaatgtaaacaggagggcttggggagcgtgggcacttttctcatgagcagctactgcggcgttggcaggactcgctgctgctgctgctgcttgtgtaggtcggggagccggagatccccgaggacgcgcgccggacagtcggcactgaccggcccacctggtagcagaggacacccccagccccccaagcattgaagacatagtgtatttcctcgtatcctttctcccttgggtgtagttggggtggggaagcagggaaggctggtgcgatctccattccttgggctccgcgtccgagttcatggtgcgccgctgtgctgggagctgcagtgggaatgtgtgggacaccttgaccaaaggggagctttgtctcgtgtgttttgaaaaaggcttaatgaagagaatgttgttcattcttagtagtatagtttgcaattcttaatggcaaataataagtttcagtag

SEQ ID NO: 11 - DNA, 1117 bp, Homo sapiens
ttgctggcccgtcggagcgacgccgctcgggtcagtcggcggccggactgggaagatggacgcagctactctgacctacgacactctccggtttgctgagtttgaagattttcctgagacctcagagcccgtttggatactgggtagaaaatacagcattttcacagaaaaggacgagatcttgtctgatgtggcatctagactttggtttacatacaggaaaaactttccagccattggggggacaggccccacctcggacacaggctggggctgcatgctgcggtgtggacagatgatctttgcccaagccctggtgtgccggcacctaggccgagattggaggtggacacaaaggaagaggcagccagacagctacttcagcgtcctcaacgcattcatcgacaggaaggacagttactactccattcaccagatagcgcaaatgggagttggcgaaggcaagtccataggccagtggtacgggcccaacactgtcgcccaggtcctgaagaagcttgctgtcttcgatacgtggagctccttggcggtccacattgcaatggacaacactgttgtgatggaggaaatcagaaggttgtgcaggaccagcgttccctgtgcaggcgccactgcgtttcctgcagattccgaccggcactgcaacggattccctgccggagctgaggtcaccaacaggccgtcgccatggagacccctggtacttctcattcccctgcgcctggggctcacggacatcaacgaggcctacgtggagacgctgaagcactgcttcatgatgccccagtccctgggcgtcatcggagggaagcccaacagcgcccactacttcatcggctacgttggtgaggagctcatctacctggacccccacaccacgcagccagccgtggagcccactgatggctgcttcatcccggacgagagcttccactgccagcacccgccgtgccgcatgagcatcgcggagcttgacccgtccatcgctgtggtacgtggcggccacctgagcacacaggcatttggtgctgaatgctgtttgggaatgacgaggaaaactttcggatttttgcgttttttttttcagcatgttggg

SEQ ID NO: 12 - DNA, 2821 bp, Homo sapiens
ttgctggcccgtcggagcgacgccgctcgggtcagtcggcggccggactgggaagatggacgcagctactctgacctacgacactctccggtttgctgagtttgaagattttcctgagacctcagagcccgtttggatactgggtagaaaatacagcattttcacagaaaaggacgagatcttgtctgatgtggcatctagactttggtttacatacaggaaaaactttccagccattggggggacaggccccacctcggacacaggctggggctgcatgctgcggtgtggacagatgatctttgcccaagccctggtgtgccggcacctaggccgagattggaggtggacacaaaggaagaggcagccagacagctacttcagcgtcctcaacgcattcatcgacaggaaggacagttactactccattcaccagatagcgcaaatgggagttggcgaaggcaagtccataggccagtggtacgggcccaacactgtcgcccaggtcctgaagaagcttgctgtcttcgatacgtggagctccttggcggtccacattgcaatggacaacactgttgtgatggaggaaatcagaaggttgtgcaggaccagcgttccctgtgcaggcgccactgcgtttcctgcagattccgaccggcactgcaacggattccctgccggagctgaggtcaccaacaggccgtcgccatggagacccctggtacttctcattcccctgcgcctggggctcacggacatcaacgaggcctacgtggagacgctgaagcactgcttcatgatgccccagtccctgggcgtcatcggagggaagcccaacagcgcccactacttcatcggctacgttggtgaggagctcatctacctggacccccacaccacgcagccagccgtggagcccactgatggctgcttcatcccggacgagagcttccactgccagcacccgccgtgccgcatgagcatcgcggagcttgacccgtccatcgctgtggggtttttctgtaagactgaagatgacttcaatgattggtgccagcaagtcaaaaagctgtctctgcttggaggtgccctgcccatgtttgagctggtggagcagcagccttcacatctggcctgccccgacgtcctgaacctgtccctagattcttctgatgtagagcgactggaaagattcttcgactcagaagatgaagactttgaaatcctgtccctttgaaaatcctggggtcgggggtggcacctgtgagagcctggggctcctggtgccgctgcgtttcatccatcccgcccgctcgcctgccgagggctgcgccccgtgctgcctccccccagagggccacccgctgtgctcgtggactgaggctgcgctgcccgggaggccttactgcttggtgtcagactgcccagctcagagtgcccgtcagggcctgtgcatccgcacgcggagccgtctgttaggagcttccagagcgttctctcgacactgccagccccgtgttagcacctgggcctcagtcccacttgctcccaggcgccggttctgtggttggtttggaattaaagtcctgtttgaagttgtcagacacagacatgaatttctggggcgctccctgagtcagagtctcagaagacctgtgcaggctggcgtgagaggagcggcagccacactgcggccccacgcccaaggactgggctgctctcgaggggggcgcgcccaccgctgtgtcctctctgcccagcctggcttaccaagggctacctcagtgggagatgaggttggaggaacgaaggcgaggttcctccttgctttggggagaaaagtattcaggaagtgggtgtgtgggaaacctgaagatggcgtgcacaggacacagcgtgggcggcctgggcagaagggcggctggctgtcctggagctgctgctggagcctgccctcagagtgtccctttccagtgctgtggcattctgtggcagcttccccaggtgtggtgacggggggggcggggcctccacctgtgacagtcaggcttgagggtggacggcgtgcctctcccaggagccttccccatgtccttgccttgctgagaattgccctcccatgccgctgaggtgttaggtggtttagggccaaaaggggaaaaccacttgagtcttgtggtgtgtggtgggcagacaccacagggtggcatcacctggtggcatttccagaacctcagccccgattccagcacccaccaccgcctgaccctgtgtaacctgctgtcccgggtcccagagtgcactctgccccactgctctgctgcctgtcctgggaaagtagctttgccccactaggaaatgtaaacaggagggcttggggagcgtgggcacttttctcatgagcagctactgcggcgttggcaggactcgctgctgctgctgctgcttgtgtaggtcggggagccggagatccccgaggacgcgcgccggacagtcggcactgaccggcccacctggtagcagaggacacccccagccccccaagcattgaagacatagtgtatttcctcgtatcctttctcccttgggtgtagttggggtggggaagcagggaaggctggtgcgatctccattccttgggctccgcgtccgagttcatggtgcgccgctgtgctgggagctgcagtgggaatgtgtgggacaccttgaccaaaggggagctttgtctcgtgtgttttgaaaaaggcttaatgaagagaatgttgttcattcttagtagtatagtttgcaattcttaatggcaaataataagtttcagtag

SEQ ID NO: 13 - DNA, 2788 bp, Homo sapiens
ccttggagactgcttttctccagctctgtcaactcaacctttcccaccatgagtcggcaactgaacatcaagtccagtggtgacaagggcaacttcagtgtgcattcggcagtggtgccaaggaaggctgtgggtagcctggcttcttactgtgcagctggcagaggggctggcgctggctttggcagtcggagcctctatagccttggagggaatcggcgtatttctttcaatgtggctggtggcggcgttcgggctggaggttacggcttcaggcctggctctgggtatggagggggccgggccagtggctttgctggcagtatgtttggcagtgtggccctggggcctgcatgtttgtctgtgtgcccacctgggggcatccaccaggtcactgtcaacaagagcctcttggcccccctcaacgtggagctggaccctgagatccagaaggtgcgcgcccaggagcgggaacagatcaaggtgctgaacgacaagttcgcctccttcattgacaaggtacgcttcctagagcagcagaaccaggttctagaaaccaagtgggagctgctgcagcagctggacctgaacaactgcaagaagaacctggagcccatccttgagggctacatcagcaacctgcggaagcagctggagacactgtctggggacagggtgaggctggactcggagctgagaagcatgagggatctggtggaggactataagaagagatatgaggtggagattaaccggcgcacaacagcagagaatgagtttgtggtgcttaagaaggatgcagatgcagcctacgcagtcaaggtggagcttcaggccaaagtggactcactggacaaagacatcaagttcctcaagtgtctgtatgatgcagagatcgctcagatccagactcacgccagtgagacctctgtcatcctgtccatggacaacaaccgggacctggaccttgacagcatcatcgctgaggtccgcatgcattatgaggagatcgccctgaagagcaaggccgaggccgaggccctgtaccagaccaagatccaggagctgcagctggcagccagtcggcatggtgacgacctgaaacacaccaggagcgagatggtggagctgaaccggctcatccagaggatccggtgtgagatcgggaatgtgaagaagcagcgtgccagcctggagacggccatcgctgacgctgagcagcggggagacaatgccctgaaggatgcccaggccaagctggatgagctggagggcgccctgcaccaggccaaggaggagctggcgcggatgctgcgcgagtaccaggagctcatgagcctgaaactggccctggacatggagattgccacctaccgcaagctgctggagggcgaggagtgcaggatgtctggtgagaatccatcctctgtgagcatctctgtcatcagcagtagcagctacagctaccaccaccccagctctgcgggtgttgaccttggggccagcgctgtggcaggcagctctggcagcacccagagcgggcagaccaagaccacagaggcgcgagggggagacctcaaggacacccagggcaagagcaccccagccagcatcccagcaaggaaagccacccgctagacccatggcctcacccacctcagcacttggaagaagaggtgactttgccacccccaaaggtgtctgccacacccaagttcccaggccctgagttttaaaactgtctgtagtacactcaactgtctgcatcgtggtttagcttttactttcaagctctgattgacacagtcaccttccctgtttccttaggtcccatgtggactaacgacttctcattttcctcgctgcctttggctggcaggaggctttggaggcacaagccattataaccttcttggccctaaggaagctgtgatcatccctagaaagagggaaggagcaggagacgacaggggaggggctggtttgttctgtgcttaggccaagttagctactgtctgagaggttttacatcccctgccagcatggtggggtgacacgagacctgtaagcaggtggtgagaagttagacagcctttacttgctccatcagaaacaactttgcaggatgacgccaatatttaggacaccacgtgtacatctgtagaccaccagctgcacccatctccacaaagccaagtgaaggtgtattggggattctctgccagcctgtgtcacccacccacctccttcattatcagcaatagctaccatcatttgtcaagcacctactagatgccagacaccctacacatattgcctcctgttctcatccattcctgcaaagaagatgcaatgagcatccttggaacagactgggagcctgatcccaagaggctgctgaactggccccagtcacccacctatgtgccagagtcaggcctggccgacacaaggatctatgctttttctgtggtgtgtcactgcctttttaacaaaagggctgtcaaagtcaccattctttttgatgagggcagcgtaattacattgccttttgtcaggactgtgggtatgtgatttgtcttccacagtctctctggggctgtgtcctacatagcttctgactctcaatttttggtgccatgagctgagctcagtgagtggagctggcttttctgtcgctgagtggtactgcctagtccagatgtcgtggctcagggtgtaaatattcctaagaatggcagcatctatttcctcttttgtttgaattaaagactctgaatttctgctg

SEQ ID NO: 14 - DNA, 1974 bp, Homo sapiens
atgaccttgcacaataacagtacaacctcgcctttgtttccaaacatcagctcctcctggatacacagcccctccgatgcagggctgcccccgggaaccgtcactcatttcggcagctacaatgtttctcgagcagctggcaatttctcctctccagacggtaccaccgatgaccctctgggaggtcataccgtctggcaagtggtcttcatcgctttcttaacgggcatcctggccttggtgaccatcatcggcaacatcctggtaattgtgtcatttaaggtcaacaagcagctgaagacggtcaacaactacttcctcttaagcctggcctgtgccgatctgattatcggggtcatttcaatgaatctgtttacgacctacatcatcatgaatcgatgggccttagggaacttggcctgtgacctctggcttgccattgactacgtagccagcaatgcctctgttatgaatcttctggtcatcagctttgacagatacttttccatcacgaggccgctcacgtaccgagccaaacgaacaacaaagagagccggtgtgatgatcggtctggcttgggtcatctcctttgtcctttgggctcctgccatcttgttctggcaatactttgttggaaagagaactgtgcctccgggagagtgcttcattcagttcctcagtgagcccaccattacttttggcacagccatcgctgctttttatatgcctgtcaccattatgactattttatactggaggatctataaggaaactgaaaagcgtaccaaagagcttgctggcctgcaagcctctgggacagaggcagagacagaaaactttgtccaccccacgggcagttctcgaagctgcagcagttacgaacttcaacagcaaagcatgaaacgctccaacaggaggaagtatggccgctgccacttctggttcacaaccaagagctggaaacccagctccgagcagatggaccaagaccacagcagcagtgacagttggaacaacaatgatgctgctgcctccctggagaactccgcctcctccgacgaggaggacattggctccgagacgagagccatctactccatcgtgctcaagcttccgggtcacagcaccatcctcaactccaccaagttaccctcatcggacaacctgcaggtgcctgaggaggagctggggatggtggacttggagaggaaagccgacaagctgcaggcccagaagagcgtggacgatggaggcagttttccaaaaagcttctccaagcttcccatccagctagagtcagccgtggacacagctaagacttctgacgtcaactcctcagtgggtaagagcacggccactctacctctgtccttcaaggaagccactctggccaagaggtttgctctgaagaccagaagtcagatcactaagcggaaaaggatgtccctggtcaaggagaagaaagcggcccagaccctcagtgcgatcttgcttgccttcatcatcacttggaccccatacaacatcatggttctggtgaacaccttttgtgacagctgcatacccaaaaccttttggaatctgggctactggctgtgctacatcaacagcaccgtgaaccccgtgtgctatgctctgtgcaacaaaacattcagaaccactttcaagatgctgctgctgtgccagtgtgacaaaaaaaagaggcgcaagcagcagtaccagcagagacagtcggtcatttttcacaagcgcgcacccgagcaggccttgtagaatgaggttgtatcaatagcagtgacaaaacgcacacatcaacccacagaccttaggaggaggaaggcgagggcggggtgacttctggtgatgataaaaatggttttatcacccagatgtgaaagaagctgcctgtttactgatccattgaataaacccattttaatagaaaaagtcaataccaattcagcaaaaagaaaa

SEQ ID NO: 15 - DNA, 2860 bp, Homo sapiens
ccaagtcccagtcctgctgtcccaagggactccggggtcaggtggagcaggcagggcagtctgccacgggctccccaactgaagccactctggggagggtccggccaccagaaaatttgcccagctttgctgcctgttggccatgggtgacctctcatctttgacccccggagggtccatgggtctccaagtaaacagaggctcccagagctccctggagggggctcctgccaccgccccggagcctcacagcctgggcatcctccatgcctcctacagcgtcagccaccgcgtgaggccctggtgggacatcacatcttgccggcagcagtggaccaggcagatcctcaaagatgtctccttgtacgtggagagcgggcagatcatgtgcatcctaggaagctcaggctccgggaaaaccacgctgctggacgccatgtccgggaggctggggcgcgcggggaccttcctgggggaggtgtatgtgaacggccgggcgctgcgccgggagcagttccaggactgcttctcctacgtcctgcagagcgacaccctgctgagcagcctcaccgtgcgcgagacgctgcactacaccgcgctgctggccatccgccgcggcaatcccggctccttccagaagaaggtggaggccgtcatggcagagctgagtctgagccatgtggcagaccgactgattggcaactacagcttggggggcatttccacgggtgagcggcgccgggtctccatcgcagcccagctgctccaggatcctaaggtcatgctgtttgatgagccaaccacaggcctggactgcatgactgctaatcagattgtcgtcctcctggtggaactggctcgcaggaaccgaattgtggttctcaccattcaccagccccgttctgagctttttcagctctttgacaaaattgccatcctgagcttcggagagctgattttctgtggcacgccagcggaaatgcttgatttcttcaatgactgcggttacccttgtcctgaacattcaaacccttttgacttctatatggacctgacgtcagtggatacccaaagcaaggaacgggaaatagaaacctccaagagagtccagatgatagaatctgcctacaagaaatcagcaatttgtcataaaactttgaagaatattgaaagaatgaaacacctgaaaacgttaccaatggttcctttcaaaaccaaagattctcctggagttttctctaaactgggtgttctcctgaggagagtgacaagaaacttggtgagaaataagctggcagtgattacgcgtctccttcagaatctgatcatgggtttgttcctccttttcttcgttctgcgggtccgaagcaatgtgctaaagggtgctatccaggaccgcgtaggtctcctttaccagtttgtgggcgccaccccgtacacaggcatgctgaacgctgtgaatctgtttcccgtgctgcgagctgtcagcgaccaggagagtcaggacggcctctaccagaagtggcagatgatgctggcctatgcactgcacgtcctccccttcagcgttgttgccaccatgattttcagcagtgtgtgctactggacgctgggcttacatcctgaggttgcccgatttggatatttttctgctgctctcttggccccccacttaattggtgaatttctaactcttgtgctacttggtatcgtccaaaatccaaatatagtcaacagtgtagtggctctgctgtccattgcgggggtgcttgttggatctggattcctcagaaacatacaagaaatgcccattccttttaaaatcatcagttattttacattccaaaaatattgcagtgagattcttgtagtcaatgagttctacggactgaatttcacttgtggcagctcaaatgtttctgtgacaactaatccaatgtgtgccttcactcaaggaattcaattcattgagaaaacctgcccaggtgcaacatctagattcacaatgaactttctgattttgtattcatttattccagctcttgtcatcctaggaatagttgttttcaaaataagggatcatctcattagcaggtagtgaaagccatggctgggaaaatggaagtgaagctgccgactgtgcatgactgctctgaacgtctgaaatgagagtgccatgtatttctttcttgacaggacatctcaagtcttttaaccattaagactccatttgtgcctcttggatccaagcaggccttgaatgcaatggaagtggtttatagtcccttgctcttacaacttgcagggacatgtggttatttggaaattgtgactgagcggacccaagaatgtaaataatattcataaacctatgggagactcgtgtgactattttttttccttgttctaggcacagaaaaaaataggtcagcttaaaaatatgtttacattggataaaggattaggcaaaaataaaatgtttcaaggattcctgaccataagtgacagagaaagagagttgtgggtttagatgaagcaaggttatcatgcagaattgggtaagaatgcttctgttcctggaagacccagagttaaatgcagatgtccacacgaggggtcggagttacctgatcacatcgagagagtgctgggcagatggatggtgagcaccactgctacagagcacccagtgattttactgaggattaaaataaaaaaccgtaggaatgggctcaacagtgaacaaagcacaccagacaaacctctggttatgtttttaaagattcgtttgctatttttcactttcagctgagtttacttataggcacattgtgcacatgtaccctaaaacttaaagtat

SEQ ID NO: 16 - DNA, 1483 bp, Homo sapiens
ccaagtcccagtcctgctgtcccaagggactccggggtcaggtggagcaggcagggcagtctgccacgggctccccaactgaagccactctggggagggtccggccaccagaaaatttgcccagctttgctgcctgttggccatgggtgacctctcatctttgacccccggagggtccatgggtctccaagtaaacagaggctcccagagctccctggagggggctcctgccaccgccccggagcctcacagcctgggcatcctccatgcctcctacagcgtcagccaccgcgtgaggccctggtgggacatcacatcttgccggcagcagtggaccaggcagatcctcaaagatgtctccttgtacgtggagagcgggcagatcatgtgcatcctaggaagctcaggctccgggaaaaccacgctgctggacgccatgtccgggaggctggggcgcgcggggaccttcctgggggaggtgtatgtgaacggccgggcgctgcgccgggagcagttccaggactgcttctcctacgtcctgcagagcgacaccctgctgagcagcctcaccgtgcgcgagacgctgcactacaccgcgctgctggccatccgccgcggcaatcccggctccttccagaagaaggtggaggccgtcatggcagagctgagtctgagccatgtggcagaccgactgattggcaactacagcttggggggcatttccacgggtgagcggcgccgggtctccatcgcagcccagctgctccaggatcctaaggtcatgctgtttgatgagccaaccacaggcctggactgcatgactgctaatcagattgtcgtcctcctggtggaactggctcgcaggaaccgaattgtggttctcaccattcaccagccccgttctgagctttttcagctctttgacaaaattgccatcctgagcttcggagagctgattttctgtggcacgccagcggaaatgcttgatttcttcaatgactgcggttacccttgtcctgaacattcaaacccttttgacttctatatggacctgacgtcagtggatacccaaagcaaggaacgggaaatagaaacctccaagagagtccagatgatagaatctgcctacaagaaatcagcaatttgtcataaaactttgaagaatattgaaagaatgaaacacctgaaaacgttaccaatggttcctttcaaaaccaaagattctcctggagttttctctaaactgggtgttctcctgaggagagtgacaagaaacttggtgagaaataagctggcagtgattacgcgtctccttcagaatctgatcatgggtttgttcctccttttcttcgttctgcgggtccgaagcaatgtgctaaagggtgctatccaggaccgcgtaggtctcctttaccagtttgtgggcgccaccccgtacacaggcatgctgaacgctgtgaatctgtgtaagtgcccacgtgct

SEQ ID NO: 17 - DNA, 2469 bp, Homo sapiens
gccaatgcttctcccgtcctttgcatggcacccaagaaggagaaaggaggaactgtgaacaccagttctaagatatgggaaccctcgctcatagctgcacagttcaatcagaacgattggcaggcctccattgcttttgtggttgggaaccagattgaagatgatcttctcatccaagcccttaccgtggctgtccaggtccctcagcgtaaactcttcagtatggtgtcgtggcaagacattctccagcagattaatgaaataaatacacttgttggatctgcttcatctaaaaaggcaaaaaaacctgtaggtggtaatgctcctttatattatgaggtgttaacggcagcaaaagcaattatggatagtggagagaaattaaccttaccactgatagggaaactcttgaaatttcaacttctccagattaaatttaaggaccaacagcgacgggaaaatgaaaagaaggtaatagaagacaaacctaagttagaaaaggataaagggaaagcaaaatctcccaaggagaaaaaggctccaagtgccaagcctgccaaaggaaagggaaaggatcagcctgaggcaaatgcaccagtgaaaaagaccacccagttaaagcggagaggagaagacgaccacaccaatcgttacattgacgatgagccagatgatggtgcccaacattacattatagttgtgggctttaacaatcctcagctattagcaattatggctgagcttggcattcctataaccagcgtgattaaaatatcttcagagaattatgaacctctgcagacacacctggcagcagttaaccagcagcaggaagttcttcttcagtcagaagatctagaagcagaaaaattgaagaaagaaaatgccataaaagagcttaaaactttctggaagtacttggaaccagtcctgaataatgagaaacctgaaacaaatctctttgatgttgctcgacttgagtacatggtcaaagcagctgattttccttctgactggtcagatggtgagatgatgctgaaattgggcactgatatttttgaaaatattgcctgcttgatgtatgacatcctggattggaaaaggcagcaccagcactatttggaaagcatgcagcttattaatgttccacaagtggttaatgagaaacctgtattagaagccatgccaacttcagaggctccacaacctgctgtaccagctcctggaaagaagaaagcacagtatgaagaaccgcaagctccaccaccagtgacttcagtcatcacaactgaagtagacatgagatattacaattatttgctgaatccaattcgagaggaattcatttctgtgcccctgatactgcattgtatgctggaacaggttgttgcaactgaagaagatctcgtcccacccagtctgcgggagccatcccccagagcagacgggctagaccacagaatcgcagctcacattgtgtcccttctgccctcactctgtctctcagagagggagaaaaagaatcttcatgacatatttttatctgaagaagaaaatgaaagcaaagcagtgcccaaaggccccctcctactgaactatcatgatgcacacgcccacaagaagtacgcactacaggaccaaaagaattttgatccagttcaaattgagcaggagatgcagtccaagttgccactgtgggaatttcttcaattccctctacccccaccatggaacaacactaaacgtctagctacaattcatgagcttatgcacttttgtacgagtgatgtcttgagctggaatgaagtagaacgagccttcaaggtgtttacttttgagagcctgaagctctctgaggttgatgaaaaagggaaactgaaaccttctgggatgatgtgtgggtcagattctgaaatgttcaacataccgtgggacaaccctgccagatttgctaaacagataaggcagcaatatgtcatgaaaatgaatactcaagaggccaagcagaaagcagatattaaaatcaaagacagaacactatttgtggatcagaatttgtcaatgtctgtgcaagataatgaaagcaaccgagaaccttcagatcctagtcagtgtgatgctaacaatatgaagcattctgacttgaataatctcaaactctcagtccctgataatagacagctgttagagcaggagagcatcatgaaggctcagccccaacatgagtctctggagcagaccacaaacaatgagatcaaagatgatgcagtcacaaaggctgattctcatgaaaagaaacccaagaagatgatggtggaagcagatttagaggacataaagaaaacacagcagcgcagtctaatggactggagttttactgaacattttaaaccgaaagtactgcttcaggtatttatggactgtgattctctaggagacggtcagataggtctggagagtctgctgtga

SEQ ID NO: 18 - DNA, 1339 bp, Homo sapiens
gagcgacccgggccgggcggggaagggagcgcggccggacgcgggcacgacaaggcccaatggctgctgttcggaaccagaggccggggaccggagaaaggaggagcggagaaggagaaggaggagagcacggcctggctgggacagaagcggtgggaccctgggaggcctccgctgtgcccgtgccgcgctcctcgggaccagcgcgtcgcacacaaaggggctgccgagccagagccaccagcgcctcagggcaccgtggggagcgcgcagctagggggcctgtgcgcaccccgccccgcagccccgcccccggccctccccggccccaccccactcccaccgccctctccgcggccgtccccacccctatctccgcgacccccactcctcctcggctgttccccaaccctgtcactgtgctcccctccctactcccggcccgtagtggaggtgactttcctgcgcagcgccgcttctgagggcggagaacccacagggagtgcgacccctttgcacgctgtgagtgggcaactgtccgagggactcgagccgatcgaaggctggacgccctatagggctcttggcagtccacgaaagacctggagtccgcctccccatttctccggtcggtgagtggcaggaggaaatcgccaaacatgttttcccgctttgcctccccaactcggaaacttgcaacttgccgtgtcctggaggttgagacaatttggggtctcttggctgccgtccaacagatttatctctgagggcagtgtccttggtgagaggtccaagtaggtgtgggcgacattttcctccatctcatgagggagcagccctgcacactagggcccaaaactctgcgaaggagcttggaagttcttcatccgttccacttgttttgctactccacacacccttctaggacatgttgattgccaactgctctgtgcagctttcccatagctgtctgttcccgtgcatttcggagcaccaagcaaatacgagcagagagacctggaaaaaaaaatgatgaagacagtattaatgataaaattaacatggctgagtgaattgtcaatgcaagttcctttactaactctttgttaagttttgctttgtactccttacatcctctttctcttaagccattgttttaatttcttctcgttatcatttttaaaagtaacagaaatacagctttcttcctaccttcacgattgacttggtggaggttgggttgcaaagaggaagcagtaagaaaaaataattattctatacattcacaagtccttcaaggcacaaaataaaagtaagaaatagaaaatatgtcctttct

SEQ ID NO: 19 - DNA, 4111 bp, Homo sapiens
gagaactagttttgttccgtgccctctggactggaaccttttggagagaacccccggcaggaccaaccccgcacccgccagcaccgcggcaatgtccagcaatagttttccttacaatgagcagtccggaggaggggaggcgacggagctgggtcaggaggcgacctcaaccatttccccctcgggggccttcggcctctttagcagcgatttgaagaagaatgaagatctaaagcaaatgttagagagcaacaaagattctgctaaactggatgctatgaagcggattgttgggatgattgcaaaagggaaaaatgcatctgaactgtttcctgctgttgtgaagaatgtggccagtaaaaatattgagatcaagaagttggtatatgtttacctggttcgatatgctgaagaacagcaggatcttgcactcctgtccataagcacttttcagcgagctctgaaggacccaaaccaactaattcgtgcaagcgctttgagagttctgtcaagtattagagtgccaattattgtacctatcatgatgcttgctattaaggaagcttctgctgacttatcaccatatgttaggaagaatgcagcccatgcaatacaaaaattatacagccttgatccagagcagaaggaaatgttaattgaagtaattgaaaaacttctgaaagataaaagcacattggtagctggcagtgttgtgatggcttttgaagaagtatgcccggacagaatagatctgattcataaaaattaccgcaagctatgtaacttactagtggatgttgaagagtgggggcaggttgtcataatccacatgctaactcgatatgctcggacacagtttgtcagcccttggaaagagggtgatgaattagaagacaatggaaagaatttctacgaatctgatgatgatcagaaggaaaagactgacaaaaagaagaagccgtatactatggatccagatcatagactcttaattagaaatacaaagcctttgcttcagagcaggaatgctgcggtggttatggcagttgctcagctgtattggcacatatcaccaaaatctgaagctggcataatttctaaatcactagtgcgtttacttcgtagcaatagggaggtgcagtatattgtcctacaaaatatagcaactatgtcaattcaaagagcttgaaattttgacaaacttggcaaatgaagccaacatatcaactcttcttcgagaatttcagacctatgtgaaaagccaggataaacaatttgcagcagccactattcagactataggcagatgtgcaaccaacatcttggaagtcactgacacgtgcctcaatggcttggtctgtctgctgtccaacagggatgaaatagttgttgctgaaagtgtggttgttataaagaaattactgcaaatgcaacctgcacaacatggtgaaattattaaacatatggccaaactcctggacagtatcactgttcctgttgctagagcaagtattctttggctaattggagaaaactgtgaacgagttcctaaaattgcccctgatgttttgaggaagatggctaaaagcttcactagtgaagatgatctggtaaaactgcagatattaaatctgggagcaaaattgtatttaaccaactccaaacagacaaaattgcttacccagtacatattaaatctcggcaagtatgatcaaaactacgacatcagagaccgtacaagatttattaggcagcttattgttccgaatgaaaagagtggagctttaagtaaatatgccaaaaaaatattcctagcacaaaagcctgcaccactgcttgagtctccttttaaagatagagatcatttccagcttggcaccttatctcatactctcaacattaaagctactgggtacctggaattatctaattggccagaggtggcgcccgacccatcagttcgaaatgtagaagtaatagagttggcaaaagaatggaccccagcaggaaaagcaaagcaagagaattctgctaagaagttttattctgaatctgaggaagaggaggactcttctgatagtagcagtgacagtgagagtgaatctggaagtgaaagtggagaacaaggcgaaagtggggaggaaggagacagcaatgaggacagcagtgaggactcctccagtgagcaggacagtgagagtggacgggagtcaggcctagaaaacaaaagaacagccaagaggaactcaaaagccaaaggaaaaagtgattctgaagatggggagaaggaaaatgaaaaatctaaaacttcagattcttcaaatgacgaatctagttcaatagaagacagttcttccgattctgaatcagagtcagaacctgaaagtgaatctgaatccagaagagtcactaaggagaaagaaaagaaaacaaagcaagatagaactcctcttaccaaagatgtttcacttctagatctggatgattttaacccagtatccactccagttgcacttcccacaccagctctttctccaagtttgatggctgatcttgaaggtttacacttgtcaacttcctcttcagtcatcagtgtcagtactcctgcatttgtaccaacgaaaactcacgtgctgcttcatcgaatgagtggaaaaggactagctgcccattatttctttccaagacagccttgcatttttggtgataagatggtctctatacaaataacactgaataacactactgatcgaaagatagaaaatatccacataggggaaaaaaaacttcctataggcatgaaaatgcatgtttttaatccaatagactctcttgagcctgagggatccattacagtttcaatgggtattgacttttgtgattctactcagactgccagtttccagttgtgtaccaaggatgattgcttcaatgttaatattcagccacctgttggagaactgcttttacctgtggccatgtcagagaaagattttaagaaagagcaaggagtgctaacaggaatgaatgaaacttctgctgtaatcattgctgcaccacagaatttcactccctctgtgatctttcagaaggttgtaaatgtagccaatgtaggtgcagtcccttctggccaggataatatacacaggtttgcagctaaaactgtgcacagtgggtcattgatgctagtcacagtggaactgaaggaaggctctacagcccagcttatcataaacactgagaaaactgtgattggctctgttctgctgcgggaactgaagcctgtcctgtctcaggggtaacctgcttacatctggactttagaatctggcacacaacaaaagtgcctggcatccactactgctgcctttcatttataataatagcccttccatctggcagtgggggtagaatacactcttgacattcttgtctcctgctttagaatgctagtgtgtatctatcatgtatgcaatactttccccctttttgctttgctaaccaaagagcatatattttactgtcagttgtctcaactcttgaatccatgtggcgttttctctgtcctgctgcttcttttggcctcctcgttttccttctctttttcgacaatggtagacatgaatgagatatttaaagttcattggaaatcttcttccctacagcagtaagcaaaaattagcaaagagatagtctaaatggcctctcagcttggtatgtgaaaatgagatcacatactttttaaatccaaatacaaaagcatagtctctgcaagattttgttctttgaatttcttgatattgtaattgattattgataactgtcatcatgaaattatctctcaataataagataaataaactagcatatgaatcatatttgtctttgcatttttaatgagaaactattaataatcctgaagttcatatgctaaagttttcttattttaaagcaagtattttgagtgttacattatgcagagaagcaatgtggtttagttagcgaaagaaaaaccacttccaaaccaagtaaattttctacttatagtttactccaaggaaaaaaaattggtgtatttaataacaaaaacaaaaatcttcatattgcaaaa

SEQ ID NO: 20 - DNA, 4107 bp, Homo sapiens
gagaactagttttgttccgtgccctctggactggaaccttttggagagaacccccggcaggaccaaccccgcacccgccagcaccgcggcaatgtccagcaatagttttccttacaatgagcagtccggaggaggggaggcgacggagctgggtcaggaggcgacctcaaccatttccccctcgggggccttcggcctctttagcagcgatttgaagaagaatgaagatctaaagcaaatgttagagagcaacaaagattctgctaaactggatgctatgaagcggattgttgggatgattgcaaaagggaaaaatgcatctgaactgtttcctgctgttgtgaagaatgtggccagtaaaaatattgagatcaagaagttggtatatgtttacctggttcgatatgctgaagaacagcaggatcttgcactcctgtccataagcacttttcagcgagctctgaaggacccaaaccaactaattcgtgcaagcgctttgagagttctgtcaagtattagagtgccaattattgtacctatcatgatgcttgctattaaggaagcttctgctgacttatcaccatatgttaggaagaatgcagcccatgcaatacaaaaattatacagccttgatccagagcagaaggaaatgttaattgaagtaattgaaaaacttctgaaagataaaagcacattggtagctggcagtgttgtgatggcttttgaagaagtatgcccggacagaatagatctgattcataaaaattaccgcaagctatgtaacttactagtggatgttgaagagtgggggcaggttgtcataatccacatgctaactcgatatgctcggacacagtttgtcagcccttggaaagagggtgatgaattagaagacaatggaaagaatttctacgaatctgatgatgatcagaaggaaaagactgacaaaaagaagaagccgtatactatggatccagatcatagactcttaattagaaatacaaagcctttgcttcagagcaggaatgctgcggtggttatggcagttgctcagctgtattggcacatatcaccaaaatctgaagctggcataatttctaaatcactagtgcgtttacttcgtagcaatagggaggtgcagtatattgtcctacaaaatatagcaactatgtcaattcaacttgaaattttgacaaacttggcaaatgaagccaacatatcaactcttcttcgagaatttcagacctatgtgaaaagccaggataaacaatttgcagcagccactattcagactataggcagatgtgcaaccaacatcttggaagtcactgacacgtgcctcaatggcttggtctgtctgctgtccaacagggatgaaatagttgttgctgaaagtgtggttgttataaagaaattactgcaaatgcaacctgcacaacatggtgaaattattaaacatatggccaaactcctggacagtatcactgttcctgttgctagagcaagtattctttggctaattggagaaaactgtgaacgagttcctaaaattgcccctgatgttttgaggaagatggctaaaagcttcactagtgaagatgatctggtaaaactgcagatattaaatctgggagcaaaattgtatttaaccaactccaaacagacaaaattgcttacccagtacatattaaatctcggcaagtatgatcaaaactacgacatcagagaccgtacaagatttattaggcagcttattgttccgaatgaaaagagtggagctttaagtaaatatgccaaaaaaatattcctagcacaaaagcctgcaccactgcttgagtctccttttaaagatagagatcatttccagcttggcaccttatctcatactctcaacattaaagctactgggtacctggaattatctaattggccagaggtggcgcccgacccatcagttcgaaatgtagaagtaatagagttggcaaaagaatggaccccagcaggaaaagcaaagcaagagaattctgctaagaagttttattctgaatctgaggaagaggaggactcttctgatagtagcagtgacagtgagagtgaatctggaagtgaaagtggagaacaaggcgaaagtggggaggaaggagacagcaatgaggacagcagtgaggactcctccagtgagcaggacagtgagagtggacgggagtcaggcctagaaaacaaaagaacagccaagaggaactcaaaagccaaaggaaaaagtgattctgaagatggggagaaggaaaatgaaaaatctaaaacttcagattcttcaaatgacgaatctagttcaatagaagacagttcttccgattctgaatcagagtcagaacctgaaagtgaatctgaatccagaagagtcactaaggagaaagaaaagaaaacaaagcaagatagaactcctcttaccaaagatgtttcacttctagatctggatgattttaacccagtatccactccagttgcacttcccacaccagctctttctccaagtttgatggctgatcttgaaggtttacacttgtcaacttcctcttcagtcatcagtgtcagtactcctgcatttgtaccaacgaaaactcacgtgctgcttcatcgaatgagtggaaaaggactagctgcccattatttctttccaagacagccttgcatttttggtgataagatggtctctatacaaataacactgaataacactactgatcgaaagatagaaaatatccacataggggaaaaaaaacttcctataggcatgaaaatgcatgtttttaatccaatagactctcttgagcctgagggatccattacagtttcaatgggtattgacttttgtgattctactcagactgccagtttccagttgtgtaccaaggatgattgcttcaatgttaatattcagccacctgttggagaactgcttttacctgtggccatgtcagagaaagattttaagaaagagcaaggagtgctaacaggaatgaatgaaacttctgctgtaatcattgctgcaccacagaatttcactccctctgtgatctttcagaaggttgtaaatgtagccaatgtaggtgcagtcccttctggccaggataatatacacaggtttgcagctaaaactgtgcacagtgggtcattgatgctagtcacagtggaactgaaggaaggctctacagcccagcttatcataaacactgagaaaactgtgattggctctgttctgctgcgggaactgaagcctgtcctgtctcaggggtaacctgcttacatctggactttagaatctggcacacaacaaaagtgcctggcatccactactgctgcctttcatttataataatagcccttccatctggcagtgggggtagaatacactcttgacattcttgtctcctgctttagaatgctagtgtgtatctatcatgtatgcaatactttccccctttttgctttgctaaccaaagagcatatattttactgtcagttgtctcaactcttgaatccatgtggcgttttctctgtcctgctgcttcttttggcctcctcgttttccttctctttttcgacaatggtagacatgaatgagatatttaaagttcattggaaatcttcttccctacagcagtaagcaaaaattagcaaagagatagtctaaatggcctctcagcttggtatgtgaaaatgagatcacatactttttaaatccaaatacaaaagcatagtctctgcaagattttgttctttgaatttcttgatattgtaattgattattgataactgtcatcatgaaattatctctcaataataagataaataaactagcatatgaatcatatttgtctttgcatttttaatgagaaactattaataatcctgaagttcatatgctaaagttttcttattttaaagcaagtattttgagtgttacattatgcagagaagcaatgtggtttagttagcgaaagaaaaaccacttccaaaccaagtaaattttctacttatagtttactccaaggaaaaaaaattggtgtatttaataacaaaaacaaaaatcttcatattgcaaaa

SEQ ID NO: 21 - DNA, 192 bp, Homo sapiens
atgggagggaggagctgcggactcggaggagtgggcgccagggtgggcttcctggagaggagcggggtcgccctgaggtctgagcagggcagggcggtaacgtgtcccgcgggtgggaatgaagatctaaagcaaatgttagagagcaacaaagattctgctaaactggatgctatgaagcggattgttggg

SEQ ID NO: 22 - DNA, 5923 bp, Homo sapiens
tttaccaattcccttcctgggagttgcggcttccctcgctcggccccactcccgtttaccctttccccagctcccgccttagccaggggcttccccgcctgccgctagggctcgggccgaagcgccgctcagcgccagcctgccgctccccgggctccactttcactttcggtcctgggggagctaggccggcggcagtggtggtggcggcggcgcaagggtgagggcggccccagaaccccaggtaggtagagcaagaagatggtgtttctgcccctcaaatggtcccttgcaaccatgtcatttctactttcctcactgttggctctcttaactgtgtccactccttcatggtgtcagagcactgaagcatctccaaaacgtagtgatgggacaccatttccttggaataaaatacgacttcctgagtacgtcatcccagttcattatgatctcttgatccatgcaaaccttaccacgctgaccttctggggaaccacgaaagtagaaatcacagccagtcagcccaccagcaccatcatcctgcatagtcaccacctgcagatatctagggccaccctcaggaagggagctggagagaggctatcggaagaacccctgcaggtcctggaacacccccctcaggagcaaattgcactgctggctcccgagcccctccttgtcgggctcccgtacacagttgtcattcactatgctggcaatctttcggagactttccacggattttacaaaagcacctacagaaccaaggaaggggaactgaggatactagcatcaacacaatttgaacccactgcagctagaatggcctttccctgctttgatgaacctgccttcaaagcaagtttctcaatcaaaattagaagagagccaaggcacctagccatctccaatatgccattggtgaaatctgtgactgttgctgaaggactcatagaagaccattttgatgtcactgtgaagatgagcacctatctggtggccttcatcatttcagattttgagtctgtcagcaagataaccaagagtggagtcaaggtttctgtttatgctgtgccagacaagataaatcaagcagattatgcactggatgctgcggtgactcttctagaattttatgaggattatttcagcataccgtatcccctacccaaacaagatcttgctgctattcccgactttcagtctggtgctatggaaaactggggactgacaacatatagagaatctgctctgttgtttgatgcagaaaagtcttctgcatcaagtaagcttggcatcacaatgactgtggcccatgaactggcccaccagtggtttgggaacctggtcactatggaatggtggaatgatctttggctaaatgaaggatttgccaaatttatggagtttgtgtctgtcagtgtgacccatcctgaactgaaagttggagattatttctttggcaaatgttttgacgcaatggaggtagatgctttaaattcctcacaccctgtgtctacacctgtggaaaatcctgctcagatccgggagatgtttgatgatgtttcttatgataagggagcttgtattctgaatatgctaagggagtatcttagcgctgacgcatttaaaagtggtattgtacagtatctccagaagcatagctataaaaatacaaaaaacgaggacctgtgggatagtatggcaagtatttgccctacagatggtgtaaaagggatggatggcttttgctctagaagtcaacattcatcttcatcctcacattggcatcaggaaggggtggatgtgaaaaccatgatgaacacttggacactgcagaggggttttcccctaataaccatcacagtgagggggaggaatgtacacatgaagcaagagcactacatgaagggctctgacggcgccccggacactgggtacctgtggcatgttccattgacattcatcaccagcaaatccgacatggtccatcgatttttgctaaaaacaaaaacagatgtgctcatcctcccagaagaggtggaatggatcaaatttaatgtgggcatgaatggctattacattgtgcattacgaggatgatggatgggactctttgactggccttttaaaaggaacacacacagcagtcagcagtaatgatcgggcaagtctcattaacaatgcatttcagctcgtcagcattgggaagctgtccattgaaaaggccttggatttatccctgtacttgaaacatgaaactgaaattatgcccgtgtttcaaggtttgaatgagctgattcctatgtataagttaatggagaaaagagatatgaatgaagtggaaactcaattcaaggccttcctcatcaggctgctaagggacctcattgataagcagacatggacagacgagggctcagtctcagagcgaatgctgcggagtgaactactactcctcgcctgtgtgcacaactatcagccgtgcgtacagagggcagaaggctatttcagaaagtggaaggaatccaatggaaacttgagcctgcctgtcgacgtgaccttggcagtgtttgctgtgggggcccagagcacagaaggctgggattttctttatagtaaatatcagttttctttgtccagtactgagaaaagccaaattgaatttgccctctgcagaacccaaaataaggaaaagcttcaatggctactagatgaaagctttaagggagataaaataaaaactcaggagtttccacaaattcttacactcattggcaggaacccagtaggatacccactggcctggcaatttctgaggaaaaactggaacaaacttgtacaaaagtttgaacttggctcatcttccatagcccacatggtaatgggtacaacaaatcaattctccacaagaacacggcttgaagaggtaaaaggattcttcagctctttgaaagaaaatggttctcagctccgttgtgtccaacagacaattgaaaccattgaagaaaacatcggttggatggataagaattttgataaaatcagagtgtggctgcaaagtgaaaagcttgaacgtatgtaaaaattcctcccttgccaggttcctgttatctctaatcaccaacattttgttgagtgtattttcaaactagagatggctgttttggctccaactggagatacttttttcccttcaactcattttttgactatccctgtgaaaagaatagctgttagtttttcatgaatgggctatcgctaccatgtgttttgttcatcacaggtgttgccctgcaacgtaaacccaagtgttgggttccctgccacagaagaataaagtaccttattcttctcattttatagtttatgcttaagcacccgtgtccaaaaccctgtaccccatgtttatcattcataaactgtttcatcagtctcctcgaaagactctgaatagtcgactactgaacaatgaacacctggatctgagactaagccggacgatgactgggttaaagctctcccggctcacccctccagacccgctgcccatccctcttccttgctccatgcccaggggctgacttgtaaaggccaagtcatcaagctttcttgccctttggatgttggtcagtggggagccggagagctggagctggggtcggaggaggtagtaggtggaggtgttcttccctgattcccttgcgggatgcctcgggctggcctcccctgagggtcttagctccgagaggggaccctcttttccacacagccttctccacctctggattttggtaactgctccctcctcatcccttcaggattagtggcctcagtgggagtctggcttttactagtcctggcggacttgtggtttctacataatgtgctcgcacttttgcaaaaaatctttttatagaaccctcctcagataattctgagtgtcatctatttccctgactggtacagtatctcttctgaaaaagcagagtgcattcaagtctgtaggaaaacccttttcttagggaggtgattttttttctctctctgcttcttatttggcctactttacaatttctaactaactagttattggcatttactgacagtaaattattgcagtcaccaataaatgatagtacattgtgaaacaaaatatttgctcatattagcaaataggacattctttggctttgaagtctttcttttgtgaagacttcacacacggttgcttcagcacacagttgctgctcaggttttatgtatagatgataataatagaaagcacagtttactaacatggtaaaccaacggagttcaagtcaagtcagttaataccctaagaattagattttatttcttattctgaaaacttgctacacagggacttatctaacccatagtgtgctctgttgctgacttgattcaagttgcagcgtgttttgcgctgactctaaggtgcggaaatcctcacacctggcaaaggagaattcaaactgaactttttgaatataaggcaaaaacttcaagataagggaatatgattgatgattggtacgaaaaatgtcaaaatgtgttcccctaatacacgacaaaatagagtgacttctggacataaatctgccatttattaaaccattcactacaacaaataaataggtataaaagtggaattggaatttttatacttatttgttgtagtgaatggtttaataaaaatagaaatcactggtaatttccaccccaaactaaactatttcccttcttttaaaaaaatacacaaccaagattttaatgtaaaatattttgctttaattgtattttatgccttgattaatgaaacatggaaatattgattttcagttttggtcacctgaggaacctatctttgtttgcttttggaaaagcccattttctaaacagatacaatattgccacaacaatgtgcagaaacctttttgataataaaaaattgttctttgcctctaagtggatatttgcaattattttctctctcctaactagactgtaaaaagggctgctttagatcctgtagcttactccagttattagttattaacaaacacccaagtctcgaagatatttctaattaaaaaagaaggcatattcagagttctttttaaataaatgttgtttacttttataggcatctttaaacttctggattttggtatgccatttaaaaatacttccagatacacatggaaattagtaatactgcagccgtatccttgcaaacacatctgtcagtgtcaaaggtttcaaggtttttcttaaaaaaagaaaacaaaaaagcaaacacctatactgcccaaatgggaggattagatacatggttagaaatccctcaggaaaagtgttttttcttttcttgttgctgccttaaaaatagaataatgactatttctgatggatagagacatagcattttaagctggtggtgtgtaaaatcccataggtatgtgcatgactttcagagagtatttgggggggaggttaacaagatgtggtgccatttataagcagtgttattgtttttgcttgccccgctgccacaagtcagctaagtcataacaaaagcttcaaactgatgctaaggaaggccatgccctttggaaacaataaattcccaatctgttttatgttatgtacctgacatcttttcctgcattctctaccaggaaataaagatgaaattaaatatcaaaattctaatcgatgatatcagtgcaatgttcaggaactattcattaagatattagaaaaccattcaaagtggtaggacatcagagcctacttcttacattgctgtgggagaaatgcaggtttcaaatttaatatatatatataatttttttaaaagcagaagtttctttttatatttggtaaacttaagttcc

SEQ ID NO: 23 - DNA, 6768 bp, Homo sapiens
tttaccaattcccttcctgggagttgcggcttccctcgctcggccccactcccgtttaccctttccccagctcccgccttagccaggggcttccccgcctgccgctagggctcgggccgaagcgccgctcagcgccagcctgccgctccccgggctccactttcactttcggtcctgggggagctaggccggcggcagtggtggtggcggcggcgcaagggtgagggcggccccagaaccccaggtaggtagagcaagaagatggtgtttctgcccctcaaatggtcccttgcaaccatgtcatttctactttcctcactgttggctctcttaactgtgtccactccttcatggtgtcagagcactgaagcatctccaaaacgtagtgatgggacaccatttccttggaataaaatacgacttcctgagtacgtcatcccagttcattatgatctcttgatccatgcaaaccttaccacgctgaccttctggggaaccacgaaagtagaaatcacagccagtcagcccaccagcaccatcatcctgcatagtcaccacctgcagatatctagggccaccctcaggaagggagctggagagaggctatcggaagaacccctgcaggtcctggaacacccccctcaggagcaaattgcactgctggctcccgagcccctccttgtcgggctcccgtacacagttgtcattcactatgctggcaatctttcggagactttccacggattttacaaaagcacctacagaaccaaggaaggggaactgaggatactagcatcaacacaatttgaacccactgcagctagaatggcctttccctgctttgatgaacctgccttcaaagcaagtttctcaatcaaaattagaagagagccaaggcacctagccatctccaatatgccattggtgaaatctgtgactgttgctgaaggactcatagaagaccattttgatgtcactgtgaagatgagcacctatctggtggccttcatcatttcagattttgagtctgtcagcaagataaccaagagtggagtcaaggtttctgtttatgctgtgccagacaagataaatcaagcagattatgcactggatgctgcggtgactcttctagaattttatgaggattatttcagcataccgtatcccctacccaaacaagatcttgctgctattcccgactttcagtctggtgctatggaaaactggggactgacaacatatagagaatctgctctgttgtttgatgcagaaaagtcttctgcatcaagtaagcttggcatcacaatgactgtggcccatgaactggcccaccagtggtttgggaacctggtcactatggaatggtggaatgatctttggctaaatgaaggatttgccaaatttatggagtttgtgtctgtcagtgtgacccatcctgaactgaaagttggagattatttctttggcaaatgttttgacgcaatggaggtagatgctttaaattcctcacaccctgtgtctacacctgtggaaaatcctgctcagatccgggagatgtttgatgatgtttcttatgataagggagcttgtattctgaatatgctaagggagtatcttagcgctgacgcatttaaaagtggtattgtacagtatctccagaagcatagctataaaaatacaaaaaacgaggacctgtgggatagtatggcaagtatttgccctacagatggtgtaaaagggatggatggcttttgctctagaagtcaacattcatcttcatcctcacattggcatcaggaaggggtggatgtgaaaaccatgatgaacacttggacactgcagaggggttttcccctaataaccatcacagtgagggggaggaatgtacacatgaagcaagagcactacatgaagggctctgacggcgccccggacactgggtacctgtggcatgttccattgacattcatcaccagcaaatccgacatggtccatcgatttttgctaaaaacaaaaacagatgtgctcatcctcccagaagaggtggaatggatcaaatttaatgtgggcatgaatggctattacattgtgcattacgaggatgatggatgggactctttgactggccttttaaaaggaacacacacagcagtcagcagtaatgatcgggcaagtctcattaacaatgcatttcagctcgtcagcattgggaagctgtccattgaaaaggccttggatttatccctgtacttgaaacatgaaactgaaattatgcccgtgtttcaaggtttgaatgagctgattcctatgtataagttaatggagaaaagagatatgaatgaagtggaaactcaattcaaggccttcctcatcaggctgctaagggacctcattgataagcagacatggacagacgagggctcagtctcagagcgaatgctgcggagtgaactactactcctcgcctgtgtgcacaactatcagccgtgcgtacagagggcagaaggctatttcagaaagtggaaggaatccaatggaaacttgagcctgcctgtcgacgtgaccttggcagtgtttgctgtgggggcccagagcacagaaggctgggattttctttatagtaaatatcagttttctttgtccagtactgagaaaagccaaattgaatttgccctctgcagaacccaaaataaggaaaagcttcaatggctactagatgaaagctttaagggagataaaataaaaactcaggagtttccacaaattcttacactcattggcaggaacccagtaggatacccactggcctggcaatttctgaggaaaaactggaacaaacttgtacaaaagtttgaacttggctcatcttccatagcccacatggtaatgggtacaacaaatcaattctccacaagaacacggcttgaagaggtaaaaggattcttcagctctttgaaagaaaatggttctcagctccgttgtgtccaacagacaattgaaaccattgaagaaaacatcggttggatggataagaattttgataaaatcagagtgtggctgcaaagtgaaaagcttgaacatgatcctgaagctgacgcaacaggatgaaaatccatcagaatctcagactacagcactaaatatgctttgatgctacatcaaacggaatggaagcatagctgacttcgctaaagttacttcatctccatctagcaaatgaggcactgttctcaaccaaaggagatggggatctggtttagggcaatccctttataatttgatgtgctgtggtctccttggtaatgtataatttggtattgcacaggtgattagtcaaggaagtctggaaaagctttggtcccacagccttgcctcacagcatgtaaataattaaaacaatattgatgctgaggttcttctactgctagtatgaaagtgacaaatttttactggtgtgaattgggaagaaaacaatgctattccatgacgtttgtaaaatgtttgtaaaagctcaaacatgacgattccataaaataaacttgaggttaaataatgggtagtaaattatagaatgtataagaaaaaatataaaggagaaaatcaattatcaggaaagctaaagaacttttcaaatctagtaatttgaatatagacacaatgcactttattgcactttcaattcttataaagcaacaataatattaaggtccttgactatgtgtacaatgttttcacatatatagtttcatttaatcatttcaaagttaatctctgccatctcgctaaatcatcagtcttggctcttctgaaatagaaggtgcctgatcttcctaataattctgcctattttcatttgctttaaacaggcgccctattttctttctagttgtggctgcgcaaaaacatttatctcccaaataagatgtgctgcttaccgaggtatcacggggtggggctccagcttgggtcgttgaagctggggtttgggaaaccacttcagagatggcagcagcaagtttagcatcttcaaatttcttttattgaaaaaaattttattagtaacatgttgtatataaaattatgagcacaatgccatcacttaactataactcttaacgatagcttaatgactgtttattctcttgaccaaatagactcataataacatataattttaaaagaaatttaaattctttcttctctattgtattattttatacaatttgctatttctatttccttctcatattgattattctaaatactatgcaataatataacttagagttccacggtttgtttacacatttcctgttgtacatttaggttattcaaagttttcagctcttttaaaattgctctgaataagttctagtgagtgagttatggtgctggctatattttgctaaactgccctctcaaatgttgctaggaattcatactgcgaaaagcaatgaataagcatgcctgttttcccatggccttgcttgccagaatttgacttttattatgataatcagtgtaaaatgatatactactattgcttgtatattgtggtatacggtgtcaggtttcagggttttttttcaacgttaaatattctagaaactttctgaaataatttctgtttaaaaatattgaatatttgcttcatttcaaatactcccttttgacaaaaaaacttaggtataactgttgatgaaaaaccagaaaaaagtccagaactctttggtgactccaactatggatagcttattttgaaaaaggagaattgcaaattttaccaaaagatggagaaaagcacattaaaaagataccaacattcagaaattcatttcagcatgttattattggaaattatttaaactaatttagataactataagatacttattgtccatttataccctgtaaagccgttttagaatgtaatattttaggtaatccaaaatgtactaaattaaattcatttttagttatgagaaatctttgcttatatgacaaatgaaaagaataacaagttgtcaaatgaaaagaatgacattgaaacatttgtattgtctcttcttaaactatcttattgacttattatttaagccttttaatactaagtatgaaacaacctatggtctggaaatttgtatcgcaaagctatatgtgcatatgttatttaattcatctaatgctacacaaaagcataaaataatgatttttcactctctttaaaaatactaaatcatttatgtccatttctcaattttttcattgatctatgctttgagtttgctttctcaacattattgtattttccacttattattactgtataacatatgctagtgtttagttggattaatcttacctaaaagtactgaaaaatgctttttagtactttttcatattttatacatttattttccgaatgtatcattgaataattttattgagttataaaagtatcttattgctatttaataaaaaattaacacataaaatgacttgaattgtcatcattctttttaagatatttagttaaactgacttaatgtatggccttcaatttttttgtgtccttatttttctgatcatttctccttttatagtttacattaagtctgatctcatattaattacattttctcatctgttgttactaataaacatggcataatgttacttacaaatgtattatctacaagtagtgctatccacaaatatattcaaatgttcccttttaatgtttgtcatttttttcatgtgttgttaatgattcttccatgtgataataagcagaaatgacaataaacttttcatagtttctgcttttaaggaaaatgcctccagcatgatattgaatatttgattctgaaaactaaagactctttaacagattaggggattgcctactttttaaaaagtttttatttataatatgagtatatgtaaaattttaaatagatcttttacatggacatgattatttgtttctatttgatataccactacaatatattgacagttttcctgctactgaatcaatacttataatggcaaataatttaactgtttgttatattctatgtatgctgtatgtaatttttacatctacacatttaagtaactttagctgataccgttatatttgtcagattttaagattagcaccataattactcatagaagcaactatgtgaccccatctttttcatgacatatttatgccacataagaactgagtgttcaacagttagagtcatctttaaaccttcagtagaaggacagtttgaaaatcattgcaatattttcttcagtctttttttaggttttgtgaattacgcagtttaatatttttgtttaatcttagaaaattgttgtacatagtgtttcctaataatttatttgtgctctgtactgattattgtattttctcacatttatgttaaattttattagtaagattattttctctatttatcagttttgtaaaatgttaaaaattcataaaagccaactgactattggctttaaactaccaataatttagttgatctctatattattatattactctgttaaaatttaattgtattttttgtaaggttttttttcctcttttatatttgctagtattttataaagtatttgttatttcaaaagaaacaactattggccagttaactttcatgccgctattttcatttcctggtatgcttattgctactttgtttttggtggctaccttattaaaacttttagaaatttcagttt

SEQ ID NO: 24 - DNA, 4632 bp, Homo sapiens
ttctgctgggcctcaggtgagactgcagctccagtcatcatcttgattgcagcccacagaaactaccaacccacagaaactgtaggtagagcaagaagatggtgtttctgcccctcaaatggtcccttgcaaccatgtcatttctactttcctcactgttggctctcttaactgtgtccactccttcatggtgtcagagcactgaagcatctccaaaacgtagtgatgggacaccatttccttggaataaaatacgacttcctgagtacgtcatcccagttcattatgatctcttgatccatgcaaaccttaccacgctgaccttctggggaaccacgaaagtagaaatcacagccagtcagcccaccagcaccatcatcctgcatagtcaccacctgcagatatctagggccaccctcaggaagggagctggagagaggctatcggaagaacccctgcaggtcctggaacacccccctcaggagcaaattgcactgctggctcccgagcccctccttgtcgggctcccgtacacagttgtcattcactatgctggcaatctttcggagactttccacggattttacaaaagcacctacagaaccaaggaaggggaactgaggatactagcatcaacacaatttgaacccactgcagctagaatggcctttccctgctttgatgaacctgccttcaaagcaagtttctcaatcaaaattagaagagagccaaggcacctagccatctccaatatgccattggtgaaatctgtgactgttgctgaaggactcatagaagaccattttgatgtcactgtgaagatgagcacctatctggtggccttcatcatttcagattttgagtctgtcagcaagataaccaagagtggagtcaaggtttctgtttatgctgtgccagacaagataaatcaagcagattatgcactggatgctgcggtgactcttctagaattttatgaggattatttcagcataccgtatcccctacccaaacaagatcttgctgctattcccgactttcagtctggtgctatggaaaactggggactgacaacatatagagaatctgctctgttgtttgatgcagaaaagtcttctgcatcaagtaagcttggcatcacaatgactgtggcccatgaactggcccaccagtggtttgggaacctggtcactatggaatggtggaatgatctttggctaaatgaaggatttgccaaatttatggagtttgtgtctgtcagtgtgacccatcctgaactgaaagttggagattatttctttggcaaatgttttgacgcaatggaggtagatgctttaaattcctcacaccctgtgtctacacctgtggaaaatcctgctcagatccgggagatgtttgatgatgtttcttatgataagggagcttgtattctgaatatgctaagggagtatcttagcgctgacgcatttaaaagtggtattgtacagtatctccagaagcatagctataaaaatacaaaaaacgaggacctgtgggatagtatggcaagtatttgccctacagatggtgtaaaagggatggatggcttttgctctagaagtcaacattcatcttcatcctcacattggcatcaggaaggggtggatgtgaaaaccatgatgaacacttggacactgcagaggggttttcccctaataaccatcacagtgagggggaggaatgtacacatgaagcaagagcactacatgaagggctctgacggcgccccggacactgggtacctgtggcatgttccattgacattcatcaccagcaaatccgacatggtccatcgatttttgctaaaaacaaaaacagatgtgctcatcctcccagaagaggtggaatggatcaaatttaatgtgggcatgaatggctattacattgtgcattacgaggatgatggatgggactctttgactggccttttaaaaggaacacacacagcagtcagcagtaatgatcgggcaagtctcattaacaatgcatttcagctcgtcagcattgggaagctgtccattgaaaaggccttggatttatccctgtacttgaaacatgaaactgaaattatgcccgtgtttcaaggtttgaatgagctgattcctatgtataagttaatggagaaaagagatatgaatgaagtggaaactcaattcaaggccttcctcatcaggctgctaagggacctcattgataagcagacatggacagacgagggctcagtctcagagcgaatgctgcggagtgaactactactcctcgcctgtgtgcacaactatcagccgtgcgtacagagggcagaaggctatttcagaaagtggaaggaatccaatggaaacttgagcctgcctgtcgacgtgaccttggcagtgtttgctgtgggggcccagagcacagaaggctgggattttctttatagtaaatatcagttttctttgtccagtactgagaaaagccaaattgaatttgccctctgcagaacccaaaataaggaaaagcttcaatggctactagatgaaagctttaagggagataaaataaaaactcaggagtttccacaaattcttacactcattggcaggaacccagtaggatacccactggcctggcaatttctgaggaaaaactggaacaaacttgtacaaaagtttgaacttggctcatcttccatagcccacatggtaatgggtacaacaaatcaattctccacaagaacacggcttgaagaggtaaaaggattcttcagctctttgaaagaaaatggttctcagctccgttgtgtccaacagacaattgaaaccattgaagaaaacatcggttggatggataagaattttgataaaatcagagtgtggctgcaaagtgaaaagcttgaacgtatgtaaaaattcctcccttgccaggttcctgttatctctaatcaccaacattttgttgagtgtattttcaaactagagatggctgttttggctccaactggagatacttttttcccttcaactcattttttgactatccctgtgaaaagaatagctgttagtttttcatgaatgggctatcgctaccatgtgttttgttcatcacaggtgttgccctgcaacgtaaacccaagtgttgggttccctgccacagaagaataaagtaccttattcttctcattttatagtttatgcttaagcacccgtgtccaaaaccctgtaccccatgtttatcattcataaactgtttcatcagtctcctcgaaagactctgaatagtcgactactgaacaatgaacacctggatctgagactaagccggacgatgactgggttaaagctctcccggctcacccctccagacccgctgcccatccctcttccttgctccatgcccaggggctgacttgtaaaggccaagtcatcaagctttcttgccctttggatgttggtcagtggggagccggagagctggagctggggtcggaggaggtagtaggtggaggtgttcttccctgattcccttgcgggatgcctcgggctggcctcccctgagggtcttagctccgagaggggaccctcttttccacacagccttctccacctctggattttggtaactgctccctcctcatcccttcaggattagtggcctcagtgggagtctggcttttactagtcctggcggacttgtggtttctacataatgtgctcgcacttttgcaaaaaatctttttatagaaccctcctcagataattctgagtgtcatctatttccctgactggtacagtatctcttctgaaaaagcagagtgcattcaagtctgtaggaaaacccttttcttagggaggtgattttttttctctctctgcttcttatttggcctactttacaatttctaactaactagttattggcatttactgacagtaaattattgcagtcaccaataaatgatagtacattgtgaaacaaaatatttgctcatattagcaaataggacattctttggctttgaagtctttcttttgtgaagacttcacacacggttgcttcagcacacagttgctgctcaggttttatgtatagatgataataatagaaagcacagtttactaacatggtaaaccaacggagttcaagtcaagtcagttaataccctaagaattagattttatttcttattctgaaaacttgctacacagggacttatctaacccatagtgtgctctgttgctgacttgattcaagttgcagcgtgttttgcgctgactctaaggtgcggaaatcctcacacctggcaaaggagaattcaaactgaacttttgaatggtttaataaaaatagaaatcactggtaatttccaccccaaactaaactatttcccttcttttaaaaaaatacacaaccaagattttaatgtaaaatattttgctttaattgtattttatgccttgattaatgaaacatggaaatattgattttcagttttggtcacctgaggaacctatctttgtttgcttttggaaaagcccattttctaaacagatacaatattgccacaacaatgtgcagaaacctttttgataataaaaaattgttctttgcctctaa

SEQ ID NO: 25 - DNA, 3739 bp, Homo sapiens
gggcgggcggccgggcgccgaagacccggcgcgggcggcggcggctgctgctgccggggaccacgcgccgcgagcctcttccgccccagagatcagcgctcgcgccccctccctcaccccggcctctcccttctcccccatcccaccccgcccccaccccggccctctcccgcgcgcgccccgccacccgcgcgcactcgctcacgctgcccctcgcgcacacacatggtcggctcgcggcaaagtttcgcctgcgatcaccactccgggatcctgccgcagtgcttggggctgtaaccttgaactttcccagcgcggtgacacattctccccgctctccctcccgcccgcccgctcgccctcctgcgccctcccgcgcccccctccccgccttttttgaaaaagcattttaccaccaaccaccaccccaatccaacccacaccgaaccttcgcgcaccccctacaccccaacaacaacaacaactgcaaaatagaaaacaaatccccaaacccaggcgaaaagcagccaacaccggcggcggcggcggcctcggcaagcacggccagcgcgctcggactgcaagagggttaaaagtgtagattggatttcacccctggaaatctagcacgccgagtgaacttgaatctttggctatttaaggaggactgggtttgttgtgaagttgcggtgatccagcgcagagccccgtcctgattgatcgcatcgcggggctcagatgactgtaaaatgaatagatgaaattcttgcttctcgaagattttcttgggcatctcccggaaagtgcgttttaaggcgaagtcatgatgtattctcccatctgtctcactcaggatgaatttcacccattcatcgaggcacttcttccacatgtccgtgcaattgcctatacttggttcaacctgcaggctcgaaaacgcaagtactttaaaaagcatgagaagcgaatgtcaaaggatgaagaaagagcagtcaaagatgagcttctcagtgaaaagcctgaaatcaaacagaagtgggcatccaggctccttgccaaactgcgcaaagatattcgccaggagtatcgagaggactttgtgctcaccgtgactggcaagaagcacccgtgctgtgtcttatccaatcccgaccagaagggtaagattaggagaatcgactgcctgcgacaggcagacaaagtctggcgtctggatctagtcatggtgatcctgttcaaaggcatccccttggaaagtaccgatggagagcggctcatgaaatccccacattgcacaaacccagcactttgtgtccagccacatcatatcacagtatcagttaaggagcttgatttgtttttggcatactacgtgcaggagcaagattctggacaatcaggaagtccaagccacaatgatcctgccaagaatcctccaggttaccttgaggatagttttgtaaaatctggagtcttcaatgtatcagaacttgtaagagtatccagaacgcccataacccagggaactggagtcaacttcccaattggagaaatcccaagccaaccatactatcatgacatgaactcgggggtcaatcttcagaggtctctgtcttctccaccaagcagcaaaagacccaaaactatatccatagatgaaaatatggaaccaagtcctacaggagacttttacccctctccaagttcaccagctgctggaagtcgaacatggcacgaaagagatcaagatatgtcttctccgactactatgaagaagcctgaaaagccattgttcagctctgcatctccacaggattcttccccaagactgagcactttcccccagcaccaccatcccggaatacctggagttgcacacagtgtcatctcaactcgaactccacctccaccttcaccgttgccatttccaacacaagctatccttcctccagccccatcgagctacttttctcatccaacaatcagatatcctccccacctgaatcctcaggatactctgaagaactatgtaccttcttatgacccatccagtccacaaaccagccagtcctggtacctgggctagcttggttcctttccaagtgtcaaataggacacccatcttaccggccaatgtccaaaattacggtttgaacataattggagaacctttccttcaagcagaaacaagcaactgagggaaaaagaaacacaacaatagtttaagaaattttttttttaaataaaaaaaaaggaaaagaggaagactggacaaaacaacacaaaggcagaaaggaaagaaactgaagaaagaagataatagaccagcaattgcagcacttacaatcactaattcccttaaggttgaaactgtaatgacataaaaagggtcgatgatatttcactgatggtagatcgcagcccctgcaacgtagcctttgttacatgaagtccgctgggaaatagatgttctgtctctatgacaatatattttaactgactttctagatgccttaatatttgcatgataagctagttttattggtttagtattcttgttgtttacgcatggaatcactattcctggttatctcaccaacgaaggctaggaggcggcgtcagaggtgctgggtgacagagccatgagccagccattttataagcactctgatttctaaaagttaaaaaaaatatatgaaatctctgtagcctttagttatcagtacagatttattaaatttcggcccttaacccagccttttccagtgtgtaacccagtttgaaatcttaaaaaaagaaaaaatgaaaaaaaaaggaaaaaaagaaaaaaggaaaaaaacagtttgaacacaaaggctctatggaagaaatgcctctatgtaggtgaagtgttctctctgcatgcaacagtaaaaattaatataatattttccccacaaaagaaacacttaacagaggcaagtgcaatttataaatttatatctaaaggggaatcatgattataagtccttcagcccttggactctaaattgaggggattaaaaagaatttaaaataattttgaacgaatttattttcccctcagtttttgagggcattaaaaaggcattaaatcaagacaaatcatgtgcttgagaaaaataaaattaatgaaaacacagcacttatgttggtttagctgcagcctccttggaggtagaatttatttatttaaaattactggttgcatcaagaacccatagggtgtacaaaaggttctataaaatctgcattatagagacaaagaggcaggcaaatccatgtcacaagggtaaagcttacagtttacaaactgggaacgccagggtgtaggatataaaaacgcactcttgagaaaacaaatgtaatcagggtgctgaaaacttgcatggtgctttcagacattagccttgttcaacaaatttcttgtattgacagatccatagtgtgcatgggcagacacattttgcctctatgtctcttaaaattttaattaaaaatactctttccagtaatcctaatttgcacgaagatataatgtccacattacgtgccttgccttgaaatctaaaaaacaaaaaacaaaaaaaaaaaaacaaaaaaatacaacaaagtgacatcactacacttgttttgctgcatttattatcattttaaatctttaccatttttatgacaaaatattttgtactccagacgaagaaaaatgtgtgacatcatg

SEQ ID NO: 26 - DNA, 4050 bp, Homo sapiens
gggcgggcggccgggcgccgaagacccggcgcgggcggcggcggctgctgctgccggggaccacgcgccgcgagcctcttccgccccagagatcagcgctcgcgccccctccctcaccccggcctctcccttctcccccatcccaccccgcccccaccccggccctctcccgcgcgcgccccgccacccgcgcgcactcgctcacgctgcccctcgcgcacacacatggtcggctcgcggcaaagtttcgcctgcgatcaccactccgggatcctgccgcagtgcttggggctgtaaccttgaactttcccagcgcggtgacacattctccccgctctccctcccgcccgcccgctcgccctcctgcgccctcccgcgcccccctccccgccttttttgaaaaagcattttaccaccaaccaccaccccaatccaacccacaccgaaccttcgcgcaccccctacaccccaacaacaacaacaactgcaaaatagaaaacaaatccccaaacccaggcgaaaagcagccaacaccggcggcggcggcggcctcggcaagcacggccagcgcgctcggactgcaagagggttaaaagtgtagattggatttcacccctggaaatctagcacgccgagtgaacttgaatctttggctatttaaggaggactgggtttgttgtgaagttgcggtgatccagcgcagagccccgtcctgattgatcgcatcgcggggctcagatgactgtaaaatgaatagatgaaattcttgcttctcgaagattttcttgggcatctcccggaaagtgcgttttaaggcgaagtcatgatgtattctcccatctgtctcactcaggatgaatttcacccattcatcgaggcacttcttccacatgtccgtgcaattgcctatacttggttcaacctgcaggctcgaaaacgcaagtactttaaaaagcatgagaagcgaatgtcaaaggatgaagaaagagcagtcaaagatgagcttctcagtgaaaagcctgaaatcaaacagaagtgggcatccaggctccttgccaaactgcgcaaagatattcgccaggagtatcgagaggactttgtgctcaccgtgactggcaagaagcacccgtgctgtgtcttatccaatcccgaccagaagggtaagattaggagaatcgactgcctgcgacaggcagacaaagtctggcgtctggatctagtcatggtgatcctgttcaaaggcatccccttggaaagtaccgatggagagcggctcatgaaatccccacattgcacaaacccagcactttgtgtccagccacatcatatcacagtatcagttaaggagcttgatttgtttttggcatactacgtgcaggagcaagattctggacaatcaggaagtccaagccacaatgatcctgccaagaatcctccaggttaccttgaggatagttttgtaaaatctggagtcttcaatgtatcagaacttgtaagagtatccagaacgcccataacccagggaactggagtcaacttcccaattggagaaatcccaagccaaccatactatcatgacatgaactcgggggtcaatcttcagaggtctctgtcttctccaccaagcagcaaaagacccaaaactatatccatagatgaaaatatggaaccaagtcctacaggagacttttacccctctccaagttcaccagctgctggaagtcgaacatggcacgaaagagatcaagatatgtcttctccgactactatgaagaagcctgaaaagccattgttcagctctgcatctccacaggattcttccccaagactgagcactttcccccagcaccaccatcccggaatacctggagttgcacacagtgtcatctcaactcgaactccacctccaccttcaccgttgccatttccaacacaagctatccttcctccagccccatcgagctacttttctcatccaacaatcagatatcctccccacctgaatcctcaggatactctgaagaactatgtaccttcttatgacccatccagtccacaaaccagccagcctaacggcagtggtcaagtagtagggaaagtgcctggccatttcactcctgtcttggcaccctctccccatcccagtgcagtgcgacctgtgaccctgagcatgacagatactaaacccatcactacatccactgaagcctacacagcctcaggcacatctcaagccaatcgatatgtgggactaagcccaagagacccatccttcctacatcagcaacagctgaggatttgtgactggaccatgaatcaaaacggcaggcatttataccccagtaccagtgaggatacattgggaattacttggcaaagtcctggtacctgggctagcttggttcctttccaagtgtcaaataggacacccatcttaccggccaatgtccaaaattacggtttgaacataattggagaacctttccttcaagcagaaacaagcaactgagggaaaaagaaacacaacaatagtttaagaaattttttttttaaataaaaaaaaaggaaaagaggaagactggacaaaacaacacaaaggcagaaaggaaagaaactgaagaaagaagataatagaccagcaattgcagcacttacaatcactaattcccttaaggttgaaactgtaatgacataaaaagggtcgatgatatttcactgatggtagatcgcagcccctgcaacgtagcctttgttacatgaagtccgctgggaaatagatgttctgtctctatgacaatatattttaactgactttctagatgccttaatatttgcatgataagctagttttattggtttagtattcttgttgtttacgcatggaatcactattcctggttatctcaccaacgaaggctaggaggcggcgtcagaggtgctgggtgacagagccatgagccagccattttataagcactctgatttctaaaagttaaaaaaaatatatgaaatctctgtagcctttagttatcagtacagatttattaaatttcggcccttaacccagccttttccagtgtgtaacccagtttgaaatcttaaaaaaagaaaaaatgaaaaaaaaaggaaaaaaagaaaaaaggaaaaaaacagtttgaacacaaaggctctatggaagaaatgcctctatgtaggtgaagtgttctctctgcatgcaacagtaaaaattaatataatattttccccacaaaagaaacacttaacagaggcaagtgcaatttataaatttatatctaaaggggaatcatgattataagtccttcagcccttggactctaaattgaggggattaaaaagaatttaaaataattttgaacgaatttattttcccctcagtttttgagggcattaaaaaggcattaaatcaagacaaatcatgtgcttgagaaaaataaaattaatgaaaacacagcacttatgttggtttagctgcagcctccttggaggtagaatttatttatttaaaattactggttgcatcaagaacccatagggtgtacaaaaggttctataaaatctgcattatagagacaaagaggcaggcaaatccatgtcacaagggtaaagcttacagtttacaaactgggaacgccagggtgtaggatataaaaacgcactcttgagaaaacaaatgtaatcagggtgctgaaaacttgcatggtgctttcagacattagccttgttcaacaaatttcttgtattgacagatccatagtgtgcatgggcagacacattttgcctctatgtctcttaaaattttaattaaaaatactctttccagtaatcctaatttgcacgaagatataatgtccacattacgtgccttgccttgaaatctaaaaaacaaaaaacaaaaaaaaaaaaacaaaaaaatacaacaaagtgacatcactacacttgttttgctgcatttattatcattttaaatctttaccatttttatgacaaaatattttgtactccagacgaagaaaaatgtgtgacatcatg

SEQ ID NO: 27 - DNA, 4077 bp, Homo sapiens
gggcgggcggccgggcgccgaagacccggcgcgggcggcggcggctgctgctgccggggaccacgcgccgcgagcctcttccgccccagagatcagcgctcgcgccccctccctcaccccggcctctcccttctcccccatcccaccccgcccccaccccggccctctcccgcgcgcgccccgccacccgcgcgcactcgctcacgctgcccctcgcgcacacacatggtcggctcgcggcaaagtttcgcctgcgatcaccactccgggatcctgccgcagtgcttggggctgtaaccttgaactttcccagcgcggtgacacattctccccgctctccctcccgcccgcccgctcgccctcctgcgccctcccgcgcccccctccccgccttttttgaaaaagcattttaccaccaaccaccaccccaatccaacccacaccgaaccttcgcgcaccccctacaccccaacaacaacaacaactgcaaaatagaaaacaaatccccaaacccaggcgaaaagcagccaacaccggcggcggcggcggcctcggcaagcacggccagcgcgctcggactgcaagagggttaaaagtgtagattggatttcacccctggaaatctagcacgccgagtgaacttgaatctttggctatttaaggaggactgggtttgttgtgaagttgcggtgatccagcgcagagccccgtcctgattgatcgcatcgcggggctcagatgactgtaaaatgaatagatgaaattcttgcttctcgaagattttcttgggcatctcccggaaagtgcgttttaaggcgaagtcatgatgtattctcccatctgtctcactcaggatgaatttcacccattcatcgaggcacttcttccacatgtccgtgcaattgcctatacttggttcaacctgcaggctcgaaaacgcaagtactttaaaaagcatgagaagcgaatgtcaaaggatgaagaaagagcagtcaaagatgagcttctcagtgaaaagcctgaaatcaaacagaagtgggcatccaggctccttgccaaactgcgcaaagatattcgccaggagtatcgagaggactttgtgctcaccgtgactggcaagaagcacccgtgctgtgtcttatccaatcccgaccagaagggtaagattaggagaatcgactgcctgcgacaggcagacaaagtctggcgtctggatctagtcatggtgatcctgttcaaaggcatccccttggaaagtaccgatggagagcggctcatgaaatccccacattgcacaaacccagcactttgtgtccagccacatcatatcacagtatcagttaaggagcttgatttgtttttggcatactacgtgcaggagcaagattctggacaatcaggaagtccaagccacaatgatcctgccaagaatcctccaggttaccttgaggatagttttgtaaaatctggagtcttcaatgtatcagaacttgtaagagtatccagaacgcccataacccagggaactggagtcaacttcccaattggagaaatcccaagccaaccatactatcatgacatgaactcgggggtcaatcttcagaggtctctgtcttctccaccaagcagcaaaagacccaaaactatatccatagatgaaaatatggaaccaagtcctacaggagacttttacccctctccaagttcaccagctgctggaagtcgaacatggcacgaaagagatcaagatatgtcttctccgactactatgaagaagcctgaaaagccattgttcagctctgcatctccacaggattcttccccaagactgagcactttcccccagcaccaccatcccggaatacctggagttgcacacagtgtcatctcaactcgaactccacctccaccttcaccgttgccatttccaacacaagctatccttcctccagccccatcgagctacttttctcatccaacaatcagatatcctccccacctgaatcctcaggatactctgaagaactatgtaccttcttatgacccatccagtccacaaaccagccagcctaacggcagtggtcaagtagtagggaaagtgcctggccatttcactcctgtcttggcaccctctccccatcccagtgcagtgcgacctgtgaccctgagcatgacagatactaaacccatcactacatccactgaaggtgaggcagcttcacctacagcaaccacctacacagcctcaggcacatctcaagccaatcgatatgtgggactaagcccaagagacccatccttcctacatcagcaacagctgaggatttgtgactggaccatgaatcaaaacggcaggcatttataccccagtaccagtgaggatacattgggaattacttggcaaagtcctggtacctgggctagcttggttcctttccaagtgtcaaataggacacccatcttaccggccaatgtccaaaattacggtttgaacataattggagaacctttccttcaagcagaaacaagcaactgagggaaaaagaaacacaacaatagtttaagaaattttttttttaaataaaaaaaaaggaaaagaggaagactggacaaaacaacacaaaggcagaaaggaaagaaactgaagaaagaagataatagaccagcaattgcagcacttacaatcactaattcccttaaggttgaaactgtaatgacataaaaagggtcgatgatatttcactgatggtagatcgcagcccctgcaacgtagcctttgttacatgaagtccgctgggaaatagatgttctgtctctatgacaatatattttaactgactttctagatgccttaatatttgcatgataagctagttttattggtttagtattcttgttgtttacgcatggaatcactattcctggttatctcaccaacgaaggctaggaggcggcgtcagaggtgctgggtgacagagccatgagccagccattttataagcactctgatttctaaaagttaaaaaaaatatatgaaatctctgtagcctttagttatcagtacagatttattaaatttcggcccttaacccagccttttccagtgtgtaacccagtttgaaatcttaaaaaaagaaaaaatgaaaaaaaaaggaaaaaaagaaaaaaggaaaaaaacagtttgaacacaaaggctctatggaagaaatgcctctatgtaggtgaagtgttctctctgcatgcaacagtaaaaattaatataatattttccccacaaaagaaacacttaacagaggcaagtgcaatttataaatttatatctaaaggggaatcatgattataagtccttcagcccttggactctaaattgaggggattaaaaagaatttaaaataattttgaacgaatttattttcccctcagtttttgagggcattaaaaaggcattaaatcaagacaaatcatgtgcttgagaaaaataaaattaatgaaaacacagcacttatgttggtttagctgcagcctccttggaggtagaatttatttatttaaaattactggttgcatcaagaacccatagggtgtacaaaaggttctataaaatctgcattatagagacaaagaggcaggcaaatccatgtcacaagggtaaagcttacagtttacaaactgggaacgccagggtgtaggatataaaaacgcactcttgagaaaacaaatgtaatcagggtgctgaaaacttgcatggtgctttcagacattagccttgttcaacaaatttcttgtattgacagatccatagtgtgcatgggcagacacattttgcctctatgtctcttaaaattttaattaaaaatactctttccagtaatcctaatttgcacgaagatataatgtccacattacgtgccttgccttgaaatctaaaaaacaaaaaacaaaaaaaaaaaaacaaaaaaatacaacaaagtgacatcactacacttgttttgctgcatttattatcattttaaatctttaccatttttatgacaaaatattttgtactccagacgaagaaaaatgtgtgacatcatg

SEQ ID NO: 28 - DNA, 2694 bp, Homo sapiens
tcagacggtttcggtgcttctcccactcggatgttcccgcggcttaaaagagtccgcagcgagcaccgaaatacctcttccaggttaccttgaggatagttttgtaaaatctggagtcttcaatgtatcagaacttgtaagagtatccagaacgcccataacccagggaactggagtcaacttcccaattggagaaatcccaagccaaccatactatcatgacatgaactcgggggtcaatcttcagaggtctctgtcttctccaccaagcagcaaaagacccaaaactatatccatagatgaaaatatggaaccaagtcctacaggagacttttacccctctccaagttcaccagctgctggaagtcgaacatggcacgaaagagatcaagatatgtcttctccgactactatgaagaagcctgaaaagccattgttcagctctgcatctccacaggattcttccccaagactgagcactttcccccagcaccaccatcccggaatacctggagttgcacacagtgtcatctcaactcgaactccacctccaccttcaccgttgccatttccaacacaagctatccttcctccagccccatcgagctacttttctcatccaacaatcagatatcctccccacctgaatcctcaggatactctgaagaactatgtaccttcttatgacccatccagtccacaaaccagccagcctaacggcagtggtcaagtagtagggaaagtgcctggccatttcactcctgtcttggcaccctctccccatcccagtgcagtgcgacctgtgaccctgagcatgacagatactaaacccatcactacatccactgaagcctacacagcctcaggcacatctcaagccaatcgatatgtgggactaagcccaagagacccatccttcctacatcagcaacagctgaggatttgtgactggaccatgaatcaaaacggcaggcatttataccccagtaccagtgaggatacattgggaattacttggcaaagtcctggtacctgggctagcttggttcctttccaagtgtcaaataggacacccatcttaccggccaatgtccaaaattacggtttgaacataattggagaacctttccttcaagcagaaacaagcaactgagggaaaaagaaacacaacaatagtttaagaaattttttttttaaataaaaaaaaaggaaaagaggaagactggacaaaacaacacaaaggcagaaaggaaagaaactgaagaaagaagataatagaccagcaattgcagcacttacaatcactaattcccttaaggttgaaactgtaatgacataaaaagggtcgatgatatttcactgatggtagatcgcagcccctgcaacgtagcctttgttacatgaagtccgctgggaaatagatgttctgtctctatgacaatatattttaactgactttctagatgccttaatatttgcatgataagctagttttattggtttagtattcttgttgtttacgcatggaatcactattcctggttatctcaccaacgaaggctaggaggcggcgtcagaggtgctgggtgacagagccatgagccagccattttataagcactctgatttctaaaagttaaaaaaaatatatgaaatctctgtagcctttagttatcagtacagatttattaaatttcggcccttaacccagccttttccagtgtgtaacccagtttgaaatcttaaaaaaagaaaaaatgaaaaaaaaaggaaaaaaagaaaaaaggaaaaaaacagtttgaacacaaaggctctatggaagaaatgcctctatgtaggtgaagtgttctctctgcatgcaacagtaaaaattaatataatattttccccacaaaagaaacacttaacagaggcaagtgcaatttataaatttatatctaaaggggaatcatgattataagtccttcagcccttggactctaaattgaggggattaaaaagaatttaaaataattttgaacgaatttattttcccctcagtttttgagggcattaaaaaggcattaaatcaagacaaatcatgtgcttgagaaaaataaaattaatgaaaacacagcacttatgttggtttagctgcagcctccttggaggtagaatttatttatttaaaattactggttgcatcaagaacccatagggtgtacaaaaggttctataaaatctgcattatagagacaaagaggcaggcaaatccatgtcacaagggtaaagcttacagtttacaaactgggaacgccagggtgtaggatataaaaacgcactcttgagaaaacaaatgtaatcagggtgctgaaaacttgcatggtgctttcagacattagccttgttcaacaaatttcttgtattgacagatccatagtgtgcatgggcagacacattttgcctctatgtctcttaaaattttaattaaaaatactctttccagtaatcctaatttgcacgaagatataatgtccacattacgtgccttgccttgaaatctaaaaaacaaaaaacaaaaaaaaaaaaacaaaaaaatacaacaaagtgacatcactacacttgttttgctgcatttattatcattttaaatctttaccatttttatgacaaaatattttgtactccagacgaagaaaaatgtgtgacatcatg

SEQ ID NO: 29 - DNA, 2284 bp, Homo sapiens
gggcgggcggccgggcgccgaagacccggcgcgggcggcggcggctgctgctgccggggaccacgcgccgcgagcctcttccgccccagagatcagcgctcgcgccccctccctcaccccggcctctcccttctcccccatcccaccccgcccccaccccggccctctcccgcgcgcgccccgccacccgcgcgcactcgctcacgctgcccctcgcgcacacacatggtcggctcgcggcaaagtttcgcctgcgatcaccactccgggatcctgccgcagtgcttggggctgtaaccttgaactttcccagcgcggtgacacattctccccgctctccctcccgcccgcccgctcgccctcctgcgccctcccgcgcccccctccccgccttttttgaaaaagcattttaccaccaaccaccaccccaatccaacccacaccgaaccttcgcgcaccccctacaccccaacaacaacaacaactgcaaaatagaaaacaaatccccaaacccaggcgaaaagcagccaacaccggcggcggcggcggcctcggcaagcacggccagcgcgctcggactgcaagagggttaaaagtgtagattggatttcacccctggaaatctagcacgccgagtgaacttgaatctttggctatttaaggaggactgggtttgttgtgaagttgcggtgatccagcgcagagccccgtcctgattgatcgcatcgcggggctcagatgactgtaaaatgaatagatgaaattcttgcttctcgaagattttcttgggcatctcccggaaagtgcgttttaaggcgaagtcatgatgtattctcccatctgtctcactcaggatgaatttcacccattcatcgaggcacttcttccacatgtccgtgcaattgcctatacttggttcaacctgcaggctcgaaaacgcaagtactttaaaaagcatgagaagcgaatgtcaaaggatgaagaaagagcagtcaaagatgagcttctcagtgaaaagcctgaaatcaaacagaagtgggcatccaggctccttgccaaactgcgcaaagatattcgccaggagtatcgagaggactttgtgctcaccgtgactggcaagaagcacccgtgctgtgtcttatccaatcccgaccagaagggtaagattaggagaatcgactgcctgcgacaggcagacaaagtctggcgtctggatctagtcatggtgatcctgttcaaaggcatccccttggaaagtaccgatggagagcggctcatgaaatccccacattgcacaaacccagcactttgtgtccagccacatcatatcacagtatcagttaaggagcttgatttgtttttggcatactacgtgcaggagcaagattctggacaatcaggaagtccaagccacaatgatcctgccaagaatcctccaggttaccttgaggatagttttgtaaaatctggagtcttcaatgtatcagaacttgtaagagtatccagaacgcccataacccagggaactggagtcaacttcccaattggagaaatcccaagccaaccatactatcatgacatgaactcgggggtcaatcttcagaggtctctgtcttctccaccaagcagcaaaagacccaaaactatatccatagatgaaaatatggaaccaagtcctacaggagacttttacccctctccaagttcaccagctgctggaagtcgaacatggcacgaaagagatcaagatatgtcttctccgactactatgaagaagcctgaaaagccattgttcagctctgcatctccacaggattcttccccaagactgagcactttcccccagcaccaccatcccggaatacctggagttgcacacagtgtcatctcaactcgaactccacctccaccttcaccgttgccatttccaacacaagctatccttcctccagccccatcgagctacttttctcatccaacaatcagatatcctccccacctgaatcctcaggatactctgaagaactatgtaccttcttatgacccatccagtccacaaaccagccagctgaggatttgtgactggaccatgaatcaaaacggcaggcatttataccccagtaccagtgaggatacattgggaattacttggcaaagtcctggtacctgggctagcttggttcctttccaagtgtcaaataggacacccatcttaccggccaatgtccaaaattacggtttgaacataattggagaacctttccttcaagcagaaacaagcaac

SEQ ID NO: 30 - DNA, 1674 bp, Homo sapiens
cctccccattgaataacagccaagttgctttggtttctatttctttgttaagtcgttccctctacaaaggacttcctagtgggtgtgaaaggcagcggtggccacagaggcggcggagagatggccttcagcggttcccaggctccctacctgagtccagctgtccccttttctgggactattcaaggaggtctccaggacggacttcagatcactgtcaatgggaccgttctcagctccagtggaaccaggtttgctgtgaactttcagactggcttcagtggaaatgacattgccttccacttcaaccctcggtttgaagatggagggtacgtggtgtgcaacacgaggcagaacggaagctgggggcccgaggagaggaagacacacatgcctttccagaaggggatgccctttgacctctgcttcctggtgcagagctcagatttcaaggtgatggtgaacgggatcctcttcgtgcagtacttccaccgcgtgcccttccaccgtgtggacaccatctccgtcaatggctctgtgcagctgtcctacatcagcttccagcctcccggcgtgtggcctgccaacccggctcccattacccagacagtcatccacacagtgcagagcgcccctggacagatgttctctactcccgccatcccacctatgatgtacccccaccccgcctatccgatgcctttcatcaccaccattctgggagggctgtacccatccaagtccatcctcctgtcaggcactgtcctgcccagtgctcagaggttccacatcaacctgtgctctgggaaccacatcgccttccacctgaacccccgttttgatgagaatgctgtggtccgcaacacccagatcgacaactcctgggggtctgaggagcgaagtctgccccgaaaaatgcccttcgtccgtggccagagcttctcagtgtggatcttgtgtgaagctcactgcctcaaggtggccgtggatggtcagcacctgtttgaatactaccatcgcctgaggaacctgcccaccatcaacagactggaagtggggggcgacatccagctgacccatgtgcagacataggcggcttcctggccctggggccgggggctggggtgtggggcagtctgggtcctctcatcatccccacttcccaggcccagcctttccaaccctgcctgggatctgggctttaatgcagaggccatgtccttgtctggtcctgcttctggctacagccaccctggaacggagaaggcagctgacggggattgccttcctcagccgcagcagcacctggggctccagctgctggaatcctaccatcccaggaggcaggcacagccagggagaggggaggagtgggcagtgaagatgaagccccatgctcagtcccctcccatcccccacgcagctccaccccagtcccaagccaccagctgtctgctcctggtgggaggtggcctcctcagcccctcctctctgacctttaacctcactctcaccttgcaccgtgcaccaacccttcacccctcctggaaagcaggcctgatggcttcccactggcctccaccacctgaccagagtgttctcttcagaggactggctcctttcccagtgtccttaaaataaagaaatgaaaatgcttgttggcacattcatgtg

SEQ ID NO: 31 - DNA, 1770 bp, Homo sapiens
cctccccattgaataacagccaagttgctttggtttctatttctttgttaagtcgttccctctacaaaggacttcctagtgggtgtgaaaggcagcggtggccacagaggcggcggagagatggccttcagcggttcccaggctccctacctgagtccagctgtccccttttctgggactattcaaggaggtctccaggacggacttcagatcactgtcaatgggaccgttctcagctccagtggaaccaggtttgctgtgaactttcagactggcttcagtggaaatgacattgccttccacttcaaccctcggtttgaagatggagggtacgtggtgtgcaacacgaggcagaacggaagctgggggcccgaggagaggaagacacacatgcctttccagaaggggatgccctttgacctctgcttcctggtgcagagctcagatttcaaggtgatggtgaacgggatcctcttcgtgcagtacttccaccgcgtgcccttccaccgtgtggacaccatctccgtcaatggctctgtgcagctgtcctacatcagcttccagaacccccgcacagtccctgttcagcctgccttctccacggtgccgttctcccagcctgtctgtttcccacccaggcccagggggcgcagacaaaaacctcccggcgtgtggcctgccaacccggctcccattacccagacagtcatccacacagtgcagagcgcccctggacagatgttctctactcccgccatcccacctatgatgtacccccaccccgcctatccgatgcctttcatcaccaccattctgggagggctgtacccatccaagtccatcctcctgtcaggcactgtcctgcccagtgctcagaggttccacatcaacctgtgctctgggaaccacatcgccttccacctgaacccccgttttgatgagaatgctgtggtccgcaacacccagatcgacaactcctgggggtctgaggagcgaagtctgccccgaaaaatgcccttcgtccgtggccagagcttctcagtgtggatcttgtgtgaagctcactgcctcaaggtggccgtggatggtcagcacctgtttgaatactaccatcgcctgaggaacctgcccaccatcaacagactggaagtggggggcgacatccagctgacccatgtgcagacataggcggcttcctggccctggggccgggggctggggtgtggggcagtctgggtcctctcatcatccccacttcccaggcccagcctttccaaccctgcctgggatctgggctttaatgcagaggccatgtccttgtctggtcctgcttctggctacagccaccctggaacggagaaggcagctgacggggattgccttcctcagccgcagcagcacctggggctccagctgctggaatcctaccatcccaggaggcaggcacagccagggagaggggaggagtgggcagtgaagatgaagccccatgctcagtcccctcccatcccccacgcagctccaccccagtcccaagccaccagctgtctgctcctggtgggaggtggcctcctcagcccctcctctctgacctttaacctcactctcaccttgcaccgtgcaccaacccttcacccctcctggaaagcaggcctgatggcttcccactggcctccaccacctgaccagagtgttctcttcagaggactggctcctttcccagtgtccttaaaataaagaaatgaaaatgcttgttggcacattcatgtg

SEQ ID NO: 32 - DNA, 1638 bp, Homo sapiens
cctccccattgaataacagccaagttgctttggtttctatttctttgttaagtcgttccctctacaaaggacttcctagtgggtgtgaaaggcagcggtggccacagaggcggcggagagatggccttcagcggttcccaggctccctacctgagtccagctgtccccttttctgggactattcaaggaggtctccaggacggacttcagatcactgtcaatgggaccgttctcagctccagtggaaccaggtttgctgtgaactttcagactggcttcagtggaaatgacattgccttccacttcaaccctcggtttgaagatggagggtacgtggtgtgcaacacgaggcagaacggaagctgggggcccgaggagaggaagacacacatgcctttccagaaggggatgccctttgacctctgcttcctggtgcagagctcagatttcaaggtgatggtgaacgggatcctcttcgtgcagtacttccaccgcgtgcccttccaccgtgtggacaccatctccgtcaatggctctgtgcagctgtcctacatcagcttccagacccagacagtcatccacacagtgcagagcgcccctggacagatgttctctactcccgccatcccacctatgatgtacccccaccccgcctatccgatgcctttcatcaccaccattctgggagggctgtacccatccaagtccatcctcctgtcaggcactgtcctgcccagtgctcagaggttccacatcaacctgtgctctgggaaccacatcgccttccacctgaacccccgttttgatgagaatgctgtggtccgcaacacccagatcgacaactcctgggggtctgaggagcgaagtctgccccgaaaaatgcccttcgtccgtggccagagcttctcagtgtggatcttgtgtgaagctcactgcctcaaggtggccgtggatggtcagcacctgtttgaatactaccatcgcctgaggaacctgcccaccatcaacagactggaagtggggggcgacatccagctgacccatgtgcagacataggcggcttcctggccctggggccgggggctggggtgtggggcagtctgggtcctctcatcatccccacttcccaggcccagcctttccaaccctgcctgggatctgggctttaatgcagaggccatgtccttgtctggtcctgcttctggctacagccaccctggaacggagaaggcagctgacggggattgccttcctcagccgcagcagcacctggggctccagctgctggaatcctaccatcccaggaggcaggcacagccagggagaggggaggagtgggcagtgaagatgaagccccatgctcagtcccctcccatcccccacgcagctccaccccagtcccaagccaccagctgtctgctcctggtgggaggtggcctcctcagcccctcctctctgacctttaacctcactctcaccttgcaccgtgcaccaacccttcacccctcctggaaagcaggcctgatggcttcccactggcctccaccacctgaccagagtgttctcttcagaggactggctcctttcccagtgtccttaaaataaagaaatgaaaatgcttgttggcacattcatgtg

SEQ ID NO: 33 - DNA, 1734 bp, Homo sapiens
cctccccattgaataacagccaagttgctttggtttctatttctttgttaagtcgttccctctacaaaggacttcctagtgggtgtgaaaggcagcggtggccacagaggcggcggagagatggccttcagcggttcccaggctccctacctgagtccagctgtccccttttctgggactattcaaggaggtctccaggacggacttcagatcactgtcaatgggaccgttctcagctccagtggaaccaggtttgctgtgaactttcagactggcttcagtggaaatgacattgccttccacttcaaccctcggtttgaagatggagggtacgtggtgtgcaacacgaggcagaacggaagctgggggcccgaggagaggaagacacacatgcctttccagaaggggatgccctttgacctctgcttcctggtgcagagctcagatttcaaggtgatggtgaacgggatcctcttcgtgcagtacttccaccgcgtgcccttccaccgtgtggacaccatctccgtcaatggctctgtgcagctgtcctacatcagcttccagaacccccgcacagtccctgttcagcctgccttctccacggtgccgttctcccagcctgtctgtttcccacccaggcccagggggcgcagacaaaaaacccagacagtcatccacacagtgcagagcgcccctggacagatgttctctactcccgccatcccacctatgatgtacccccaccccgcctatccgatgcctttcatcaccaccattctgggagggctgtacccatccaagtccatcctcctgtcaggcactgtcctgcccagtgctcagaggttccacatcaacctgtgctctgggaaccacatcgccttccacctgaacccccgttttgatgagaatgctgtggtccgcaacacccagatcgacaactcctgggggtctgaggagcgaagtctgccccgaaaaatgcccttcgtccgtggccagagcttctcagtgtggatcttgtgtgaagctcactgcctcaaggtggccgtggatggtcagcacctgtttgaatactaccatcgcctgaggaacctgcccaccatcaacagactggaagtggggggcgacatccagctgacccatgtgcagacataggcggcttcctggccctggggccgggggctggggtgtggggcagtctgggtcctctcatcatccccacttcccaggcccagcctttccaaccctgcctgggatctgggctttaatgcagaggccatgtccttgtctggtcctgcttctggctacagccaccctggaacggagaaggcagctgacggggattgccttcctcagccgcagcagcacctggggctccagctgctggaatcctaccatcccaggaggcaggcacagccagggagaggggaggagtgggcagtgaagatgaagccccatgctcagtcccctcccatcccccacgcagctccaccccagtcccaagccaccagctgtctgctcctggtgggaggtggcctcctcagcccctcctctctgacctttaacctcactctcaccttgcaccgtgcaccaacccttcacccctcctggaaagcaggcctgatggcttcccactggcctccaccacctgaccagagtgttctcttcagaggactggctcctttcccagtgtccttaaaataaagaaatgaaaatgcttgttggcacattcatgtg

SEQ ID NO: 34 - DNA, 1638 bp, Homo sapiens
cgttctggtctgcagagctcggctctgctttctaaactccagagagaaagaatggggaaaggaggcctgtttcctcctggctgtcaccaatgacacctcagccaccctgtggaggcccctgaggctgtccccttttctgggactattcaaggaggtctccaggacggacttcagatcactgtcaatgggaccgttctcagctccagtggaaccaggtttgctgtgaactttcagactggcttcagtggaaatgacattgccttccacttcaaccctcggtttgaagatggagggtacgtggtgtgcaacacgaggcagaacggaagctgggggcccgaggagaggaagacacacatgcctttccagaaggggatgccctttgacctctgcttcctggtgcagagctcagatttcaaggtgatggtgaacgggatcctcttcgtgcagtacttccaccgcgtgcccttccaccgtgtggacaccatctccgtcaatggctctgtgcagctgtcctacatcagcttccagcctcccggcgtgtggcctgccaacccggctcccattacccagacagtcatccacacagtgcagagcgcccctggacagatgttctctactcccgccatcccacctatgatgtacccccaccccgcctatccgatgcctttcatcaccaccattctgggagggctgtacccatccaagtccatcctcctgtcaggcactgtcctgcccagtgctcagaggttccacatcaacctgtgctctgggaaccacatcgccttccacctgaacccccgttttgatgagaatgctgtggtccgcaacacccagatcgacaactcctgggggtctgaggagcgaagtctgccccgaaaaatgcccttcgtccgtggccagagcttctcagtgtggatcttgtgtgaagctcactgcctcaaggtggccgtggatggtcagcacctgtttgaatactaccatcgcctgaggaacctgcccaccatcaacagactggaagtggggggcgacatccagctgacccatgtgcagacataggcggcttcctggccctggggccgggggctggggtgtggggcagtctgggtcctctcatcatccccacttcccaggcccagcctttccaaccctgcctgggatctgggctttaatgcagaggccatgtccttgtctggtcctgcttctggctacagccaccctggaacggagaaggcagctgacggggattgccttcctcagccgcagcagcacctggggctccagctgctggaatcctaccatcccaggaggcaggcacagccagggagaggggaggagtgggcagtgaagatgaagccccatgctcagtcccctcccatcccccacgcagctccaccccagtcccaagccaccagctgtctgctcctggtgggaggtggcctcctcagcccctcctctctgacctttaacctcactctcaccttgcaccgtgcaccaacccttcacccctcctggaaagcaggcctgatggcttcccactggcctccaccacctgaccagagtgttctcttcagaggactggctcctttcccagtgtccttaaaataaagaaatgaaaatgcttgttggcacattcatgtg

SEQ ID NO: 35 - DNA, 1713 bp, Homo sapiens
cctccccattgaataacagccaagttgctttggtttctatttctttgttaagtcgttccctctacaaaggacttcctagtgggtgtgaaaggcagcggtggccacagaggcggcggagagatggccttcagcggttcccaggctccctacctgagtccagctgtccccttttctgggactattcaaggaggtctccaggacggacttcagatcactgtcaatgggaccgttctcagctccagtggaaccaggtttgctgtgaactttcagactggcttcagtggaaatgacattgccttccacttcaaccctcggtttgaagatggagggtacgtggtgtgcaacacgaggcagaacggaagctgggggcccgaggagaggaagacacacatgcctttccagaaggggatgccctttgacctctgcttcctggtgcagagctcagatttcaaggtgatggtgaacgggatcctcttcgtgcagtacttccaccgcgtgcccttccaccgtgtggacaccatctccgtcaatggctctgtgcagctgtcctacatcagcttccagaacccccgcacagtccctgttcagcctgccttctccacggtgccgttctcccagcctgtctgtttcccacccaggcccagggggcgcagacaaaaacctcccggcgtgtggcctgccaacccggctcccattacccagacagtcatccacacagtgcagagcgcccctggacagatgttctctactcccgccatcccacctatgatgtacccccaccccgcctatccgatgcctttcatcaccaccattctgggagggctgtacccatccaagtccatcctcctgtcaggcactgtcctgcccagtgctcagaggttccacatcaacctgtgctctgggaaccacatcgccttccacctgaacccccgttttgatgagaatgctgtggtccgcaacacccagatcgacaactcctgggggtctgaggagcgaagtctgccccgaaaaatgcccttcgtccgtggccagagcttctcagtgtggatcttgtgtgaagctcactgcctcaaggtggccgtggatggtcagcacctgtttgaatactaccatcgcctgaggaacctgcccaccatcaacagactggaagtggggggcgacatccagctgacccatgtgcagacataggcggcttcctggccctggggccgggggctggggtgtggggcagtctgggtcctctcatcatccccacttcccaggcccagcctttccaaccctgacagccaccctggaacggagaaggcagctgacggggattgccttcctcagccgcagcagcacctggggctccagctgctggaatcctaccatcccaggaggcaggcacagccagggagaggggaggagtgggcagtgaagatgaagccccatgctcagtcccctcccatcccccacgcagctccaccccagtcccaagccaccagctgtctgctcctggtgggaggtggcctcctcagcccctcctctctgacctttaacctcactctcaccttgcaccgtgcaccaacccttcacccctcctggaaagcaggcctgatggcttcccactggcctccaccacctgaccagagtgttctcttcagaggactggctcctttcccagtgtccttaaaataaagaaatgaaaatgcttgttggcacattcatgtg

SEQ ID NO: 36 - DNA, 1617 bp, Homo sapiens
cctccccattgaataacagccaagttgctttggtttctatttctttgttaagtcgttccctctacaaaggacttcctagtgggtgtgaaaggcagcggtggccacagaggcggcggagagatggccttcagcggttcccaggctccctacctgagtccagctgtccccttttctgggactattcaaggaggtctccaggacggacttcagatcactgtcaatgggaccgttctcagctccagtggaaccaggtttgctgtgaactttcagactggcttcagtggaaatgacattgccttccacttcaaccctcggtttgaagatggagggtacgtggtgtgcaacacgaggcagaacggaagctgggggcccgaggagaggaagacacacatgcctttccagaaggggatgccctttgacctctgcttcctggtgcagagctcagatttcaaggtgatggtgaacgggatcctcttcgtgcagtacttccaccgcgtgcccttccaccgtgtggacaccatctccgtcaatggctctgtgcagctgtcctacatcagcttccagcctcccggcgtgtggcctgccaacccggctcccattacccagacagtcatccacacagtgcagagcgcccctggacagatgttctctactcccgccatcccacctatgatgtacccccaccccgcctatccgatgcctttcatcaccaccattctgggagggctgtacccatccaagtccatcctcctgtcaggcactgtcctgcccagtgctcagaggttccacatcaacctgtgctctgggaaccacatcgccttccacctgaacccccgttttgatgagaatgctgtggtccgcaacacccagatcgacaactcctgggggtctgaggagcgaagtctgccccgaaaaatgcccttcgtccgtggccagagcttctcagtgtggatcttgtgtgaagctcactgcctcaaggtggccgtggatggtcagcacctgtttgaatactaccatcgcctgaggaacctgcccaccatcaacagactggaagtggggggcgacatccagctgacccatgtgcagacataggcggcttcctggccctggggccgggggctggggtgtggggcagtctgggtcctctcatcatccccacttcccaggcccagcctttccaaccctgacagccaccctggaacggagaaggcagctgacggggattgccttcctcagccgcagcagcacctggggctccagctgctggaatcctaccatcccaggaggcaggcacagccagggagaggggaggagtgggcagtgaagatgaagccccatgctcagtcccctcccatcccccacgcagctccaccccagtcccaagccaccagctgtctgctcctggtgggaggtggcctcctcagcccctcctctctgacctttaacctcactctcaccttgcaccgtgcaccaacccttcacccctcctggaaagcaggcctgatggcttcccactggcctccaccacctgaccagagtgttctcttcagaggactggctcctttcccagtgtccttaaaataaagaaatgaaaatgcttgttggcacattcatgtg

SEQ ID NO: 37 - DNA, 1581 bp, Homo sapiens
cctccccattgaataacagccaagttgctttggtttctatttctttgttaagtcgttccctctacaaaggacttcctagtgggtgtgaaaggcagcggtggccacagaggcggcggagagatggccttcagcggttcccaggctccctacctgagtccagctgtccccttttctgggactattcaaggaggtctccaggacggacttcagatcactgtcaatgggaccgttctcagctccagtggaaccaggtttgctgtgaactttcagactggcttcagtggaaatgacattgccttccacttcaaccctcggtttgaagatggagggtacgtggtgtgcaacacgaggcagaacggaagctgggggcccgaggagaggaagacacacatgcctttccagaaggggatgccctttgacctctgcttcctggtgcagagctcagatttcaaggtgatggtgaacgggatcctcttcgtgcagtacttccaccgcgtgcccttccaccgtgtggacaccatctccgtcaatggctctgtgcagctgtcctacatcagcttccagacccagacagtcatccacacagtgcagagcgcccctggacagatgttctctactcccgccatcccacctatgatgtacccccaccccgcctatccgatgcctttcatcaccaccattctgggagggctgtacccatccaagtccatcctcctgtcaggcactgtcctgcccagtgctcagaggttccacatcaacctgtgctctgggaaccacatcgccttccacctgaacccccgttttgatgagaatgctgtggtccgcaacacccagatcgacaactcctgggggtctgaggagcgaagtctgccccgaaaaatgcccttcgtccgtggccagagcttctcagtgtggatcttgtgtgaagctcactgcctcaaggtggccgtggatggtcagcacctgtttgaatactaccatcgcctgaggaacctgcccaccatcaacagactggaagtggggggcgacatccagctgacccatgtgcagacataggcggcttcctggccctggggccgggggctggggtgtggggcagtctgggtcctctcatcatccccacttcccaggcccagcctttccaaccctgacagccaccctggaacggagaaggcagctgacggggattgccttcctcagccgcagcagcacctggggctccagctgctggaatcctaccatcccaggaggcaggcacagccagggagaggggaggagtgggcagtgaagatgaagccccatgctcagtcccctcccatcccccacgcagctccaccccagtcccaagccaccagctgtctgctcctggtgggaggtggcctcctcagcccctcctctctgacctttaacctcactctcaccttgcaccgtgcaccaacccttcacccctcctggaaagcaggcctgatggcttcccactggcctccaccacctgaccagagtgttctcttcagaggactggctcctttcccagtgtccttaaaataaagaaatgaaaatgcttgttggcacattcatgtg

SEQ ID NO: 38 - DNA, 1870 bp, Homo sapiens
gccctttcaccctttaccttggacccctcaccaaggctcccactgggttgcagggacaccaagctgggctgccagcagacatggggcctgtgcctgttggaatctacagcagtgctgattgctttgggattctgcatgagacggagctgccccctgtcactacctggaaggtgaaggtcatgaaggagaagggcaagaggtcctctggacacatccaccagatcgacctggacatgagccggacattaaggaaccacctgttcttcagggaccgatatggagtcaacactgatgaagcaaatccaatacttagggaatggtggccacgtgctggaccagccccgggctctgaggatctgacagttctctgcatggacaagtacagggaggcacagctgttgctggtggagaccaccacatttgggaatggagacttccccagcaatggagagaaactgaagaaatccctcttcatgctgaaagagctcaccaacaaattcaggtatgccatgtttggcctcagctccagcaagtaccctcagttctgtgcctttgctcatgacctcacccagtagctgtcccacctgggggcctctcagctcaccccgatgggggaagaggatgaggtcagtgggcagaggatgccttccgcagctgggccatgcaaaccttcaaggcagcctgtgaaacgtttgatgtccgaagccaacagcacattcagatccccaagctctacacctccaatgtgacctggggcttgcaccacttcaggctcgtgcaggactcacagcctttggacctcagctaaccctcagcagcatgcacgccaataacatgttcaccacgaggctcaaatctcagcagaagctacagagtccaacatccagccacaccaccatcctggtggaattctcttgtgaggagggccaaggcctgaactacctgccaagggagcaccttggggtttgcccaggcaaccagctggccctggtccaaggcatgctggagcgagtggtggatggccccacaccccaccagacagggcacctggaggctctggatgagagcagtgagccctgggccagggagccagtgctgcctggcatcctctggccaccccatctggctgaggggctgagcctgggcctgccagtgacagtcatccctagtacagcaagtggaagttcaccaacagcctcacgttcctggaggtgctggaggagtttctgtccctgtgggtgtctgctagcttcctgctctcccagctccccattctgaatcccaggttctactccatcagctcctcctgggatcacatgcccatggagatccacctgactgtgaccgtgctcatgtaccacacccgagcggcttccacctccccgaggatccctcccatcctcgcatccttgtcaggcctggcacaggtatcgctcccttccacagtttctggcagcagcggctccatgactcccagcggaagggtcgatgttcaggacatcctgcagcagcagctggccagcaaggtgctccgtgtactccacgaggagccaggccacctctatgtttgctgggatatgcgcatggcctgggatgtggcccacaccctgaagcagctggtggctgccaagctgaaattgaatgaggagcaggtcgaggactatttctttcagctcaaggaggggttaaagctgccggcacagaacttaaccacggagccagctctgcattatccgaggtcacagggcctggggagatggaggaaagtgatatcccccagcctcacatcttattttttcacttcattccccatcaagccctttacttgacctcctaccaagtagcaccctggattgatcagagcctcctc

SEQ ID NO: 39 - DNA, 666 bp, Homo sapiens
atggggcctgtgcctgttggaatctacagcagtgctgattgctttgggattctgcatgagacggagctgccccctgtcactacctggaaggtgaaggtcatgaaggagaagggcaagaggtcctctggacacatccaccagatcgacctggacatgagccggacattaaggaaccacctgttcttcagggaccgatatggagtcaacactgatgaagcaaatccaatacttagggaatggtggccacgtgctggaccagccccgggctctgaggatctgacagttctctgcatggacaagtacagggaggcacagctgttgctggtggagaccaccacatttgggaatggagacttccccagcaatggagagaaactgaagaaatccctcttcatgctgaaagagctcaccaacaaattcaggtatgccatgtttggcctcagctccagcaagtaccctcagttctgtgcctttgctcatgacctcacccagcccttagaagagctccaccttgtgcacacaactctgggggagaaggcagcctgtgaaacgtttgatgtccgaagccaacagcacattcagatccccaagctctacacctccaatgtgacctggggcttgcaccacttcaggctcgtgcaggactcacagcctttggacctcagc

SEQ ID NO: 40 - DNA, 1526 bp, Homo sapiens
ggctgctgtttctaaaacccctttccctctaacccacaccacctttctactcactgatgccttcaggaagccataatggatggcacagagattgctgtttcccctcggtcactgcattcagaactcatgtgccctatctgcctggacatgctgaagaatacgatgaccaccaaggagtgcctccacagattctgctctgactgcattgtcacagccctacggagcgggaacaaggagtgtcctacctgccgaaagaagctggtgtccaagcgatccctacggccagaccccaactttgatgccctgatctctaagatctatcctagccgggaggaatacgaggcccatcaagaccgagtgcttatccgcctgagccgcctgcacaaccagcaggcattgagctccagcattgaggaggggctacgcatgcaggccatgcacagggcccagcgtgtgaggcggccgataccagggtcagatcagaccacaacgatgagtgggggggaaggagagcccggggagggagaaggggatggagaagatgtgagctcagactccgcccctgactctgccccaggccctgctcccaagcgaccccgtggagggggcgcaggggggagcagtgtagggacagggggaggcggcactggtggggtgggtgggggtgccggttcggaagactctggtgaccggggagggactctgggagggggaacgctgggccccccaagccctcctggggcccccagccccccagagccaggtggagaaattgagctcgtgttccggccccaccccctgctcgtggagaagggagaatactgccagacgaggtatgtgaagacaactgggaatgccacagtggaccacctctccaagtacttggccctgcgcattgccctcgagcggaggcaacagcaggaagcaggggagccaggagggcctggagggggcgcctctgacaccggaggacctgatgggtgtggcggggagggtgggggtgccggaggaggtgacggtcctgaggagcctgctttgcccagcctggagggcgtcagtgaaaagcagtacaccatctacatcgcacctggaggcggggcgttcacgacgttgaatggctcgctgaccctggagctggtgaatgagaaattctggaaggtgtcccggccactggagctgtgctatgctcccaccaaggatccaaagtgaccccaccaggggacagccagaggaaggggaccatggggtatccctgtgtcctggtctatcaccccagcttctttgtcccccagtacccccagcccagccagccaataagaggacacaaatgaggacacgtggcttttatacaaagtatctatatgagattcttctatattgtacagagtggggcaaaacacgcccccatctgctgccttttctattgccctgcaacgtcccatctatacgaggtgttggagaaggtgaagaaccctcccattcacgcccgcctaccaacaacaaacgtgcttttttcctctttgaaa

SEQ ID NO: 41 - DNA, 1735 bp, Homo sapiens
ccccagcgcccgggccatggcggcggcggtggcgggagctgctgtctgagcagcggttgcggaccgagcgaacttggcccaggagcccgggcctagggagaggcgcggcggcggcgggagcgcgaacggctggagctggccttcttcgccttctcctcggctgtggagccctggtggggggtctgcgcccggtcaccatgacgacgccggcgaatgcccagaatgccagcaaaacgtgggaactgagtctgtatgagctgcaccggaccccgcaggaagccataatggatggcacagagattgctgtttcccctcggtcactgcattcagaactcatgtgccctatctgcctggacatgctgaagaatacgatgaccaccaaggagtgcctccacagattctgctctgactgcattgtcacagccctacggagcgggaacaaggagtgtcctacctgccgaaagaagctggtgtccaagcgatccctacggccagaccccaactttgatgccctgatctctaagatctatcctagccgggaggaatacgaggcccatcaagaccgagtgcttatccgcctgagccgcctgcacaaccagcaggcattgagctccagcattgaggaggggctacgcatgcaggccatgcacagggcccagcgtgtgaggcggccgataccagggtcagatcagaccacaacgatgagtgggggggaaggagagcccggggagggagaaggggatggagaagatgtgagctcagactccgcccctgactctgccccaggccctgctcccaagcgaccccgtggagggggcgcaggggggagcagtgtagggacagggggaggcggcactggtggggtgggtgggggtgccggttcggaagactctggtgaccggggagggactctgggagggggaacgctgggccccccaagccctcctggggcccccagccccccagagccaggtggagaaattgagctcgtgttccggccccaccccctgctcgtggagaagggagaatactgccagacgaggtatgtgaagacaactgggaatgccacagtggaccacctctccaagtacttggccctgcgcattgccctcgagcggaggcaacagcaggaagcaggggagccaggagggcctggagggggcgcctctgacaccggaggacctgatgggtgtggcggggagggtgggggtgccggaggaggtgacggtcctgaggagcctgctttgcccagcctggagggcgtcagtgaaaagcagtacaccatctacatcgcacctggaggcggggcgttcacgacgttgaatggctcgctgaccctggagctggtgaatgagaaattctggaaggtgtcccggccactggagctgtgctatgctcccaccaaggatccaaagtgaccccaccaggggacagccagaggaaggggaccatggggtatccctgtgtcctggtctatcaccccagcttctttgtcccccagtacccccagcccagccagccaataagaggacacaaatgaggacacgtggcttttatacaaagtatctatatgagattcttctatattgtacagagtggggcaaaacacgcccccatctgctgccttttctattgccctgcaacgtcccatctatacgaggtgttggagaaggtgaagaaccctcccattcacgcccgcctaccaacaacaaacgtgcttttttcctctttgaaa

SEQ ID NO: 42 - DNA, 790 bp, Homo sapiens
gagccaggtgcaaacatttcccgtcaattggcagaaaacaaccttgaggaaccttgacgagtgtccggagtttagaaaacttagggatggagccccccaagatgaacccagtggtggagccactgtcctggatgctgggcacctggctgtcggacccacctggagccgggacctaccccacactgcagcccttccagtacctggaggaggttcacatctcccacgtgggccagcccatgctgaacttctcgttcaactccttccacccggacacgcgcaagccgatgcacagagagtgtggcttcattcgcctcaagcccgacaccaacaaggtggcctttgtcagcgcccagaacacaggcgtggtggaagtggaggagggcgaggtgaacgggcaggagctgtgcatcgcatcccactccatcgccaggatctccttcgccaaggagccccacgtagagcagatcacccggaagttcaggctgaattctgaaggcaaacttgagcagacggtctccatggcaaccacgacacagccaatgactcagcatcttcacgtcacctacaagaaggtgaccccgtaaacctagagcttctggagccctcgggagggcctggctactgtgcctcaacggttcggctcctcaacagacagtccctgcggcagaagtgggtgtggccgtgagcctctgcaggctcaagagtgttgtccagatgtttctgtactggcatagaaaaaccaaataaaaggcctttatttttatggctgaggattttgaatattatcact

SEQ ID NO: 43 - DNA, 1863 bp, Homo sapiens
gttccccctaaaggactcaaaacgtctaatccaatggttaaaagctgttcagagggataactggactcccactaagtattcatttctctgtagtgagcatttcaccaaagacagcttctccaagaggctggaggaccagcatcgcctgctgaagcccacggccgtgccatccatcttccacctgaccgagaagaagaggggggctggaggccatggccgcacccggagaaaagatgccagcaaggccacagggggtgtgaggggacactcgagtgccgccaccggcagaggagctgcaggttggtcaccgtcctcgagtggaaacccgatggccaagccagagtcccgcaggttgaagcaagctgctctgcaaggtgaagccacacccagggcggcccaggaggccgccagccaggagcaggcccagcaagctctggaacggactccaggagatggactggccaccatggtggcaggcagtcagggaaaagcagaagcgtctgccacagatgctggcgatgagagcgccacttcctccatcgaagggggcgtgacagataagagtggcatttctatggatgactttacgcccccaggatctggggcgtgcaaatttatcggctcacttcattcgtacagtttctcctctaagcacacccgagaaaggccatctgtcccccgagagcccattgaccgcaagaggctgaagaaagatgtggaaccaagctgcagtgggagcagcctgggacccgacaagggcctggcccagagccctcccagctcatcacttaccgcgacaccgcagaagccttcccagagcccctctgcccctcctgccgacgtcaccccaaagccagccacggaagccgtgcagagcgagcacagcgacgccagccccatgtccatcaacgaggtcatcctgtcggcgtcaggggcctgcaagctcatcgactcactgcactcctactgcttctcctcccggcagaacaagagccaggtgtgctgcctgcgggagcaggtggagaagaagaacggcgagctgaagagcctgcggcagagggtcagccgctccgacagccaggtgcggaagctacaggagaagctggatgagctgaggagagtgagcgtcccctatccaagtagcctgctgtcgcccagccgcgagccccccaagatgaacccagtggtggagccactgtcctggatgctgggcacctggctgtcggacccacctggagccgggacctaccccacactgcagcccttccagtacctggaggaggttcacatctcccacgtgggccagcccatgctgaacttctcgttcaactccttccacccggacacgcgcaagccgatgcacagagagtgtggcttcattcgcctcaagcccgacaccaacaaggtggcctttgtcagcgcccagaacacaggcgtggtggaagtggaggagggcgaggtgaacgggcaggagctgtgcatcgcatcccactccatcgccaggatctccttcgccaaggagccccacgtagagcagatcacccggaagttcaggctgaattctgaaggcaaacttgagcagacggtctccatggcaaccacgacacagccaatgactcagcatcttcacgtcacctacaagaaggtgaccccgtaaacctagagcttctggagccctcgggagggcctggctactgtgcctcaacggttcggctcctcaacagacagtccctgcggcagaagtgggtgtggccgtgagcctctgcaggctcaagagtgttgtccagatgtttctgtactggcatagaaaaaccaaataaaaggcctttatttttatggctgaggattttgaatattatcact

SEQ ID NO: 44 - DNA, 1940 bp, Homo sapiens
atggtgatctgctgtgcggtcgtgaactgctccaaccggcagggaaagggcgagaagcgcgccgtctccttccacaggttccccctaaaggactcaaaacgtctaatccaatggttaaaagctgttcagagggataactggactcccactaagtattcatttctctgtagtgagcatttcaccaaagacagcttctccaagaggctggaggaccagcatcgcctgctgaagcccacggccgtgccatccatcttccacctgaccgagaagaagaggggggctggaggccatggccgcacccggagaaaagatgccagcaaggccacagggggtgtgaggggacactcgagtgccgccaccggcagaggagctgcaggttggtcaccgtcctcgagtggaaacccgatggccaagccagagtcccgcaggttgaagcaagctgctctgcaaggtgaagccacacccagggcggcccaggaggccgccagccaggagcaggcccagcaagctctggaacggactccaggagatggactggccaccatggtggcaggcagtcagggaaaagcagaagcgtctgccacagatgctggcgatgagagcgccacttcctccatcgaagggggcgtgacagataagagtggcatttctatggatgactttacgcccccaggatctggggcgtgcaaatttatcggctcacttcattcgtacagtttctcctctaagcacacccgagaaaggccatctgtcccccgagagcccattgaccgcaagaggctgaagaaagatgtggaaccaagctgcagtgggagcagcctgggacccgacaagggcctggcccagagccctcccagctcatcacttaccgcgacaccgcagaagccttcccagagcccctctgcccctcctgccgacgtcaccccaaagccagccacggaagccgtgcagagcgagcacagcgacgccagccccatgtccatcaacgaggtcatcctgtcggcgtcaggggcctgcaagctcatcgactcactgcactcctactgcttctcctcccggcagaacaagagccaggtgtgctgcctgcgggagcaggtggagaagaagaacggcgagctgaagagcctgcggcagagggtcagccgctccgacagccaggtgcggaagctacaggagaagctggatgagctgaggagagtgagcgtcccctatccaagtagcctgctgtcgcccagccgcgagccccccaagatgaacccagtggtggagccactgtcctggatgctgggcacctggctgtcggacccacctggagccgggacctaccccacactgcagcccttccagtacctggaggaggttcacatctcccacgtgggccagcccatgctgaacttctcgttcaactccttccacccggacacgcgcaagccgatgcacagagagtgtggcttcattcgcctcaagcccgacaccaacaaggtggcctttgtcagcgcccagaacacaggcgtggtggaagtggaggagggcgaggtgaacgggcaggagctgtgcatcgcatcccactccatcgccaggatctccttcgccaaggagccccacgtagagcagatcacccggaagttcaggctgaattctgaaggcaaacttgagcagacggtctccatggcaaccacgacacagccaatgactcagcatcttcacgtcacctacaagaaggtgaccccgtaaacctagagcttctggagccctcgggagggcctggctactgtgcctcaacggttcggctcctcaacagacagtccctgcggcagaagtgggtgtggccgtgagcctctgcaggctcaagagtgttgtccagatgtttctgtactggcatagaaaaaccaaataaaaggcctttatttttatggctgaggattttgaatattatcact

SEQ ID NO: 45 - DNA, 8503 bp, Homo sapiens
taaatttaaaggcggggcggcctgtgagccctgaagtgccggccgcggagggtcctggccattttcctgggaccagttcagcctgataggatggcggaggaaggagccgtggccgtctgcgtgcgagtgcggccgctgaacagcagagaagaatcacttggagaaactgcccaagtttactggaaaactgacaataatgtcatttatcaagttgatggaagtaaatccttcaattttgatcgtgtctttcatggtaatgaaactaccaaaaatgtgtatgaagaaatagcagcaccaatcatcgattctgccatacaaggctacaatggtactatatttgcctatggacagactgcttcaggaaaaacatataccatgatgggttcagaagatcatttgggagttatacccagggcaattcatgacattttccaaaaaattaagaagtttcctgatagggaatttctcttacgtgtatcttacatggaaatatacaatgaaaccattacagatttactctgtggcactcaaaaaatgaaacctttaattattcgagaagatgtcaataggaatgtgtatgttgctgatctcacagaagaagttgtatatacatcagaaatggctttgaaatggattacaaagggagaaaagagcaggcattatggagaaacaaaaatgaatcaaagaagcagtcgttctcataccatctttaggatgattttggaaagcagagagaagggtgaaccttctaattgtgaaggatctgttaaggtatcccatttgaatttggttgatcttgcaggcagtgaaagagctgctcaaacaggcgctgcaggtgtgcggctcaaggaaggctgtaatataaatcgaagcttatttattttgggacaagtgatcaagaaacttagtgatggacaagttggtggtttcataaattatcgagatagcaagttaacacgaattctccagaattccttgggaggaaatgcaaagacacgtattatctgcacaattactccagtatcttttgatgaaacacttactgctctccagtttgccagtactgctaaatatatgaagaatactccttatgttaatgaggtatcaactgatgaagctctcctgaaaaggtatagaaaagaaataatggatcttaaaaaacaattagaggaggtttctttagagacgcgggctcaggcaatggaaaaagaccaattggcccaacttttggaagaaaaagatttgcttcagaaagtacagaatgagaaaattgaaaacttaacacggatgctggtgacctcttcttccctcacgttgcaacaggaattaaaggctaaaagaaaacgaagagttacttggtgccttggcaaaattaacaaaatgaagaactcaaactatgcagatcaatttaatataccaacaaatataacaacaaaaacacataagctttctataaatttattacgagaaattgatgaatctgtctgttcagagtctgatgttttcagtaacactcttgatacattaagtgagatagaatggaatccagcaacaaagctactaaatcaggagaatatagaaagtgagttgaactcacttcgtgctgactatgataatctggtattagactatgaacaactacgaacagaaaaagaagaaatggaattgaaattaaaagaaaagaatgatttggatgaatttgaggctctagaaagaaaaactaaaaaagatcaagagatgcaactaattcatgaaatttcgaacttaaagaatttagttaagcatgcagaagtatataatcaagatcttgagaatgaactcagttcaaaagtagagctgcttagagaaaaggaagaccagattaagaagctacaggaatacatagactctcaaaagctagaaaatataaaaatggacttgtcatactcattggaaagcattgaagacccaaaacaaatgaagcagactctgtttgatgctgaaactgtagcccttgatgccaagagagaatcagcctttcttagaagtgaaaatctggagctgaaggagaaaatgaaagaacttgcaactacatacaagcaaatggaaaatgatattcagttatatcaaagccagttggaggcaaaaaagaaaatgcaagttgatctggagaaagaattacaatctgcttttaatgagataacaaaactcacctcccttatagatggcaaagttccaaaagatttgctctgtaatttggaattggaaggaaagattactgatcttcagaaagaactaaataaagaagttgaagaaaatgaagctttgcgggaagaagtcattttgctttcagaattgaaatctttaccttctgaagtagaaaggctgaggaaagagatacaagacaaatctgaagagctccatataataacatcagaaaaagataaattgttttctgaagtagttcataaggagagtagagttcaaggtttacttgaagaaattgggaaaacaaaagatgacctagcaactacacagtcgaattataaaagcactgatcaagaattccaaaatttcaaaacccttcatatggactttgagcaaaagtataagatggtccttgaggagaatgagagaatgaatcaggaaatagttaatctctctaaagaagcccaaaaatttgattcgagtttgggtgctttgaagaccgagctttcttacaagacccaagaacttcaggagaaaacacgtgaggttcaagaaagactaaatgagatggaacagctgaaggaacaattagaaaatagagattctacgctgcaaactgtagaaagggagaaaacactgattactgagaaactgcagcaaactttagaagaagtaaaaactttaactcaagaaaaagatgatctaaaacaactccaagaaagcttgcaaattgagagggaccaactcaaaagtgatattcacgatactgttaacatgaatatagatactcaagaacaattacgaaatgctcttgagtctctgaaacaacatcaagaaacaattaatacactaaaatcgaaaatttctgaggaagtttccaggaatttgcatatggaggaaaatacaggagaaactaaagatgaatttcagcaaaagatggttggcatagataaaaaacaggatttggaagctaaaaatacccaaacactaactgcagatgttaaggataatgagataattgagcaacaaaggaagatattttctttaatacaggagaaaaatgaactccaacaaatgttagagagtgttatagcagaaaaggaacaattgaagactgacctaaaggaaaatattgaaatgaccattgaaaaccaggaagaattaagacttcttggggatgaacttaaaaagcaacaagagatagttgcacaagaaaagaaccatgccataaagaaagaaggagagctttctaggacctgtgacagactggcagaagttgaagaaaaactaaaggaaaagagccagcaactccaagaaaaacagcaacaacttcttaatgtacaagaagagatgagtgagatgcagaaaaagattaatgaaatagagaatttaaagaatgaattaaagaacaaagaattgacattggaacatatggaaacagagaggcttgagttggctcagaaacttaatgaaaattatgaggaagtgaaatctataaccaaagaaagaaaagttctaaaggaattacagaagtcatttgaaacagagagagaccaccttagaggatatataagagaaattgaagctacaggcctacaaaccaaagaagaactaaaaattgctcatattcacctaaaagaacaccaagaaactattgatgaactaagaagaagcgtatctgagaagacagctcaaataataaatactcaggacttagaaaaatcccataccaaattacaagaagagatcccagtgcttcatgaggaacaagagttactgcctaatgtgaaagaagtcagtgagactcaggaaacaatgaatgaactggagttattaacagaacagtccacaaccaaggactcaacaacactggcaagaatagaaatggaaaggctcaggttgaatgaaaaatttcaagaaagtcaggaagagataaaatctctaaccaaggaaagagacaaccttaaaacgataaaagaagcccttgaagttaaacatgaccagctgaaagaacatattagagaaactttggctaaaatccaggagtctcaaagcaaacaagaacagtccttaaatatgaaagaaaaagacaatgaaactaccaaaatcgtgagtgagatggagcaattcaaacccaaagattcagcactactaaggatagaaatagaaatgctcggattgtccaaaagacttcaagaaagtcatgatgaaatgaaatctgtagctaaggagaaagatgacctacagaggctgcaagaagttcttcaatctgaaagtgaccagctcaaagaaaacataaaagaaattgtagctaaacacctggaaactgaagaggaacttaaagttgctcattgttgcctgaaagaacaagaggaaactattaatgagttaagagtgaatctttcagagaaggaaactgaaatatcaaccattcaaaagcagttagaagcaatcaatgataaattacagaacaagatccaagagatttatgagaaagaggaacaatttaatataaaacaaattagtgaggttcaggaaaaagtgaatgaactgaaacaattcaaggagcatcgcaaagccaaggattcagcactacaaagtatagaaagtaagatgctcgagttgaccaacagacttcaagaaagtcaagaagaaatacaaattatgattaaggaaaaagaggaaatgaaaagagtacaggaggcccttcagatagagagagaccaactgaaagaaaacactaaagaaattgtagctaaaatgaaagaatctcaagaaaaagaatatcagtttcttaagatgacagctgtcaatgagactcaggagaaaatgtgtgaaatagaacacttgaaggagcaatttgagacccagaagttaaacctggaaaacatagaaacggagaatataaggttgactcagatactacatgaaaaccttgaagaaatgagatctgtaacaaaagaaagagatgaccttaggagtgtggaggagactctcaaagtagagagagaccagctcaaggaaaaccttagagaaactataactagagacctagaaaaacaagaggagctaaaaattgttcacatgcatctgaaggagcaccaagaaactattgataaactaagagggattgtttcagagaaaacaaatgaaatatcaaatatgcaaaaggacttagaacactcaaatgatgccttaaaagcacaggatctgaaaatacaagaggaactaagaattgctcacatgcatctgaaagagcagcaggaaactattgacaaactcagaggaattgtttctgagaagacagataaactatcaaatatgcaaaaagatttagaaaattcaaatgctaaattacaagaaaagattcaagaacttaaggcaaatgaacatcaacttattacgttaaaaaaagatgtcaatgagacacagaaaaaagtgtctgaaatggagcaactaaagaaacaaataaaagaccaaagcttaactctgagtaaattagaaatagagaatttaaatttggctcagaaacttcatgaaaaccttgaagaaatgaaatctgtaatgaaagaaagagataatctaagaagagtagaggagacactcaaactggagagagaccaactcaaggaaagcctgcaagaaaccaaagctagagatctggaaatacaacaggaactaaaaactgctcgtatgctatcaaaagaacacaaagaaactgttgataaacttagagaaaaaatttcagaaaagacaattcaaatttcagacattcaaaaggatttagataaatcaaaagatgaattacagaaaaagatccaagaacttcagaaaaaagaacttcaactgcttagagtgaaagaagatgtcaatatgagtcataaaaaaattaatgaaatggaacagttgaagaagcaatttgaggcccaaaacttatctatgcaaagtgtgagaatggataacttccagttgactaagaaacttcatgaaagccttgaagaaataagaattgtagctaaagaaagagatgagctaaggaggataaaagaatctctcaaaatggaaagggaccaattcatagcaaccttaagggaaatgatagctagagaccgacagaaccaccaagtaaaacctgaaaaaaggttactaagtgatggacaacagcaccttacggaaagcctgagagaaaagtgctctagaataaaagagcttttgaagagatactcagagatggatgatcattatgagtgcttgaatagattgtctcttgacttggagaaggaaattgaattccacagaatcatgaagaaactgaagtatgtgttaagctatgttacaaaaataaaagaagaacaacatgaatccatcaataaatttgaaatggattttattgatgaagtggaaaagcaaaaggaattgctaattaaaatacagcaccttcaacaagattgtgatgtaccatccagagaattaagggatctcaaattgaaccagaatatggatctacatattgaggaaattctcaaagatttctcagaaagtgagttccctagcataaagactgaatttcaacaagtactaagtaataggaaagaaatgacacagtttttggaagagtggttaaatactcgttttgatatagaaaagcttaaaaatggcatccagaaagaaaatgataggatttgtcaagtgaataacttctttaataacagaataattgccataatgaatgaatcaacagagtttgaggaaagaagtgctaccatatccaaagagtgggaacaggacctgaaatcactgaaagagaaaaatgaaaaactatttaaaaactaccaaacattgaagacttccttggcatctggtgcccaggttaatcctaccacacaagacaataagaatcctcatgttacatcaagagctacacagttaaccacagagaaaattcgagagctggaaaattcactgcatgaagctaaagaaagtgctatgcataaggaaagcaagattataaagatgcagaaagaacttgaggtgactaatgacataatagcaaaacttcaagccaaagttcatgaatcaaataaatgccttgaaaaaacaaaagagacaattcaagtacttcaggacaaagttgctttaggagctaagccatataaagaagaaattgaagatctcaaaatgaagcttgtgaaaatagacctagagaaaatgaaaaatgccaaagaatttgaaaaggaaatcagtgctacaaaagccactgtagaatatcaaaaggaagttataaggctattgagagaaaatctcagaagaagtcaacaggcccaagatacctcagtgatatcagaacatactgatcctcagccttcaaataaacccttaacttgtggaggtggcagcggcattgtacaaaacacaaaagctcttattttgaaaagtgaacatataaggctagaaaaagaaatttctaagttaaagcagcaaaatgaacagctaataaaacaaaagaatgaattgttaagcaataatcagcatctttccaatgaggtcaaaacttggaaggaaagaacccttaaaagagaggctcacaaacaagtaacttgtgagaattctccaaagtctcctaaagtgactggaacagcttctaaaaagaaacaaattacaccctctcaatgcaaggaacggaatttacaagatcctgtgccaaaggaatcaccaaaatcttgtttttttgatagccgatcaaagtctttaccatcacctcatccagttcgctattttgataactcaagtttaggcctttgtccagaggtgcaaaatgcaggagcagagagtgtggattctcagccaggtccttggcacgcctcctcaggcaaggatgtgcctgagtgcaaaactcagtagactcctctttgtcacttctctggagatccagcattccttatttggaaatgactttgtttatgtgtctatccctggtaatgatgttgtagtgcagcttaatttcaattcagtctttactttgccactagagttgaaagataagggaacaggaaatgaatgcattgtggtaatttagaatggtgatagcaataccttcttcttgcatatggtaatacttttaaaagttgaattgttttatttatttgtatattttgtaaagaataaagttattgaaagaaatgtaaagttatctacatgacttagcatattccaaagcataatacatacattaatataaaacatcattttattaacaaaattgtaaatgtttttaataccttacacattcaataaatgtttagtagttctgaatcac

SEQ ID NO: 46 - DNA, 8512 bp, Homo sapiens
taaatttaaaggcggggcggcctgtgagccctgaagtgccggccgcggagggtcctggccattttcctgggaccagttcagcctgataggatggcggaggaaggagccgtggccgtctgcgtgcgagtgcggccgctgaacagcagagaagaatcacttggagaaactgcccaagtttactggaaaactgacaataatgtcatttatcaagttgatggaagtaaatccttcaattttgatcgtgtctttcatggtaatgaaactaccaaaaatgtgtatgaagaaatagcagcaccaatcatcgattctgccatacaaggctacaatggtactatatttgcctatggacagactgcttcaggaaaaacatataccatgatgggttcagaagatcatttgggagttatacccagggcaattcatgacattttccaaaaaattaagaagtttcctgatagggaatttctcttacgtgtatcttacatggaaatatacaatgaaaccattacagatttactctgtggcactcaaaaaatgaaacctttaattattcgagaagatgtcaataggaatgtgtatgttgctgatctcacagaagaagttgtatatacatcagaaatggctttgaaatggattacaaagggagaaaagagcaggcattatggagaaacaaaaatgaatcaaagaagcagtcgttctcataccatctttaggatgattttggaaagcagagagaagggtgaaccttctaattgtgaaggatctgttaaggtatcccatttgaatttggttgatcttgcaggcagtgaaagagctgctcaaacaggcgctgcaggtgtgcggctcaaggaaggctgtaatataaatcgaagcttatttattttgggacaagtgatcaagaaacttagtgatggacaagttggtggtttcataaattatcgagatagcaagttaacacgaattctccagaattccttgggaggaaatgcaaagacacgtattatctgcacaattactccagtatcttttgatgaaacacttactgctctccagtttgccagtactgctaaatatatgaagaatactccttatgttaatgaggtatcaactgatgaagctctcctgaaaaggtatagaaaagaaataatggatcttaaaaaacaattagaggaggtttctttagagacgcgggctcaggcaatggaaaaagaccaattggcccaacttttggaagaaaaagatttgcttcagaaagtacagaatgagaaaattgaaaacttaacacggatgctggtgacctcttcttccctcacgttgcaacaggaattaaaggctaaaagaaaacgaagagttacttggtgccttggcaaaattaacaaaatgaagaactcaaactatgcagatcaatttaatataccaacaaatataacaacaaaaacacataagctttctataaatttattacgagaaattgatgaatctgtctgttcagagtctgatgttttcagtaacactcttgatacattaagtgagatagaatggaatccagcaacaaagctactaaatcaggagaatatagaaagtgagttgaactcacttcgtgctgactatgataatctggtattagactatgaacaactacgaacagaaaaagaagaaatggaattgaaattaaaagaaaagaatgatttggatgaatttgaggctctagaaagaaaaactaaaaaagatcaagagatgcaactaattcatgaaatttcgaacttaaagaatttagttaagcatgcagaagtatataatcaagatcttgagaatgaactcagttcaaaagtagagctgcttagagaaaaggaagaccagattaagaagctacaggaatacatagactctcaaaagctagaaaatataaaaatggacttgtcatactcattggaaagcattgaagacccaaaacaaatgaagcagactctgtttgatgctgaaactgtagcccttgatgccaagagagaatcagcctttcttagaagtgaaaatctggagctgaaggagaaaatgaaagaacttgcaactacatacaagcaaatggaaaatgatattcagttatatcaaagccagttggaggcaaaaaagaaaatgcaagttgatctggagaaagaattacaatctgcttttaatgagataacaaaactcacctcccttatagatggcaaagttccaaaagatttgctctgtaatttggaattggaaggaaagattactgatcttcagaaagaactaaataaagaagttgaagaaaatgaagctttgcgggaagaagtcattttgctttcagaattgaaatctttaccttctgaagtagaaaggctgaggaaagagatacaagacaaatctgaagagctccatataataacatcagaaaaagataaattgttttctgaagtagttcataaggagagtagagttcaaggtttacttgaagaaattgggaaaacaaaagatgacctagcaactacacagtcgaattataaaagcactgatcaagaattccaaaatttcaaaacccttcatatggactttgagcaaaagtataagatggtccttgaggagaatgagagaatgaatcaggaaatagttaatctctctaaagaagcccaaaaatttgattcgagtttgggtgctttgaagaccgagctttcttacaagacccaagaacttcaggagaaaacacgtgaggttcaagaaagactaaatgagatggaacagctgaaggaacaattagaaaatagagattctacgctgcaaactgtagaaagggagaaaacactgattactgagaaactgcagcaaactttagaagaagtaaaaactttaactcaagaaaaagatgatctaaaacaactccaagaaagcttgcaaattgagagggaccaactcaaaagtgatattcacgatactgttaacatgaatatagatactcaagaacaattacgaaatgctcttgagtctctgaaacaacatcaagaaacaattaatacactaaaatcgaaaatttctgaggaagtttccaggaatttgcatatggaggaaaatacaggagaaactaaagatgaatttcagcaaaagatggttggcatagataaaaaacaggatttggaagctaaaaatacccaaacactaactgcagatgttaaggataatgagataattgagcaacaaaggaagatattttctttaatacaggagaaaaatgaactccaacaaatgttagagagtgttatagcagaaaaggaacaattgaagactgacctaaaggaaaatattgaaatgaccattgaaaaccaggaagaattaagacttcttggggatgaacttaaaaagcaacaagagatagttgcacaagaaaagaaccatgccataaagaaagaaggagagctttctaggacctgtgacagactggcagaagttgaagaaaaactaaaggaaaagagccagcaactccaagaaaaacagcaacaacttcttaatgtacaagaagagatgagtgagatgcagaaaaagattaatgaaatagagaatttaaagaatgaattaaagaacaaagaattgacattggaacatatggaaacagagaggcttgagttggctcagaaacttaatgaaaattatgaggaagtgaaatctataaccaaagaaagaaaagttctaaaggaattacagaagtcatttgaaacagagagagaccaccttagaggatatataagagaaattgaagctacaggcctacaaaccaaagaagaactaaaaattgctcatattcacctaaaagaacaccaagaaactattgatgaactaagaagaagcgtatctgagaagacagctcaaataataaatactcaggacttagaaaaatcccataccaaattacaagaagagatcccagtgcttcatgaggaacaagagttactgcctaatgtgaaagaagtcagtgagactcaggaaacaatgaatgaactggagttattaacagaacagtccacaaccaaggactcaacaacactggcaagaatagaaatggaaaggctcaggttgaatgaaaaatttcaagaaagtcaggaagagataaaatctctaaccaaggaaagagacaaccttaaaacgataaaagaagcccttgaagttaaacatgaccagctgaaagaacatattagagaaactttggctaaaatccaggagtctcaaagcaaacaagaacagtccttaaatatgaaagaaaaagacaatgaaactaccaaaatcgtgagtgagatggagcaattcaaacccaaagattcagcactactaaggatagaaatagaaatgctcggattgtccaaaagacttcaagaaagtcatgatgaaatgaaatctgtagctaaggagaaagatgacctacagaggctgcaagaagttcttcaatctgaaagtgaccagctcaaagaaaacataaaagaaattgtagctaaacacctggaaactgaagaggaacttaaagttgctcattgttgcctgaaagaacaagaggaaactattaatgagttaagagtgaatctttcagagaaggaaactgaaatatcaaccattcaaaagcagttagaagcaatcaatgataaattacagaacaagatccaagagatttatgagaaagaggaacaatttaatataaaacaaattagtgaggttcaggaaaaagtgaatgaactgaaacaattcaaggagcatcgcaaagccaaggattcagcactacaaagtatagaaagtaagatgctcgagttgaccaacagacttcaagaaagtcaagaagaaatacaaattatgattaaggaaaaagaggaaatgaaaagagtacaggaggcccttcagatagagagagaccaactgaaagaaaacactaaagaaattgtagctaaaatgaaagaatctcaagaaaaagaatatcagtttcttaagatgacagctgtcaatgagactcaggagaaaatgtgtgaaatagaacacttgaaggagcaatttgagacccagaagttaaacctggaaaacatagaaacggagaatataaggttgactcagatactacatgaaaaccttgaagaaatgagatctgtaacaaaagaaagagatgaccttaggagtgtggaggagactctcaaagtagagagagaccagctcaaggaaaaccttagagaaactataactagattgataaaggacctagaaaaacaagaggagctaaaaattgttcacatgcatctgaaggagcaccaagaaactattgataaactaagagggattgtttcagagaaaacaaatgaaatatcaaatatgcaaaaggacttagaacactcaaatgatgccttaaaagcacaggatctgaaaatacaagaggaactaagaattgctcacatgcatctgaaagagcagcaggaaactattgacaaactcagaggaattgtttctgagaagacagataaactatcaaatatgcaaaaagatttagaaaattcaaatgctaaattacaagaaaaggtaattcaagaacttaaggcaaatgaacatcaacttattacgttaaaaaaagatgtcaatgagacacagaaaaaagtgtctgaaatggagcaactaaagaaacaaataaaagaccaaagcttaactctgagtaaattagaaatagagaatttaaatttggctcagaaacttcatgaaaaccttgaagaaatgaaatctgtaatgaaagaaagagataatctaagaagagtagaggagacactcaaactggagagagaccaactcaaggaaagcctgcaagaaaccaaagctagagatctggaaatacaacaggaactaaaaactgctcgtatgctatcaaaagaacacaaagaaactgttgataaacttagagaaaaaatttcagaaaagacaattcaaatttcagacattcaaaaggatttagataaatcaaaagatgaattacagaaaaagatccaagaacttcagaaaaaagaacttcaactgcttagagtgaaagaagatgtcaatatgagtcataaaaaaattaatgaaatggaacagttgaagaagcaatttgaggcccaaaacttatctatgcaaagtgtgagaatggataacttccagttgactaagaaacttcatgaaagccttgaagaaataagaattgtagctaaagaaagagatgagctaaggaggataaaagaatctctcaaaatggaaagggaccaattcatagcaaccttaagggaaatgatagctagagaccgacagaaccaccaagtaaaacctgaaaaaaggttactaagtgatggacaacagcaccttacggaaagcctgagagaaaagtgctctagaataaaagagcttttgaagagatactcagagatggatgatcattatgagtgcttgaatagattgtctcttgacttggagaaggaaattgaattccaaaaagagctttcaatgagatatgtgttaagctatgttacaaaaataaaagaagaacaacatgaatccatcaataaatttgaaatggattttattgatgaagtggaaaagcaaaaggaattgctaattaaaatacagcaccttcaacaagattgtgatgtaccatccagagaattaagggatctcaaattgaaccagaatatggatctacatattgaggaaattctcaaagatttctcagaaagtgagttccctagcataaagactgaatttcaacaagtactaagtaataggaaagaaatgacacagtttttggaagagtggttaaatactcgttttgatatagaaaagcttaaaaatggcatccagaaagaaaatgataggatttgtcaagtgaataacttctttaataacagaataattgccataatgaatgaatcaacagagtttgaggaaagaagtgctaccatatccaaagagtgggaacaggacctgaaatcactgaaagagaaaaatgaaaaactatttaaaaactaccaaacattgaagacttccttggcatctggtgcccaggttaatcctaccacacaagacaataagaatcctcatgttacatcaagagctacacagttaaccacagagaaaattcgagagctggaaaattcactgcatgaagctaaagaaagtgctatgcataaggaaagcaagattataaagatgcagaaagaacttgaggtgactaatgacataatagcaaaacttcaagccaaagttcatgaatcaaataaatgccttgaaaaaacaaaagagacaattcaagtacttcaggacaaagttgctttaggagctaagccatataaagaagaaattgaagatctcaaaatgaagcttgtgaaaatagacctagagaaaatgaaaaatgccaaagaatttgaaaaggaaatcagtgctacaaaagccactgtagaatatcaaaaggaagttataaggctattgagagaaaatctcagaagaagtcaacaggcccaagatacctcagtgatatcagaacatactgatcctcagccttcaaataaacccttaacttgtggaggtggcagcggcattgtacaaaacacaaaagctcttattttgaaaagtgaacatataaggctagaaaaagaaatttctaagttaaagcagcaaaatgaacagctaataaaacaaaagaatgaattgttaagcaataatcagcatctttccaatgaggtcaaaacttggaaggaaagaacccttaaaagagaggctcacaaacaagtaacttgtgagaattctccaaagtctcctaaagtgactggaacagcttctaaaaagaaacaaattacaccctctcaatgcaaggaacggaatttacaagatcctgtgccaaaggaatcaccaaaatcttgtttttttgatagccgatcaaagtctttaccatcacctcatccagttcgctattttgataactcaagtttaggcctttgtccagaggtgcaaaatgcaggagcagagagtgtggattctcagccaggtccttggcacgcctcctcaggcaaggatgtgcctgagtgcaaaactcagtagactcctctttgtcacttctctggagatccagcattccttatttggaaatgactttgtttatgtgtctatccctggtaatgatgttgtagtgcagcttaatttcaattcagtctttactttgccactagagttgaaagataagggaacaggaaatgaatgcattgtggtaatttagaatggtgatagcaataccttcttcttgcatatggtaatacttttaaaagttgaattgttttatttatttgtatattttgtaaagaataaagttattgaaagaaatgtaaagttatctacatgacttagcatattccaaagcataatacatacattaatataaaacatcattttattaacaaaattgtaaatgtttttaataccttacacattcaataaatgtttagtagttctgaatcac

SEQ ID NO: 47 - DNA, 1154 bp, Homo sapiens
ctgaaagcagggaaactacaaatcccagcatgcattattaagcgcttgacttgcttccagacaaaggttgtctcaagtttgttgctcaaaccgagttctggagaacgccatcagctcgctgcttaaaattaaaccacaggttccattatgggtcgacttgatgggaaagtcatcatcctgacggccgctgctcaggggattggccaagcagctgccttagcttttgcaagagaaggtgccaaagtcatagccacagacattaatgagtccaaacttcaggaactggaaaagtacccgggtattcaaactcgtgtccttgatgtcacaaagaagaaacaaattgatcagtttgccaatgaagttgagagacttgatgttctctttaatgttgctggttttgtccatcatggaactgtcctggattgtgaggagaaagactgggacttctcgatgaatctcaatgtgcgcagcatgtacctgatgatcaaggcattccttcctaaaatgcttgctcagaaatctggcaatattatcaacatgtcttctgtggcttccagcgtcaaaggagttgtgaacagatgtgtgtacagcacaaccaaggcagccgtgattggcctcacaaaatctgtggctgcagatttcatccagcagggcatcaggtgcaactgtgtgtgcccaggaacagttgatacgccatctctacaagaaagaatacaagccagaggaaatcctgaagaggcacggaatgatttcctgaagagacaaaagacgggaagattcgcaactgcagaagaaatagccatgctctgcgtgtatttggcttctgatgaatctgcttatgtaactggtaaccctgtcatcattgatggaggctggagcttgtgattttaggatctccatggtgggaaggaaggcaggcccttcctatccacagtgaacctggttacgaagaaaactcaccaatcatctccttcctgttaatcacatgttaatgaaaataagctctttttaatgatgtcactgtttgcaagagtctgattctttaagtatattaatctctttgtaatctcttctgaaatcattgtaaagaaataaaaatattgaactcatagcaggagaatagtttttaaaataaatctcgatttgttagcatc

SEQ ID NO: 48 - DNA, 1313 bp, Homo sapiens
ctgaaagcagggaaactacaaatcccagcatgcattattaagcgcttgacttgcttccagacaaaggttgtctcaagtttgttgctcaaaccgagttctggagaacgccatcagctcgctgcttaaagggaaatgctgttgtgagagagaatgaggagagaactaggtaaggctgtgagagccatcagacctcgatgcaagtccacccgcgagggaggaaaagaaggaaaccaggttgagtggaagcatcccagacagctgtgcagtctaagagaacttcagcaagattaaaccacaggttccattatgggtcgacttgatgggaaagtcatcatcctgacggccgctgctcaggggattggccaagcagctgccttagcttttgcaagagaaggtgccaaagtcatagccacagacattaatgagtccaaacttcaggaactggaaaagtacccgggtattcaaactcgtgtccttgatgtcacaaagaagaaacaaattgatcagtttgccaatgaagttgagagacttgatgttctctttaatgttgctggttttgtccatcatggaactgtcctggattgtgaggagaaagactgggacttctcgatgaatctcaatgtgcgcagcatgtacctgatgatcaaggcattccttcctaaaatgcttgctcagaaatctggcaatattatcaacatgtcttctgtggcttccagcgtcaaaggagttgtgaacagatgtgtgtacagcacaaccaaggcagccgtgattggcctcacaaaatctgtggctgcagatttcatccagcagggcatcaggtgcaactgtgtgtgcccaggaacagttgatacgccatctctacaagaaagaatacaagccagaggaaatcctgaagaggcacggaatgatttcctgaagagacaaaagacgggaagattcgcaactgcagaagaaatagccatgctctgcgtgtatttggcttctgatgaatctgcttatgtaactggtaaccctgtcatcattgatggaggctggagcttgtgattttaggatctccatggtgggaaggaaggcaggcccttcctatccacagtgaacctggttacgaagaaaactcaccaatcatctccttcctgttaatcacatgttaatgaaaataagctctttttaatgatgtcactgtttgcaagagtctgattctttaagtatattaatctctttgtaatctcttctgaaatcattgtaaagaaataaaaatattgaactcatagcaggagaatagtttttaaaataaatctcgatttgttagcatc

SEQ ID NO: 49 - DNA, 2171 bp, Homo sapiens
ctgaaagcagggaaactacaaatcccagcatgcattattaagcgcttgacttgcttccagacaaaggttgtctcaagtttgttgctcaaaccgagttctggagaacgccatcagctcgctgcttaaaattaaaccacaggttccattatgggtcgacttgatgggaaagtcatcatcctgacggccgctgctcaggggattggccaagcagctgccttagcttttgcaagagaaggtgccaaagtcatagccacagacattaatgagtccaaacttcaggaactggaaaagtacccgggtattcaaactcgtgtccttgatgtcacaaagaagaaacaaattgatcagtttgccaatgaagttgagagacttgatgttctctttaatgttgctggttttgtccatcatggaactgtcctggattgtgaggagaaagactgggacttctcgatgaatctcaatgtgcgcagcatgtacctgatgatcaaggcattccttcctaaaatgcttgctcagaaatctggcaatattatcaacatgtcttctgtggcttccagcgtcaaaggtgggtctgtctccttccgaggactgcgatgctcatacacgcacatcattaagagctctgcgtttgggaacaggcatagcagagattataatttcaagtattgaaatgatttcaaaactgcttttttcaaaattggtattaagttccttaaccacagatcttttgctctcgatgtgagccagtggtaaaattaaattaaaatgtggggtatttttgccctcccttttattctttctaatggacatggaaatgaacatcaaactgggagaaagaaccatttaacatttaattaatttaaaatagtgtattgagcaccggtatgtgctctggccataaaagaattcacagtccaaaactaggagcaaggcagcaaacatcatcttctccagtgtgatgatatataacagaggtttgtacaaagcgctgtcaaaatacagggaaataactgcctgtgagtttgtggaatgcttcacaaagacagttgatctgagccatcagcaagaagtcaagttgaaggacaaggacagcagtacaaaatgtggattatgtcacaatctggcatagttggatctgtgagtttaaaatgaaatagttactgctgagataccatttcttctctttgcaaggatacacatattcaacatacacaagagaggaatgtaaagaagtgcctaggcctcctgttttattgttttgttttgttattaatcttcattttcttttggaatctgcctaagagttatggcaactgatgatgagaaactaagactaccaatgttaagtaagttcagcatttcaattaagtctcaattaagttgtgcctatactgatattatttccctagatccagaaactgactctattgaaggaaaaaaatctgatatcaatctttttaaaaggggaggaatgtgggagaaagcatgaaaatggctactgggaaaacttatttgtgttacctttctgaaggaaaatacattttttattccttcaattgttgaacctttcctccaccctcaggagttgtgaacagatgtgtgtacagcacaaccaaggcagccgtgattggcctcacaaaatctgtggctgcagatttcatccagcagggcatcaggtgcaactgtgtgtgcccaggaacagttgatacgccatctctacaagaaagaatacaagccagaggaaatcctgaagaggcacggaatgatttcctgaagagacaaaagacgggaagattcgcaactgcagaagaaatagccatgctctgcgtgtatttggcttctgatgaatctgcttatgtaactggtaaccctgtcatcattgatggaggctggagcttgtgattttaggatctccatggtgggaaggaaggcaggcccttcctatccacagtgaacctggttacgaagaaaactcaccaatcatctccttcctgttaatcacatgttaatgaaaataagctctttttaatgatgtcactgtttgcaagagtctgattctttaagtatattaatctctttgtaatctcttctgaaatcattgtaaagaaataaaaatattgaactcatagcaggagaatagtttttaaaataaatctcgatttgttagcatc

SEQ ID NO: 50 - DNA, 950 bp, Homo sapiens
cttgcttccagacaaaggttgtctcaagtttgttgctcaaaccgagttctggagaacgccatcagctcgctgcttaaaattaaaccacaggttccattatgggtcgacttgatgggaaagtcatcatcctgacggccgctgctcaggggattggccaagcagctgccttagcttttgcaagagaaggtgccaaagtcatagccacagacattaatgagtccaaacttcaggaactggaaaagtacccgggtattcaaactcgtgtccttgatgtcacaaagaagaaacaaattgatcagtttgccaatgaagttgagagacttgatgttctctttaatgttgctggttttgtccatcatggaactgtcctggattgtgaggagaaagactgggacttctcgatgaatctcaatgtgcgcagcatgtacctgatgatcaaggcattccttcctaaaatgcttgctcagaaatctggcaatattatcaacatgtcttctgtggcttccagcgtcaaaggagttgtgaacagatgtgtgtacagcacaaccaaggcagccgtgattggcctcacaaaatctgtggctgcagatttcctgaagagacaaaagacgggaagattcgcaactgcagaagaaatagccatgctctgcgtgtatttggcttctgatgaatctgcttatgtaactggtaaccctgtcatcattgatggaggctggagcttgtgattttaggatctccatggtgggaaggaaggcaggcccttcctatccacagtgaacctggttacgaagaaaactcaccaatcatctccttcctgttaatcacatgttaatgaaaataagctctttttaatgatgtcactgtttgcaagagtctgattctttaagtatattaatctctttgtaatctcttctgaaatcattgtaaagaaataaaaatattgaactcat

SEQ ID NO: 51 - DNA, 594 bp, Homo sapiens
ctaagagttatggcaactgatgatgagaaactaagactaccaatgttaagagttgtgaacagatgtgtgtacagcacaaccaaggcagccgtgattggcctcacaaaatctgtggctgcagatttcatccagcagggcatcaggtgcaactgtgtgtgcccaggaacagttgatacgccatctctacaagaaagaatacaagccagaggaaatcctgaagaggcacggaatgatttcctgaagagacaaaagacgggaagattcgcaactgcagaagaaatagccatgctctgcgtgtatttggcttctgatgaatctgcttatgtaactggtaaccctgtcatcattgatggaggctggagcttgtgattttaggatctccatggtgggaaggaaggcaggcccttcctatccacagtgaacctggttacgaagaaaactcaccaatcatctccttcctgttaatcacatgttaatgaaaataagctctttttaatgatgtcactgtttgcaagagtctgattctttaagtatattaatctctttgtaatctcttctgaaatcattgtaaagaaataaaaatattgaactcat

SEQ ID NO: 52 - DNA, 4239 bp, Homo sapiens
ggccactacccagagggctgccgccgcctctccaagttcttgtggcccccgcggtgcggagtatggggcgctgatggccatggagggctactggcgcttcctggcgctgctggggtcggcactgctcgtcggcttcctgtcggtgatcttcgccctcgtctgggtcctccactaccgagaggggcttggctgggatgggagcgcactagagtttaactggcacccagtgctcatggtcaccggcttcgtcttcatccagggcatcgccatcatcgtctacagactgccgtggacctggaaatgcagcaagctcctgatgaaatccatccatgcagggttaaatgcagttgctgccattcttgcaattatctctgtggtggccgtgtttgagaaccacaatgttaacaatatagccaatatgtacagtctgcacagctgggttggactgatagctgtcatatgctatttgttacagcttctttcaggtttttcagtctttctgcttccatgggctccgctttctctccgagcatttctcatgcccatacatgtttattctggaattgtcatctttggaacagtgattgcaacagcacttatgggattgacagagaaactgattttttccctgagagatcctgcatacagtacattcccgccagaaggtgttttcgtaaatacgcttggccttctgatcctggtgttcggggccctcattttttggatagtcaccagaccgcaatggaaacgtcctaaggagccaaattctaccattcttcatccaaatggaggcactgaacagggagcaagaggttccatgccagcctactctggcaacaacatggacaaatcagattcagagttaaacaatgaagtagcagcaaggaaaagaaacttagctctggatgaggctgggcagagatctaccatgtaaaatgttgtagagatagagccatataacgtcacgtttcaaaactagctctacagttttgcttctcctattagccatatgataattgggctatgtagtatcaatatttactttaatcacaaaggatggtttcttgaaataatttgtattgattgaggcctatgaactgacctgaattggaaaggatgtgattaatataaataatagcagatataaattgtggttatgttacctttatcttgttgaggaccacaacattagcacggtgccttgtgcagaatagatactcaatatgtgaatatgtgtctactagtagttaattggataaactggcagcatccctggcctgttgtcatgcagtcatttcctgttaattctgggagacaatgatttcacaactagagggaagcagtcctaaaagtttaaaatccgataaggaatatctgggacagggtttagatcatgactctacacagataccatgatgagagtatattaaagaaatttaggaaagcacctggttcctttctccccatgcctgccttctgctccctccccagctggtttgggctcaaattgtccctggagactagggtttatgttagggtattgatagattagagcaggtggttgaagagatcttctctggtcagacttggaagaatttccaaaactgaagttagccccaagacttccctagggttgatgtactttatgatccagatgctaaacttcttagaatgaaaatatgcttcaacacttaagtagcatacactgccctacaaacctcagagagcacttttccccaagttcttgtttttatttttgaaagtactcacacagcacttactatgctccaaacactcctctaagcactttacacatattagctcattcagtccccagacagacgggatgaagtaggtattgttactgttcccattttacaggtgagagatttgaagcctggggaggctagtaactcaccccaaggtcacacggctcatacatggtgggactgagactcagatgcaggcagtctggcacctcagtctggattctaaccatttcactaagctatttttgtcttgtactactttgacccacccctgaataaacctcaattgctggagtggggtgtagttattaaagggatgctttttaccttttgctgtctgctgtggcagattccccagataaccaaggaaaaggggccacccatacctggaaataggccatagggcccctactactgccaacaagccatggcctaccttgacaattgtttgatcttaaaattgtgtcttggtaacaaaagatttggacaggcatatctgtagctttcaagttaattaattgcaatatttttttcttcaggattttagctgctgaacaactttcagtttggagctaaaagagacctgtctcatggtctgcccttccctggggcaatagctagggtctttcctgatttttatggaattttaggggatattttgaacttgggttctcagtagtgaattgagacttggaggtgacttttcatgtttggagtatcatctctgtctgggatctgggctgacaaattaaaacctagagtagtgcttatgctgaaatgatacttttcattttttggttgatttttttgccttcccttcaattttaaactgaagcattttaatgtgggtagaaactctacaccaaatacactaaacattttggtgcttagtggatttctttttaggtaactggtacttacttccaaagactgaatacaagccacactccatcatatcccttaaacttcatgaaaaaccattcaagatccccttgctgcaacactgttctcttcttctctactaaattctatttccaaaattggtaatagagccagaaggatccccagtacccagccctctgcctggcacaaactggtagcacaattaaattcagtatgggtggagcatggtacagtcttggtgccatagaaggagtagttgcatagtcacacatcatttgataagttggatgttccattacatagaggaacacaaaattccagggtttttggaggaagggattagatagtgactaagccgccagaattgaggtggccattcctttttgtataggctaagaaacaggttatcagtgaaaagttaattatggctttggcactagaatagcactgttgcaaagtatttaagcaccccccatctcagccctttattttatctttcatgtgggctaatgtgaggataatcttacagatattataggaatttcttttctatctttatgaaaacaacgtatataaaatatatctagaaaacctttgtttgagactcttatttaatgggcttttgattctaatgataattgtacctttatctttcaaaagctgatatttcctacctaagcatctcccgagaaaaatatctcattaaaaagcccataaataataggggagaagaaagccttaggtatcaattccaaaacagtgattgaaatttcccaaaataattatggcttctgtcatctccagagataatctggcttggtttaccccataatctaatttcagaaaagaaagctttattttaacactcatctgaatcaacattaaagccttttctctcaaagcgtttattgagaaactcaaatgaatatactttttgaattactgtcatcaaaagtgtacggcttcctgtgctgcttgtgtcaaatggaacctgccctctaaagcactttctttcctttacttgcgtggtttcatgtaagctgtgctgtttagaaacaacatctcagactttacaaagaaatgacaaagaaggcaattgcactttttaagggatatcgacaagcagtttctgttttctaaaggacaaaatacagagtgtgtgtcatttttaattagattctttcccctgctgagttggaaattccagtgcagcactgattgaccacagttgccaatctaaaagcacaaagacagaagtaaagctttatgctaattttatttcaatatgatagaaaatttatcttggtatgtccttttttagataactccagcaggaaactgtaactgctatgtctttaggaaaatgtagaagaaagaacattattattctttaattcctacaaggtactcgaaaaccttaagtgaaaaagatttctatctttttatcttagcgcatttatggaaaaaatattaactatcctgaatattttataattttgtaggaaaaatatgcatctattttttcttgacttcttttatatagtaataaaagttattttggaagctc

SEQ ID NO: 53 - DNA, 531 bp, Homo sapiens
atgctgctcttctgaggatccggcaagatggcagaagtagagcagaagaagaagcggaccttccgcaagttcacctaccgcggcgtggacctggaccagctgctggacatgtcctacgagcagctggagcagccgatgcagctgtacagtgcgcgccagcggcggcggctgaaccggggcctgcggcggaagcagcactccctgctgaagcgcctgcgcaaggccaagaaggaggcgccgcccatggagaagcaggaagtggtgaagacgcacctgcgggacatgatcatcctacccgagatggtgggcagcatggtgggcgtctacaacggcaagaccttcaaccaggtggagatcaagcccgagatgatcggccactacctgggcgagttctccatcacctacaagcccgtaaagcacggccggcccggcatcggggccacccactcctcccgcttcatccctctcaagtaatggctcagctaataaaggcgcacatgactccaaaaaaaaaaaaaaaaagaagtccag

SEQ ID NO: 54 - DNA, 3622 bp, Homo sapiens
atggaagccaccaagaaggtggggggccctgatccatcgggtccccaggaccacccctcagccggcagccagcagctggggagtggcctcagagggtctcagggaccacggataagctcagaatccctatacttcaagcaggggttgtcattgtctaccaagaccatcactgatggtgcctgtggcccagcctcccaggcctgcatccctgggtccatttgccagctactccaggatcctgcttgggttagctcccagtgctgctgtgagcaggcctcccaggatgccccgagactctcctccactagtgtatcttcaagtcccattgtgggagcccaacaacatctcatcatggaggatgtcaccctgaccttaccagagtgcatgcacagtgacagcaccagtgacatagcccagtgtggaccctgccaccttcggtttcaggtgcagaatttgggggaaggcaagcgtccagctaaggtcctggtaggctggggcaaaggcccctgcagctccgaccagatagcctccttgggcagcaggaagagtcggtggctgcccttcctcctctcaggagagaatggtgctcccgaagcccaaggtgctcttctggctccagctcaggatctagcccaagatcaggaccaggccaccgtgcccggacttacaccttcttttctgtcactgactcctccaattccagcttgggctacgactccagctctggatgttaccccaacccccactgcagttgaaactgacatccataccattgatcacctgactgacaccactgcagtcaccaagggcccatctcaagacctccttctcaggaagtgtggcaatcagtggtcaactgtcttggagtcttccaaaatagttgcatcttgccaggacaaagtgaatctccactctaaagaggaggctcccatcccaaagcctactctagaagagcgcccagaccatgcccaggaggaggaggttaccagaaggaaggtgcccagaaggaaggtgccaactgaggaggctgagaaccccatgaagaaacttccagtctctacctccaggccaggcagcccaatgccaggcccagagcccccagttatctccaagtcccagaggagtagccaggagatctgtagctctcagccacagaagcagctccccaatgtctgtgacaataccagctctaatgtgccactgtctgcctaccaagtaacctgccacaagcagtccccattccagtctccgaaggaagccatgcagatccccctctccagtgccccaacctgccagcttcaggaagttgtggaggaccgtgtgctggtatttgatggggctgctgtgccatgaccctgtgggctcacgggcagtgcttgtgggcctcatgcccagccacccatccatctatgtccctgaaaatatgctgtccacccagctgtcggccaaacccatcctgtctcctgacagcaatcactccagcttttggtctatcacacccatgctgtccagcccagtgccctgcagcctctcatctggcagctaccgagaggtagccctgattcccaaggaggccaggctcaacctggagtcatgggactcccctggtactgagacacccatcagggttgggatgctgactgggcctgttccactggggatgcccctccaatttgatgagaggatactgacccatgtccctaatactagctggtccaagcctgatggtgaaaaaaatgaacctagtcataccatctggatgctagacccttccatggcaccctctaggatgccagatgcctccatagtccagaccaagaaactgcagtggatgaactcagagcctgctgcaccagccgatacccaggaagtgcccagatccctcctccaggaagacataggcagccacgaagaggtcattcctgctcaccctgataaccctcaggccaaagatgctggacagactctcctcactgggcagatcctccttgctggacagccacccctacctgagcacccccttactgatcaaccccctctcactgggcagacaccccttgctaggaatccctctttatctaaagaaccccccatcaccaaagagcccactctttcaagatggtcccccaaccctggagaacctggccaggtctccacccaggaagatgagcccttaggcctgcctactcatgtaggggtatttcaggtgcccctgacccctgaggagacctgtatctatatgagtagagacaaggttggcatcagtaatactcagcactccatcacgcatcagcagcaacctggcaactcccctaggacccaggaggagcagcttcccttgatcacatttaccacacctggcactggacgcaaggtcttgcccatggccatggtggccactgagccccagagtgccccattcaagctgacagctgaggatcttacacacttatcagtagttgcacaccttggactgccccacggggcctgctatgaactggtgtccaccatggatgctctgccagttcggtcgccagtgctctgctgccactcactgggacccttccaggacatggcggccgtggtgattgatacaggcacaggattcaccaaatgtggactggcgggagaggaccatgtcctcagtgtcataccctcacgagttcagctgctgcagcacccagcccagggccagccacgatatgcagtgcctgaaaaccaagtgggatcctattcagtgctgaaccgtggtgtggtctatgactgggatgcactagaggtgctatggcagcacctgttctattgaaggctgggtgtgcagcccgagaagctgtctgtgctcgtagccgactcgcccatctcaccactcaccaaccgagaaaaggtggctgaaatactctttgagcatttccatgtcccagccatgcagacagtgcatcaggccctgctggcgctctatgcttatggacgtaccactgggctggtgctgggcagtggccatggcacttcctatgtggcacccatcctcactggggatctggccccacttgacacctaccggctggatgtggctggtgctgaccttactgactacttggcccagctgctgcagagaagtggccactcactgccccaggcaggactgatcaaccagatgaaagaggcctgctgctacgtggccatggatgtggcagctgagagggcccacacccaggcgcaggccgaggtggactttgtgcttccagacaagcaggttatcacgctggggcctgagcgcttctgctgccctgaggccctcttccaacccaatctgataggtctcaaccagctgggccttccacagctggccctcctaagcatcagccggttggaggccaagcagcaggagcagctactggccaatgtggtactggacggtggcagcaccctcatgagtggcttccctgagcgcctgagacaggagctgggccctggtgccactgtgctggggtctccccaccgtgcagttgctgcctggcttgggggctccatcatggcatcccggagctctttccagagcctgtggctcagctgccaggaatatgaggaagagggcccatgggctatctataagtaccagctg

SEQ ID NO: 55 - DNA, 4359 bp, Homo sapiens
agccgggtagaagtggaggggccgttcgaagagtcgtgagggggtgacgggttaagattcggagagagaggtgctagtggctggacttgacctggaaagaatcttctgctgactctcaacttttcctggaaaaaatggatcattcccaccatatggggatgagctatatggactccaacagtaccatgcaaccttctcaccatcacccaaccacttcagcctcacactcccatggtggaggagacagcagcatgatgatgatgcctatgaccttctactttggctttaagaatgtggaactactgttttccggtttggtgatcaatacagctggagaaatggctggagcttttgtggcagtgtttttactagcaatgttctatgaaggactcaagatagcccgagagagcctgctgcgtaagtcacaagtcagcattcgctacaattccatgcctgtcccaggaccaaatggaaccatccttatggagacacacaaaactgttgggcaacagatgctgagctttcctcacctcctgcaaacagtgctgcacatcatccaggtggtcataagctacttcctcatgctcatcttcatgacctacaacgggtacctctgcattgcagtagcagcaggggccggtacaggatacttcctcttcagctggaagaaggcagtggtagtggatatcacagagcattgccattgacatcaaactctatggcgtggccttatcgattgcagtgggaagttgttgaagacttgaagacgtgattcctgctccaatcatcccttcttgctcctctttgtgcacgtacacacacacacacacacacacacacacacacccctgctcaacagaggtttagtttacagtctctgaactaaagtagtaacctcccaaattgttttttctaataagctgagattcccatttctcttaaggagaagccacccatgagatgtcttttccttctccatcatcttagagccaagttatatgttcttgtctaatccatgtagctttttgttcaatgacttgatcatctgcttcctttttgaatttttaacagatagtaagtaaatttggtggttttttcccctgggtcagtgatggaaaggggttaacttcagccaggattgatggcagctgagggaaattcttgcccaactaaacccagaactcaaacttaacattagaaaataaggtccagggccggacacagtggcccatgcctgtaatcccagcactttggggggccaaggcaggctggatcacctgaggacaggagttcgagaccagtctggccaacatggggaaaccccgtctctactaaaaatacaaaaattagccgggcatggtggtgggcgcctgtaatcccagctactcagaaggctgaggcaggagaatcacttgaacctaggaggcggaggttgcagtgagccaagatggcgccattgcactccagcctgggtgacaagagtgaaactccatctcaaaaaaaaagaaaagaaggtccagcttttggattcaatgagtgggaaatacattgtgcctttctctagatgtgatacgttataccaaaatctttgtagtgtgcagagcggtggtttgagactaaatacaggcttagaacttgcagagtgtgtattcttggatggctgatgcatcgacttgcattcccacttaacactttgattagcatgaacttgccaatcaaaaaatgacaatcaatttgagaaaatagaaatagatatttttaaataaaaccattcacagtttactttgtcttgataccttggtttgtcccagctgaagtgaagcaagagagtttgaattaatttttccattataatgttttcgcatgtctgcctctaaaactgtgattttcaagctttagcgtgcatcagaatcacctgtagggcttgttaaaacactaattgctgggcctcaacccaaaagcccccaaagtggcacttctgagttcctgctgatgttacaagggaccacacttttgagaatctgtgctttaagctaaggaaatattgcctggtgggttggctgcctggtattgggcatggaaatttgaattgctgattggtagatggtgtgtctggacttaactcacgtagtaaatactgctgatcaatacctaatcattccacatttattgagctccacctgtgtgtatgtgtacccaagcacacatgtgtgaagggctatagccaaagtatttttactagcctgtatgaaatcactagtccttatttttaaaggtctatggtttcttggaagtagtttgattgttgagagagacctttgatctgcagtgtaaatctaccagtcatgggccagaagggcaaaagcccagctttctctttggaaagactcaggctgtggtttgttgatggccaggttttcctcaggctccaacaactgtgcttataccaagcagatcctcatcctccatataatcatctttgttattcgtgggggtttaattacattacaagtggccaaaacccctgttctcagtgaagaaccacattggatttgtattctgttcagttgtagtctacactgcagtcttattcctggttcaaactacctctttaaattgatttgtcttgtgctggtctgttaaatcctgccctccttggtgctagatccagttgtgcctcagggcagaggaaacaaaacacagctatcctgttggcctgtgttgtggttttgaagtttgtactttctctgtgggtgccagttaaatattggagagcaaggaatgtggacttgtatggctttgaaccaagagagggttatgagcctactggattgaggttaaaatccaagaaccaacatttagagctttgtgcttttctctcattccatcactttgtaatgatgatacttaacatgagcagggtgaatgacaggtactgacgaagtccaacacaaaggtataatacagcctgttgtctaaagccaaggagtcataaaaccatgagaaataaataggaatcaatagttagtagtgacattggtgctctctagaaatctcagcatgagctgctatagaataccctcccagcaacaaaacctaatcagtaaggccagctagacccaatggctcatgcctgtaatcccaacactttgggaggccaaggtgggaggatggcttgtgtccagaagttcgagaccagcctggacaacatagtgagatcctatctctataaaaaatcaaaaattagccaggcatggtggtgcatacctatagtcctggctatttgggaggctgaggcaggaggattgctttagccctggaggtcgaggctgcagtaagccatgattgcgccactgcactcagcccgggtgacaaagcaagcccctgtctcagaaaaaaagaaaattcaaggccagttaagacaaaatgctatgactttgaaattcacagaaagaaataacagtttagattaggtcttcaggtattcaggatagagataatctcctgaaaaacctgaatttcagagattcttagactggctgccaaaggatgaagctagtgaaggagaaaaagcttaaattccatcttgagctcttggattgtgataatacaatgatttcattaacttttcatttctgtatacctgttcatttggaatttaatgcttgacttctttgttcattttggatctaaacttctcttttcttccttccccattcacatctattagaagactgcatcaccatttctttggcccccttactctgttgtcctttcccttttctttcagtttttttaatcgcatgtctagtatattaagtctccatagccctcctgatgcagtagacagtgctatgctgtggatataataccaaccagaaattggcatttataaacctgttaagagactttaagcatgcttcaagaggcagttgacccactggaatttctataaggctggtacccttcccagagttacagaatcttaggtgccgtctctagtctgtgagggaggaactcccagcatccccattgcccacaaatggaatcctcactgtatccactaggagattagaaattaaggtttcttcactacttctatggtagggttgtctgaaattccctttcaggctgtgggtactggtcttgggttctagtcataaggggttccttataaggagcaggcggaggggagtacactttcatgtgatttaattttgatcctgccctctccagctgctccttcaaaagatacatcaaaagatagaaactctgggctgggcacagtggctcacacactttgggaggccaagcgggggtgcagatcacctgaggtcaggagtttgagaccagcctggc

SEQ ID NO: 56 - DNA, 1426 bp, Homo sapiens
agccgggtagaagtggaggggccgttcgaagagtcgtgagggggtgacgggttaagattcggagagagaggtgctagtggctggacttgacctggaaagaatcttctgctgactctcaacttttcctggaaaaaatggatcattcccaccatatggggatgagctatatggactccaacagtaccatgcaaccttctcaccatcacccaaccacttcagcctcacactcccatggtggaggagacagcagcatgatgatgatgcctatgaccttctactttggctttaagaatgtggaactactgttttccggtttggtgatcaatacagctggagaaatggctggagcttttgtggcagtgtttttactagcaatgttctatgaaggactcaagatagcccgagagagcctgctgcgtaagtcacaagtcagcattcgctacaattccatgcctgtcccaggaccaaatggaaccatccttatggagacacacaaaactgttgggcaacagatgctgagctttcctcacctcctgcaaacagtgctgcacatcatccaggtggtcataagctacttcctcatgctcatcttcatgacctacaacgggtacctctgcattgcagtagcagcaggggccggtacaggatacttcctcttcagctggaagaaggcagtggtagtggatatcacagagcattgccattgacatcaaactctatggcgtggccttatcgattgcagtgggaagttgttgaagacttgaagacgtgattcctgctccaatcatcccttcttgctcctctttgtgcacgtacacacacacacacacacacacacacacacacccctgctcaacagaggtttagtttacagtctctgaactaaagtagtaacctcccaaattgttttttctaataagctgagattcccatttctcttaaggagaagccacccatgagatgtcttttccttctccatcatcttagagccaagttatatgttcttgtctaatccatgtagctttttgttcaatgacttgatcatctgcttcctttttgaatttttaacagatagtaagtaaatttggtggttttttcccctgggtcagtgatggaaaggggttaacttcagccaggattgatggcagctgagggaaattcttgcccaactaaacccagaactcaaacttaacattagaagcgggtggatcacttgaggtcaggagttcaagaccagcctggccaacatggtgaaaccccgtctctactaaaaatacaaaaattagccggcgcatggtggtgggtgcctgtaatcccagctactctgcaggctgaggcaggagaatcacttgaacctaggaggcggaggttgcagtgggccgagatcgcgccattgcactccagcctgggcgacaagagcgaaact

SEQ ID NO: 57 - DNA, 1466 bp, Homo sapiens
aaatcctcggcctcggtggcggtggtggacacgtcgagccgggtagaagtggaggggccgttcgaagagtcgtgagggggtgacgggttaagattcggagagagaggtgctagtggctggacttgacctggaaagaatcttctgctgactctcaacttttcctggaaaaaatggatcattcccaccatatggggatgagctatatggactccaacagtaccatgcaaccttctcaccatcacccaaccacttcagcctcacactcccatggtggaggagacagcagcatgatgatgatggtgacctatgaccttctactttggctttaagaatgtggaactactgttttccggtttggtgatcaatacagctggagaaatggctggagcttttgtggcagtgtttttactagcaatgttctatgaaggactcaagatagcccgagagagcctgctgcgtaagtcacaagtcagcattcgctacaattccatgcctgtcccaggaccaaatggaaccatccttatggagacacacaaaactgttgggcaacagatgctgagctttcctcacctcctgcaaacagtgctgcacatcatccaggtggtcataagctacttcctcatgctcatcttcatgacctacaacgggtacctctgcattgcagtagcagcaggggccggtacaggatacttcctcttcagctggaagaaggcagtggtagtggatatcacagagcattgccattgacatcaaactctatggcgtggccttatcgattgcagtgggaagttgttgaagacttgaagacgtgattcctgctccaatcatcccttcttgctcctctttgtgcacgtacacacacacacacacacacacacacacacacccctgctcaacagaggtttagtttacagtctctgaactaaagtagtaacctcccaaattgttttttctaataagctgagattcccatttctcttaaggagaagccacccatgagatgtcttttccttctccatcatcttagagccaagttatatgttcttgtctaatccatgtagctttttgttcaatgacttgatcatctgcttcctttttgaatttttaacagatagtaagtaaatttggtggttttttcccctgggtcagtgatggaaaggggttaacttcagccaggattgatggcagctgagggaaattcttgcccaactaaacccagaactcaaacttaacattagaagcgggtggatcacttgaggtcaggagttcaagaccagcctggccaacatggtgaaaccccgtctctactaaaaatacaaaaattagccggcgcatggtggtgggtgcctgtaatcccagctactctgcaggctgaggcaggagaatcacttgaacctaggaggcggaggttgcagtgggccgagatcgcgccattgcactccagcctgggcgacaagagcgaaact

SEQ ID NO: 58 - DNA, 4395 bp, Homo sapiens
aaatcctcggcctcggtggcggtggtggacacgtcgagccgggtagaagtggaggggccgttcgaagagtcgtgagggggtgacgggttaagattcggagagagaggtgctagtggctggacttgacctggaaagaatcttctgctgactctcaacttttcctggaaaaaatggatcattcccaccatatggggatgagctatatggactccaacagtaccatgcaaccttctcaccatcacccaaccacttcagcctcacactcccatggtggaggagacagcagcatgatgatgatgcctatgaccttctactttggctttaagaatgtggaactactgttttccggtttggtgatcaatacagctggagaaatggctggagcttttgtggcagtgtttttactagcaatgttctatgaaggactcaagatagcccgagagagcctgctgcgtaagtcacaagtcagcattcgctacaattccatgcctgtcccaggaccaaatggaaccatccttatggagacacacaaaactgttgggcaacagatgctgagctttcctcacctcctgcaaacagtgctgcacatcatccaggtggtcataagctacttcctcatgctcatcttcatgacctacaacgggtacctctgcattgcagtagcagcaggggccggtacaggatacttcctcttcagctggaagaaggcagtggtagtggatatcacagagcattgccattgacatcaaactctatggcgtggccttatcgattgcagtgggaagttgttgaagacttgaagacgtgattcctgctccaatcatcccttcttgctcctctttgtgcacgtacacacacacacacacacacacacacacacacccctgctcaacagaggtttagtttacagtctctgaactaaagtagtaacctcccaaattgttttttctaataagctgagattcccatttctcttaaggagaagccacccatgagatgtcttttccttctccatcatcttagagccaagttatatgttcttgtctaatccatgtagctttttgttcaatgacttgatcatctgcttcctttttgaatttttaacagatagtaagtaaatttggtggttttttcccctgggtcagtgatggaaaggggttaacttcagccaggattgatggcagctgagggaaattcttgcccaactaaacccagaactcaaacttaacattagaaaataaggtccagggccggacacagtggcccatgcctgtaatcccagcactttggggggccaaggcaggctggatcacctgaggacaggagttcgagaccagtctggccaacatggggaaaccccgtctctactaaaaatacaaaaattagccgggcatggtggtgggcgcctgtaatcccagctactcagaaggctgaggcaggagaatcacttgaacctaggaggcggaggttgcagtgagccaagatggcgccattgcactccagcctgggtgacaagagtgaaactccatctcaaaaaaaaagaaaagaaggtccagcttttggattcaatgagtgggaaatacattgtgcctttctctagatgtgatacgttataccaaaatctttgtagtgtgcagagcggtggtttgagactaaatacaggcttagaacttgcagagtgtgtattcttggatggctgatgcatcgacttgcattcccacttaacactttgattagcatgaacttgccaatcaaaaaatgacaatcaatttgagaaaatagaaatagatatttttaaataaaaccattcacagtttactttgtcttgataccttggtttgtcccagctgaagtgaagcaagagagtttgaattaatttttccattataatgttttcgcatgtctgcctctaaaactgtgattttcaagctttagcgtgcatcagaatcacctgtagggcttgttaaaacactaattgctgggcctcaacccaaaagcccccaaagtggcacttctgagttcctgctgatgttacaagggaccacacttttgagaatctgtgctttaagctaaggaaatattgcctggtgggttggctgcctggtattgggcatggaaatttgaattgctgattggtagatggtgtgtctggacttaactcacgtagtaaatactgctgatcaatacctaatcattccacatttattgagctccacctgtgtgtatgtgtacccaagcacacatgtgtgaagggctatagccaaagtatttttactagcctgtatgaaatcactagtccttatttttaaaggtctatggtttcttggaagtagtttgattgttgagagagacctttgatctgcagtgtaaatctaccagtcatgggccagaagggcaaaagcccagctttctctttggaaagactcaggctgtggtttgttgatggccaggttttcctcaggctccaacaactgtgcttataccaagcagatcctcatcctccatataatcatctttgttattcgtgggggtttaattacattacaagtggccaaaacccctgttctcagtgaagaaccacattggatttgtattctgttcagttgtagtctacactgcagtcttattcctggttcaaactacctctttaaattgatttgtcttgtgctggtctgttaaatcctgccctccttggtgctagatccagttgtgcctcagggcagaggaaacaaaacacagctatcctgttggcctgtgttgtggttttgaagtttgtactttctctgtgggtgccagttaaatattggagagcaaggaatgtggacttgtatggctttgaaccaagagagggttatgagcctactggattgaggttaaaatccaagaaccaacatttagagctttgtgcttttctctcattccatcactttgtaatgatgatacttaacatgagcagggtgaatgacaggtactgacgaagtccaacacaaaggtataatacagcctgttgtctaaagccaaggagtcataaaaccatgagaaataaataggaatcaatagttagtagtgacattggtgctctctagaaatctcagcatgagctgctatagaataccctcccagcaacaaaacctaatcagtaaggccagctagacccaatggctcatgcctgtaatcccaacactttgggaggccaaggtgggaggatggcttgtgtccagaagttcgagaccagcctggacaacatagtgagatcctatctctataaaaaatcaaaaattagccaggcatggtggtgcatacctatagtcctggctatttgggaggctgaggcaggaggattgctttagccctggaggtcgaggctgcagtaagccatgattgcgccactgcactcagcccgggtgacaaagcaagcccctgtctcagaaaaaaagaaaattcaaggccagttaagacaaaatgctatgactttgaaattcacagaaagaaataacagtttagattaggtcttcaggtattcaggatagagataatctcctgaaaaacctgaatttcagagattcttagactggctgccaaaggatgaagctagtgaaggagaaaaagcttaaattccatcttgagctcttggattgtgataatacaatgatttcattaacttttcatttctgtatacctgttcatttggaatttaatgcttgacttctttgttcattttggatctaaacttctcttttcttccttccccattcacatctattagaagactgcatcaccatttctttggcccccttactctgttgtcctttcccttttctttcagtttttttaatcgcatgtctagtatattaagtctccatagccctcctgatgcagtagacagtgctatgctgtggatataataccaaccagaaattggcatttataaacctgttaagagactttaagcatgcttcaagaggcagttgacccactggaatttctataaggctggtacccttcccagagttacagaatcttaggtgccgtctctagtctgtgagggaggaactcccagcatccccattgcccacaaatggaatcctcactgtatccactaggagattagaaattaaggtttcttcactacttctatggtagggttgtctgaaattccctttcaggctgtgggtactggtcttgggttctagtcataaggggttccttataaggagcaggcggaggggagtacactttcatgtgatttaattttgatcctgccctctccagctgctccttcaaaagatacatcaaaagatagaaactctgggctgggcacagtggctcacacactttgggaggccaagcgggggtgcagatcacctgaggtcaggagtttgagaccagcctggc

SEQ ID NO: 59 - DNA, 3756 bp, Homo sapiens
atgaactactgcaggaatccagatgctgtggcagctccttattgttatacgagggatcccggtgtcaggtgggagtactgcaacctgacgcaatgctcagacgcagaagggactgccgtcgcgcctccgactgttaccccggttccaagcctagaggctccttccgaacaagcaccaactgagcaaaggcctggggtgcaggagtgctaccacggaaatggacagagttatcaaggcacatacttcattactgtcacaggaagaacctgccaagcttggtcatctatgacaccacactcgcatagtcggaccccagcatactacccaaatgctggcttgatcaagaactactgccgaaatccagatcctgtggcagccccttggtgttatacaacagatcccagtgtcaggtgggagtactgcaacctgacacgatgctcagatgcagaatggactgccttcgtccctccgaatgttattctggctccaagcctagaggctttttttgaacaagcactgactgaggaaacccccggggtacaggactgctactaccattatggacagagttaccgaggcacatactccaccactgtcacaggaagaacttgccaagcttggtcatctatgacaccacaccagcatagtcggaccccagaaaactacccaaatgctggcctgaccaggaactactgcaggaatccagatgctgagattcgcccttggtgttacaccatggatcccagtgtcaggtgggagtactgcaacctgacacaatgcctggtgacagaatcaagtgtccttgcaactctcacggtggtcccagatccaagcacagaggcttcttctgaagaagcaccaacggagcaaagccccggggtccaggattgctaccatggtgatggacagagttatcgaggctcattctctaccactgtcacaggaaggacatgtcagtcttggtcctctatgacaccacactggcatcagaggacaacagaatattatccaaatggtggcctgaccaggaactactgcaggaatccagatgctgagattagtccttggtgttataccatggatcccaatgtcagatgggagtactgcaacctgacacaatgtccagtgacagaatcaagtgtccttgcgacgtccacggctgtttctgaacaagcaccaacggagcaaagccccacagtccaggactgctaccatggtgatggacagagttatcgaggctcattctccaccactgttacaggaaggacatgtcagtcttggtcctctatgacaccacactggcatcagagaaccacagaatactacccaaatggtggcctgaccaggaactactgcaggaatccagatgctgagattcgcccttggtgttataccatggatcccagtgtcagatgggagtactgcaacctgacgcaatgtccagtgatggaatcaactctcctcacaactcccacggtggtcccagttccaagcacagagcttccttctgaagaagcaccaactgaaaacagcactggggtccaggactgctaccgaggtgatggacagagttatcgaggcacactctccaccactatcacaggaagaacatgtcagtcttggtcgtctatgacaccacattggcatcggaggatcccattatactatccaaatgctggcctgaccaggaactactgcaggaatccagatgctgagattcgcccttggtgttacaccatggatcccagtgtcaggtgggagtactgcaacctgacacgatgtccagtgacagaatcgagtgtcctcacaactcccacagtggccccggttccaagcacagaggctccttctgaacaagcaccacctgagaaaagccctgtggtccaggattgctaccatggtgatggacggagttatcgaggcatatcctccaccactgtcacaggaaggacctgtcaatcttggtcatctatgataccacactggcatcagaggaccccagaaaactacccaaatgctggcctgaccgagaactactgcaggaatccagattctgggaaacaaccctggtgttacacaaccgatccgtgtgtgaggtgggagtactgcaatctgacacaatgctcagaaacagaatcaggtgtcctagagactcccactgttgttccagttccaagcatggaggctcattctgaagcagcaccaactgagcaaacccctgtggtccggcagtgctaccatggtaatggccagagttatcgaggcacattctccaccactgtcacaggaaggacatgtcaatcttggtcatccatgacaccacaccggcatcagaggaccccagaaaactacccaaatgatggcctgacaatgaactactgcaggaatccagatgccgatacaggcccttggtgttttaccatggaccccagcatcaggtgggagtactgcaacctgacgcgatgctcagacacagaagggactgtggtcgctcctccgactgtcatccaggttccaagcctagggcctccttctgaacaagactgtatgtttgggaatgggaaaggataccggggcaagaaggcaaccactgttactgggacgccatgccaggaatgggctgcccaggagccccatagacacagcacgttcattccagggacaaataaatgggcaggtctggaaaaaaattactgccgtaaccctgatggtgacatcaatggtccctggtgctacacaatgaatccaagaaaactttttgactactgtgatatccctctctgtgcatcctcttcatttgattgtgggaagcctcaagtggagccgaagaaatgtcctggaagcattgtaggggggtgtgtggcccacccacattcctggccctggcaagtcagtctcagaacaaggtttggaaagcacttctgtggaggcaccttaatatccccagagtgggtgctgactgctgctcactgcttgaagaagtcctcaaggccttcatcctacaaggtcatcctgggtgcacaccaagaagtgaacctcgaatctcatgttcaggaaatagaagtgtctaggctgttcttggagcccacacaagcagatattgccttgctaaagctaagcaggcctgccgtcatcactgacaaagtaatgccagcttgtctgccatccccagactacatggtcaccgccaggactgaatgttacatcactggctggggagaaacccaaggtacctttgggactggccttctcaaggaagcccagctccttgttattgagaatgaagtgtgcaatcactataagtatatttgtgctgagcatttggccagaggcactgacagttgccagggtgacagtggagggcctctggtttgcttcgagaaggacaaatacattttacaaggagtcacttcttggggtcttggctgtgcacgccccaataagcctggtgtctatgctcgtgtttcaaggtttgttacttggattgagggaatgatgagaaataattaattggacgggagacagagtgaagcatcaacctacttagaagctgaaacgtgggtaaggatttagcatgctggaaataatagacagcaatcaaacgaagacactgttcccagctaccagctatgccaaaccttggcatttttggtatttttgtgtataagcttttaaggtctgactgacaaattctgtattaaggtgtcatagctatgacatttgttaaaaataaactctgcacttattttgatttga

SEQ ID NO: 60 - DNA, 985 bp, Homo sapiens
gcgggagctcaggaccggcgccttctccttgcttctgggggtcgtggccttgctcccgctgtgcgggaaaagaatccaggcccttccacgcgcgtgtgggtgcgggggccccgaagtgctcgtggttccccgctaggtctccgctggggcaggaaccggaatcatgggtgggaccaccagcacccgccgggtcaccttcgaggcggacgagaatgagaacatcaccgtggtgaagggcatccggctttcggaaaatgtgattgatcgaatgaaggaatcctctccatctggttcgaagtctcagcggtattctggtgcttatggtgcctcagtttctgatgaagaattgaaaagaagagtagctgaggagctggcattggagcaagccaagaaagaatccgaagatcagaaacgactaaagcaagccaaagagctggaccgagagagggctgctgccaatgagcagttaaccagagccatccttcgggagaggatatgtagcgaggaggaacgcgctaaggcaaagcacctgataaaagtggagctgctctgggtgaaacctggagtgttgactgcttagcctccacttcggccttcctagaaacccagatgttactcctcggaacctttagtcctcattggagcacagttgggaactcactggacagggaaaatgggaccatggaatggagaactttgaactgaagagtgagggggattttcctagttcactaggcaattgggaaacactaaaactttctaagaagaaggctcatttctagtctctcccattctttaccttagtcacttctctgaaagaccaacccatgaccagctgcaaacagagaacatgaaaggaagtccatgcgtaatgaatcagtttcttcagtgacaaatctggggtcccggttgcatgggcaaatagtgaagccagaatagaggtggtagaccaagaaagaaatgtcagtggactgactggcagctg

SEQ ID NO: 61 - DNA, 1363 bp, Homo sapiens
ctaaattggcatggtattggattgctgactagaaatacttctatctcaaccttataaccaactggctgttttaccttggtttctgatgaagaattgaaaagaagagtagctgaggagctggcattggagcaagccaagaaagaatccgaagatcagaaacgactaaagcaagccaaagagctggaccgagagagggctgctgccaatgagcagttaaccagagccatccttcgggagaggatatgtagcgaggaggaacgcgctaaggcaaagcacctggctaggcagctggaagagaaagaccgagtgctaaagaagcaggatgcattctacaaagaacagctggctagactggaggagaggagctcagagttctacagagtcaccactgaacaatatcagaaagctgctgaagaggtggaagcaaagttcaagcgatatgagtctcatccagtctgtgctgatctgcaggccaaaattcttcagtgttaccgtgagaacacccaccagaccctcaaatgctccgctctggccacccagtatatgcactgtgtcaatcatgccaaacagagcatgcttgagaagggaggataaaaactttcagaatgagcaaaacaccatcaacgttaattccagagatggaacattttttttcctagtgagaaaacaacccatttgaagagaagaccactaatgagaagaccactaaagagagacatcaagaatggattcagcagaatcatttcacgttttgaacagcagcagtttgaagggccaaagccttgatcagggatcagtcattaaaggacactcttgagtattagtaaaccctcttatgatgattaaaagagaagggcagccctctccaccttttggtactttctattcaacttgcactgaccataaaatgtttctcttctgaacaagccccatcatttggtgaacctccaccctaacaaagtaggatggggttgggggctaaattaattggagtggggcgaggagagagccagaaaacatagatccgagggcagcagtgctgggtggagagagccagaaaacagatctggaggcagcagtgctggatggaattgtctaggctgtggcatgttggttttgtctttcttttctcctttgattatgtaagagctatttcattataacttattatggtgattatacaggcaagaagacaaaaaggagagaaaatgtacctcttctactggaataatgtttatgattacaagtgagataaggtatttttatcaatatgaaggcaaccttggctgataaaacctctatagtgaatactcacatctttacttcactcactatcaataataaatatattttctgacaaaga

SEQ ID NO: 62 - DNA, 1740 bp, Homo sapiens
accacctgttgccatagcatccgggtcgggtgaaccaatccgggcgccctcgccgaacagaggcgggcagttcgcatcgccgaccaacctgaggcgtttttgttgtggcgcgtgaccggaggaggcgggagctcaggaccggcgccttctccttgcttctgggggtcgtggccttgctcccgctgtgcgggaaaagaatccaggcccttccacgcgcgtgtgggtgcgggggccccgaagtgctcgtggttccccgctaggtctccgctggggcaggaaccggaatcatgggtgggaccaccagcacccgccgggtcaccttcgaggcggacgagaatgagaacatcaccgtggtgaagggcatccggctttcggaaaatgtgattgatcgaatgaaggaatcctctccatctggttcgaagtctcagcggtattctggtgcttatggtgcctcagtttctgatgaagaattgaaaagaagagtagctgaggagctggcattggagcaagccaagaaagaatccgaagatcagaaacgactaaagcaagccaaagagctggaccgagagagggctgctgccaatgagcagttaaccagagccatccttcgggagaggatatgtagcgaggaggaacgcgctaaggcaaagcacctggctaggcagctggaagagaaagaccgagtgctaaagaagcaggatgcattctacaaagaacagctggctagactggaggagaggagctcagagttctacagagtcaccactgaacaatatcagaaagctgctgaagaggtggaagcaaagttcaagcgatatgagtctcatccagtctgtgctgatctgcaggccaaaattcttcagtgttaccgtgagaacacccaccagaccctcaaatgctccgctctggccacccagtatatgcactgtgtcaatcatgccaaacagagcatgcttgagaagggaggataaaaactttcagaatgagcaaaacaccatcaacgttaattccagagatggaacattttttttcctagtgagaaaacaacccatttgaagagaagaccactaatgagaagaccactaaagagagacatcaagaatggattcagcagaatcatttcacgttttgaacagcagcagtttgaagggccaaagccttgatcagggatcagtcattaaaggacactcttgagtattagtaaaccctcttatgatgattaaaagagaagggcagccctctccaccttttggtactttctattcaacttgcactgaccataaaatgtttctcttctgaacaagccccatcatttggtgaacctccaccctaacaaagtaggatggggttgggggctaaattaattggagtggggcgaggagagagccagaaaacatagatccgagggcagcagtgctgggtggagagagccagaaaacagatctggaggcagcagtgctggatggaattgtctaggctgtggcatgttggttttgtctttcttttctcctttgattatgtaagagctatttcattataacttattatggtgattatacaggcaagaagacaaaaaggagagaaaatgtacctcttctactggaataatgtttatgattacaagtgagataaggtatttttatcaatatgaaggcaaccttggctgataaaacctctatagtgaatactcacatctttacttcactcactatcaataataaatatattttctgacaaaga

SEQ ID NO: 63 - DNA, 4932 bp, Homo sapiens
cggccgcggagggaggcgcaggggccgcggccagccgggcgctgcagcagtgcgggcagctccagaagctcatcgacatctccatcggcagcctgcgcgggctgcgcaccaagtgcgctgtgtccaacgacctcacccagcaggagatacggaccctggaggcgaagctggtccgttacatttgtaagcagaggcagtgcaagctgagcgtggctcccggtgagaggaccccagagctcaacagctacccccgcttcagcgactggctgtacactttcaacgtgaggccggaggtggtgcaggaggggagcacaaggaggactccagttggagttcattggatgcgcggcgggaaagtggctcagggccttccacggacaccctctcagcagccagcctgccctggcccccagggagctcccagctgggcagagcaggcaacagcgcccagggcccacgctccatctccgtgtcagctctgcccgcctcagactcccccacccccagcttcagtgagggcctctcagacacctgtattcccctgcacgccagcggccggctgaccccccgtgccctgcacagcttcatcaccccgcccaccacaccccagctgcgacggcacaccaagctgaagccaccacggacgccccccccacccagccgcaaggtcttccagctgctgcccagcttccccacactcacccggagcaagtcccatgagtctcagctggggaaccgcattgatgacgtctcctcgatgagagggagaaatctctcgcatggatccccacagatggtacggagggatatcgggctgtcggtgacgcacaggttctccaccaagtcctggctgtcgcaggtctgccacgtgtgccagaagagcatgatatttggagtgaagtgcaagcattgcaggttgaagtgtcacaacaaatgtaccaaagaagcccctgcctgtagaatatccttcctgccactaactcggcttcggaggacagaatctgtcccctcggacatcaacaacccggtggacagagcagccgaaccccattttggaaccctccccaaagcactgacaaagaaggagcaccctccggccatgaatcacctggactccagcagcaacccttcctccaccacctcctccacaccctcctcaccggcgcccttcccgacatcatccaacccatccagcgccaccacgccccccaacccctcacctggccagcgggacagcaggttcaacttcccagctgcctacttcattcatcatagacagcagtttatctttccagacatttcagcctttgcacacgcagccccgctccctgaagctgccgacggtacccggctcgatgaccagccgaaagcagatgtgttggaagctcacgaagcggaggctgaggagccagaggctggcaagtcagaggcagaagacgatgaggacgaggtggacgacttgccgagctctcgccggccctggcggggccccatctctcgcaaggccagccagaccagcgtgtacctgcaggagtgggacatccccttcgagcaggtagagctgggcgagcccatcgggcagggccgctggggccgggtgcaccgcggccgctggcatggcgaggtggccattcgcctgctggagatggacggccacaaccaggaccacctgaagctcttcaagaaagaggtgatgaactaccggcagacgcggcatgagaacgtggtgctcttcatgggggcctgcatgaacccgccccacctggccattatcaccagcttctgcaaggggcggacgttgcactcgtttgtgagggaccccaagacgtctctggacatcaacaagacgaggcaaatcgctcaggagatcatcaagggcatgggatatcttcatgccaagggcatcgtacacaaagatctcaaatctaagaacgtcttctatgacaacggcaaggtggtcatcacagacttcgggctgtttgggatctcaggcgtggtccgagagggacggcgtgagaaccagctaaagctgtcccacgactggctgtgctatctggcccctgagattgtacgcgagatgacccccgggaaggacgaggatcagctgccattctccaaagctgctgatgtctatgcatttgggactgtttggtatgagctgcaagcaagagactggcccttgaagaaccaggctgcagaggcatccatctggcagattggaagcggggaaggaatgaagcgtgtcctgacttctgtcagcttggggaaggaagtcagtgagatcctgtcggcctgctgggctttcgacctgcaggagagacccagcttcagcctgctgatggacatgctggagaaacttcccaagctgaaccggcggctctcccaccctggacacttctggaagtcagctgacattaacagcagcaaagttgtaccccggtttgaaaggtttggcttgggcgtcctggagtccagtaatccaaagatgtagccagccatatggtttttcgctgctgatctctttctttttaaaatgtgtttctgaaacatcccaacaaccaccacgacaaaaaaacactgcctgcccagcgctgcaaaccaggagcacacgtcctagattcagactgttggccataaaccccactcgggagatggagctgcacctgctatttcttaaaatgacaccaccaacaaccaaacctgtcatgacagacagcaaatgtttacacgtatatttctcctgagtgaacctgatgttttacaataggtaataataaaaacagtctgtgcagatgcactggcactgacggccaggatggcggaaatggccatcccctctgaggaccttgtaggcggtgagggacccatgctgggccagaaggaagacaaacatggtaattgcagctgttcttggggtagggcggggagcccagaaggtctgatctggcctctgctttttggcccaagactccatcagggaaatctatctagggctctccccttgtcctttcaaagggatactgccccttcctcgtcttgcagaggaaaccctggctaggaactgagctagtttatggagtctggaattcctggagagcttgggttcaccttctcacccctgtaatccaggctgctcctgctggaaaagtagaaacagaatccaaaaaaggtctggactcacccggtggttcccagccagggtttctgctgcaaggtgaggaaacatccatggcttgtacagatgtgagtctttgatgaagcccccaggcaggcaccaaggtgatgggactcagggccttggcttttagatacatcccagtccctgactgacatctgaccatgagggctggatgggtgggaacaaggaggagtagatggcaaaagtacctgagcccacttcccagccacagggtgaccctggcactgtaaaaaccctttgtcagtcatgccagaaggttctagaactgcccacctcttccatttcagtcctgctgaaaccccttagcctatttccgactcctctgtccatgctctgagttcagctgggcagtgtgtgggctatcacccctttcatttagacctacctagctggcccccatctgcagagccttccttagcaccattaggccttctacttgtgtccatttgaagcaggaggggctggatttggaaaagtctttgaagtgagagcaccacgcttgtcttcgttagaaactcttaactgcagaaaaaagttccagatggcaagggagcccttaagtggagattaggttgcattagactccaaaaccagaaaggaaaaagggtgatgggagtggagacgtgattggattcaggcccagaacctgtgaccatgctctgagctcagacttggggagggaggggtgtggctcccaccccttccagttaagacctgcctagcagagccccagtctccagccccttccctagcaccagagtctggtcaaaatgccacagaaaatgagctgctctgccagcaagctgtggagctgcctcctctccaggcctggcatcccttggtcagcccctcctgggagggcacagccgtattacagtgccagtgtgcctggccatcagcatcttcacccttcccagtctgtgtggggaggctgtaaaccccgtggattcagctccgtgtggagtttctgtgctatggtgggactgctcattttgccccatcatccctttggcctcccacacacctgccccttcccagggatcacgtgtgtctccagcctttcacctttctattgcaatggtggcctttgtccaggcaagagcaggcctgatggatgtactggtgagccccacagttggatgtcagctcagccgtccaactgggaggaacagtaggctcagttcctccctgacccctgacaccaggccgcagtgggcatgcacaggcccacagaaagtcagtctgggttttgcttttctcgtgagcatcacagttaaagaagcgctcattgagcaactacagtgcacttggtcttctgcaagtgctgggcacctagagataggaacagtcatggtccctgctcttaaggaactgatgacctggtggggccctgttgtcttcaaggaacccagaagccactgggccccaaaggtggaactgaaggactgggggcagctggctctcagcctgccacctctgcactgcctgcctttaaagaaccccaccccaccccatgatggccccctctgttccccttgtatttcagtgactgtgaattgaggttaggaaggcacacctgcccttctgtgtgctctctccacacgaaggatgacagatactgtgaattcagccctcacggccaactgtgaaggggatggagaaggctgggagggctcggggagagctcttaggggctgcggaagtccccacgggggtctgagagtggagcccaa

SEQ ID NO: 64 - DNA, 306 bp, Homo sapiens
atggatagagcagcgctgcgcgcggcggcgatgggagagaagaaggagggcggtggcgggggggatgcggcggccgcggagggaggcgcaggggccgcggccagccgggcgctgcagcagtgcgggcagctccagaagctcatcgacatctccatcggcagcctgcgcgggctgcgcaccaagtgcgctgtgtccaacgacctcacccagcaggagatacggaccctggagattggatttaggcttaggaaggattatgctgggaagcaagcctttggtgggaagatgaaactgtttaaagggttc

SEQ ID NO: 65 - DNA, 4768 bp, Homo sapiens
cggccgcatccttgccgcccgccccggcccagccgcgtcccggagccgtcgggcatggagccgtggaagcagtgcgcgcagtggctcatccattgcaaggtgctgcccaccaaccaccgggtgacctgggactcggctcaggtgttcgaccttgcgcagaccctccgcgatggagtcctgctctgccagctgcttaacaacctccgggcgcactccatcaacctgaaggagatcaacctgaggccgcagatgtcccagtttctctgtttgaagaacataaggacatttctcacggcctgttgtgagacgtttggaatgaggaaaagtgaacttttcgaggcatttgacttgtttgatgttcgtgactttggaaaggttatagaaacattatcacgactttctcgaacacctatagcattggccacaggaatcaggcccttcccaacagaagaaagcattaatgatgaagacatctacaaaggccttcctgatttaatagatgaaacccttgtggaagatgaagaagatctctatgactgtgtttatggggaagatgaaggtggagaagtctatgaggacttaatgaaggcagaggaagcacatcagcccaaatgtccagaaaatgatatacgaagttgttgtctagcagaaattaagcagacagaagaaaaatatacagaaactttggagtcaatagaaaaatatttcatggcaccactaaaaagatttctgacagcagcagaatttgattcagtattcatcaacattcctgaacttgtaaaacttcatcggaacctaatgcaagagattcatgattccattgtaaataaaaatgaccagaacttgtaccaagtttttattaactacaaggaaagattggttatttacgggcagtactgcagtggagtggagtcagccatctctagtttagactacatttctaagtcaaaagaagatgtcaaactgaaattagaggaatgttccaaaagagcaaataatgggaaatttactcttcgagacttgcttgtggttcctatgcaacgtgttttaaagtaccaccttctcctccaggaactggtcaaacataccactgatccgactgagaaggcaaatctgaaactggctcttgatgccatgaaggacttggcacaatatgtgaatgaagtgaaaagagataatgagacccttcgtgaaattaaacagtttcagctatctatagagaatttgaaccaaccagttttgctttttggacgacctcagggagatggtgaaattcgaataaccactctagacaagcataccaaacaagaaaggcatatcttcttatttgatttggcagtgatcgtatgtaagagaaaaggtgataactatgaaatgaaggaaataatagatcttcagcagtacaagatagccaataatcctacaaccgataaagaaaacaaaaagtggtcttatggcttctacctcatccatacccaaggacaaaatgggttagaattttattgcaaaacaaaagatttaaagaagaaatggctagaacagtttgaaatggctttgtctaacataagaccagactatgcagactccaatttccacgacttcaagatgcataccttcactcgagtcacatcctgcaaagtctgccagatgctcctgaggggaacattttatcaaggctatttatgttttaagtgtggagcgagagcacacaaagaatgtttgggaagagtagacaattgtggcagagttaattctggtgaacaagggacactcaaactaccagagaaacggaccaatggactgcgaagaactcctaaacaggtggatccaggtttaccaaagatgcaggtcattaggaactattctggaacaccacccccagctctgcatgaaggaccccctttacagctccaggccggggataccgttgaacttctgaaaggagatgcacacagtctgttttggcagggcagaaatttagcatctggagaggttggattttttccaagtgatgcagtcaagccttgcccatgtgtgcccaaaccagtagattattcttgccaaccctggtatgctggagcaatggaaagattgcaagcagagaccgaacttattaatagggtaaatagtacttaccttgtgaggcacaggaccaaagagtcaggagaatatgcaattagcattaagtacaataatgaagcaaagcacatcaagattttaacaagagatggcttttttcacattgcagaaaatagaaaatttaaaagtttaatggaacttgtggagtactacaagcatcattctctcaaggaagggttcagaaccttagatacaactctgcagtttccatacaaggagccagaacattcagctggacagaggggtaatagagcaggcaacagcttgttaagtccaaaagtgctgggcattgccatcgctcggtatgacttctgtgcaagagatatgagagagttgtccttgttgaaaggagatgtggtgaagatttacacaaagatgagtgcaaatggctggtggagaggagaagtaaatggcagggtgggctggtttccatccacatatgtggaagaggatgaataaattcaaatcccgtgttgcaccctgcaccaaaaatttcagagaagggataaatagaagcctgcacagcatcgtgaattaactgaagtgtttaaaaagctgcatttctggctgttcaacatcctccctccttagcccctcctaagtcttaatgctgagatttctaaagatgctggtactgacagattaatggcttgcctagagctgtgcaagaaacagcctgccagtctgtcattgtcagggaccagggcaaaaccaagagctgttcttcccagaagagccctgcaaacacattggttcgtgcttccctttacttcttctggtcagataccatgaatgccagtcatcagtaaatcttaatacacttttgctttattctcacatgccattcaccagattatttgatggtacaaagaagcagaagtgtaattttccttttcccagcatgacgaaaaattggagttctgccatttgagcagcttactggaaagatccagccttacttgtcttaaattgtccaacaaggtgactcattgcccggcaaacacttttaccctcagatgttactcatgatattataaaatatgaggccagtgctcaggtttgcatcataagtgagctatccctgaagggttttaattacttatttggtgtcctgattatatttgcaaacttctttataaaaggtgaaaaaagcacacaaaagagagggtgtcttcatattaaaccttcacaaccttcatgatttcataggattattttggaaatatagcacttgactttatgaaaggatctgggctaggtatattaggggtagttgccaataacctgaagaagctggcattgtttacagaaacagatcaagggctataatttatgtcattttatagcagcagtatctattaatacatgccttttcctcccatccacctcccccgcacacacacaaagatgacctgggacatgatttttttattcccacattttcttggagcacaaacaactttgttgaggattttggaaggaaagcacaactgggtcctttattcatttctgggacagaaagagggtcagtggacttttgtgggcctccagcttctctcagagtctccccctctgcagcccatcctgggagtgtattaactggagggaagatgggtcttgcagtacatttgttttgcccagccatcactcttttttgtgaggagcctaaatacattcttcctggggtccagagtccccattcaaggcagtcaagttaagacactaacttggccctttcctgatggaaatatttcctccatagcagaagttgtgttctgacaagactgagagagttacatgttgggaaaaaaaagaagcattaacttagtagaactgaaccaggagcattaagttctgaaattttgaatcatctctgaaatgaagcaggtgtagcctgccctctcatcaatccgtctgggtgccagaactcaaggttcagtggacacatccccctgttagagaccctcatgggctaggacttttcatctaggatagattcaagacctttacctcagaattatgtaaactgtgattgtgttttagaaaaattattatttgctaaaaccatttaagtctttgtatatgtgtaaatgatcacaaaaatgtattttataaaatgttctgtacaataaagttacacctcaaagtgtactcttggaatggattctttcctgtaaagtcttatctgcgactctgtctcgggaatgttttgtctgttgccgtcagccgaactttgttatggagggagcagcctcacacaagcagaaacactcctgtggatggtattgtagcatgtattgtttattttagtcaatagaccctctccttataaatggtgtttagtcttcctgttgcatttcatgggcctgggggtttcctagcagaggatattggagcccctttttgtgacattaccaattacatctttgtccacgtttaatactttgttttggaaaatttaaatgctgcagatttgtgtagagttctaataccaaagacagaagtaaatgttttccatatactttgtcttgcctgtatgcagccctcgtgtaatacggtgaattagagtggtatttcactttgtattattttgtaaatatgtcaatataataaatagtgactaaattga

SEQ ID NO: 66 - DNA, 3107 bp, Homo sapiens
aaagcagtggtgttttaccactctgcagagaaagctaaggttgctaaccaaacaaaataactttacactgacaatgccaatttttacatttctttcagaacaagggacactcaaactaccagagaaacggaccaatggactgcgaagaactcctaaacaggtggatccaggtttaccaaagatgcaggtcattaggaactattctggaacaccacccccagctctgcatgaaggaccccctttacagctccaggccggggataccgttgaacttctgaaaggagatgcacacagtctgttttggcagggcagaaatttagcatctggagaggttggattttttccaagtgatgcagtcaagccttgcccatgtgtgcccaaaccagtagattattcttgccaaccctggtatgctggagcaatggaaagattgcaagcagagaccgaacttattaatagggtaaatagtacttaccttgtgaggcacaggaccaaagagtcaggagaatatgcaattagcattaagtacaataatgaagcaaagcacatcaagattttaacaagagatggcttttttcacattgcagaaaatagaaaatttaaaagtttaatggaacttgtggagtactacaagcatcattctctcaaggaagggttcagaaccttagatacaactctgcagtttccatacaaggagccagaacattcagctggacagaggggtaatagagcaggcaacagcttgttaagtccaaaagtgctgggcattgccatcgctcggtatgacttctgtgcaagagatatgagagagttgtccttgttgaaaggagatgtggtgaagatttacacaaagatgagtgcaaatggctggtggagaggagaagtaaatggcagggtgggctggtttccatccacatatgtggaagaggatgaataaattcaaatcccgtgttgcaccctgcaccaaaaatttcagagaagggataaatagaagcctgcacagcatcgtgaattaactgaagtgtttaaaaagctgcatttctggctgttcaacatcctccctccttagcccctcctaagtcttaatgctgagatttctaaagatgctggtactgacagattaatggcttgcctagagctgtgcaagaaacagcctgccagtctgtcattgtcagggaccagggcaaaaccaagagctgttcttcccagaagagccctgcaaacacattggttcgtgcttccctttacttcttctggtcagataccatgaatgccagtcatcagtaaatcttaatacacttttgctttattctcacatgccattcaccagattatttgatggtacaaagaagcagaagtgtaattttccttttcccagcatgacgaaaaattggagttctgccatttgagcagcttactggaaagatccagccttacttgtcttaaattgtccaacaaggtgactcattgcccggcaaacacttttaccctcagatgttactcatgatattataaaatatgaggccagtgctcaggtttgcatcataagtgagctatccctgaagggttttaattacttatttggtgtcctgattatatttgcaaacttctttataaaaggtgaaaaaagcacacaaaagagagggtgtcttcatattaaaccttcacaaccttcatgatttcataggattattttggaaatatagcacttgactttatgaaaggatctgggctaggtatattaggggtagttgccaataacctgaagaagctggcattgtttacagaaacagatcaagggctataatttatgtcattttatagcagcagtatctattaatacatgccttttcctcccatccacctcccccgcacacacacaaagatgacctgggacatgatttttttattcccacattttcttggagcacaaacaactttgttgaggattttggaaggaaagcacaactgggtcctttattcatttctgggacagaaagagggtcagtggacttttgtgggcctccagcttctctcagagtctccccctctgcagcccatcctgggagtgtattaactggagggaagatgggtcttgcagtacatttgttttgcccagccatcactcttttttgtgaggagcctaaatacattcttcctggggtccagagtccccattcaaggcagtcaagttaagacactaacttggccctttcctgatggaaatatttcctccatagcagaagttgtgttctgacaagactgagagagttacatgttgggaaaaaaaagaagcattaacttagtagaactgaaccaggagcattaagttctgaaattttgaatcatctctgaaatgaagcaggtgtagcctgccctctcatcaatccgtctgggtgccagaactcaaggttcagtggacacatccccctgttagagaccctcatgggctaggacttttcatctaggatagattcaagacctttacctcagaattatgtaaactgtgattgtgttttagaaaaattattatttgctaaaaccatttaagtctttgtatatgtgtaaatgatcacaaaaatgtattttataaaatgttctgtacaataaagttacacctcaaagtgtactcttggaatggattctttcctgtaaagtcttatctgcgactctgtctcgggaatgttttgtctgttgccgtcagccgaactttgttatggagggagcagcctcacacaagcagaaacactcctgtggatggtattgtagcatgtattgtttattttagtcaatagaccctctccttataaatggtgtttagtcttcctgttgcatttcatgggcctgggggtttcctagcagaggatattggagcccctttttgtgacattaccaattacatctttgtccacgtttaatactttgttttggaaaatttaaatgctgcagatttgtgtagagttctaataccaaagacagaagtaaatgttttccatatactttgtcttgcctgtatgcagccctcgtgtaatacggtgaattagagtggtatttcactttgtattattttgtaaatatgtcaatataataaatagtgactaaattga

SEQ ID NO: 67 - DNA, 2871 bp, Homo sapiens
ggggcaggatggtgaatctggagtccatgcacacagatatcaagatgagtggggatgtagccgattccacggatgctcgcagcactctcagccaggtggagccaggaaatgatcgaaatggcctagatttcaacaggcagattaaaaccgaagatctcagtgactccctgcagcagaccctctcccatcggccatgccacctgagtcaaggacctgccatgatgtccggaaaccaaatgtctgggctaaatgccagcccatgtcaggacatggcttccctccatccgctccagcagcttgtgctggttcccggccacttacagtctgtatcccagttcctgctatctcagacccagcctgggcagcaaggtctgcagccaaatctcctcccctttccacagcaacaaagcggtctcctcctcccacagactgggccgggactggcatcccaggcatttgggcgccctgggctgccaggatcctctttagaaccccacctggaagcatcccagcatctcccagtgcccaagcatctacccagctctggaggggccgatgagcccagtgacctcgaggagctggagaagtttgccaagaccttcaagcagaggcgcattaagctgggcttcacacagggagatgtggggctggcgatgggaaagctgtatggcaacgacttcagccagaccaccatctcacgatttgaggccctcaacctgagcttcaagaacatgtgcaagctcaagcccctgctggagaagtggctgaatgatgcagagtcctctccgtcagacccctcagtgagcacgcccagctcctaccccagcctcagtgaagtatttggtaggaagagaaagaaacggaccagcatcgagaccaacatccgcctgactctggagaagaggtttcaagataacccaaaacccagctcggaggagatctccatgattgcagagcagttgtccatggagaaggaggtggtgagggtctggttctgcaaccgacgccaaaaggagaagcgaatcaactgccctgtggccacacccatcaaaccacctgtctacaactcccggctggtatctccctcagggtctctgggccccctctctgtccctcctgtccacagtaccatgcctggaacagtaacgtcatcctgttcccctgggaacaacagcaggccttcatctcctggctcaggactccacgccagcagccccactgcatctcaaaataactccaaagcagcagtgaactccgcctccagttttaactcttcaggatcttggtaccgatggaatcattccacctacctccactgagaccaaaaagtttctcctactccagctggccctgtattccccctggaaggaagggaatcatgccttctatatacagacagattgccttcagaagagtggaagaaaatctccactatcaatgaacccagactcttgtcttcttcaagagcaagggcctccggagatccaaactgtgattgaaccaagtgcagactcctaatgctcttgaaatacacagcccctcctaggagcttaccattttcaccttccttgcctatgcccttgccttctagttccaaatattttagccagcttcactgtggcaatagtctttcagagaaaagacttcttgctgttattctccaactcatccgtgggcttctggggacagccatttggctggggtgccaaacaccagaaggggagataatagttttgactctgaacttggccacaacccctgaactgatcccaaaatctgtgaaaagatttgaatctgatatctccaccaaagccttgatgttttctctgtacagctaagttttctgatggaatcttcatctcaccccattttctttttaacctcgcccccttttctacaatcaaatccattcattattgcgccctccaggtcccctcctttttgcagaaggtgtaaaagagctgcccttggtgggtgccctgggcatgttgcaacgcctgctggtgcccttctgtctgtccacgtctgcctagggctcaggagtgcttgttctttcccttcctccctgtgtttctctttatcctgtcccctctcctttctcctggcagcagaaaaggaagaacacaagagcaaacacacaacaatgatggtggcaaagtacctgtatatagccctttcccattttttgcattatgttcttaactccttaatgtggaattttccagcaaaatgtttaactcaggtgtgatttttgaaaatgtctctgtaatattttatcttctttaaaaaaaagggggggaaataccaaagtgtgaaatactgtgctaccttccagagttcccacatgggctgggatttttttttctttttcttttttttttttttttttgagacagtcttgctccagcccaggctggagtgcagtggcatgatcttggctcactgcatgctctgccacttgggttcaagcgattctcctgcctcagcctctcaagtagcgggattacaggcgcccaccaccaaaaattagcccagctaatttttgtatttttagtagagatggggtttcaccatgttggtcaggctggtcttgaactcctgacctcctgatccacccacctcagcgtcccgaagtgctgggattacaggtgtgagccaccgcgcctggcctgggctgggaatctttgttgacttctttgggaacattatctctagagtctgcttttttgtgggccagtttgtagagatgtaacatgaagccattccagaaatggtaacttaaaaaaaaaaagactacatgtctaggaaactgttgagattcaaaggaatctcactgttcctaaataaatgtgtatagtgattatgaaaagt

SEQ ID NO: 68 - DNA, 3161 bp, Homo sapiens
actttgggtgtgtttcaaatattagtctgatttttgcttgagaaaatatttgtattgatatgtaagtttgcatttgactacattggtaaggtgttttcccccattgaaactaatattttctattttcaagaaaaaagcagcaagcctcggcagcagtcaatcctccagaacctatgctggtggaacagcctcggccaccaaggtgtcagcttcctctggtgcaaccagcaagtcttccagtatgaatcccacagaaaccaagataaaataaaattatacctggggctgtgctcttatattaggccattccagtcagccaacagatggaaggaccacatcttcctaacaagaaaaaacacaaaaaacaggctgtaaaaacagaacctgagaagaagtcacagtcaaccaagctgtctgtggttcatgagaaaaaatcccaagaaggaaagccaaaagaacacacagagccaaaaagcctacccaagcaggcatcagatacaggaagtaacgatgctcacaataaaaaagcagtttccagatcagctgaacagcagccatcagagaaatcaacagaaccaaagactaaaccacaagacatgatttctgctggtggagagagtgttgctggtatcactgcaatatctggcaagccgggtgacaagaaaaaagaaaagaaatcattaaccccagctgtgccagttgaatctaaaccggataaaccatcgggaaagtcaggcatggatgctgctttggatgacttaatagatactttaggaggacctgaagaaactgaagaagaaaatacaacgtatactggaccagaagtttcagatccaatgagttccacctacatagaggaattgggtaaaagagaagtcacaattcctccaaaatatagggaactattggctaaaaaggaagggatcacagggcctcctgcagactcttcgaaacccatagggccagatgatgctatagacgccttgtcatctgacttcacctgtgggtcgcctacagctgctggaaagaaaactgaaaaagaggaatctacagaagttttaaaagctcagtcagcagggacagtcagaagtgctgctccaccccaagagaagaaaagaaaggtggagaaggatacaatgagtgatcaagcactcgaggctctgtcggcttcactgggcacccggcaagcagaacctgagctcgacctccgctcaattaaggaagtcgatgaggggagtctccctgacttccagcaacaatccttgagtctgggactgccctggcctaagatgggccagtttctatcttcgactttcttggagggctcaccggccacagtgtggcacgataagctttgtgacggtgaacgcagaggagcaagagaagcagttcgtatcttccaggaccaagcaaaagctaaagaagaaaaactagagaagtgtggtgaggatgatgaaacaatcccatctgagtacagattaaaaccagccacggataaagatggaaaaccactattgccagagcctgaagaaaaacccaagcctcggagtgaatcagaactcattgatgaactttcagaagattttgaccggtctgaatgtaaagagaaaccatctaagccaactgaaaagacagaagaatctaaggccgctgctccagctcctgtgtcggaggctgtgtgtcggacctccatgtgtagtatacagtcagcaccccctgagccggctaccttgaagggcacagtgccagatgatgctgtagaagccttggctgatagcctggggaaaaaggaagcagatccagaagatggaaaacctgtgatggataaagtcaaggagaaggccaaagaagaagaccgtgaaaagcttggtgaaaaagaagaaacaattcctcctgattatagattagaagaggtcaaggataaagatggaaagccactcctgccaaaagagtctaaggaacagcttccacccatgagtgaagacttccttctggatgctttgtctgaggacttctctggtccacaaaatgcttcatctcttaaatttgaagatgctaaacttgctgctgccatctctgaagtggtttcccaaaccccagcttcaacgacccaagctggagccccaccccgtgatacctcgcagagtgacaaagacctcgatgatgccttggataaactctctgacagtctaggacaaaggcagcctgacccagatgagaacaaaccaatggaagataaagtaaaggaaaaagctaaagctgaacatagagacaagcttggagaaagagatgacactatcccacctgaatacagacatctcctggatgataatggacaggacaaaccagtgaagccacctacaaagaaatcagaggattcaaagaaacctgcagatgaccaagaccccattgatgctctctcaggagatctggacagctgtccctccactacagaaacctcacagaacacagcaaaggataagtgcaagaaggctgcttccagctccaaagcacctaagaatggaggtaaagcgaaggattcagcaaagacaacagaggaaacttccaagccaaaagatgactaaagaaatacaagttaaggtatctggtatctgcatgtaaaatcttcagctggtggatggtgacttttgaagaacaaaaggctttggcaacagaaaacaattgttctgggtgatttctagaatggtttttgttgagtctctgaacatcctaaatattggtttgttattcttttccagaaagaaaatgaatttgactggttcacctgtgtactgagtattgataaactttgaatttttttaattgccttcaattgggagagaaagctttatatttgtgtgaggacttctgcatcttacagtcagcacagaacacactgagacttgaatcaagtcagcaacagagcaaaataaagatgcaaacttcgttttttaaaaacatgatatctaaaaagcagaatgtgcagagtcttttctttgccaagcaaaacagtttccaccacatgtgtgctgacttgcagtatgttcccagcaggatagacaattcctggccaagaaaacaaaaatagatgccagaatgatctaatctaatctaatttcccttggccacatgaacatgaatgaatgacggactcaccattg

SEQ ID NO: 69 - DNA, 2943 bp, Homo sapiens
gggagggcccatcggggctaggggaaccccggcgcagacctggggtggggtcggaaaagctgtttcatcgcccgctcccgggccctcctccctccctccctccctccctctctccctggcaggactccccgccaggcctccccgccactctccgcggcgcattccgggaggcagcggccgcagcggcctcgccatgtcccagcccggccagaagcccgccgcctccccgcggccccggcgagcagccgccgcccgccgcacccatgagcatgtcagtgaaaaaaccagtgaatcgccttccaaaccaggagaaaagaaaggatcagatgagaaaaaagcagcaagcctcggcagcagtcaatcctccagaacctatgctggtggaacagcctcggccaccaaggtgtcagcttcctctggtgcaaccagcaagtcttccagtatgaatcccacagaaaccaaggccattccagtcagccaacagatggaaggaccacatcttcctaacaagaaaaaacacaaaaaacaggctgtaaaaacagaacctgagaagaagtcacagtcaaccaagctgtctgtggttcatgagaaaaaatcccaagaaggaaagccaaaagaacacacagagccaaaaagcctacccaagcaggcatcagatacaggaagtaacgatgctcacaataaaaaagcagtttccagatcagctgaacagcagccatcagagaaatcaacagaaccaaagactaaaccacaagacatgatttctgctggtggagagagtgttgctggtatcactgcaatatctggcaagccgggtgacaagaaaaaagaaaagaaatcattaaccccagctgtgccagttgaatctaaaccggataaaccatcgggaaagtcaggcatggatgctgctttggatgacttaatagatactttaggaggacctgaagaaactgaagaagaaaatacaacgtatactggaccagaagtttcagatccaatgagttccacctacatagaggaattgggtaaaagagaagtcacaattcctccaaaatatagggaactattggctaaacccatagggccagatgatgctatagacgccttgtcatctgacttcacctgtgggtcgcctacagctgctggaaagaaaactgaaaaagaggaatctacagaagttttaaaagctcagtcagcagggacagtcagaagtgctgctccaccccaagagaagaaaagaaaggtggagaaggatacaatgagtgatcaagcactcgaggctctgtcggcttcactgggcacccggcaagcagaacctgagctcgacctccgctcaattaaggaagtcgatgaggcaaaagctaaagaagaaaaactagagaagtgtggtgaggatgatgaaacaatcccatctgagtacagattaaaaccagccacggataaagatggaaaaccactattgccagagcctgaagaaaaacccaagcctcggagtgaatcagaactcattgatgaactttcagaagattttgaccggtctgaatgtaaagagaaaccatctaagccaactgaaaagacagaagaatctaaggccgctgctccagctcctgtgtcggaggctgtgtgtcggacctccatgtgtagtatacagtcagcaccccctgagccggctaccttgaagggcacagtgccagatgatgctgtagaagccttggctgatagcctggggaaaaaggaagcagatccagaagatggaaaacctgtgatggataaagtcaaggagaaggccaaagaagaagaccgtgaaaagcttggtgaaaaagaagaaacaattcctcctgattatagattagaagaggtcaaggataaagatggaaagccactcctgccaaaagagtctaaggaacagcttccacccatgagtgaagacttccttctggatgctttgtctgaggacttctctggtccacaaaatgcttcatctcttaaatttgaagatgctaaacttgctgctgccatctctgaagtggtttcccaaaccccagcttcaacgacccaagctggagccccaccccgtgatacctcgagtgacaaagacctcgatgatgccttggataaactctctgacagtctaggacaaaggcagcctgacccagatgagaacaaaccaatggaagataaagtaaaggaaaaagctaaagctgaacatagagacaagcttggagaaagagatgacactatcccacctgaatacagacatctcctggatgataatggacaggacaaaccagtgaagccacctacaaagaaatcagaggattcaaagaaacctgcagatgaccaagaccccattgatgctctctcaggagatctggacagctgtccctccactacagaaacctcacagaacacagcaaaggataagtgcaagaaggctgcttccagctccaaagcacctaagaatggaggtaaagcgaaggattcagcaaagacaacagaggaaacttccaagccaaaagatgactaaagaaatacaagttaaggtatctggtatctgcatgtaaaatcttcagctggtggatggtgacttttgaagaacaaaaggctttggcaacagaaaacaattgttctgggtgatttctagaatggtttttgttgagtctctgaacatcctaaatattggtttgttattcttttccagaaagaaaatgaatttgactggttcacctgtgtactgagtattgataaactttgaatttttttaattgccttcaattgggagagaaagctttatatttgtgtgaggacttctgcatcttacagtcagcacagaacacactgagacttgaatcaagtcagcaacagagcaaaataaaggttagataagtccttgtgtagcaaatttcgagcataagaaataaaatctaattaattcttagggta

SEQ ID NO: 70 - DNA, 3989 bp, Homo sapiens
cccgggaccgccccgccccgtcgcactcagagagctgggctggagctccaagcggaaaccgcgggagccgagcccagctaggaatgcagacctcctgaaaaccaagccgaggactgcggggtccggtgtccacgcagagtgtcagcttcctctggtgcaaccagcaagtcttccagtatgaatcccacagaaaccaaggctgtaaaaacagaacctgagaagaagtcacagtcaaccaagctgtctgtggttcatgagaaaaaatcccaagaaggaaagccaaaagaacacacagagccaaaaagcctacccaagcaggcatcagatacaggaagtaacgatgctcacaataaaaaagcagtttccagatcagctgaacagcagccatcagagaaatcaacagaaccaaagactaaaccacaagacatgatttctgctggtggagagagtgttgctggtatcactgcaatatctggcaagccgggtgacaagaaaaaagaaaagaaatcattaaccccagctgtgccagttgaatctaaaccggataaaccatcgggaaagtcaggcatggatgctgctttggatgacttaatagatactttaggaggacctgaagaaactgaagaagaaaatacaacgtatactggaccagaagtttcagatccaatgagttccacctacatagaggaattgggtaaaagagaagtcacaattcctccaaaatatagggaactattggctaaaaaggaagggatcacagggcctcctgcagactcttcgaaacccatagggccagatgatgctatagacgccttgtcatctgacttcacctgtgggtcgcctacagctgctggaaagaaaactgaaaaagaggaatctacagaagttttaaaagctcagtcagcagggacagtcagaagtgctgctccaccccaagagaagaaaagaaaggtggagaaggatacaatgagtgatcaagcactcgaggctctgtcggcttcactgggcacccggcaagcagaacctgagctcgacctccgctcaattaaggaagtcgatgaggcaaaagctaaagaagaaaaactagagaagtgtggtgaggatgatgaaacaatcccatctgagtacagattaaaaccagccacggataaagatggaaaaccactattgccagagcctgaagaaaaacccaagcctcggagtgaatcagaactcattgatgaactttcagaagattttgaccggtctgaatgtaaagagaaaccatctaagccaactgaaaagacagaagaatctaaggccgctgctccagctcctgtgtcggaggctgtgtgtcggacctccatgtgtagtatacagtcagcaccccctgagccggctaccttgaagggcacagtgccagatgatgctgtagaagccttggctgatagcctggggaaaaaggaagcagatccagaagatggaaaacctgtgatggataaagtcaaggagaaggccaaagaagaagaccgtgaaaagcttggtgaaaaagaagaaacaattcctcctgattatagattagaagaggtcaaggataaagatggaaagccactcctgccaaaagagtctaaggaacagcttccacccatgagtgaagacttccttctggatgctttgtctgaggacttctctggtccacaaaatgcttcatctcttaaatttgaagatgctaaacttgctgctgccatctctgaagtggtttcccaaaccccagcttcaacgacccaagctggagccccaccccgtgatacctcgcagagtgacaaagacctcgatgatgccttggataaactctctgacagtctaggacaaaggcagcctgacccagatgagaacaaaccaatggaagataaagtaaaggaaaaagctaaagctgaacatagagacaagcttggagaaagagatgacactatcccacctgaatacagacatctcctggatgataatggacaggacaaaccagtgaagccacctacaaagaaatcagaggattcaaagaaacctgcagatgaccaagaccccattgatgctctctcaggagatctggacagctgtccctccactacagaaacctcacagaacacagcaaaggataagtgcaagaaggctgcttccagctccaaagcacctaagaatggaggtaaagcgaaggattcagcaaagacaacagaggaaacttccaagccaaaagatgactaaagaaatacaagttaaggtatctggtatctgcatgtaaaatcttcagctggtggatggtgacttttgaagaacaaaaggctttggcaacagaaaacaattgttctgggtgatttctagaatggtttttgttgagtctctgaacatcctaaatattggtttgttattcttttccagaaagaaaatgaatttgactggttcacctgtgtactgagtattgataaactttgaatttttttaattgccttcaattgggagagaaagctttatatttgtaagaaatatatttgataaagtttcttaaagcaacaccaaaaaaacaaaagaaaagctaagtgaatttttgcacattctacacacagtgcctgtaaatctcatttgtattttcagtttgcccttaattttttttgttagtgtttagaaaacaatgttttaaacattcttcagtgttctgatttcttattaccccctttcctcttgggcttttgaactgtatttgatgttgctttgggataatgtttataagtcaaacataagatattgtacattgggcacatatctcctcttgggctgctaataataaattaataacaggtaacctggacaaaccaggaagcaccaaaccccttttcagtttgaactcttctttgccaggtgtgaggacttctgcatcttacagtcagcacagaacacactgagacttgaatcaagtcagcaacagagcaaaataaaggttagataagtccttgtgtagcaaatttcgagcataagaaataaaatctaattaattcttagggtactcatctgacttgaactctgttggtttactgtgttagtaaactgtgctttctattatctatacataaaacctgagcagcaactgtgtctttagagctattgccacattagcctttgcactgtatagcgtctggctttatggaacttaagtttaccaaatataaaaagaaacttctgcttttaaaaaaattatatatatatattaaatttgaaacctgcatttctcccacagcaatgtaagaagtaggctctgatgtcctaccactttgaatggttttctaatatcttaatgaatagttcctgaacattgcactgatatcatcgattagaattttgatatttaatttcatctttatttcctggtagagaatgcaggaaaagatgtcaggtacataacataaaacagattgggaatttattgtttccaaagggcatggccttccttagcatcagtttgaagcttttgttatgacttagctgacttgtggcagcggggcaagcaaaaacaataacactgcttataaatggcaccacatcttgttaacctcccccccaaatactctctgaaagtcatgcacatacctatgggattttacacaccaccagcttaaaatgctatgtctctatccatcagaaatagtcattattctatttttaaggcagcaacaagaaaagaaaaaacacttttcctgagggatttctaaccatgtatctaatcctcccatttgggcagtataggtgtttgcttttttgttttctttttttaagaaaaaccttgaaacctttgacactgacagatgtgtttgcaaggatacggctgcagtattactaatttccatgtgtatctggaagtatttttaaatggcataccaaaatccagaagtttaaagatgcctataaaagtaaacaacatttatttaaaaagaactctgaatatgccttcttttttaattaga

SEQ ID NO: 71 - DNA, 3076 bp, Homo sapiens
gctagatctgggcatcgaaggaggaacgctgcaacctccaaccccttctttctgaccaaccgggaccagagcagtgctggggccggggcgggtcaccgggactccccgccaggcctccccgccactctccgcggcgcattccgggaggcagcggccgcagcggcctcgccatgtcccagcccggccagaagcccgccgcctccccgcggccccggcgagcagccgccgcccgccgcacccatgagcatgtcagtgaaaaaaccagtgaatcgccttccaaaccaggagaaaagaaaggatcagatgagaaaaaagcagcaagcctcggcagcagtcaatcctccagaacctatgctggtggaacagcctcggccaccaaggtgtcagcttcctctggtgcaaccagcaagtcttccagtatgaatcccacagaaaccaaggccattccagtcagccaacagatggaaggaccacatcttcctaacaagaaaaaacacaaaaaacaggctgtaaaaacagaacctgagaagaagtcacagtcaaccaagctgtctgtggttcatgagaaaaaatcccaagaaggaaagccaaaagaacacacagagccaaaaagcctacccaagcaggcatcagatacaggaagtaacgatgctcacaataaaaaagcagtttccagatcagctgaacagcagccatcagagaaatcaacagaaccaaagactaaaccacaagacatgatttctgctggtggagagagtgttgctggtatcactgcaatatctggcaagccgggtgacaagaaaaaagaaaagaaatcattaaccccagctgtgccagttgaatctaaaccggataaaccatcgggaaagtcaggcatggatgctgctttggatgacttaatagatactttaggaggacctgaagaaactgaagaagaaaatacaacgtatactggaccagaagtttcagatccaatgagttccacctacatagaggaattgggtaaaagagaagtcacaattcctccaaaatatagggaactattggctaaacccatagggccagatgatgctatagacgccttgtcatctgacttcacctgtgggtcgcctacagctgctggaaagaaaactgaaaaagaggaatctacagaagttttaaaagctcagtcagcagggacagtcagaagtgctgctccaccccaagagaagaaaagaaaggtggagaaggatacaatgagtgatcaagcactcgaggctctgtcggcttcactgggcacccggcaagcagaacctgagctcgacctccgctcaattaaggaagtcgatgaggcaaaagctaaagaagaaaaactagagaagtgtggtgaggatgatgaaacaatcccatctgagtacagattaaaaccagccacggataaagatggaaaaccactattgccagagcctgaagaaaaacccaagcctcggagtgaatcagaactcattgatgaactttcagaagattttgaccggtctgaatgtaaagagaaaccatctaagccaactgaaaagacagaagaatctaaggccgctgctccagctcctgtgtcggaggctgtgtgtcggacctccatgtgtagtatacagtcagcaccccctgagccggctaccttgaagggcacagtgccagatgatgctgtagaagccttggctgatagcctggggaaaaaggaagcagatccagaagatggaaaacctgtgatggataaagtcaaggagaaggccaaagaagaagaccgtgaaaagcttggtgaaaaagaagaaacaattcctcctgattatagattagaagaggtcaaggataaagatggaaagccactcctgccaaaagagtctaaggaacagcttccacccatgagtgaagacttccttctggatgctttgtctgaggacttctctggtccacaaaatgcttcatctcttaaatttgaagatgctaaacttgctgctgccatctctgaagtggtttcccaaaccccagcttcaacgacccaagctggagccccaccccgtgatacctcgcagagtgacaaagacctcgatgatgccttggataaactctctgacagtctaggacaaaggcagcctgacccagatgagaacaaaccaatggaagataaagtaaaggaaaaagctaaagctgaacatagagacaagcttggagaaagagatgacactatcccacctgaatacagacatctcctggatgataatggacaggacaaaccagtgaagccacctacaaagaaatcagaggattcaaagaaacctgcagatgaccaagaccccattgatgctctctcaggagatctggacagctgtccctccactacagaaacctcacagaacacagcaaaggataagtgcaagaaggctgcttccagctccaaagcacctaagaatggaggtaaagcgaaggattcagcaaagacaacagaggaaacttccaagccaaaagatgactaaagaaatacaagttaaggtatctgcatgtaaaatcttcagctggtggatggtgacttttgaagaacaaaaggctttggcaacagaaaacaattgttctgggtgatttctagaatggtttttgttgagtctctgaacatcctaaatattggtttgttattcttttccagaaagaaaatgaatttgactggttcacctgtgtactgagtattgataaactttgaatttttttaattgccttcaattgggagagaaagctttatatttgtgtgaggacttctgcatcttacagtcagcacagaacacactgagacttgaatcaagtcagcaacagagcaaaataaagatgcaaacttcgttttttaaaaacatgatatctaaaaagcagaatgtgcagagtcttttctttgccaagcaaaacagtttccaccacatgtgtgctgacttgcagtatgttcccagcaggatagacaattcctggccaagaaaacaaaaatagatgccagaatgatctaatctaatctaatttcccttggccacatgaacatgaatgaatgacggactcaccattg

SEQ ID NO: 72 - DNA, 3151 bp, Homo sapiens
gctagatctgggcatcgaaggaggaacgctgcaacctccaaccccttctttctgaccaaccgggaccagagcagtgctggggccggggcgggtcaccgggactccccgccaggcctccccgccactctccgcggcgcattccgggaggcagcggccgcagcggcctcgccatgtcccagcccggccagaagcccgccgcctccccgcggccccggcgagcagccgccgcccgccgcacccatgagcatgtcagtgaaaaaaccagtgaatcgccttccaaaccaggagaaaagaaaggatcagatgaggtgtcagcttcctctggtgcaaccagcaagtcttccagtatgaatcccacagaaaccaaggctgtaaaaacagaacctgagaagaagtcacagtcaaccaagctgtctgtggttcatgagaaaaaatcccaagaaggaaagccaaaagaacacacagagccaaaaagcctacccaagcaggcatcagatacaggaagtaacgatgctcacaataaaaaagcagtttccagatcagctgaacagcagccatcagagaaatcaacagaaccaaagactaaaccacaagacatgatttctgctggtggagagagtgttgctggtatcactgcaatatctggcaagccgggtgacaagaaaaaagaaaagaaatcattaaccccagctgtgccagttgaatctaaaccggataaaccatcgggaaagtcaggcatggatgctgctttggatgacttaatagatactttaggaggacctgaagaaactgaagaagaaaatacaacgtatactggaccagaagtttcagatccaatgagttccacctacatagaggaattgggtaaaagagaagtcacaattcctccaaaatatagggaactattggctaaaaaggaagggatcacagggcctcctgcagactcttcgaaacccatagggccagatgatgctatagacgccttgtcatctgacttcacctgtgggtcgcctacagctgctggaaagaaaactgaaaaagaggaatctacagaagttttaaaagctcagtcagcagggacagtcagaagtgctgctccaccccaagagaagaaaagaaaggtggagaaggatacaatgagtgatcaagcactcgaggctctgtcggcttcactgggcacccggcaagcagaacctgagctcgacctccgctcaattaaggaagtcgatgaggggagtctccctgacttccagcaacaatccttgagtctgggactgccctggcctaagatgggccagtttctatcttcgactttcttggagggctcaccggccacagtgtggcacgataagctttgtgacggtgaacgcagaggagcaagagaagcagttcgtatcttccaggaccaagcaaaagctaaagaagaaaaactagagaagtgtggtgaggatgatgaaacaatcccatctgagtacagattaaaaccagccacggataaagatggaaaaccactattgccagagcctgaagaaaaacccaagcctcggagtgaatcagaactcattgatgaactttcagaagattttgaccggtctgaatgtaaagagaaaccatctaagccaactgaaaagacagaagaatctaaggccgctgctccagctcctgtgtcggaggctgtgtgtcggacctccatgtgtagtatacagtcagcaccccctgagccggctaccttgaagggcacagtgccagatgatgctgtagaagccttggctgatagcctggggaaaaaggaagcagatccagaagatggaaaacctgtgatggataaagtcaaggagaaggccaaagaagaagaccgtgaaaagcttggtgaaaaagaagaaacaattcctcctgattatagattagaagaggtcaaggataaagatggaaagccactcctgccaaaagagtctaaggaacagcttccacccatgagtgaagacttccttctggatgctttgtctgaggacttctctggtccacaaaatgcttcatctcttaaatttgaagatgctaaacttgctgctgccatctctgaagtggtttcccaaaccccagcttcaacgacccaagctggagccccaccccgtgatacctcgagtgacaaagacctcgatgatgccttggataaactctctgacagtctaggacaaaggcagcctgacccagatgagaacaaaccaatggaagataaagtaaaggaaaaagctaaagctgaacatagagacaagcttggagaaagagatgacactatcccacctgaatacagacatctcctggatgataatggacaggacaaaccagtgaagccacctacaaagaaatcagaggattcaaagaaacctgcagatgaccaagaccccattgatgctctctcaggagatctggacagctgtccctccactacagaaacctcacagaacacagcaaaggataagtgcaagaaggctgcttccagctccaaagcacctaagaatggaggtaaagcgaaggattcagcaaagacaacagaggaaacttccaagccaaaagatgactaaagaaatacaagttaaggtatctgcatgtaaaatcttcagctggtggatggtgacttttgaagaacaaaaggctttggcaacagaaaacaattgttctgggtgatttctagaatggtttttgttgagtctctgaacatcctaaatattggtttgttattcttttccagaaagaaaatgaatttgactggttcacctgtgtactgagtattgataaactttgaatttttttaattgccttcaattgggagagaaagctttatatttgtgtgaggacttctgcatcttacagtcagcacagaacacactgagacttgaatcaagtcagcaacagagcaaaataaagatgcaaacttcgttttttaaaaacatgatatctaaaaagcagaatgtgcagagtcttttctttgccaagcaaaacagtttccaccacatgtgtgctgacttgcagtatgttcccagcaggatagacaattcctggccaagaaaacaaaaatagatgccagaatgatctaatctaatctaatttcccttggccacatgaacatgaatgaatgacggactcaccattg

SEQ ID NO: 73 - DNA, 2998 bp, Homo sapiens
gctagatctgggcatcgaaggaggaacgctgcaacctccaaccccttctttctgaccaaccgggaccagagcagtgctggggccggggcgggtcaccgggactccccgccaggcctccccgccactctccgcggcgcattccgggaggcagcggccgcagcggcctcgccatgtcccagcccggccagaagcccgccgcctccccgcggccccggcgagcagccgccgcccgccgcacccatgagcatgtcagtgaaaaaaccagtgaatcgccttccaaaccaggagaaaagaaaggatcagatgaggtgtcagcttcctctggtgcaaccagcaagtcttccagtatgaatcccacagaaaccaaggctgtaaaaacagaacctgagaagaagtcacagtcaaccaagctgtctgtggttcatgagaaaaaatcccaagaaggaaagccaaaagaacacacagagccaaaaagcctacccaagcaggcatcagatacaggaagtaacgatgctcacaataaaaaagcagtttccagatcagctgaacagcagccatcagagaaatcaacagaaccaaagactaaaccacaagacatgatttctgctggtggagagagtgttgctggtatcactgcaatatctggcaagccgggtgacaagaaaaaagaaaagaaatcattaaccccagctgtgccagttgaatctaaaccggataaaccatcgggaaagtcaggcatggatgctgctttggatgacttaatagatactttaggaggacctgaagaaactgaagaagaaaatacaacgtatactggaccagaagtttcagatccaatgagttccacctacatagaggaattgggtaaaagagaagtcacaattcctccaaaatatagggaactattggctaaaaaggaagggatcacagggcctcctgcagactcttcgaaacccatagggccagatgatgctatagacgccttgtcatctgacttcacctgtgggtcgcctacagctgctggaaagaaaactgaaaaagaggaatctacagaagttttaaaagctcagtcagcagggacagtcagaagtgctgctccaccccaagagaagaaaagaaaggtggagaaggatacaatgagtgatcaagcactcgaggctctgtcggcttcactgggcacccggcaagcagaacctgagctcgacctccgctcaattaaggaagtcgatgaggggagtctccctgacttccagcaacaatccttgagtctgggactgccctggcctaagatgggccagtttctatcttcgactttcttggagggctcaccggccacagtgtggcacgataagctttgtgacggtgaacgcagaggagcaagagaagcagttcgtatcttccaggaccaagcaaaagctaaagaagaaaaactagagaagtgtggtgaggatgatgaaacaatcccatctgagtacagattaaaaccagccacggataaagatggaaaaccactattgccagagcctgaagaaaaacccaagcctcggagtgaatcagaactcattgatgaactttcagaagattttgaccggtctgaatgtaaagagaaaccatctaagccaactgaaaagacagaagaatctaaggccgctgctccagctcctgtgtcggaggctgtgtgtcggacctccatgtgtagtatacagtcagcaccccctgagccggctaccttgaagggcacagtgccagatgatgctgtagaagccttggctgatagcctggggaaaaaggaagcagatccagaagatggaaaacctgtgatggataaagtcaaggagaaggccaaagaagaagaccgtgaaaagcttggtgaaaaagaagaaacaattcctcctgattatagattagaagaggtcaaggataaagatggaaagccactcctgccaaaagagtctaaggaacagcttccacccatgagtgaagacttccttctggatgctttgtctgaggacttctctggtccacaaaatgcttcatctcttaaatttgaagatgctaaacttgctgctgccatctctgaagtggtttcccaaaccccagcttcaacgacccaagctggagccccaccccgtgatacctcgagtgacaaagacctcgatgatgccttggataaactctctgacagtctaggacaaaggcagcctgacccagatgagaacaaaccaatggaagataaagtaaaggaaaaagctaaagctgaacatagagacaagcttggagaaagagatgacactatcccacctgaatacagacatctcctggatgataatggacaggacaaaccagtgaagccacctacaaagaaatcagaggattcaaagaaacctgcagatgaccaagaccccattgatgctctctcaggagatctggacagctgtccctccactacagaaacctcacagaacacagcaaaggataagtgcaagaaggctgcttccagctccaaagcacctaagaatggaggtaaagcgaaggattcagcaaagacaacagaggaaacttccaagccaaaagatgactaaagaaatacaagttaaggtatctggtatctgcatgtaaaatcttcagctggtggatggtgacttttgaagaacaaaaggctttggcaacagaaaacaattgttctgggtgatttctagaatggtttttgttgagtctctgaacatcctaaatattggtttgttattcttttccagaaagaaaatgaatttgactggttcacctgtgtactgagtattgataaactttgaatttttttaattgccttcaattgggagagaaagctttatatttgtgtgaggacttctgcatcttacagtcagcacagaacacactgagacttgaatcaagtcagcaacagagcaaaataaaggttagataagtccttgtgtagcaaatttcgagcataagaaataaaatctaattaattcttagggta

SEQ ID NO: 74 - DNA, 2791 bp, Homo sapiens
gctagatctgggcatcgaaggaggaacgctgcaacctccaaccccttctttctgaccaaccgggaccagagcagtgctggggccggggcgggtcaccgggactccccgccaggcctccccgccactctccgcggcgcattccgggaggcagcggccgcagcggcctcgccatgtcccagcccggccagaagcccgccgcctccccgcggccccggcgagcagccgccgcccgccgcacccatgagcatgtcagtgaaaaaaccagtgaatcgccttccaaaccaggagaaaagaaaggatcagatgagaaaaaagcagcaagcctcggcagcagtcaatcctccagaacctatgctggtggaacagcctcggccaccaaggtgtcagcttcctctggtgcaaccagcaagtcttccagtatgaatcccacagaaaccaaggccattccagtcagccaacagatggaaggaccacatcttcctaacaagaaaaaacacaaaaaacaggctgtaaaaacagaacctgagaagaagtcacagtcaaccaagctgtctgtggttcatgagaaaaaatcccaagaaggaaagccaaaagaacacacagagccaaaaagcctacccaagcaggcatcagatacaggaagtaacgatgctcacaataaaaaagcagtttccagatcagctgaacagcagccatcagagaaatcaacagaaccaaagactaaaccacaagacatgatttctgctggtggagagagtgttgctggtatcactgcaatatctggcaagccgggtgacaagaaaaaagaaaagaaatcattaaccccagctgtgccagttgaatctaaaccggataaaccatcgggaaagtcaggcatggatgctgctttggatgacttaatagatactttaggaggacctgaagaaactgaagaagaaaatacaacgtatactggaccagaagtttcagatccaatgagttccacctacatagaggaattgggtaaaagagaagtcacaattcctccaaaatatagggaactattggctaaaaaggaagggatcacagggcctcctgcagactcttcgaaacccatagggccagatgatgctatagacgccttgtcatctgacttcacctgtgggtcgcctacagctgctggaaagaaaactgaaaaagaggaatctacagaagttttaaaagctcagtcagcagggacagtcagaagtgctgctccaccccaagagaagaaaagaaaggtggagaaggatacaatgagtgatcaagcactcgaggctctgtcggcttcactgggcacccggcaagcagaacctgagctcgacctccgctcaattaaggaagtcgatgagaagggcacagtgccagatgatgctgtagaagccttggctgatagcctggggaaaaaggaagcagatccagaagatggaaaacctgtgatggataaagtcaaggagaaggccaaagaagaagaccgtgaaaagcttggtgaaaaagaagaaacaattcctcctgattatagattagaagaggtcaaggataaagatggaaagccactcctgccaaaagagtctaaggaacagcttccacccatgagtgaagacttccttctggatgctttgtctgaggacttctctggtccacaaaatgcttcatctcttaaatttgaagatgctaaacttgctgctgccatctctgaagtggtttcccaaaccccagcttcaacgacccaagctggagccccaccccgtgatacctcgcagagtgacaaagacctcgatgatgccttggataaactctctgacagtctaggacaaaggcagcctgacccagatgagaacaaaccaatggaagataaagtaaaggaaaaagctaaagctgaacatagagacaagcttggagaaagagatgacactatcccacctgaatacagacatctcctggatgataatggacaggacaaaccagtgaagccacctacaaagaaatcagaggattcaaagaaacctgcagatgaccaagaccccattgatgctctctcaggagatctggacagctgtccctccactacagaaacctcacagaacacagcaaaggataagtgcaagaaggctgcttccagctccaaagcacctaagaatggaggtaaagcgaaggattcagcaaagacaacagaggaaacttccaagccaaaagatgactaaagaaatacaagttaaggtatctgcatgtaaaatcttcagctggtggatggtgacttttgaagaacaaaaggctttggcaacagaaaacaattgttctgggtgatttctagaatggtttttgttgagtctctgaacatcctaaatattggtttgttattcttttccagaaagaaaatgaatttgactggttcacctgtgtactgagtattgataaactttgaatttttttaattgccttcaattgggagagaaagctttatatttgtgtgaggacttctgcatcttacagtcagcacagaacacactgagacttgaatcaagtcagcaacagagcaaaataaagatgcaaacttcgttttttaaaaacatgatatctaaaaagcagaatgtgcagagtcttttctttgccaagcaaaacagtttccaccacatgtgtgctgacttgcagtatgttcccagcaggatagacaattcctggccaagaaaacaaaaatagatgccagaatgatctaatctaatctaatttcccttggccacatgaacatgaatgaatgacggactcaccattg

SEQ ID NO: 75 - DNA, 4174 bp, Homo sapiens
gctagatctgggcatcgaaggaggaacgctgcaacctccaaccccttctttctgaccaaccgggaccagagcagtgctggggccggggcgggtcaccgggactccccgccaggcctccccgccactctccgcggcgcattccgggaggcagcggccgcagcggcctcgccatgtcccagcccggccagaagcccgccgcctccccgcggccccggcgagcagccgccgcccgccgcacccatgagcatgtcagtgaaaaaaccagtgaatcgccttccaaaccaggagaaaagaaaggatcagatgagaaaaaagcagcaagcctcggcagcagtcaatcctccagaacctatgctggtggaacagcctcggccaccaaggtgtcagcttcctctggtgcaaccagcaagtcttccagtatgaatcccacagaaaccaaggctgtaaaaacagaacctgagaagaagtcacagtcaaccaagccaaaaagcctacccaagcaggcatcagatacaggaagtaacgatgctcacaataaaaaagcagtttccagatcagctgaacagcagccatcagagaaatcaacagaaccaaagactaaaccacaagacatgatttctgctggtggagagagtgttgctggtatcactgcaatatctggcaagccgggtgacaagaaaaaagaaaagaaatcattaaccccagctgtgccagttgaatctaaaccggataaaccatcgggaaagtcaggcatggatgctgctttggatgacttaatagatactttaggaggacctgaagaaactgaagaagaaaatacaacgtatactggaccagaagtttcagatccaatgagttccacctacatagaggaattgggtaaaagagaagtcacaattcctccaaaatatagggaactattggctaaaaaggaagggatcacagggcctcctgcagactcttcgaaacccatagggccagatgatgctatagacgccttgtcatctgacttcacctgtgggtcgcctacagctgctggaaagaaaactgaaaaagaggaatctacagaagttttaaaagctcagtcagcagggacagtcagaagtgctgctccaccccaagagaagaaaagaaaggtggagaaggatacaatgagtgatcaagcactcgaggctctgtcggcttcactgggcacccggcaagcagaacctgagctcgacctccgctcaattaaggaagtcgatgaggcaaaagctaaagaagaaaaactagagaagtgtggtgaggatgatgaaacaatcccatctgagtacagattaaaaccagccacggataaagatggaaaaccactattgccagagcctgaagaaaaacccaagcctcggagtgaatcagaactcattgatgaactttcagaagattttgaccggtctgaatgtaaagagaaaccatctaagccaactgaaaagacagaagaatctaaggccgctgctccagctcctgtgtcggaggctgtgtgtcggacctccatgtgtagtatacagtcagcaccccctgagccggctaccttgaagggcacagtgccagatgatgctgtagaagccttggctgatagcctggggaaaaaggaagcagatccagaagatggaaaacctgtgatggataaagtcaaggagaaggccaaagaagaagaccgtgaaaagcttggtgaaaaagaagaaacaattcctcctgattatagattagaagaggtcaaggataaagatggaaagccactcctgccaaaagagtctaaggaacagcttccacccatgagtgaagacttccttctggatgctttgtctgaggacttctctggtccacaaaatgcttcatctcttaaatttgaagatgctaaacttgctgctgccatctctgaagtggtttcccaaaccccagcttcaacgacccaagctggagccccaccccgtgatacctcgcagagtgacaaagacctcgatgatgccttggataaactctctgacagtctaggacaaaggcagcctgacccagatgagaacaaaccaatggaagataaagtaaaggaaaaagctaaagctgaacatagagacaagcttggagaaagagatgacactatcccacctgaatacagacatctcctggatgataatggacaggacaaaccagtgaagccacctacaaagaaatcagaggattcaaagaaacctgcagatgaccaagaccccattgatgctctctcaggagatctggacagctgtccctccactacagaaacctcacagaacacagcaaaggataagtgcaagaaggctgcttccagctccaaagcacctaagaatggaggtaaagcgaaggattcagcaaagacaacagaggaaacttccaagccaaaagatgactaaagaaatacaagttaaggtatctggtatctgcatgtaaaatcttcagctggtggatggtgacttttgaagaacaaaaggctttggcaacagaaaacaattgttctgggtgatttctagaatggtttttgttgagtctctgaacatcctaaatattggtttgttattcttttccagaaagaaaatgaatttgactggttcacctgtgtactgagtattgataaactttgaatttttttaattgccttcaattgggagagaaagctttatatttgtaagaaatatatttgataaagtttcttaaagcaacaccaaaaaaacaaaagaaaagctaagtgaatttttgcacattctacacacagtgcctgtaaatctcatttgtattttcagtttgcccttaattttttttgttagtgtttagaaaacaatgttttaaacattcttcagtgttctgatttcttattaccccctttcctcttgggcttttgaactgtatttgatgttgctttgggataatgtttataagtcaaacataagatattgtacattgggcacatatctcctcttgggctgctaataataaattaataacaggtaacctggacaaaccaggaagcaccaaaccccttttcagtttgaactcttctttgccaggtgtgaggacttctgcatcttacagtcagcacagaacacactgagacttgaatcaagtcagcaacagagcaaaataaaggttagataagtccttgtgtagcaaatttcgagcataagaaataaaatctaattaattcttagggtactcatctgacttgaactctgttggtttactgtgttagtaaactgtgctttctattatctatacataaaacctgagcagcaactgtgtctttagagctattgccacattagcctttgcactgtatagcgtctggctttatggaacttaagtttaccaaatataaaaagaaacttctgcttttaaaaaaattatatatatatattaaatttgaaacctgcatttctcccacagcaatgtaagaagtaggctctgatgtcctaccactttgaatggttttctaatatcttaatgaatagttcctgaacattgcactgatatcatcgattagaattttgatatttaatttcatctttatttcctggtagagaatgcaggaaaagatgtcaggtacataacataaaacagattgggaatttattgtttccaaagggcatggccttccttagcatcagtttgaagcttttgttatgacttagctgacttgtggcagcggggcaagcaaaaacaataacactgcttataaatggcaccacatcttgttaacctcccccccaaatactctctgaaagtcatgcacatacctatgggattttacacaccaccagcttaaaatgctatgtctctatccatcagaaatagtcattattctatttttaaggcagcaacaagaaaagaaaaaacacttttcctgagggatttctaaccatgtatctaatcctcccatttgggcagtataggtgtttgcttttttgttttctttttttaagaaaaaccttgaaacctttgacactgacagatgtgtttgcaaggatacggctgcagtattactaatttccatgtgtatctggaagtatttttaaatggcataccaaaatccagaagtttaaagatgcctataaaagtaaacaacatttatttaaaaagaactctgaatatgccttcttttttaattaga

SEQ ID NO: 76 - DNA, 3122 bp, Homo sapiens
gctagatctgggcatcgaaggaggaacgctgcaacctccaaccccttctttctgaccaaccgggaccagagcagtgctggggccggggcgggtcaccgggactccccgccaggcctccccgccactctccgcggcgcattccgggaggcagcggccgcagcggcctcgccatgtcccagcccggccagaagcccgccgcctccccgcggccccggcgagcagccgccgcccgccgcacccatgagcatgtcagtgaaaaaaccagtgaatcgccttccaaaccaggagaaaagaaaggatcagatgagaaaaaagcagcaagcctcggcagcagtcaatcctccagaacctatgctggtggaacagcctcggccaccaaggtgtcagcttcctctggtgcaaccagcaagtcttccagtatgaatcccacagaaaccaaggccattccagtcagccaacagatggaaggaccacatcttcctaacaagaaaaaacacaaaaaacaggctgtaaaaacagaacctgagaagaagtcacagtcaaccaagctgtctgtggttcatgagaaaaaatcccaagaaggaaagccaaaagaacacacagagccaaaaagcctacccaagcaggcatcagatacaggaagtaacgatgctcacaataaaaaagcagtttccagatcagctgaacagcagccatcagagaaatcaacagaaccaaagactaaaccacaagacatgatttctgctggtggagagagtgttgctggtatcactgcaatatctggcaagccgggtgacaagaaaaaagaaaagaaatcattaaccccagctgtgccagttgaatctaaaccggataaaccatcgggaaagtcaggcatggatgctgctttggatgacttaatagatactttaggaggacctgaagaaactgaagaagaaaatacaacgtatactggaccagaagtttcagatccaatgagttccacctacatagaggaattgggtaaaagagaagtcacaattcctccaaaatatagggaactattggctaaaaaggaagggatcacagggcctcctgcagactcttcgaaacccatagggccagatgatgctatagacgccttgtcatctgacttcacctgtgggtcgcctacagctgctggaaagaaaactgaaaaagaggaatctacagaagttttaaaagctcagtcagcagggacagtcagaagtgctgctccaccccaagagaagaaaagaaaggtggagaaggatacaatgagtgatcaagcactcgaggctctgtcggcttcactgggcacccggcaagcagaacctgagctcgacctccgctcaattaaggaagtcgatgaggcaaaagctaaagaagaaaaactagagaagtgtggtgaggatgatgaaacaatcccatctgagtacagattaaaaccagccacggataaagatggaaaaccactattgccagagcctgaagaaaaacccaagcctcggagtgaatcagaactcattgatgaactttcagaagattttgaccggtctgaatgtaaagagaaaccatctaagccaactgaaaagacagaagaatctaaggccgctgctccagctcctgtgtcggaggctgtgtgtcggacctccatgtgtagtatacagtcagcaccccctgagccggctaccttgaagggcacagtgccagatgatgctgtagaagccttggctgatagcctggggaaaaaggaagcagatccagaagatggaaaacctgtgatggataaagtcaaggagaaggccaaagaagaagaccgtgaaaagcttggtgaaaaagaagaaacaattcctcctgattatagattagaagaggtcaaggataaagatggaaagccactcctgccaaaagagtctaaggaacagcttccacccatgagtgaagacttccttctggatgctttgtctgaggacttctctggtccacaaaatgcttcatctcttaaatttgaagatgctaaacttgctgctgccatctctgaagtggtttcccaaaccccagcttcaacgacccaagctggagccccaccccgtgatacctcgcagagtgacaaagacctcgatgatgccttggataaactctctgacagtctaggacaaaggcagcctgacccagatgagaacaaaccaatggaagataaagtaaaggaaaaagctaaagctgaacatagagacaagcttggagaaagagatgacactatcccacctgaatacagacatctcctggatgataatggacaggacaaaccagtgaagccacctacaaagaaatcagaggattcaaagaaacctgcagatgaccaagaccccattgatgctctctcaggagatctggacagctgtccctccactacagaaacctcacagaacacagcaaaggataagtgcaagaaggctgcttccagctccaaagcacctaagaatggaggtaaagcgaaggattcagcaaagacaacagaggaaacttccaagccaaaagatgactaaagaaatacaagttaaggtatctggtatctgcatgtaaaatcttcagctggtggatggtgacttttgaagaacaaaaggctttggcaacagaaaacaattgttctgggtgatttctagaatggtttttgttgagtctctgaacatcctaaatattggtttgttattcttttccagaaagaaaatgaatttgactggttcacctgtgtactgagtattgataaactttgaatttttttaattgccttcaattgggagagaaagctttatatttgtgtgaggacttctgcatcttacagtcagcacagaacacactgagacttgaatcaagtcagcaacagagcaaaataaagatgcaaacttcgttttttaaaaacatgatatctaaaaagcagaatgtgcagagtcttttctttgccaagcaaaacagtttccaccacatgtgtgctgacttgcagtatgttcccagcaggatagacaattcctggccaagaaaacaaaaatagatgccagaatgatctaatctaatctaatttcccttggccacatgaacatgaatgaatgacggactcaccattg

SEQ ID NO: 77 - DNA, 3257 bp, Homo sapiens
gctagatctgggcatcgaaggaggaacgctgcaacctccaaccccttctttctgaccaaccgggaccagagcagtgctggggccggggcgggtcaccgggactccccgccaggcctccccgccactctccgcggcgcattccgggaggcagcggccgcagcggcctcgccatgtcccagcccggccagaagcccgccgcctccccgcggccccggcgagcagccgccgcccgccgcacccatgagcatgtcagtgaaaaaaccagtgaatcgccttccaaaccaggagaaaagaaaggatcagatgagaaaaaagcagcaagcctcggcagcagtcaatcctccagaacctatgctggtggaacagcctcggccaccaaggtgtcagcttcctctggtgcaaccagcaagtcttccagtatgaatcccacagaaaccaaggccattccagtcagccaacagatggaaggaccacatcttcctaacaagaaaaaacacaaaaaacaggctgtaaaaacagaacctgagaagaagtcacagtcaaccaagctgtctgtggttcatgagaaaaaatcccaagaaggaaagccaaaagaacacacagagccaaaaagcctacccaagcaggcatcagatacaggaagtaacgatgctcacaataaaaaagcagtttccagatcagctgaacagcagccatcagagaaatcaacagaaccaaagactaaaccacaagacatgatttctgctggtggagagagtgttgctggtatcactgcaatatctggcaagccgggtgacaagaaaaaagaaaagaaatcattaaccccagctgtgccagttgaatctaaaccggataaaccatcgggaaagtcaggcatggatgctgctttggatgacttaatagatactttaggaggacctgaagaaactgaagaagaaaatacaacgtatactggaccagaagtttcagatccaatgagttccacctacatagaggaattgggtaaaagagaagtcacaattcctccaaaatatagggaactattggctaaacccatagggccagatgatgctatagacgccttgtcatctgacttcacctgtgggtcgcctacagctgctggaaagaaaactgaaaaagaggaatctacagaagttttaaaagctcagtcagcagggacagtcagaagtgctgctccaccccaagagaagaaaagaaaggtggagaaggatacaatgagtgatcaagcactcgaggctctgtcggcttcactgggcacccggcaagcagaacctgagctcgacctccgctcaattaaggaagtcgatgaggggagtctccctgacttccagcaacaatccttgagtctgggactgccctggcctaagatgggccagtttctatcttcgactttcttggagggctcaccggccacagtgtggcacgataagctttgtgacggtgaacgcagaggagcaagagaagcagttcgtatcttccaggaccaagcaaaagctaaagaagaaaaactagagaagtgtggtgaggatgatgaaacaatcccatctgagtacagattaaaaccagccacggataaagatggaaaaccactattgccagagcctgaagaaaaacccaagcctcggagtgaatcagaactcattgatgaactttcagaagattttgaccggtctgaatgtaaagagaaaccatctaagccaactgaaaagacagaagaatctaaggccgctgctccagctcctgtgtcggaggctgtgtgtcggacctccatgtgtagtatacagtcagcaccccctgagccggctaccttgaagggcacagtgccagatgatgctgtagaagccttggctgatagcctggggaaaaaggaagcagatccagaagatggaaaacctgtgatggataaagtcaaggagaaggccaaagaagaagaccgtgaaaagcttggtgaaaaagaagaaacaattcctcctgattatagattagaagaggtcaaggataaagatggaaagccactcctgccaaaagagtctaaggaacagcttccacccatgagtgaagacttccttctggatgctttgtctgaggacttctctggtccacaaaatgcttcatctcttaaatttgaagatgctaaacttgctgctgccatctctgaagtggtttcccaaaccccagcttcaacgacccaagctggagccccaccccgtgatacctcgagtgacaaagacctcgatgatgccttggataaactctctgacagtctaggacaaaggcagcctgacccagatgagaacaaaccaatggaagataaagtaaaggaaaaagctaaagctgaacatagagacaagcttggagaaagagatgacactatcccacctgaatacagacatctcctggatgataatggacaggacaaaccagtgaagccacctacaaagaaatcagaggattcaaagaaacctgcagatgaccaagaccccattgatgctctctcaggagatctggacagctgtccctccactacagaaacctcacagaacacagcaaaggataagtgcaagaaggctgcttccagctccaaagcacctaagaatggaggtaaagcgaaggattcagcaaagacaacagaggaaacttccaagccaaaagatgactaaagaaatacaagttaaggtatctggtatctgcatgtaaaatcttcagctggtggatggtgacttttgaagaacaaaaggctttggcaacagaaaacaattgttctgggtgatttctagaatggtttttgttgagtctctgaacatcctaaatattggtttgttattcttttccagaaagaaaatgaatttgactggttcacctgtgtactgagtattgataaactttgaatttttttaattgccttcaattgggagagaaagctttatatttgtgtgaggacttctgcatcttacagtcagcacagaacacactgagacttgaatcaagtcagcaacagagcaaaataaagatgcaaacttcgttttttaaaaacatgatatctaaaaagcagaatgtgcagagtcttttctttgccaagcaaaacagtttccaccacatgtgtgctgacttgcagtatgttcccagcaggatagacaattcctggccaagaaaacaaaaatagatgccagaatgatctaatctaatctaatttcccttggccacatgaacatgaatgaatgacggactcaccattg

SEQ ID NO: 78 - DNA, 2920 bp, Homo sapiens
gctagatctgggcatcgaaggaggaacgctgcaacctccaaccccttctttctgaccaaccgggaccagagcagtgctggggccggggcgggtcaccgggactccccgccaggcctccccgccactctccgcggcgcattccgggaggcagcggccgcagcggcctcgccatgtcccagcccggccagaagcccgccgcctccccgcggccccggcgagcagccgccgcccgccgcacccatgagcatgtcagtgaaaaaaccagtgaatcgccttccaaaccaggagaaaagaaaggatcagatgaggtgtcagcttcctctggtgcaaccagcaagtcttccagtatgaatcccacagaaaccaaggctgtaaaaacagaacctgagaagaagtcacagtcaaccaagccaaaaagcctacccaagcaggcatcagatacaggaagtaacgatgctcacaataaaaaagcagtttccagatcagctgaacagcagccatcagagaaatcaacagaaccaaagactaaaccacaagacatgatttctgctggtggagagagtgttgctggtatcactgcaatatctggcaagccgggtgacaagaaaaaagaaaagaaatcattaaccccagctgtgccagttgaatctaaaccggataaaccatcgggaaagtcaggcatggatgctgctttggatgacttaatagatactttaggaggacctgaagaaactgaagaagaaaatacaacgtatactggaccagaagtttcagatccaatgagttccacctacatagaggaattgggtaaaagagaagtcacaattcctccaaaatatagggaactattggctaaaaaggaagggatcacagggcctcctgcagactcttcgaaacccatagggccagatgatgctatagacgccttgtcatctgacttcacctgtgggtcgcctacagctgctggaaagaaaactgaaaaagaggaatctacagaagttttaaaagctcagtcagcagggacagtcagaagtgctgctccaccccaagagaagaaaagaaaggtggagaaggatacaatgagtgatcaagcactcgaggctctgtcggcttcactgggcacccggcaagcagaacctgagctcgacctccgctcaattaaggaagtcgatgaggcaaaagctaaagaagaaaaactagagaagtgtggtgaggatgatgaaacaatcccatctgagtacagattaaaaccagccacggataaagatggaaaaccactattgccagagcctgaagaaaaacccaagcctcggagtgaatcagaactcattgatgaactttcagaagattttgaccggtctgaatgtaaagagaaaccatctaagccaactgaaaagacagaagaatctaaggccgctgctccagctcctgtgtcggaggctgtgtgtcggacctccatgtgtagtatacagtcagcaccccctgagccggctaccttgaagggcacagtgccagatgatgctgtagaagccttggctgatagcctggggaaaaaggaagcagatccagaagatggaaaacctgtgatggataaagtcaaggagaaggccaaagaagaagaccgtgaaaagcttggtgaaaaagaagaaacaattcctcctgattatagattagaagaggtcaaggataaagatggaaagccactcctgccaaaagagtctaaggaacagcttccacccatgagtgaagacttccttctggatgctttgtctgaggacttctctggtccacaaaatgcttcatctcttaaatttgaagatgctaaacttgctgctgccatctctgaagtggtttcccaaaccccagcttcaacgacccaagctggagccccaccccgtgatacctcgcagagtgacaaagacctcgatgatgccttggataaactctctgacagtctaggacaaaggcagcctgacccagatgagaacaaaccaatggaagataaagtaaaggaaaaagctaaagctgaacatagagacaagcttggagaaagagatgacactatcccacctgaatacagacatctcctggatgataatggacaggacaaaccagtgaagccacctacaaagaaatcagaggattcaaagaaacctgcagatgaccaagaccccattgatgctctctcaggagatctggacagctgtccctccactacagaaacctcacagaacacagcaaaggataagtgcaagaaggctgcttccagctccaaagcacctaagaatggaggtaaagcgaaggattcagcaaagacaacagaggaaacttccaagccaaaagatgactaaagaaatacaagttaaggtatctgcatgtaaaatcttcagctggtggatggtgacttttgaagaacaaaaggctttggcaacagaaaacaattgttctgggtgatttctagaatggtttttgttgagtctctgaacatcctaaatattggtttgttattcttttccagaaagaaaatgaatttgactggttcacctgtgtactgagtattgataaactttgaatttttttaattgccttcaattgggagagaaagctttatatttgtgtgaggacttctgcatcttacagtcagcacagaacacactgagacttgaatcaagtcagcaacagagcaaaataaagatgcaaacttcgttttttaaaaacatgatatctaaaaagcagaatgtgcagagtcttttctttgccaagcaaaacagtttccaccacatgtgtgctgacttgcagtatgttcccagcaggatagacaattcctggccaagaaaacaaaaatagatgccagaatgatctaatctaatctaatttcccttggccacatgaacatgaatgaatgacggactcaccattg

SEQ ID NO: 79 - DNA, 4143 bp, Homo sapiens
gggagggcccatcggggctaggggaaccccggcgcagacctggggtggggtcggaaaagctgtttcatcgcccgctcccgggccctcctccctccctccctccctccctctctccctggcaggactccccgccaggcctccccgccactctccgcggcgcattccgggaggcagcggccgcagcggcctcgccatgtcccagcccggccagaagcccgccgcctccccgcggccccggcgagcagccgccgcccgccgcacccatgagcatgtcagtgaaaaaaccagtgaatcgccttccaaaccaggagaaaagaaaggatcagatgaggtgtcagcttcctctggtgcaaccagcaagtcttccagtatgaatcccacagaaaccaaggctgtaaaaacagaacctgagaagaagtcacagtcaaccaagctgtctgtggttcatgagaaaaaatcccaagaaggaaagccaaaagaacacacagagccaaaaagcctacccaagcaggcatcagatacaggaagtaacgatgctcacaataaaaaagcagtttccagatcagctgaacagcagccatcagagaaatcaacagaaccaaagactaaaccacaagacatgatttctgctggtggagagagtgttgctggtatcactgcaatatctggcaagccgggtgacaagaaaaaagaaaagaaatcattaaccccagctgtgccagttgaatctaaaccggataaaccatcgggaaagtcaggcatggatgctgctttggatgacttaatagatactttaggaggacctgaagaaactgaagaagaaaatacaacgtatactggaccagaagtttcagatccaatgagttccacctacatagaggaattgggtaaaagagaagtcacaattcctccaaaatatagggaactattggctaaacccatagggccagatgatgctatagacgccttgtcatctgacttcacctgtgggtcgcctacagctgctggaaagaaaactgaaaaagaggaatctacagaagttttaaaagctcagtcagcagggacagtcagaagtgctgctccaccccaagagaagaaaagaaaggtggagaaggatacaatgagtgatcaagcactcgaggctctgtcggcttcactgggcacccggcaagcagaacctgagctcgacctccgctcaattaaggaagtcgatgaggcaaaagctaaagaagaaaaactagagaagtgtggtgaggatgatgaaacaatcccatctgagtacagattaaaaccagccacggataaagatggaaaaccactattgccagagcctgaagaaaaacccaagcctcggagtgaatcagaactcattgatgaactttcagaagattttgaccggtctgaatgtaaagagaaaccatctaagccaactgaaaagacagaagaatctaaggccgctgctccagctcctgtgtcggaggctgtgtgtcggacctccatgtgtagtatacagtcagcaccccctgagccggctaccttgaagggcacagtgccagatgatgctgtagaagccttggctgatagcctggggaaaaaggaagcagatccagaagatggaaaacctgtgatggataaagtcaaggagaaggccaaagaagaagaccgtgaaaagcttggtgaaaaagaagaaacaattcctcctgattatagattagaagaggtcaaggataaagatggaaagccactcctgccaaaagagtctaaggaacagcttccacccatgagtgaagacttccttctggatgctttgtctgaggacttctctggtccacaaaatgcttcatctcttaaatttgaagatgctaaacttgctgctgccatctctgaagtggtttcccaaaccccagcttcaacgacccaagctggagccccaccccgtgatacctcgcagagtgacaaagacctcgatgatgccttggataaactctctgacagtctaggacaaaggcagcctgacccagatgagaacaaaccaatggaagataaagtaaaggaaaaagctaaagctgaacatagagacaagcttggagaaagagatgacactatcccacctgaatacagacatctcctggatgataatggacaggacaaaccagtgaagccacctacaaagaaatcagaggattcaaagaaacctgcagatgaccaagaccccattgatgctctctcaggagatctggacagctgtccctccactacagaaacctcacagaacacagcaaaggataagtgcaagaaggctgcttccagctccaaagcacctaagaatggaggtaaagcgaaggattcagcaaagacaacagaggaaacttccaagccaaaagatgactaaagaaatacaagttaaggtatctggtatctgcatgtaaaatcttcagctggtggatggtgacttttgaagaacaaaaggctttggcaacagaaaacaattgttctgggtgatttctagaatggtttttgttgagtctctgaacatcctaaatattggtttgttattcttttccagaaagaaaatgaatttgactggttcacctgtgtactgagtattgataaactttgaatttttttaattgccttcaattgggagagaaagctttatatttgtaagaaatatatttgataaagtttcttaaagcaacaccaaaaaaacaaaagaaaagctaagtgaatttttgcacattctacacacagtgcctgtaaatctcatttgtattttcagtttgcccttaattttttttgttagtgtttagaaaacaatgttttaaacattcttcagtgttctgatttcttattaccccctttcctcttgggcttttgaactgtatttgatgttgctttgggataatgtttataagtcaaacataagatattgtacattgggcacatatctcctcttgggctgctaataataaattaataacaggtaacctggacaaaccaggaagcaccaaaccccttttcagtttgaactcttctttgccaggtgtgaggacttctgcatcttacagtcagcacagaacacactgagacttgaatcaagtcagcaacagagcaaaataaaggttagataagtccttgtgtagcaaatttcgagcataagaaataaaatctaattaattcttagggtactcatctgacttgaactctgttggtttactgtgttagtaaactgtgctttctattatctatacataaaacctgagcagcaactgtgtctttagagctattgccacattagcctttgcactgtatagcgtctggctttatggaacttaagtttaccaaatataaaaagaaacttctgcttttaaaaaaattatatatatatattaaatttgaaacctgcatttctcccacagcaatgtaagaagtaggctctgatgtcctaccactttgaatggttttctaatatcttaatgaatagttcctgaacattgcactgatatcatcgattagaattttgatatttaatttcatctttatttcctggtagagaatgcaggaaaagatgtcaggtacataacataaaacagattgggaatttattgtttccaaagggcatggccttccttagcatcagtttgaagcttttgttatgacttagctgacttgtggcagcggggcaagcaaaaacaataacactgcttataaatggcaccacatcttgttaacctcccccccaaatactctctgaaagtcatgcacatacctatgggattttacacaccaccagcttaaaatgctatgtctctatccatcagaaatagtcattattctatttttaaggcagcaacaagaaaagaaaaaacacttttcctgagggatttctaaccatgtatctaatcctcccatttgggcagtataggtgtttgcttttttgttttctttttttaagaaaaaccttgaaacctttgacactgacagatgtgtttgcaaggatacggctgcagtattactaatttccatgtgtatctggaagtatttttaaatggcataccaaaatccagaagtttaaagatgcctataaaagtaaacaacatttatttaaaaagaactctgaatatgccttcttttttaattaga

SEQ ID NO: 80 - DNA, 4075 bp, Homo sapiens
gactccccgccaggcctccccgccactctccgcggcgcattccgggaggcagcggccgcagcggcctcgccatgtcccagcccggccagaagcccgccgcctccccgcggccccggcgagcagccgccgcccgccgcacccatgagcatgtcagtgaaaaaaccagtgaatcgccttccaaaccaggagaaaagaaaggatcagatgagaaaaaagcagcaagcctcggcagcagtcaatcctccagaacctatgctggtggaacagcctcggccaccaaggtgtcagcttcctctggtgcaaccagcaagtcttccagtatgaatcccacagaaaccaaggctgtaaaaacagaacctgagaagaagtcacagtcaaccaagccaaaaagcctacccaagcaggcatcagatacaggaagtaacgatgctcacaataaaaaagcagtttccagatcagctgaacagcagccatcagagaaatcaacagaaccaaagactaaaccacaagacatgatttctgctggtggagagagtgttgctggtatcactgcaatatctggcaagccgggtgacaagaaaaaagaaaagaaatcattaaccccagctgtgccagttgaatctaaaccggataaaccatcgggaaagtcaggcatggatgctgctttggatgacttaatagatactttaggaggacctgaagaaactgaagaagaaaatacaacgtatactggaccagaagtttcagatccaatgagttccacctacatagaggaattgggtaaaagagaagtcacaattcctccaaaatatagggaactattggctaaaaaggaagggatcacagggcctcctgcagactcttcgaaacccatagggccagatgatgctatagacgccttgtcatctgacttcacctgtgggtcgcctacagctgctggaaagaaaactgaaaaagaggaatctacagaagttttaaaagctcagtcagcagggacagtcagaagtgctgctccaccccaagagaagaaaagaaaggtggagaaggatacaatgagtgatcaagcactcgaggctctgtcggcttcactgggcacccggcaagcagaacctgagctcgacctccgctcaattaaggaagtcgatgaggcaaaagctaaagaagaaaaactagagaagtgtggtgaggatgatgaaacaatcccatctgagtacagattaaaaccagccacggataaagatggaaaaccactattgccagagcctgaagaaaaacccaagcctcggagtgaatcagaactcattgatgaactttcagaagattttgaccggtctgaatgtaaagagaaaccatctaagccaactgaaaagacagaagaatctaaggccgctgctccagctcctgtgtcggaggctgtgtgtcggacctccatgtgtagtatacagtcagcaccccctgagccggctaccttgaagggcacagtgccagatgatgctgtagaagccttggctgatagcctggggaaaaaggaagcagatccagaagatggaaaacctgtgatggataaagtcaaggagaaggccaaagaagaagaccgtgaaaagcttggtgaaaaagaagaaacaattcctcctgattatagattagaagaggtcaaggataaagatggaaagccactcctgccaaaagagtctaaggaacagcttccacccatgagtgaagacttccttctggatgctttgtctgaggacttctctggtccacaaaatgcttcatctcttaaatttgaagatgctaaacttgctgctgccatctctgaagtggtttcccaaaccccagcttcaacgacccaagctggagccccaccccgtgatacctcgcagagtgacaaagacctcgatgatgccttggataaactctctgacagtctaggacaaaggcagcctgacccagatgagaacaaaccaatggaagataaagtaaaggaaaaagctaaagctgaacatagagacaagcttggagaaagagatgacactatcccacctgaatacagacatctcctggatgataatggacaggacaaaccagtgaagccacctacaaagaaatcagaggattcaaagaaacctgcagatgaccaagaccccattgatgctctctcaggagatctggacagctgtccctccactacagaaacctcacagaacacagcaaaggataagtgcaagaaggctgcttccagctccaaagcacctaagaatggaggtaaagcgaaggattcagcaaagacaacagaggaaacttccaagccaaaagatgactaaagaaatacaagttaaggtatctggtatctgcatgtaaaatcttcagctggtggatggtgacttttgaagaacaaaaggctttggcaacagaaaacaattgttctgggtgatttctagaatggtttttgttgagtctctgaacatcctaaatattggtttgttattcttttccagaaagaaaatgaatttgactggttcacctgtgtactgagtattgataaactttgaatttttttaattgccttcaattgggagagaaagctttatatttgtaagaaatatatttgataaagtttcttaaagcaacaccaaaaaaacaaaagaaaagctaagtgaatttttgcacattctacacacagtgcctgtaaatctcatttgtattttcagtttgcccttaattttttttgttagtgtttagaaaacaatgttttaaacattcttcagtgttctgatttcttattaccccctttcctcttgggcttttgaactgtatttgatgttgctttgggataatgtttataagtcaaacataagatattgtacattgggcacatatctcctcttgggctgctaataataaattaataacaggtaacctggacaaaccaggaagcaccaaaccccttttcagtttgaactcttctttgccaggtgtgaggacttctgcatcttacagtcagcacagaacacactgagacttgaatcaagtcagcaacagagcaaaataaaggttagataagtccttgtgtagcaaatttcgagcataagaaataaaatctaattaattcttagggtactcatctgacttgaactctgttggtttactgtgttagtaaactgtgctttctattatctatacataaaacctgagcagcaactgtgtctttagagctattgccacattagcctttgcactgtatagcgtctggctttatggaacttaagtttaccaaatataaaaagaaacttctgcttttaaaaaaattatatatatatattaaatttgaaacctgcatttctcccacagcaatgtaagaagtaggctctgatgtcctaccactttgaatggttttctaatatcttaatgaatagttcctgaacattgcactgatatcatcgattagaattttgatatttaatttcatctttatttcctggtagagaatgcaggaaaagatgtcaggtacataacataaaacagattgggaatttattgtttccaaagggcatggccttccttagcatcagtttgaagcttttgttatgacttagctgacttgtggcagcggggcaagcaaaaacaataacactgcttataaatggcaccacatcttgttaacctcccccccaaatactctctgaaagtcatgcacatacctatgggattttacacaccaccagcttaaaatgctatgtctctatccatcagaaatagtcattattctatttttaaggcagcaacaagaaaagaaaaaacacttttcctgagggatttctaaccatgtatctaatcctcccatttgggcagtataggtgtttgcttttttgttttctttttttaagaaaaaccttgaaacctttgacactgacagatgtgtttgcaaggatacggctgcagtattactaatttccatgtgtatctggaagtatttttaaatggcataccaaaatccagaagtttaaagatgcctataaaagtaaacaacatttatttaaaaagaactctgaatatgccttcttttttaattaga

SEQ ID NO: 81 - DNA, 2782 bp, Homo sapiens
cccgggaccgccccgccccgtcgcactcagagagctgggctggagctccaagcggaaaccgcgggagccgagcccagctaggaatgcagacctcctgaaaaccaagccgaggactgcggggtccggtgtccacgcagagtgtcagcttcctctggtgcaaccagcaagtcttccagtatgaatcccacagaaaccaaggctgtaaaaacagaacctgagaagaagtcacagtcaaccaagccaaaaagcctacccaagcaggcatcagatacaggaagtaacgatgctcacaataaaaaagcagtttccagatcagctgaacagcagccatcagagaaatcaacagaaccaaagactaaaccacaagacatgatttctgctggtggagagagtgttgctggtatcactgcaatatctggcaagccgggtgacaagaaaaaagaaaagaaatcattaaccccagctgtgccagttgaatctaaaccggataaaccatcgggaaagtcaggcatggatgctgctttggatgacttaatagatactttaggaggacctgaagaaactgaagaagaaaatacaacgtatactggaccagaagtttcagatccaatgagttccacctacatagaggaattgggtaaaagagaagtcacaattcctccaaaatatagggaactattggctaaaaaggaagggatcacagggcctcctgcagactcttcgaaacccatagggccagatgatgctatagacgccttgtcatctgacttcacctgtgggtcgcctacagctgctggaaagaaaactgaaaaagaggaatctacagaagttttaaaagctcagtcagcagggacagtcagaagtgctgctccaccccaagagaagaaaagaaaggtggagaaggatacaatgagtgatcaagcactcgaggctctgtcggcttcactgggcacccggcaagcagaacctgagctcgacctccgctcaattaaggaagtcgatgaggcaaaagctaaagaagaaaaactagagaagtgtggtgaggatgatgaaacaatcccatctgagtacagattaaaaccagccacggataaagatggaaaaccactattgccagagcctgaagaaaaacccaagcctcggagtgaatcagaactcattgatgaactttcagaagattttgaccggtctgaatgtaaagagaaaccatctaagccaactgaaaagacagaagaatctaaggccgctgctccagctcctgtgtcggaggctgtgtgtcggacctccatgtgtagtatacagtcagcaccccctgagccggctaccttgaagggcacagtgccagatgatgctgtagaagccttggctgatagcctggggaaaaaggaagcagatccagaagatggaaaacctgtgatggataaagtcaaggagaaggccaaagaagaagaccgtgaaaagcttggtgaaaaagaagaaacaattcctcctgattatagattagaagaggtcaaggataaagatggaaagccactcctgccaaaagagtctaaggaacagcttccacccatgagtgaagacttccttctggatgctttgtctgaggacttctctggtccacaaaatgcttcatctcttaaatttgaagatgctaaacttgctgctgccatctctgaagtggtttcccaaaccccagcttcaacgacccaagctggagccccaccccgtgatacctcgcagagtgacaaagacctcgatgatgccttggataaactctctgacagtctaggacaaaggcagcctgacccagatgagaacaaaccaatggaagataaagtaaaggaaaaagctaaagctgaacatagagacaagcttggagaaagagatgacactatcccacctgaatacagacatctcctggatgataatggacaggacaaaccagtgaagccacctacaaagaaatcagaggattcaaagaaacctgcagatgaccaagaccccattgatgctctctcaggagatctggacagctgtccctccactacagaaacctcacagaacacagcaaaggataagtgcaagaaggctgcttccagctccaaagcacctaagaatggaggtaaagcgaaggattcagcaaagacaacagaggaaacttccaagccaaaagatgactaaagaaatacaagttaaggtatctggtatctgcatgtaaaatcttcagctggtggatggtgacttttgaagaacaaaaggctttggcaacagaaaacaattgttctgggtgatttctagaatggtttttgttgagtctctgaacatcctaaatattggtttgttattcttttccagaaagaaaatgaatttgactggttcacctgtgtactgagtattgataaactttgaatttttttaattgccttcaattgggagagaaagctttatatttgtaagaaatatatttgataaagtttcttaaagcaacaccaaaaaaacaaaagaaaagctaagtgaatttttgcacattctacacacagtgcctgtaaatctcatttgtattttcagtttgcccttaattttttttgttagtgtttagaaaacaatgttttaaacattcttcagtgttctgatttcttattaccccctttcctcttgggcttttgaactgtatttgatgttgctttgggataatatgcaaacttcgttttttaaaaacatgatatctaaaaagcagaatgtgcagagtcttttctttgccaagcaaaacagtttccaccac

SEQ ID NO: 82 - DNA, 772 bp, Homo sapiens
agatggatccccatccatgtacctttgctcaactgtcctcagaccagatccagaattcaccctgctgtttctccatgagtctgacctgcatcaactgcctcccttattctgggattccagttgtggagctcaaggacaagtccattctgggctggctgtatccaacttctttagtccaactatatccccactggaagccaggctctttccaacagctgtcacccatgcctctttctatgtttgttatctgtctctaggttctggtaactacttccttcccttgccccttctggcctagggtgctaccaatccctcctccaaatccaactgtcactagcctcaaagtacttgtagcttcctcaccttactttcaccttaataaatggtccccctactatctctcttcaaagcacccaatttgagtgtgccatctgtttcttgccaggatcctggttggtacatcaaccaagctgcactgatggaggagcactgtgctgaactttaggaatgaagccacagggccctcactgcccccatagtcaccttggtcatcttctgcctccctgaaagactaaattcagtcagttcagatacatacacatccagacatgtcagggaaaactccattttgtaaggatctctgcttaaaatgccaaaggtttgaaagttggcaaacacttgagaaaagcacagttctctgtcttactcttactctaaacttggagataaatgcatttttaaaattgtgcatgttagagtgctaacgtgtaca

SEQ ID NO: 83 - DNA, 2352 bp, Homo sapiens
ctttttgcacacacacgaatacaaagagccatacgaccttcggatgccggaaggtccttctgaatcccttccctgttccttaggttgcactagtcgggggttccatgctggggggcagaaggaatgctctctaccgtctgaaaccgttcatcaggaaggccttgatttgtgatgtgctaggagagcacaggatctgcaaatagaaggcacctgtctcccttctgcaggccgaggagaggccgccatggactgtgtgcttcttcatggcttgtttactcttctttcacagaccctacagcttggggcctgggctcctctgaccatcctcattgagaaaggaaagtgagtccagagaagttgatgcttcctacctgttggagcggcccagcagtgtaagcgtggttgttactgccccatccgccatgtccttcagtgccaccattctcttctcccctcccagtggcagcgaggccagatgctgctgctgcgcctgtaagagtgagactaatggaggcaacacaggctcccagggtgggaatcctcctcccagcacccccatcacagtgactggacatggcttggctgttcagagctcagagcagctcctgcatgttatctaccagcgggtcgataaggcagtgggtttggctgaagctgctctgggtcttgccagggccaacaatgagttgttaaaacgtctccaggaggaagtgggtgacctgaggcaagggaaagtgtccatccctgatgaagatggggaaagccgggcacatagttccccacctgaggagcctgggcctctcaaggaaagtcccggggaagcctttaaggctctgtctgccgtggaagaggagtgtgacagcgtgggcagcggcgtgcaggtggtgattgaggagctgcggcagctgggagcagcctcagtggggcctgggcctttgggcttcccagcaactcagagggacatgcggctcccagggtgcacgctggctgccagcgaggcggcccccctgctcaatcctctggtggatgattacgtggcctctgagggtgcagtacagcgagttctggtccctgcttatgccaagcaactctcaccagccacacaactggcaatccagcgggcaaccccagagacaggaccagaaaatggaaccaagctgccaccaccccgccctgaggacatgctcaatgccgctgctgcgctggacagtgccttggaagagtcaggccctgggagcactggggagctgagacactctctagggctgaccgtttccccatgcaggaccagaggaagtgggcagaagaactccaggcgcaagcgggatcttgtactctctaaactggtccacaatgtgcataaccacatcaccaatgacaagagattcaatgggtctgaaagcatcaagtcctcttggaatatttcagtagtgaagtttcttctggaaaagctcaagcaagagctggtgaccagtccccacaattacactgataaggagctaaaaggagcctgtgtggcctacttccttactaagaggcgtgagtaccgcaactccctgaacccctttaaaggcctgaaggaaaaagaggagaagaaacttcgaagtcgccgatatcggctttttgccaaccgatccagtatcatgaggcattttggacctgaggaccaacgtctgtggaatgatgtgacagaggaactgatgtcagatgaagaggacagtcttaacgagccaggtgtgtgggtggcccgccctccccgtttccgggcccagcgcctcacagagctctgctaccacctggatgctaactctaagcatggcaccaaagccaaccgtgtgtatgggcctccctcagacagactgccttctgctgaagcccagctccttccaccagaactttacaatcctaatttccaagaagaggaagatgagggaggggatgagaatgcacctggctccccatcttttgaccaaccccacaaaacctgctgtcctgacttgaactcattcattgaaatcaaggtggaaaaggatgaataaaatctacagccaagaataactctggcttccgccatgccccatgtctcagaaataggtggccatggggcttcacaaaataatgagatgctctgtgcagtctgagaaagcaaatttgcctcttttcttaacacagtctctactggggaagcagaacactggtgggataaaaacttatctagaaggggagaaactccctccactgtgaacagtaagccagaatatgcttattcctcagcataaacagtatctcggagaagcctgggatgagaaaatgaggaggatgggtccaagaaacatgaggccttcttgacat

SEQ ID NO: 84 - DNA, 2736 bp, Homo sapiens
atttctttgaaatctagtcacattttagtgatctttgtgatcacaacagtgatgggagttttttttttttttttttttttttttgaaacggagtttcgctcttgttgcccaggctgcagtggcaatggtgcgatcttggctcactgcaaccttcgcctcctgggttcaagcgattctcctgtctcggcctcccgagtagctgggattacaggcatgtgccaccatgccgggctgatttttgtatttttagtagagacggggtttcaccatgttggtcaggctggtctccaactcctgactttaggtgatccgcccgcctctgcctctcaaagtgctgggattacaggcgtgagccaccgcgcccggccagttacgggaatttttaatggagttttaccctttttagctcttttccacatcactacaggtcatcacatatactttttaccttactttttagcgtctcaaaaaatagggagagctctccctgaacagtgcagagcccgtatccctgatttcctaggctatttgatttctacatccaggaacgtagggtcatatccactgttcttgctttttcttcctaagaaaggagagaattcctcgcacatatatatcgttggcttggccttccaaagcaaagcaaaactaaactctgttgattttgcctgggaatcctcggggcccctagtattggaaacttctttgaactgtgaggagctgctaatttgcaggtgacatgtgaaagaaatgtaaccgaggccagcagtaactaaaagtcggccaccacccaacgtgtgacgccgatttgtggccactgtgcttataatcgtgtacacacaggtttgtgagcagcagagaacaaaagcaagtaaacaaaaacaagctaaagatggcgtctgacggccttgaaaaagcctcacagtcttgtccctccctgaggaggcccctcccctacctgactttttgagtgactgttgtttgcagccaatagtgtccgtgaccctgctccccagccatcgtctaaccgccaatcaccgggagccagaaggcaaacggggcggtgtctccccgcgtgcgcgcggtagccgggtacacgggcaggcgccgcggatagttctgtctcccgcgcgcccgcctccgcctctgcctagctgagtcagcccgtgcggtagcgccaggcacacgcggtagaacatctgtagggctgcaaagctgcacctccgcgtcagttctcacggcgagcgccgccttcagcccaagttctcaaagctctcggggctacgtagtctaccctccccggtgacccggcgagatccctagccgctcctccggccgctctgctctccgcatccctcgcgggaatgaccccctttacccgggactcccagagcgcactgtatggtagggcacagtggcgagtcaccctgtcccctgaggcctcttgagcagtcgccgatctctgcttcccgcgtcgctgcgatcgcctttcccgtagctgaatcacactgacccatcggaaacggttctgccctccctggggtccaccttgtcatccttgactaatatttaatcaactaacatttaccaagttctcgctggcacgagttctaggagctactttttcatttttcagtttctccataaatgcagtgggtcctttaggcaaacctgaaatcggaaatattaatcttaccaatgtaatcttagcaaatgtaaataaaaaggactgtgctatactgggctaaaaattctcatcctgctatagaaatatacgtggaattttcagattacgtggaatcctttaaagaccgcattcggccttctgggtctacagctctcttttttacccctaaaaataaggtcttggattttttgcagaccattagtcgagtcactcttttaaaatgtgggaaaatagtattttgtggtatttacttagctgctcttgtgtgataaggagctcatttctgataaaaataggttttgagagaaccttttgacaggtgagccattttgcaccttgaagtggaggagtaggactgaccaacacagcaggagctttaagtggccgttttccttatttatttcttaaaatgaagattatgatatgaattgccatgctttcagtaatcacatttaaggaagtctattgctagcatgaccctgaatgagtcaagcacccattataaaaacatatatcatctgagtgataccatatcatacacatctattaaatagtgagaaaacttttatttttcatagtttggaggtgaactcagtcatgcagaaaattcaaactcagaatggggagaaagcaagcaagggaactgccaagagtatgatatatttagtcctaacaaaaatgtgacttgggaggaaagggatagttaaaattatggacagtcttaccctgaactgtctgtctaaaggagatgaattgtctttcttttttatctaaatatttatgaaaaataccaaaagtactggaaagtacatttttaaggctcgtttcacatttatttaaattagaccaatactgaaatgaaccccaaatgcttatattttttgcaaacctaagtgtgacatctactgtcatgttgtgttggcaacgcatcccaagattgaagatctttttctcttttttagacctagtcagttgttttcaggactttctacttaaacatgttgccatcatttgaaatttaaaatgttaaataaatacacttcttctct

SEQ ID NO: 85 - DNA, 2090 bp, Homo sapiens
gccggctcgggctccgcgagtcctcctttttgcacacacacgaatacaaagagccatacgaccttcgggtatcctttttccattttttttcctccttaatcttgtgtgtgttttcaaattttttaaaaatagagatctgtagcagtgttgggaccctacagcttggggcctgggctcctctgaccatcctcattgagaaaggaaagtgagtccagagaagttgatgcttcctacctgttggagcggcccagcagtgtaagcgtggttgttactgccccatccgccatgtccttcagtgccaccattctcttctcccctcccagtggcagcgaggccagatgctgctgctgcgcctgtaagagtgagactaatggaggcaacacaggctcccagggtgggaatcctcctcccagcacccccatcacagtgactggacatggcttggctgttcagagctcagagcagctcctgcatgttatctaccagcgggtcgataaggcagtgggtttggctgaagctgctctgggtcttgccagggccaacaatgagttgttaaaacgtctccaggaggaagtgggtgacctgaggcaagggaaagtgtccatccctgatgaagatggggaaagccgggcacatagttccccacctgaggagcctgggcctctcaaggaaagtcccggggaagcctttaaggctctgtctgccgtggaagaggagtgtgacagcgtgggcagcggcgtgcaggtggtgattgaggagctgcggcagctgggagcagcctcagtggggcctgggcctttgggcttcccagcaactcagagggacatgcggctcccagggtgcacgctggctgccagcgaggcggcccccctgctcaatcctctggtggatgattacgtggcctctgagggtgcagtacagcgagttctggtccctgcttatgccaagcaactctcaccagccacacaactggcaatccagcgggcaaccccagagacaggaccagaaaatggaaccaagctgccaccaccccgccctgaggacatgctcaatgccgctgctgcgctggacagtgccttggaagagtcaggccctgggagcactggggagctgagacactctctagggctgaccgtttccccatgcaggaccagaggaagtgggcagaagaactccaggcgcaagcgggatcttgtactctctaaactggtccacaatgtgcataaccacatcaccaatgacaagagattcaatgggtctgaaagcatcaagtcctcttggaatatttcagtagtgaagtttcttctggaaaagctcaagcaagagctggtgaccagtccccacaattacactgataaggagctaaaaggagcctgtgtggcctacttccttactaagaggcgtgagtaccgcaactccctgaacccctttaaaggcctgaaggaaaaagaggagaagaaacttcgaagtcgccgatatcggctttttgccaaccgatccagtatcatgaggcattttggacctgaggaccaacgtctgtggaatgatgtgacagaggaactgatgtcagatgaagaggacagtcttaacgagccagacagactgccttctgctgaagcccagctccttccaccagaactttacaatcctaatttccaagaagaggaagatgagggaggggatgagaatgcacctggctccccatcttttgaccaaccccacaaaacctgctgtcctgacttgaactcattcattgaaatcaaggtggaaaaggatgaataaaatctacagccaagaataactctggcttccgccatgccccatgtctcagaaataggtggccatggggcttcacaaaataatgagatgctctgtgcagtctgagaaagcaaatttgcctcttttcttaacacagtctctactggggaagcagaacactggtgggataaaaacttatctagaaggggagaaactccctccactgtgaacagtaagccagaatatgcttattcctcagcataaacagtatctcggagaagcctgggatgagaaaatgaggaggatgggtccaagaaacatgaggccttctt

SEQ ID NO: 86 - DNA, 2215 bp, Homo sapiens
gccggctcgggctccgcgagtcctcctttttgcacacacacgaatacaaagagccatacgaccttcgggtatcctttttccattttttttcctccttaatcttgtgtgtgttttcaaattttttaaaaatagagatctgtagcagtgttgggaccctacagcttggggcctgggctcctctgaccatcctcattgagaaaggaaagtgagtccagagaagttgatgcttcctacctgttggagcggcccagcagtgtaagcgtggttgttactgccccatccgccatgtccttcagtgccaccattctcttctcccctcccagtggcagcgaggccagatgctgctgctgcgcctgtaagagtgagactaatggaggcaacacaggctcccagggtgggaatcctcctcccagcacccccatcacagtgactggacatggcttggctgttcagagctcagagcagctcctgcatgttatctaccagcgggtcgataaggcagtgggtttggctgaagctgctctgggtcttgccagggccaacaatgagttgttaaaacgtctccaggaggaagtgggtgacctgaggcaagggaaagtgtccatccctgatgaagatggggaaagccgggcacatagttccccacctgaggagcctgggcctctcaaggaaagtcccggggaagcctttaaggctctgtctgccgtggaagaggagtgtgacagcgtgggcagcggcgtgcaggtggtgattgaggagctgcggcagctgggagcagcctcagtggggcctgggcctttgggcttcccagcaactcagagggacatgcggctcccagggtgcacgctggctgccagcgaggcggcccccctgctcaatcctctggtggatgattacgtggcctctgagggtgcagtacagcgagttctggtccctgcttatgccaagcaactctcaccagccacacaactggcaatccagcgggcaaccccagagacaggaccagaaaatggaaccaagctgccaccaccccgccctgaggacatgctcaatgccgctgctgcgctggacagtgccttggaagagtcaggccctgggagcactggggagctgagacactctctagggctgaccgtttccccatgcaggaccagaggaagtgggcagaagaactccaggcgcaagcgggatcttgtactctctaaactggtccacaatgtgcataaccacatcaccaatgacaagagattcaatgggtctgaaagcatcaagtcctcttggaatatttcagtagtgaagtttcttctggaaaagctcaagcaagagctggtgaccagtccccacaattacactgataaggagctaaaaggagcctgtgtggcctacttccttactaagaggcgtgagtaccgcaactccctgaacccctttaaaggcctgaaggaaaaagaggagaagaaacttcgaagtcgccgatatcggctttttgccaaccgatccagtatcatgaggcattttggacctgaggaccaacgtctgtggaatgatgtgacagaggaactgatgtcagatgaagaggacagtcttaacgagccaggtgtgtgggtggcccgccctccccgtttccgggcccagcgcctcacagagctctgctaccacctggatgctaactctaagcatggcaccaaagccaaccgtgtgtatgggcctccctcagacagactgccttctgctgaagcccagctccttccaccagaactttacaatcctaatttccaagaagaggaagatgagggaggggatgagaatgcacctggctccccatcttttgaccaaccccacaaaacctgctgtcctgacttgaactcattcattgaaatcaaggtggaaaaggatgaataaaatctacagccaagaataactctggcttccgccatgccccatgtctcagaaataggtggccatggggcttcacaaaataatgagatgctctgtgcagtctgagaaagcaaatttgcctcttttcttaacacagtctctactggggaagcagaacactggtgggataaaaacttatctagaaggggagaaactccctccactgtgaacagtaagccagaatatgcttattcctcagcataaacagtatctcggagaagcctgggatgagaaaatgaggaggatgggtccaagaaacatgaggccttcttgacat

SEQ ID NO: 87 - DNA, 2327 bp, Homo sapiens
ccgcctctgcctagctgagtcagcccgtgcggtagcgccaggcacacgcggtagaacatctgtagggctgcaaagctgcacctccgcgtcagttctcacggcgagcgccgccttcagcccaagttctcaaagctctcggggctacgtagtctaccctccccggtgacccggcgagatccctagccgctcctccggccgctctgctctccgcatccctcgcgggaatgaccccctttacccgggactcccagagcgcactgtatgaccctacagcttggggcctgggctcctctgaccatcctcattgagaaaggaaagtgagtccagagaagttgatgcttcctacctgttggagcggcccagcagtgtaagcgtggttgttactgccccatccgccatgtccttcagtgccaccattctcttctcccctcccagtggcagcgaggccagatgctgctgctgcgcctgtaagagtgagactaatggaggcaacacaggctcccagggtgggaatcctcctcccagcacccccatcacagtgactggacatggcttggctgttcagagctcagagcagctcctgcatgttatctaccagcgggtcgataaggcagtgggtttggctgaagctgctctgggtcttgccagggccaacaatgagttgttaaaacgtctccaggaggaagtgggtgacctgaggcaagggaaagtgtccatccctgatgaagatggggaaagccgggcacatagttccccacctgaggagcctgggcctctcaaggaaagtcccggggaagcctttaaggctctgtctgccgtggaagaggagtgtgacagcgtgggcagcggcgtgcaggtggtgattgaggagctgcggcagctgggagcagcctcagtggggcctgggcctttgggcttcccagcaactcagagggacatgcggctcccagggtgcacgctggctgccagcgaggcggcccccctgctcaatcctctggtggatgattacgtggcctctgagggtgcagtacagcgagttctggtccctgcttatgccaagcaactctcaccagccacacaactggcaatccagcgggcaaccccagagacaggaccagaaaatggaaccaagctgccaccaccccgccctgaggacatgctcaatgccgctgctgcgctggacagtgccttggaagagtcaggccctgggagcactggggagctgagacactctctagggctgaccgtttccccatgcaggaccagaggaagtgggcagaagaactccaggcgcaagcgggatcttgtactctctaaactggtccacaatgtgcataaccacatcaccaatgacaagagattcaatgggtctgaaagcatcaagtcctcttggaatatttcagtagtgaagtttcttctggaaaagctcaagcaagagctggtgaccagtccccacaattacactgataaggagctaaaaggagcctgtgtggcctacttccttactaagaggcgtgagtaccgcaactccctgaacccctttaaaggcctgaaggaaaaagaggagaagaaacttcgaagtcgccgatatcggctttttgccaaccgatccagtatcatgaggcattttggacctgaggaccaacgtctgtggaatgatgtgacagaggaactgatgtcagatgaagaggacagtcttaacgagccaggtgtgtgggtggcccgccctccccgtttccgggcccagcgcctcacagagctctgctaccacctggatgctaactctaagcatggcaccaaagccaaccgtgtgtatgggcctccctcagacagactgccttctgctgaagcccagctccttccaccagaactttacaatcctaatttccaagaagaggaagatgagggaggggatgagaatgcacctggctccccatcttttgaccaaccccacaaaacctgctgtcctgacttgaactcattcattgaaatcaaggtggaaaaggatgaataaaatctacagccaagaataactctggcttccgccatgccccatgtctcagaaataggtggccatggggcttcacaaaataatgagatgctctgtgcagtctgagaaagcaaatttgcctcttttcttaacacagtctctactggggaagcagaacactggtgggataaaaacttatctagaaggggagaaactccctccactgtgaacagtaagccagaatatgcttattcctcagcataaacagtatctcggagaagcctgggatgagaaaatgaggaggatgggtccaagaaacatgaggccttcttgacat

SEQ ID NO: 88 - DNA, 3124 bp, Homo sapiens
agacactggccctggcaggcagcagctgggtctaagagagctgcagcccagggtcacagacctgtgggccccatggccgggaaggcggcagaggagagagggctgccgaaaggggccactccccaggatacctcgggcctccaggatagattgttctcctctgaaagtgacaacagcctgtacttcacctacagtggccagcccaacaccctggaggtcagagacctcaactaccaggtggacctggcctctcaggtcccttggtttgagcagctggctcagttcaagatgccctggacatctcccagctgccagaattcttgtgagctgggcatccagaacctaagcttcaaagtgagaagtgggcagatgctggccatcatagggagctcaggttgtgggagagcctccttgctagatgtgatcactggccgaggtcacggcggcaagatcaagtcaggccagatctggatcaatgggcagcccagctcgcctcagctggtgaggaagtgtgtggcccacgtgcgccagcacaaccagctgctccccaacttgactgtgcgagagaccttggccttcattgcccagatgcggctgcccagaaccttctcccaggcccagcgtgacaaaagggtggaggacgtgatcgcggagctgcggcttaggcagtgcgctgacacccgcgtgggcaacatgtacgtgcgggggttgtcggggggtgagcgcaggagagtcagcattggggtgcagctcctgtggaacccaggaatccttattctcgacgaacccacctctgggctcgacagcttcacagcccacaacctggtgaagaccttgtccaggctggccaaaggcaaccggctggtgctcatctccctccaccagcctcgctctgacatcttcaggctgtttgatctggtcctcctgatgacgtctggcacccccatctacttaggggcggcccagcacatggtccagtatttcacagccatcggctacccctgtcctcgctacagcaatcctgctgacttctatgtggacctgaccagcattgacaggcgcagcagagagcaggaattggccaccagggagaaggctcagtcactcgcagccctgtttctagaaaaagtgcgtgacttagatgactttctatggaaagcagagacgaaggatcttgacgaggacacctgtgtggaaagcagcgtgaccccactagacaccaactgcctcccgagtcctacgaagatgcctggggcggtgcagcagtttacgacgctgatccgtcgtcagatttccaacgacttccgagacctgcccaccctcctcatccatggggcggaggcctgtctgatgtcaatgaccatcggcttcctctattttggccatgggagcatccagctctccttcatggatacagccgccctcttgttcatgatcggtgctctcatccctttcaacgtcattctggatgtcatctccaaatgttactcagagagggcaatgctttactatgaactggaagacgggctgtacaccactggtccatatttctttgccaagatcctcggggagcttccggagcactgtgcctacatcatcatctacgggatgcccacctactggctggccaacctgaggccaggcctccagcccttcctgctgcacttcctgctggtgtggctggtggtcttctgttgcaggattatggccctggccgccgcggccctgctccccaccttccacatggcctccttcttcagcaatgccctctacaactccttctacctcgccgggggcttcatgataaacttgagcagcctgtggacagtgcccgcgtggatttccaaagtgtccttcctgcggtggtgttttgaagggctgatgaagattcagttcagcagaagaacttataaaatgcctctcgggaacctcaccatcgcggtctcaggagataaaatcctcagtgccatggagctggactcgtaccctctctacgccatctacctcatcgtcattggcctcagcggtggcttcatggtcctgtactacgtgtccttaaggttcatcaaacagaaaccaagtcaagactggtgattcacgccagacgtctgcccgctggtgggggacctgagcagacccttcaactgcactccctcctcaggagccccttcctggggacagtgaggacaatgaccctacagatgctcagctacatccggcccagggtgctgcagtggcacagaccagccacaggatggcagtagaataaagacagtcgaaagggatttctgctcactggcaggagactgcgatgactgggagaaaacctgcactcggtggcacctacaacgttgctaatttatttccttttgatatgcatttatataggcaactcgatataggatgggagcaaactaggaatgaattgggtagctagactgtgcaggaattgttggaacctggagggaacaataacagtagctagcagatttggcttcatcttccaggggccccacactccgtggtgagccaccatcaatacagaaagtgacctaagatgtaccagcaagatgccatcccttctttttgtgtggggtcatgggctccaaaagccaacgtgaacaattaaaaatgtattgagcatctactctgtagcaggtcctgtgaaaacactttaggtggacaatcccttgaggtaagtggtatcccattttataggtgtgaaaactgaagcaaaaattcattttcctaagggcacatggatactttgtggtggagtcatatggggatcagaaaagcctttgaggcctttggagttagagggcagaaggcaaggcctgagccgctgtaagccttaggagtttaggaaggctccagaagacaaatggggtctgtagaggctgttaactcagccaggcttcttagagttgcatttcactaactgatatggtttggctctgcgtcctcacccaaatctcaccttgaattgtaataatccccaagtgtcaagggcgggaccagatggagataattgaatcataggggtggtttctctgatgctgttctcctgagagtgagtgagttctgatgagatccgacggttttataaggggcttccctcttc

SEQ ID NO: 89 - DNA, 1283 bp, Homo sapiens
agacactggccctggcaggcagcagctgggtctaagagagctgcagcccagggtcacagacctgtgggccccatggccgggaaggcggcagaggagagagggctgccgaaaggggccactccccaggatacctcgggcctccaggatagattgttctcctctgaaagtgacaacagcctgtacttcacctacagtggccagcccaacaccctggaggtcagagacctcaactaccaggtggacctggcctctcaggtcccttggtttgagcagctggctcagttcaagatgccctggacatctcccagctgccagaattcttgtgagctgggcatccagaacctaagcttcaaagtgagaagtgggcagatgctggccatcatagggagctcaggttgtgggagagcctccttgctagatgtgatcactggccgaggtcacggcggcaagatcaagtcaggccagatctggatcaatgggcagcccagctcgcctcagctggtgaggaagtgtgtggcccacgtgcgccagcacaaccagctgctccccaacttgactgtgcgagagaccttggccttcattgcccagatgcggctgcccagaaccttctcccaggcccagcgtgacaaaagggtggaggacgtgatcgcggagctgcggcttaggcagtgcgctgacacccgcgtgggcaacatgtacgtgcgggggttgtcggggggtgagcgcaggagagtcagcattggggtgcagctcctgtggaacccaggaatccttattctcgacgaacccacctctgggctcgacagcttcacagcccacaacctggtgaagaccttgtccaggctggccaaaggcaaccggctggtgctcatctccctccaccagcctcgctctgacatcttcaggctgtttgatctggtcctcctgatgacgtctggcacccccatctacttaggggcggcccagcacatggtccagtatttcacagccatcggctacccctgtcctcgctacagcaatcctgctgacttctatgtggacctgaccagcattgacaggcgcagcagagagcaggaattggccaccagggagaaggctcagtcactcgcagccctgtttctagaaaaagtgcgtgacttagatgactttctatggaaagcagagacgaaggatcttgacgaggacacctgtgtggaaagcagcgtgaccccactagacaccaactgcctcccgagtcctacgaagatgcctggggcggtgcagcagtttacgacgctgatccg

SEQ ID NO: 90 - DNA, 4085 bp, Homo sapiens
cagactcgagatgcgcccgaggaggttgggccggtgctgcgcggggagccggctcggacccggggacccagcagcactcacctgtgcaccttcgccctcagccagtcccgctccggagccctctgcgcagccgcaggcacggggcactggacagagagtaggatcccgagccacctctggaacccagttcctctcggaagcccgcaccggagctcgcccggcctcggaggctggagccaaggcaggagcccggcgcccgtccgcattctcggccatccaaggggatgtccggtctatgcccgacaattcggacgcgccgtggacccgcttcgtattccaagggccgtttggttcccgggccactggccgggggactggaaaggcagcgggcatctggaagacgccagccgcctacgttggccggcgacccggggtgtccggccctgagcgcgccgcctttattcgggagctggaggaagcactgtgtcctaacctacctccgccagtcaaaaagatcacccaggaagacgtcaaagtgatgttatatttgctggaggagcttctcccacctgtctgggagagcgttacctatgggatggtcctgcagagagagagggacctgaacactgcagctcgcatcggccagtccctggtgaaacagaacagtgttttgatggaggagaacagcaagctggaagccctgctgggctcagccaaggaggagattttatacctcagacaccaggtgaacttgcgggatgagctcctccagctctactcagattctgatgaggaggatgaggatgaagaagaggaggaggaagaaaaggaggcagaagaggaacaggaagaagaagaagcagaggaagacctgcagtgtgctcatccctgtgatgcccctaagctgatttcgcaggaggcattgctgcaccagcaccactgcccacagctggaagccttgcaggagaagctgaggctgctggaggaggagaatcatcagctgagagaagaggcctctcaactcgacactcttgaggatgaggaacagatgctcattctggagtgtgtggagcagtttttggaggccagccaacagatggctgagctgtcggaggtgctggtgctcaggctggaaaactatgaacggcagcagcaggaggtcgctcggctgcaggcccaggtgctgaagctgcagcagcgctgccggatgtatggggctgagactgaaaagttgcagaagcagctggcttcggagaaggaaatccagatgcagctccaggaagagagcgtgtgggtgggttcccagctgcaggacctgcgggagaagtacatggattgtgggggcatgctgattgagatgcaggaggaggtgaagaccctccgccagcaacccccggtgtccactgggtctgccacccattacccatacagcgtgcctctggagactcttcctggtttccaggagacgctggctgaggagctcagaacgtctctaaggaggatgatctcagaccctgtgtattttatggagaggaattatgagatgcccagaggggacacatccagcctaaggtatgattttcgctacagtgaggatcgagagcaggtgcgggggtttgaggctgaggaagggttgatgctggcagcggatatcatgcggggggaagatttcacgcctgcggaggagttggtgccccaggaggagctgggggctgccaagaaggtgccggctgaggaaggggtgatggaagaggcagagctggtgtcagaggagaccgagggctgggaggaggtggaactggagctggatgaggcaacgcggatgaacgtggtgacatcagccctggaggccagcggcttgggcccttcacacctggacatgaattatgtcctccagcagctggccaactggcaagatgcccattacaggcggcagctgaggtggaagatgctccagaaaggtgagtgcccccacggggccctccctgccgccagccggacaagctgcagatcgtcgtgccgatgaaaagagagggtggataagctccccgagtgctcacctgccccagcctggctctacctgctgtgcttatttgcatggactttgcatatcatttgcatagacacctctgatccccttcagtgggaaccgtagtgtcagtgctcatttatgtggcatttgcttaggattccagatctccatccacttttctcctgggggctgggctgggggttagggctgggactgtgcccccacactgcgcctcagcttcccatctctgcccgcttgcttcccctacccccaacccctgcctcctctataccccaggctctccaactctgcagcagtggcagcagcagtcaaaacaaacacggggggcggtgggtgggatggtggagcagcctgggggctgacccaggctggaggacaggaccagccaccctcccacggcctgggaggaagagaggccttctgggactgcccaggctatggggacaaaggccttcaccagcaagggccacagttggaacagtcccctgggtgtcagaaggtgggctagggcctcctgcagggttgtggggtggaacagggtctcctctccccagccagaaaccccaaagtctgggagctgcacctgccgagtgcaggccatgtgagccctgcctctttaaggagccgcaggacatgaaagatgaccttgtgacactcatgcacagcagccattgcacgtgcatcagctcccatcagcctcattccgtggcaggtgatgtgtccccattggttaggtgaggagggtgaggctcagagagctaaggacacttgtttggggccacacagccggggtagatctgagcccgtcctctctactcctgtgctgtagcaccttcactggcccatccctcccctctagtgctgtcctggtacccgtcccagcctgtccccattctcatggccctttggtcactgccgggtggaatagcactggcttcagcaggcgtgtcatgtaagcttgtgcaggttataaactgaaccatgacctttatggcgcatgcagggggcaacctgcataattatcaatggcgactttccgtgtccttctgatacagttgatcagacccctgcccaccgcccaggccaggcctgtggtcatcaatgccccagttcacatccacctgcttctcttccaggctttgctgttccccagcagcctgcagaggccccacagacagcttgaggcccctcctgctgcctggccaagccccacacccgcagaccctccttcccatcctctgaaatgggaccctgtgtctgtcaccagcccaccctctgtgttcatgaacctgggctggagcttggggacccctccctgcccctggcttcctcttccatgttctgccctttcccacatgttggaggcttttccaacgtcttcagggacaggcggtaggaaccccggccctcgctctgcagctggtgcaaaagctgtggctgccaggcctgggccacatggcagcccagggggcaggagaagcccgggagaggcccgctggctaccagactcagccctgagcagggaacagggcccagcttccaccggcagggagttgtgagcgccttcccaacaatgtgcccctcaccccttgatgcccatgctaatggtagccaccctggttcttgttgacttgagggacctggctgtcttccctgttcttcatcctttcttctcagtccctacctactgtttgtaaccacaagtgtctctgtgtgtgggtgggtgagggcccctctgcccagtggtgtgtctcctctccctccctccctcttctgccagtggcctgggggtgtccaggctcccatccatggcccagcccctctcccctctgtcttgatccccccctccctgcccctggcttcctcttccatgttctgccctttcccacacctttgttcctcaatagctgggggctgggactgaggcctcctgcaggtacctgccccccttcacacagcacctctcaatctcctattgcttgtcagcctgtgtgcgtgtggtgcaggaaataaaggatctataccctcctgg

SEQ ID NO: 91 - DNA, 3929 bp, Homo sapiens
cagactcgagatgcgcccgaggaggttgggccggtgctgcgcggggagccggctcggacccggggacccagcagcactcacctgtgcaccttcgccctcagccagtcccgctccggagccctctgcgcagccgcaggcacggggcactggacagagagtaggatcccgagccacctctggaacccagttcctctcggaagcccgcaccggagctcgcccggcctcggaggctggagccaaggcaggagcccggcgcccgtccgcattctcggccatccaaggggatgtccggtctatgcccgacaattcggacgcgccgtggacccgcttcgtattccaagggccgtttggttcccgggccactggccgggggactggaaaggcagcgggcatctggaagacgccagccgcctacgttggccggcgacccggggtgtccggccctgagcgcgccgcctttattcgggagctggaggaagcactgtgtcctaacctacctccgccagtcaaaaagatcacccaggaagacgtcaaagtgatgttatatttgctggaggagcttctcccacctgtctgggagagcgttacctatgggatggtcctgcagagagagagggacctgaacactgcagctcgcatcggccagtccctggtgaaacagaacagtgttttgatggaggagaacagcaagctggaagccctgctgggctcagccaaggaggagattttatacctcagacaccaggtgaacttgcgggatgagctcctccagctctactcagattctgatgaggaggatgaggatgaagaagaggaggaggaagaaaaggaggcagaagaggaacaggaagaagaagaagcagaggaagacctgcagtgtgctcatccctgtgatgcccctaagctgatttcgcaggaggcattgctgcaccagcaccactgcccacagctggaagccttgcaggagaagctgaggctgctggaggaggagaatcatcagctgagagaagaggcctctcaactcgacactcttgaggatgaggaacagatgctcattctggagtgtgtggagcagtttttggaggccagccaacagatggctgagctgtcggaggtgctggtgctcaggctggaaaactatgaacggcagcagcaggaggtcgctcggctgcaggcccaggtgctgaagctgcagcagcgctgccggatgtatggggctgagactgaaaagttgcagaagcagctggcttcggagaaggaaatccagatgcagctccaggaagaggagactcttcctggtttccaggagacgctggctgaggagctcagaacgtctctaaggaggatgatctcagaccctgtgtattttatggagaggaattatgagatgcccagaggggacacatccagcctaaggtatgattttcgctacagtgaggatcgagagcaggtgcgggggtttgaggctgaggaagggttgatgctggcagcggatatcatgcggggggaagatttcacgcctgcggaggagttggtgccccaggaggagctgggggctgccaagaaggtgccggctgaggaaggggtgatggaagaggcagagctggtgtcagaggagaccgagggctgggaggaggtggaactggagctggatgaggcaacgcggatgaacgtggtgacatcagccctggaggccagcggcttgggcccttcacacctggacatgaattatgtcctccagcagctggccaactggcaagatgcccattacaggcggcagctgaggtggaagatgctccagaaaggtgagtgcccccacggggccctccctgccgccagccggacaagctgcagatcgtcgtgccgatgaaaagagagggtggataagctccccgagtgctcacctgccccagcctggctctacctgctgtgcttatttgcatggactttgcatatcatttgcatagacacctctgatccccttcagtgggaaccgtagtgtcagtgctcatttatgtggcatttgcttaggattccagatctccatccacttttctcctgggggctgggctgggggttagggctgggactgtgcccccacactgcgcctcagcttcccatctctgcccgcttgcttcccctacccccaacccctgcctcctctataccccaggctctccaactctgcagcagtggcagcagcagtcaaaacaaacacggggggcggtgggtgggatggtggagcagcctgggggctgacccaggctggaggacaggaccagccaccctcccacggcctgggaggaagagaggccttctgggactgcccaggctatggggacaaaggccttcaccagcaagggccacagttggaacagtcccctgggtgtcagaaggtgggctagggcctcctgcagggttgtggggtggaacagggtctcctctccccagccagaaaccccaaagtctgggagctgcacctgccgagtgcaggccatgtgagccctgcctctttaaggagccgcaggacatgaaagatgaccttgtgacactcatgcacagcagccattgcacgtgcatcagctcccatcagcctcattccgtggcaggtgatgtgtccccattggttaggtgaggagggtgaggctcagagagctaaggacacttgtttggggccacacagccggggtagatctgagcccgtcctctctactcctgtgctgtagcaccttcactggcccatccctcccctctagtgctgtcctggtacccgtcccagcctgtccccattctcatggccctttggtcactgccgggtggaatagcactggcttcagcaggcgtgtcatgtaagcttgtgcaggttataaactgaaccatgacctttatggcgcatgcagggggcaacctgcataattatcaatggcgactttccgtgtccttctgatacagttgatcagacccctgcccaccgcccaggccaggcctgtggtcatcaatgccccagttcacatccacctgcttctcttccaggctttgctgttccccagcagcctgcagaggccccacagacagcttgaggcccctcctgctgcctggccaagccccacacccgcagaccctccttcccatcctctgaaatgggaccctgtgtctgtcaccagcccaccctctgtgttcatgaacctgggctggagcttggggacccctccctgcccctggcttcctcttccatgttctgccctttcccacatgttggaggcttttccaacgtcttcagggacaggcggtaggaaccccggccctcgctctgcagctggtgcaaaagctgtggctgccaggcctgggccacatggcagcccagggggcaggagaagcccgggagaggcccgctggctaccagactcagccctgagcagggaacagggcccagcttccaccggcagggagttgtgagcgccttcccaacaatgtgcccctcaccccttgatgcccatgctaatggtagccaccctggttcttgttgacttgagggacctggctgtcttccctgttcttcatcctttcttctcagtccctacctactgtttgtaaccacaagtgtctctgtgtgtgggtgggtgagggcccctctgcccagtggtgtgtctcctctccctccctccctcttctgccagtggcctgggggtgtccaggctcccatccatggcccagcccctctcccctctgtcttgatccccccctccctgcccctggcttcctcttccatgttctgccctttcccacacctttgttcctcaatagctgggggctgggactgaggcctcctgcaggtacctgccccccttcacacagcacctctcaatctcctattgcttgtcagcctgtgtgcgtgtggtgcaggaaataaaggatctataccctcctgg

SEQ ID NO: 92 - DNA, 3774 bp, Homo sapiens
cagactcgagatgcgcccgaggaggttgggccggtgctgcgcggggagccggctcggacccggggacccagcagcactcacctgtgcaccttcgccctcagccagtcccgctccggagccctctgcgcagccgcaggcacggggcactggacagagagtaggatcccgagccacctctggaacccagttcctctcggaagcccgcaccggagctcgcccggcctcggaggctggagccaaggcaggagcccggcgcccgtccgcattctcggccatccaaggggatgtccggtctatgcccgacaattcggacgcgccgtggacccgcttcgtattccaagggccgtttggttcccgggccactggccgggggactggaaaggcagcgggcatctggaagacgccagccgcctacgttggccggcgacccggggtgtccggccctgagcgcgccgcctttattcgggagctggaggaagcttctcccacctgtctgggagagcgttacctatgggatggtcctgcagagagagagggacctgaacactgcagctcgcatcggccagtccctggtgaaacagaacagtgttttgatggaggagaacagcaagctggaagccctgctgggctcagccaaggaggagattttatacctcagacaccaggtgaacttgcgggatgagctcctccagctctactcagattctgatgaggaggatgaggatgaagaagaggaggaggaagaaaaggaggcagaagaggaacaggaagaagaagaagcagaggaagacctgcagtgtgctcatccctgtgatgcccctaagctgatttcgcaggaggcattgctgcaccagcaccactgcccacagctggaagccttgcaggagaagctgaggctgctggaggaggagaatcatcagctgagagaagaggcctctcaactcgacactcttgaggatgaggaacagatgctcattctggagtgtgtggagcagtttttggaggccagccaacagatggctgagctgtcggaggtgctggtgctcaggctggaaaactatgaacggcagcagcaggaggtcgctcggctgcaggcccaggtgctgaagctgcagcagcgctgccggatggagactcttcctggtttccaggagacgctggctgaggagctcagaacgtctctaaggaggatgatctcagaccctgtgtattttatggagaggaattatgagatgcccagaggggacacatccagcctaaggtatgattttcgctacagtgaggatcgagagcaggtgcgggggtttgaggctgaggaagggttgatgctggcagcggatatcatgcggggggaagatttcacgcctgcggaggagttggtgccccaggaggagctgggggctgccaagaaggtgccggctgaggaaggggtgatggaagaggcagagctggtgtcagaggagaccgagggctgggaggaggtggaactggagctggatgaggcaacgcggatgaacgtggtgacatcagccctggaggccagcggcttgggcccttcacacctggacatgaattatgtcctccagcagctggccaactggcaagatgcccattacaggcggcagctgaggtggaagatgctccagaaaggtgagtgcccccacggggccctccctgccgccagccggacaagctgcagatcgtcgtgccgatgaaaagagagggtggataagctccccgagtgctcacctgccccagcctggctctacctgctgtgcttatttgcatggactttgcatatcatttgcatagacacctctgatccccttcagtgggaaccgtagtgtcagtgctcatttatgtggcatttgcttaggattccagatctccatccacttttctcctgggggctgggctgggggttagggctgggactgtgcccccacactgcgcctcagcttcccatctctgcccgcttgcttcccctacccccaacccctgcctcctctataccccaggctctccaactctgcagcagtggcagcagcagtcaaaacaaacacggggggcggtgggtgggatggtggagcagcctgggggctgacccaggctggaggacaggaccagccaccctcccacggcctgggaggaagagaggccttctgggactgcccaggctatggggacaaaggccttcaccagcaagggccacagttggaacagtcccctgggtgtcagaaggtgggctagggcctcctgcagggttgtggggtggaacagggtctcctctccccagccagaaaccccaaagtctgggagctgcacctgccgagtgcaggccatgtgagccctgcctctttaaggagccgcaggacatgaaagatgaccttgtgacactcatgcacagcagccattgcacgtgcatcagctcccatcagcctcattccgtggcaggtgatgtgtccccattggttaggtgaggagggtgaggctcagagagctaaggacacttgtttggggccacacagccggggtagatctgagcccgtcctctctactcctgtgctgtagcaccttcactggcccatccctcccctctagtgctgtcctggtacccgtcccagcctgtccccattctcatggccctttggtcactgccgggtggaatagcactggcttcagcaggcgtgtcatgtaagcttgtgcaggttataaactgaaccatgacctttatggcgcatgcagggggcaacctgcataattatcaatggcgactttccgtgtccttctgatacagttgatcagacccctgcccaccgcccaggccaggcctgtggtcatcaatgccccagttcacatccacctgcttctcttccaggctttgctgttccccagcagcctgcagaggccccacagacagcttgaggcccctcctgctgcctggccaagccccacacccgcagaccctccttcccatcctctgaaatgggaccctgtgtctgtcaccagcccaccctctgtgttcatgaacctgggctggagcttggggacccctccctgcccctggcttcctcttccatgttctgccctttcccacatgttggaggcttttccaacgtcttcagggacaggcggtaggaaccccggccctcgctctgcagctggtgcaaaagctgtggctgccaggcctgggccacatggcagcccagggggcaggagaagcccgggagaggcccgctggctaccagactcagccctgagcagggaacagggcccagcttccaccggcagggagttgtgagcgccttcccaacaatgtgcccctcaccccttgatgcccatgctaatggtagccaccctggttcttgttgacttgagggacctggctgtcttccctgttcttcatcctttcttctcagtccctacctactgtttgtaaccacaagtgtctctgtgtgtgggtgggtgagggcccctctgcccagtggtgtgtctcctctccctccctccctcttctgccagtggcctgggggtgtccaggctcccatccatggcccagcccctctcccctctgtcttgatccccccctccctgcccctggcttcctcttccatgttctgccctttcccacacctttgttcctcaatagctgggggctgggactgaggcctcctgcaggtacctgccccccttcacacagcacctctcaatctcctattgcttgtcagcctgtgtgcgtgtggtgcaggaaataaaggatctataccctcctgg

SEQ ID NO: 93 - DNA, 4037 bp, Homo sapiens
cagactcgagatgcgcccgaggaggttgggccggtgctgcgcggggagccggctcggacccggggacccagcagcactcacctgtgcaccttcgccctcagccagtcccgctccggagccctctgcgcagccgcaggcacggggcactggacagagagtaggatcccgagccacctctggaacccagttcctctcggaagcccgcaccggagctcgcccggcctcggaggctggagccaaggcaggagcccggcgcccgtccgcattctcggccatccaaggggatgtccggtctatgcccgacaattcggacgcgccgtggacccgcttcgtattccaagggccgtttggttcccgggccactggccgggggactggaaaggcagcgggcatctggaagacgccagccgcctacgttggccggcgacccggggtgtccggccctgagcgcgccgcctttattcgggagctggaggaagcactgtgtcctaacctacctccgccagtcaaaaagatcacccaggaagacgtcaaagtgatgttatatttgctggaggagagagagagggacctgaacactgcagctcgcatcggccagtccctggtgaaacagaacagtgttttgatggaggagaacagcaagctggaagccctgctgggctcagccaaggaggagattttatacctcagacaccaggtgaacttgcgggatgagctcctccagctctactcagattctgatgaggaggatgaggatgaagaagaggaggaggaagaaaaggaggcagaagaggaacaggaagaagaagaagcagaggaagacctgcagtgtgctcatccctgtgatgcccctaagctgatttcgcaggaggcattgctgcaccagcaccactgcccacagctggaagccttgcaggagaagctgaggctgctggaggaggagaatcatcagctgagagaagaggcctctcaactcgacactcttgaggatgaggaacagatgctcattctggagtgtgtggagcagtttttggaggccagccaacagatggctgagctgtcggaggtgctggtgctcaggctggaaaactatgaacggcagcagcaggaggtcgctcggctgcaggcccaggtgctgaagctgcagcagcgctgccggatgtatggggctgagactgaaaagttgcagaagcagctggcttcggagaaggaaatccagatgcagctccaggaagagagcgtgtgggtgggttcccagctgcaggacctgcgggagaagtacatggattgtgggggcatgctgattgagatgcaggaggaggtgaagaccctccgccagcaacccccggtgtccactgggtctgccacccattacccatacagcgtgcctctggagactcttcctggtttccaggagacgctggctgaggagctcagaacgtctctaaggaggatgatctcagaccctgtgtattttatggagaggaattatgagatgcccagaggggacacatccagcctaaggtatgattttcgctacagtgaggatcgagagcaggtgcgggggtttgaggctgaggaagggttgatgctggcagcggatatcatgcggggggaagatttcacgcctgcggaggagttggtgccccaggaggagctgggggctgccaagaaggtgccggctgaggaaggggtgatggaagaggcagagctggtgtcagaggagaccgagggctgggaggaggtggaactggagctggatgaggcaacgcggatgaacgtggtgacatcagccctggaggccagcggcttgggcccttcacacctggacatgaattatgtcctccagcagctggccaactggcaagatgcccattacaggcggcagctgaggtggaagatgctccagaaaggtgagtgcccccacggggccctccctgccgccagccggacaagctgcagatcgtcgtgccgatgaaaagagagggtggataagctccccgagtgctcacctgccccagcctggctctacctgctgtgcttatttgcatggactttgcatatcatttgcatagacacctctgatccccttcagtgggaaccgtagtgtcagtgctcatttatgtggcatttgcttaggattccagatctccatccacttttctcctgggggctgggctgggggttagggctgggactgtgcccccacactgcgcctcagcttcccatctctgcccgcttgcttcccctacccccaacccctgcctcctctataccccaggctctccaactctgcagcagtggcagcagcagtcaaaacaaacacggggggcggtgggtgggatggtggagcagcctgggggctgacccaggctggaggacaggaccagccaccctcccacggcctgggaggaagagaggccttctgggactgcccaggctatggggacaaaggccttcaccagcaagggccacagttggaacagtcccctgggtgtcagaaggtgggctagggcctcctgcagggttgtggggtggaacagggtctcctctccccagccagaaaccccaaagtctgggagctgcacctgccgagtgcaggccatgtgagccctgcctctttaaggagccgcaggacatgaaagatgaccttgtgacactcatgcacagcagccattgcacgtgcatcagctcccatcagcctcattccgtggcaggtgatgtgtccccattggttaggtgaggagggtgaggctcagagagctaaggacacttgtttggggccacacagccggggtagatctgagcccgtcctctctactcctgtgctgtagcaccttcactggcccatccctcccctctagtgctgtcctggtacccgtcccagcctgtccccattctcatggccctttggtcactgccgggtggaatagcactggcttcagcaggcgtgtcatgtaagcttgtgcaggttataaactgaaccatgacctttatggcgcatgcagggggcaacctgcataattatcaatggcgactttccgtgtccttctgatacagttgatcagacccctgcccaccgcccaggccaggcctgtggtcatcaatgccccagttcacatccacctgcttctcttccaggctttgctgttccccagcagcctgcagaggccccacagacagcttgaggcccctcctgctgcctggccaagccccacacccgcagaccctccttcccatcctctgaaatgggaccctgtgtctgtcaccagcccaccctctgtgttcatgaacctgggctggagcttggggacccctccctgcccctggcttcctcttccatgttctgccctttcccacatgttggaggcttttccaacgtcttcagggacaggcggtaggaaccccggccctcgctctgcagctggtgcaaaagctgtggctgccaggcctgggccacatggcagcccagggggcaggagaagcccgggagaggcccgctggctaccagactcagccctgagcagggaacagggcccagcttccaccggcagggagttgtgagcgccttcccaacaatgtgcccctcaccccttgatgcccatgctaatggtagccaccctggttcttgttgacttgagggacctggctgtcttccctgttcttcatcctttcttctcagtccctacctactgtttgtaaccacaagtgtctctgtgtgtgggtgggtgagggcccctctgcccagtggtgtgtctcctctccctccctccctcttctgccagtggcctgggggtgtccaggctcccatccatggcccagcccctctcccctctgtcttgatccccccctccctgcccctggcttcctcttccatgttctgccctttcccacacctttgttcctcaatagctgggggctgggactgaggcctcctgcaggtacctgccccccttcacacagcacctctcaatctcctattgcttgtcagcctgtgtgcgtgtggtgcaggaaataaaggatctataccctcctgg

SEQ ID NO: 94 - DNA, 4886 bp, Homo sapiens
aaaaagagaaactgttgggagaggaatcgtatctccatatttcttctttcagccccaatccaagggttgtagctggaactttccatcagttcttcctttctttttcctctctaagcctttgccttgctctgtcacagtgaagtcagccagagcagggctgttaaactctgtgaaatttgtcataagggtgtcaggtatttcttactggcttccaaagaaacatagataaagaaatctttcctgtggcttcccttggcaggctgcattcagaaggtctctcagttgaagaaagagcttggaggacaacagcacaacaggagagtaaaagatgccccagggctgaggcctccgctcaggcagccgcatctggggtcaatcatactcaccttgcccgggccatgctccagcaaaatcaagctgttttcttttgaaagttcaaactcatcaagattatgctgctcactcttatcattctgttgccagtagtttcaaaatttagttttgttagtctctcagcaccgcagcactggagctgtcctgaaggtactctcgcaggaaatgggaattctacttgtgtgggtcctgcacccttcttaattttctcccatggaaatagtatctttaggattgacacagaaggaaccaattatgagcaattggtggtggatgctggtgtctcagtgatcatggattttcattataatgagaaaagaatctattgggtggatttagaaagacaacttttgcaaagagtttttctgaatgggtcaaggcaagagagagtatgtaatatagagaaaaatgtttctggaatggcaataaattggataaatgaagaagttatttggtcaaatcaacaggaaggaatcattacagtaacagatatgaaaggaaataattcccacattcttttaagtgctttaaaatatcctgcaaatgtagcagttgatccagtagaaaggtttatattttggtcttcagaggtggctggaagcctttatagagcagatctcgatggtgtgggagtgaaggctctgttggagacatcagagaaaataacagctgtgtcattggatgtgcttgataagcggctgttttggattcagtacaacagagaaggaagcaattctcttatttgctcctgtgattatgatggaggttctgtccacattagtaaacatccaacacagcataatttgtttgcaatgtccctttttggtgaccgtatcttctattcaacatggaaaatgaagacaatttggatagccaacaaacacactggaaaggacatggttagaattaacctccattcatcatttgtaccacttggtgaactgaaagtagtgcatccacttgcacaacccaaggcagaagatgacacttgggagcctgagcagaaactttgcaaattgaggaaaggaaactgcagcagcactgtgtgtgggcaagacctccagtcacacttgtgcatgtgtgcagagggatacgccctaagtcgagaccggaagtactgtgaagatgttaatgaatgtgctttttggaatcatggctgtactcttgggtgtaaaaacacccctggatcctattactgcacgtgccctgtaggatttgttctgcttcctgatgggaaacgatgtcatcaacttgtttcctgtccacgcaatgtgtctgaatgcagccatgactgtgttctgacatcagaaggtcccttatgtttctgtcctgaaggctcagtgcttgagagagatgggaaaacatgtagcggttgttcctcacccgataatggtggatgtagccagctctgcgttcctcttagcccagtatcctgggaatgtgattgctttcctgggtatgacctacaactggatgaaaaaagctgtgcagcttcaggaccacaaccatttttgctgtttgccaattctcaagatattcgacacatgcattttgatggaacagactatggaactctgctcagccagcagatgggaatggtttatgccctagatcatgaccctgtggaaaataagatatactttgcccatacagccctgaagtggatagagagagctaatatggatggttcccagcgagaaaggcttattgaggaaggagtagatgtgccagaaggtcttgctgtggactggattggccgtagattctattggacagacagagggaaatctctgattggaaggagtgatttaaatgggaaacgttccaaaataatcactaaggagaacatctctcaaccacgaggaattgctgttcatccaatggccaagagattattctggactgatacagggattaatccacgaattgaaagttcttccctccaaggccttggccgtctggttatagccagctctgatctaatctggcccagtggaataacgattgacttcttaactgacaagttgtactggtgcgatgccaagcagtctgtgattgaaatggccaatctggatggttcaaaacgccgaagacttacccagaatgatgtaggtcacccatttgctgtagcagtgtttgaggattatgtgtggttctcagattgggctatgccatcagtaatgagagtaaacaagaggactggcaaagatagagtacgtctccaaggcagcatgctgaagccctcatcactggttgtggttcatccattggcaaaaccaggagcagatccctgcttatatcaaaacggaggctgtgaacatatttgcaaaaagaggcttggaactgcttggtgttcgtgtcgtgaaggttttatgaaagcctcagatgggaaaacgtgtctggctctggatggtcatcagctgttggcaggtggtgaagttgatctaaagaaccaagtaacaccattggacatcttgtccaagactagagtgtcagaagataacattacagaatctcaacacatgctagtggctgaaatcatggtgtcagatcaagatgactgtgctcctgtgggatgcagcatgtatgctcggtgtatttcagagggagaggatgccacatgtcagtgtttgaaaggatttgctggggatggaaaactatgttctgatatagatgaatgtgagatgggtgtcccagtgtgcccccctgcctcctccaagtgcatcaacaccgaaggtggttatgtctgccggtgctcagaaggctaccaaggagatgggattcactgtcttgatattgatgagtgccaactgggggagcacagctgtggagagaatgccagctgcacaaatacagagggaggctatacctgcatgtgtgctggacgcctgtctgaaccaggactgatttgccctgactctactccaccccctcacctcagggaagatgaccaccactattccgtaagaaatagtgactctgaatgtcccctgtcccacgatgggtactgcctccatgatggtgtgtgcatgtatattgaagcattggacaagtatgcatgcaactgtgttgttggctacatcggggagcgatgtcagtaccgagacctgaagtggtgggaactgcgccacgctggccacgggcagcagcagaaggtcatcgtggtggctgtctgcgtggtggtgcttgtcatgctgctcctcctgagcctgtggggggcccactactacaggactcagaagctgctatcgaaaaacccaaagaatccttatgaggagtcgagcagagatgtgaggagtcgcaggcctgctgacactgaggatgggatgtcctcttgccctcaaccttggtttgtggttataaaagaacaccaagacctcaagaatgggggtcaaccagtggctggtgaggatggccaggcagcagatgggtcaatgcaaccaacttcatggaggcaggagccccagttatgtggaatgggcacagagcaaggctgctggattccagtatccagtgataagggctcctgtccccaggtaatggagcgaagctttcatatgccctcctatgggacacagacccttgaagggggtgtcgagaagccccattctctcctatcagctaacccattatggcaacaaagggccctggacccaccacaccaaatggagctgactcagtgaaaactggaattaaaaggaaagtcaagaagaatgaactatgtcgatgcacagtatcttttctttcaaaagtagagcaaaactataggttttggttccacaatctctacgactaatcacctactcaatgcctggagacagatacgtagttgtgcttttgtttgctcttttaagcagtctcactgcagtcttatttccaagtaagagtactgggagaatcactaggtaacttattagaaacccaaattgggacaacagtgctttgtaaattgtgttgtcttcagcagtcaatacaaatagatttttgtttttgttgttcctgcagccccagaagaaattaggggttaaagcagacagtcacactggtttggtcagttacaaagtaatttctttgatctggacagaacatttatatcagtttcatgaaatgattggaatattacaataccgttaagatacagtgtaggcatttaactcctcattggcgtggtccatgctgatgattttgcaaaatgagttgtgatgaatcaatgaaaaatgtaatttagaaactgatttcttcagaattagatggcttattttttaaaatatttgaatgaaaacattttatttttaaaatattacacaggaggcttcggagtttcttagtcattactgtccttttcccctacagaattttccctcttggtgtgattgcacagaatttgtatgtattttcagttacaagattgtaagtaaattgcctgatttgttttcattatagacaacgatgaatttcttctaattatttaaataaaatcaccaaaaacataa

SEQ ID NO: 95 - DNA, 3173 bp, Homo sapiens
acggcagcgcgccggccgcgagagagggccccgtcgcgaccgcgtccccttgggtccttgatcctgagctgaccgggtagccatggccttgcggctcctgaagctggcagcgacgtccgcgtccgcccgggtcgtggcggcgggcgcccagcgcgtgagaggaattcatagcagtgtgcagtgcaagctgcgctatggaatgtggcatttcctacttggggataaagcaagcaaaagactgacagaacgcagcagagtgataactgtagatggcaatatatgtactggaaaaggcaaacttgcaaaagaaatagcagagaaactaggcttcaagcactttcctgaagcggggattcattatccagacagtaccacaggagatgggaagcccctcgccaccgactataatggcaactgtagtttggagaaattttacgatgatccgagaagcaatgatggcaacagttaccgcctgcagtcctggttgtacagcagtcgcctgctgcagtactcagatgccttggagcacttgctgaccacaggacaaggtgttgtgttggagcgctccatcttcagtgactttgtgttcctggaggcgatgtacaaccagggattcatccgaaagcagtgtgtggaccactacaacgaggtgaagagcgtcaccatctgcgattacctgcccccccacctggtgatttacatcgatgtgcccgttccagaggtccagaggcggattcagaagaaaggagatccacatgaaatgaagatcacctctgcctatctacaggacattgagaatgcctataagaaaacctttctccctgagatgagtgaaaaatgtgaggttttacaatattctgcaagggaagctcaagattcaaaaaaggtggtagaggacattgaatacctgaagttcgataaagggccgtggctcaagcaggacaatcgcactttataccacctgcgattactggttcaggataagtttgaggtgctgaattacacaagcattcctatctttctcccggaagtcaccattggagctcatcagactgaccgtgtcttacatcagttcagagagctgccgggccgcaagtacagccctgggtacaacaccgaggtgggagacaagtggatctggctgaagtgaacgggccgccttctgctccagctgcatcacagtgatggccaagctgcatcagccgcactctcctggacgccatatagctttaagatcgggggagggtaaataatgcaaaaattgcacagtggaagaaggggtctcacaaaaagcaatccatcctgtagtataggtaatggagttgggggaagcagcttccattctggatgtttggaaccctttagctttgttttggaatggcccaccattctcactggaaaacagtggtctgctgtgaaaggccagctctcggcagcccctgtggtttcagcgctgccgctctgtgtcattcaggttgtgcacattgtttttcttctgacttccagaaataaaagtgtttccatgggaatttccccatcgtacgtctatgtgcgtgcgggcacgtcgaaactgcacacgtgcacacacgctgctctgggccctgtttggtgtggtgtggtttaattgaggcttacattatgctgaagagtttttctaaaggcctactgtatttattttagtaatgtgctacattagagtagaaaaaataagaacgtgaagaagaaatagcaaaaggagaaaattaccacagatttacagaacaatatgttttaagagagatgttgagaaagattcacgtggccgtcctcagcgtctcaaactcctttgaagggagatttgagcttaggctgttgatgacataagatgcaaaagcaaaataatatactctctttattacccagaaaatcaagttgccagtcaaaactgagaaatgagaaagaaaatcagatttctttattcatctctgttgaagcctagaaaaccaaaacaagctggttgtggttcagcatcatggtttaggaatcaagctgtcagttgtgagtcctactgaactgtgggttttccactgtaaagctccactgtgtccattaggaatcaggctgccagttgtgagtcctactgaactgtgggttttccactgtaaagctccactgtgtccaatatggtagctcctagccacatgtgggtattgaaatttaaatgagctaaaatgtaatagagtttaaaattgggttccttggttgcactggccatagttcaggcactccacagccgcctgtgggcagtagttccagtgctggtgcagaggacgatgctctgctccccgcggaagctctaccaggcctcgctgctgcggagcatgcgaagaagatgcacactccttccctccttgcgtccgcctgcctttttccctctccccttccttccctccttctttcctcctccttccctcccttcctttcttccttccatctgtccttgttttcctcccttcccttcctccctgcctctttccttccctccttctcttccttccttccgtctgtccttgttttcctccctgcctctttccttccctccttctcttccttccttccttccgtctgtccttgttttcctcccttcccttcctccctgcctccttccttgttttaagaatttgaaaataaagtttcccaggagttttgaattggagtcgagatttaagtggctgaagttttgcatttcactaggaaaccaacagctttaatcatgaaatgaaagcacagctgggcattgggccagtcacagagtgtcttttgctctgagcacttcacaaacccattgtggaggggaggaaagaaaaagaaagccatctttaattatcttagctgttcctaatgtctttggctgcaaagagctagctgtttccttcaaccttggtggttgcacgggtagtgtcctcagcagtgagagggcaggtctgccctgtggtcaggattgcccttgtgaggggcagagctctccaaccatgcagggctccgtgtcggcatggtgtggactcgggtgctctgatcatcccctgtgtttgcgtctgaccctgtgtggttgcattcccttgatggaatgggaagtatgtaatttgtagtgctgaggacattcgtctgtttgattttctggtgttttcaatgac

SEQ ID NO: 96 - DNA, 743 bp, Homo sapiens
acggcagcgcgccggccgcgagagagggccccgtcgcgaccgcgtccccttgggtccttgatcctgagctgaccgggtagccatggccttgcggctcctgaagctggcagcgacgtccgcgtccgcccgggtcgtggcggcgggcgcccagcgcgtgagaggaattcatagcagtgtgcagtgcaagctgcgctatggaatgtggcatttcctacttggggataaagcaagcaaaagactgacagaacgcagcagagtgataactgtagatggcaatatatgtactggaaaaggcaaacttgcaaaagaaatagcagagaaactaggcttcaagcactttcctgaagcggggattcattatccagacagtaccacaggagatgggaagcccctcgccaccgactataatggcaactgtagtttggagaaattttacgatgatccgagaagcaatgatggcaacagttaccgcctgcagtcctggttgtacagcagtcgcctgctgcagtactcagatgccttggagcacttgctgaccacaggacaaggtgttgtgttggagcgctccatcttcagtgactttgtgttcctggaggcgatgtacaaccagggattcatccgaaagcagtgtgagtcagcattgcagacccacttctgggtgtgtggtgcgactttgcaagggctgtgatagactcaccttgcacttactgtgtttatgaatgtctgttagatagatgaataaa

SEQ ID NO: 97 - DNA, 1369 bp, Homo sapiens
acggcagcgcgccggccgcgagagagggccccgtcgcgaccgcgtccccttgggtccttgatcctgagctgaccgggtagccatggccttgcggctcctgaagctggcagcgacgtccgcgtccgcccgggtcgtggcggcgggcgcccagcgcgtgagaggaattcatagcagtgtgcagtgcaagctgcgctatggaatgtggcatttcctacttggggataaagcaagcaaaagactgacagaacgcagcagagtgataactgtagatggcaatatatgtactggaaaaggcaaacttgcaaaagaaatagcagagaaactaggcttcaagcactttcctgaagcggggattcattatccagacagtaccacaggagatgggaagcccctcgccaccgactataatggcaactgtagtttggagaaattttacgatgatccgagaagcaatgatggcaacagttaccgcctgcagtcctggttgtacagcagtcgcctgctgcagtactcagatgccttggagcacttgctgaccacaggacaaggtgttgtgttggagcgctccatcttcagtgactttgtgttcctggaggcgatgtacaaccagggattcatccgaaagcagtgtgagtcagcattgcagacccacttctggactggggtggctggagccagtggaaagctggaatctgggagctcagaggaagtactgttgattaatgaaagaggaggccgaagcaagccaggtgtggaccactacaacgaggtgaagagcgtcaccatctgcgattacctgcccccccacctggtgatttacatcgatgtgcccgttccagagccacatgaaatgaagatcacctctgcctatctacaggacattgagaatgcctataagaaaacctttctccctgagatgagtgaaaaatgtgaggttttacaatattctgcaagggaagctcaagattcaaaaaaggtggtagaggacattgaatacctgaagttcgataaagggccgtggctcaagcaggacaatcgcactttataccacctgcgattactggttcaggataagtttgaggtgctgaattacacaagcattcctatctttctcccggaagtcaccattggagctcatcagactgaccgtgtcttacatcagttcagagagcgattagattggactgtgtgttttggggaggaatccacagaggtgaagcatcaggggcacttgctgtcagtgcagcctggcaccatggccctgaccgtgggctcctggctgaggtcgtgcttgctgggtctccactggaagctgctcttcctctttccagaaagccccatgcacaccacagcctttatgttcctttgt

SEQ ID NO: 98 - DNA, 3119 bp, Homo sapiens
acggcagcgcgccggccgcgagagagggccccgtcgcgaccgcgtccccttgggtccttgatcctgagctgaccgggtagccatggccttgcggctcctgaagctggcagcgacgtccgcgtccgcccgggtcgtggcggcgggcgcccagcgcgtgagaggaattcatagcagtgtgcagtgcaagctgcgctatggaatgtggcatttcctacttggggataaagcaagcaaaagactgacagaacgcagcagagtgataactgtagatggcaatatatgtactggaaaaggcaaacttgcaaaagaaatagcagagaaactaggcttcaagcactttcctgaagcggggattcattatccagacagtaccacaggagatgggaagcccctcgccaccgactataatggcaactgtagtttggagaaattttacgatgatccgagaagcaatgatggcaacagttaccgcctgcagtcctggttgtacagcagtcgcctgctgcagtactcagatgccttggagcacttgctgaccacaggacaaggtgttgtgttggagcgctccatcttcagtgactttgtgttcctggaggcgatgtacaaccagggattcatccgaaagcagtgtgtggaccactacaacgaggtgaagagcgtcaccatctgcgattacctgcccccccacctggtgatttacatcgatgtgcccgttccagaggtccagaggcggattcagaagaaaggagatccacatgaaatgaagatcacctctgcctatctacaggacattgagaatgcctataagaaaacctttctccctgagatgagtgaaaaatgtgaggttttacaatattctgcaagggaagctcaagattcaaaaaaggtggtagaggacattgaatacctgaagttcgataaagggccgtggctcaagcaggacaatcgcactttataccacctgcgattactggttcaggataagtttgaggtgctgaattacacaagcattcctatctttctcccggaagtcaccattggagctcatcagactgaccgtgtcttacatcagttcagagagctgccgggccgcaagtacagccctgggtacaacaccgaggtgggagacaagtggatctggctgaagtgaacgggccgccttctgctccagctgcatcacagtgatggccaagctgcatcagccgcactctcctggacgccatatagctttaagatcgggggagggtaaataatgcaaaaattgcacagtggaagaaggggtctcacaaaaagcaatccatcctgtagtataggtaatggagaatggcccaccattctcactggaaaacagtggtctgctgtgaaaggccagctctcggcagcccctgtggtttcagcgctgccgctctgtgtcattcaggttgtgcacattgtttttcttctgacttccagaaataaaagtgtttccatgggaatttccccatcgtacgtctatgtgcgtgcgggcacgtcgaaactgcacacgtgcacacacgctgctctgggccctgtttggtgtggtgtggtttaattgaggcttacattatgctgaagagtttttctaaaggcctactgtatttattttagtaatgtgctacattagagtagaaaaaataagaacgtgaagaagaaatagcaaaaggagaaaattaccacagatttacagaacaatatgttttaagagagatgttgagaaagattcacgtggccgtcctcagcgtctcaaactcctttgaagggagatttgagcttaggctgttgatgacataagatgcaaaagcaaaataatatactctctttattacccagaaaatcaagttgccagtcaaaactgagaaatgagaaagaaaatcagatttctttattcatctctgttgaagcctagaaaaccaaaacaagctggttgtggttcagcatcatggtttaggaatcaagctgtcagttgtgagtcctactgaactgtgggttttccactgtaaagctccactgtgtccattaggaatcaggctgccagttgtgagtcctactgaactgtgggttttccactgtaaagctccactgtgtccaatatggtagctcctagccacatgtgggtattgaaatttaaatgagctaaaatgtaatagagtttaaaattgggttccttggttgcactggccatagttcaggcactccacagccgcctgtgggcagtagttccagtgctggtgcagaggacgatgctctgctccccgcggaagctctaccaggcctcgctgctgcggagcatgcgaagaagatgcacactccttccctccttgcgtccgcctgcctttttccctctccccttccttccctccttctttcctcctccttccctcccttcctttcttccttccatctgtccttgttttcctcccttcccttcctccctgcctctttccttccctccttctcttccttccttccgtctgtccttgttttcctccctgcctctttccttccctccttctcttccttccttccttccgtctgtccttgttttcctcccttcccttcctccctgcctccttccttgttttaagaatttgaaaataaagtttcccaggagttttgaattggagtcgagatttaagtggctgaagttttgcatttcactaggaaaccaacagctttaatcatgaaatgaaagcacagctgggcattgggccagtcacagagtgtcttttgctctgagcacttcacaaacccattgtggaggggaggaaagaaaaagaaagccatctttaattatcttagctgttcctaatgtctttggctgcaaagagctagctgtttccttcaaccttggtggttgcacgggtagtgtcctcagcagtgagagggcaggtctgccctgtggtcaggattgcccttgtgaggggcagagctctccaaccatgcagggctccgtgtcggcatggtgtggactcgggtgctctgatcatcccctgtgtttgcgtctgaccctgtgtggttgcattcccttgatggaatgggaagtatgtaatttgtagtgctgaggacattcgtctgtttgattttctggtgttttcaatgac

SEQ ID NO: 99 - DNA, 4207 bp, Homo sapiens
cgctccggcagtggtgctgggagtgtcgtggacgccgtgccgttactcgtagtcaggcggcggcgcaggcggcggcggcggcatagcgcacagcgcgccttagcagcagcagcagcagcagcagcatcggaggtacccccgccgtcgcagcccccgcgctggtgcagccaccctcgctccctctgctcttcctcccttcgctcgcaccatggctgatcagctgaccgaagaacagattgctgaattcaaggaagccttctccctatttgataaagatggcgatggcaccatcacaacaaaggaacttggaactgtcatgaggtcactgggtcagaacccaacagaagctgaattgcaggatatgatcaatgaagtggatgctgatggtaatggcaccattgacttccccgaatttttgactatgatggctagaaaaatgaaagatacagatagtgaagaagaaatccgtgaggcattccgagtctttgacaaggatggcaatggttatatcagtgcagcagaactacgtcacgtcatgacaaacttaggagaaaaactaacagatgaagaagtagatgaaatgatcagagaagcagatattgatggagacggacaagtcaactatgaagaattcgtacagatgatgactgcaaaatgaagacctactttcaactcctttttcccccctctagaagaatcaaattgaatcttttacttacctcttgcaaaaaaaagaaaaaagaaaaaagttcatttattcattctgtttctatatagcaaaactgaatgtcaaaagtaccttctgtccacacacacaaaatctgcatgtattggttggtggtcctgtcccctaaagatcaagctacacatcagttttacaatataaatacttgtactaccttaatgataaggactccttaaagttccatttgctaatgattaatacactgtttgggctggccagtttttcatgcatgcagcttgacgattgagcacagtcaggcctttgtattaaaaatgaaaaatgaaaaaacaaattcaaaacctattcaaatgggttctagttcaatttgtttagtataaattgtcatagctggtttactgaaaacaaacacatttaaaattggtttacctcaggatgacgtgcagaaaaatgggtgaaggataaaccgttgagacgtggccccactggtaggatggtcctcttgtacttcgtgtgctccgacccatggtgacgatgacacaccctggtggcatgcccgtgtatgttggtttagcgttgtctgcattgttctagagtgaaacaggtgtcaggctgtcactgttcacacaaatttttaataagaaacatttaccaagggagcatctttggactctctgtttttaaaaccttctgaaccatgacttggagccggcagagtaggctgtggctgtggacttcagcacaaccatcaacattgctgttcaaagaaattacagtttacgtccattccaagttgtaaatgctagtcttttttttttttttttccaataaaaagaccattaacttaaagtggtgttaaatgctttgtaaagctgagatctaaatggggacaaggcaggtggaggggaggccagtgtacatgtaaatgcccacagcccagcattgggtttccctcccaaggccccagcaccaacctctgagcccaagaccttgcctgaaaacaagcagataccgattgcttcatcctatttatggacatgtaggtctagttgcattttcactggggggaggggggaaggtgaattatggtaacttttaatgatctattcaggcagtagagctcttaaggaaaaaaaaaacccactttctctcaagcatgtatttaggggttgttctcaattgtgctgctgattacctgtcttatgtaactacttgagaccatctgcaagagacatgatttagtgtgtctgtaattcaatcttcgctgtgtgtggtagaagcagtagtcacttttgtaagccagtctcttcatgcctaaaagacactaccagtcacctttgattcgcgacttttaatttatgattatacttagcctcctcctcctttttttttttttcccaagttgacttgactttgcttttttccccccaagtagaactaatgctagcttccagcttgaaagtaaaactccagtgtggagtgaattttgtgtctaattataaacctgtaaccaaaactcagacatctggtactggtctttgcattgagattggtccctgtaaaaccccctttaaaagcatattgcatttagtacagagctcttttttgaaatgaaggctggagatgtgcatttttcacggtgttaactggttgtatcttattagcaaggagattggggttttgagtgtttgcgtgggtggtttcaatttgccagggaacagtggcaggctgctagcaaggcagtgagaagctcttggcagccaaatgggtgcattcagggctgatttatagagacccttggcttctccttctcctactccctgtctttctggcattttgtagcttgttagattttctgccagaggggtgggtcagagcagtggaggggagacatcgcccatgtgcttctgctactggtccttgggctgggtggttggtagaggagatgttgacactatgagctaagggttggcttttgtaattacctgaatctgaaaggaatgcctaaggttaccttggggtttctcttctggtgagatagggttcctggtttgagtaagttaatgtcctggatatttcttgtggcagggggtggtcaaagagcctgattgctgacccagtctcaggcctgtggtcgatgacctctcggtagtttcaaagggggctggagggggatatttgacttgttttttcgaaatgtagccttctaaccctcaagtctttagaagctgggtggactcttagtggtcctgcagcgtatcctaaaagactacctttgaaacaggattcttgtatggccaggatcgtgtctgggaaccagaaaccctacaccctccccctccagggaatgctgagttccagttttgagcagaggtgaggcagaatccactgtagccttccgccctggtatttggggggatgaccagcccaggcgttgggtgttagtctgcatgagtttgtgagaggaaatagctgggtgtcctggcagtgcccttgaagttggttaggaccttcctgtaaactcttgcccctacttctaactactctataaatatatacatatatttatatataaagtgattagttgaactggcatcctgctttagcctgagacttgccataagaaactgctgagtacttggcaaaccctttcatagttttgttctccatctgtttggggtaggtgttgagcgaggcaaatggatctcgatatttcagatgggcttttgatgcactgttgccaaggaaggctttttctgattttttgacaaatgaatttttgcacactttcattggtgtctttcggcaacttacacacattgaaaatgagctattgtacatatttttatattctctttataaatgcatgtctgattgtacttgtaacaatattgtaatgaacggctgtgcagtaggcccagcgctgctgtgtctcgtcagaggaatagcttaccacgaacccctcagcatactgggaatctcttcctgaacaacgaatgtaaatttggtcaagtctactcttccgttcattcaattattttaagcatttgaattatttattgtatatcctaaatatatttctcctttggcagtgactagatttccactaatgtgtcttaatctatccctccagctggcagttactgtttttttaatcccctgaagttgtcctgtaggagacagaaattctttgctgtctgtatcccttggagtaagaaggtagtggcatgggtggagtgtgtgttctttctccaaatctattatgatgtttattaaacacttctgtagcaaagatggtggtagttcttttgttactgaagttgcccttcaccatggctatttgaaaaggagatgtacttggacgtttctgtaaatcttgagataaactgtttggagatttaaccacctctctgatgggggaccaactctatggaaattgtaaatacgttttatttataaacctggcactgtattcaataaacatttctgcagcctttcatctct

SEQ ID NO: 100 - DNA, 1779 bp, Homo sapiens
cgctccggcagtggtgctgggagtgtcgtggacgccgtgccgttactcgtagtcaggcggcggcgcaggcggcggcggcggcatagcgcacagcgcgccttagcagcagcagcagcagcagcagcatcggaggtacccccgccgtcgcagcccccgcgctggtgcagccaccctcgctccctctgctcttcctcccttcgctcgcaccatggctgatcagctgaccgaagaacagattgctgaattcaaggaagccttctccctatttgataaagatggcgatggcaccatcacaacaaaggaacttggaactgtcatgaggtcactgggtcagaacccaacagaagctgaattgcaggatatgatcaatgaagtggatgctgatggtaatggcaccattgacttccccgaatttttgactatgatggctagaaaaatgaaagatacagatagtgaagaagaaatccgtgaggcattccgagtctttgacaaggatggcaatggttatatcagtgcagcagaactacgtcacgtcatgacaaacttaggagaaaaactaacagatgaagaagtagatgaaatgatcagagaagcagatattgatggagacggacaagtcaactatgaagaattcgtacagatgatgactgcaaaatgaagacctactttcaactcctttttcccccctctagaagaatcaaattgaatcttttacttacctcttgcaaaaaaaagaaaaaagaaaaaagttcatttattcattctgtttctatatagcaaaactgaatgtcaaaagtaccttctgtccacacacacaaaatctgcatgtattggttggtggtcctgtcccctaaagatcaagctacacatcagttttacaatataaatacttgtactaccttaatgataaggactccttaaagttccatttgctaatgattaatacactgtttgggctggccagtttttcatgcatgcagcttgacgattgagcacagtcaggcctttgtattaaaaatgaaaaatgaaaaaacaaattcaaaacctattcaaatgggttctagttcaatttgtttagtataaattgtcatagctggtttactgaaaacaaacacatttaaaattggtttacctcaggatgacgtggtcctcttgtacttcgtgtgctccgacccatggtgacgatgacacaccctggtggcatgcccgtgtatgttggtttagcgttgtctgcattgttctagagtgaaacaggtgtcaggctgtcactgttcacacaaatttttaataagaaacatttaccaagggagcatctttggactctctgtttttaaaaccttctgaaccatgacttggagccggcagagtaggctgtggctgtggacttcagcacaaccatcaacattgctgttcaaagaaattacagtttacgtccattccaagttgtaaatgctagtcttttttttttttttttccaataaaaagaccattaacttaaagtggtgttaaatgctttgtaaagctgagatctaaatggggacaaggcaggtggaggggaggccagtgtacatgtaaatgcccacagcccagcattgggtttccctcccaaggccccagcaccaacctctgagcccaagaccttgcctgaaaacaagcagataccgattgcttcatcctatttatggacatgtaggtctagttgcattttcactggggggaggggggaaggtgaattatggtaacttttaatgatctattcaggcagtagagctcttaagg

SEQ ID NO: 101 - DNA, 6024 bp, Homo sapiens
cgtggctcctccttgcgggcggaggcaggcggtgccgcggcgccgggacccgactcatccggtgcttgcgtgtggtggtgagcgcagcgccgaggatgaggaggtgcaacagcggctccgggccgccgccgtcgctgctgctgctgctgctgtggctgctcgcggttcccggcgctaacgcggccccgcggtcggcgctctattcgccttccgacccgctgacgctgctgcaggcggacacggtgcgcggcgcggtgctgggctcccgcagcgcctgggccgtggagttcttcgcctcctggtgcggccactgcatcgccttcgccccgacgtggaaggcgctggccgaagacgtcaaagcctggaggccggccctgtatctcgccgccctggactgtgctgaggagaccaacagtgcagtctgcagagacttcaacatccctggcttcccgactgtgaggttcttcaaggcctttaccaagaacggctcgggagcagtatttccagtggctggtgctgacgtgcagacgctgcgggagaggctcattgacgccctggagtcccatcatgacacgtggcccccagcctgtcccccactggagcctgccaagctggaggagattgatggattctttgcgagaaataacgaagagtacctggctctgatctttgaaaagggaggctcctacctgggtagagaggtggctctggacctgtcccagcacaaaggcgtggcggtgcgcagggtgctgaacacagaggccaatgtggtgagaaagtttggtgtcaccgacttcccctcttgctacctgctgttccggaatggctctgtctcccgagtccccgtgctcatggaatccaggtccttctataccgcttacctgcagagactctctgggctcaccagggaggctgcccagaccacagttgcaccaaccactgctaacaagatagctcccactgtttggaaattggcagatcgctccaagatctacatggctgacctggaatctgcactgcactacatcctgcggatagaagtgggcaggttcccggtcctggaagggcagcgcctggtggccctgaaaaagtttgtggcagtgctggccaagtatttccctggccggcccttagtccagaacttcctgcactccgtgaatgaatggctcaagaggcagaagagaaataaaattccctacagtttctttaaaactgccctggacgacaggaaagagggtgccgttcttgccaagaaggtgaactggattggctgccaggggagtgagccgcatttccggggctttccctgctccctgtgggtcctcttccacttcttgactgtgcaggcagctcggcaaaatgtagaccactcacaggaagcagccaaggccaaggaggtcctcccagccatccgaggctacgtgcactacttcttcggctgccgagactgcgctagccacttcgagcagatggctgctgcctccatgcaccgggtggggagtcccaacgccgctgtcctctggctctggtctagccacaacagggtcaatgctcgccttgcaggtgcccccagcgaggacccccagttccccaaggtgcagtggccaccccgtgaactttgttctgcctgccacaatgaacgcctggatgtgcccgtgtgggacgtggaagccaccctcaacttcctcaaggcccacttctccccaagcaacatcatcctggacttccctgcagctgggtcagctgcccggagggatgtgcagaatgtggcagccgccccagagctggcgatgggagccctggagctggaaagccggaattcaactctggaccctgggaagcctgagatgatgaagtcccccacaaacaccaccccacatgtgccggctgagggacctgaggcaagtcgacccccgaagctgcaccctggcctcagagctgcaccaggccaggagcctcctgagcacatggcagagcttcagaggaatgagcaggagcagccgcttgggcagtggcacttgagcaagcgagacacaggggctgcattgctggctgagtccagggctgagaagaaccgcctctggggccctttggaggtcaggcgcgtgggccgcagctccaagcagctggtcgacatccctgagggccagctggaggcccgagctggacggggccgaggccagtggctgcaggtgctgggagggggcttctcttacctggacatcagcctctgtgtggggctctattccctgtccttcatgggcctgctggccatgtacacctacttccaggccaagataagggccctgaagggccatgctggccaccctgcagcctgaaccacctggggaggaggcgggagagggagctgccatctctaggcacctcaagccccctgaccccattccctcccctcccaccccttgctccttgtctggcctagaagtgtgggaaattcaggaaaacgagttgctccagtgaagcttcttggggttgctaggacagagagctcctttgacacaaaagacaggagcagggtccaggttcccctgctgtgcagggagggcagccccgggcagtgggcatagggcagctcagtccctggcctcttagcaccacattcctgtttttcagcttatttgaagtcctgcctcattctcactggagcctcagtctctcctgcttggtcttggccctcaactggggcaagtgaagccagaggagggtcccccagctgggtgggctggaatggaactcctcactagctgctggggctccgcccaccctgctcccttccggacaatgaagaagcctttgcaccctgggaggaaggaccaccccgggccctctatgcctggccagcctccagctcctcagacctcctgggtggggtttggcttcagggtggggtttggaagcttctggaagtcgtgctggtctcccaggtgaggcaagccatggttgctgggctgtagggtgagtggcttgcttggtgggacctgacgagttggtggcatgggaaggatgtgggtctctagtgccttgccctggcttagctgcaggagaagatggctgctttcacttccccccattgagctctgctccctctgagcctggtcttttgtccttttttattttggtctccaagatgaatgctcatctttggagggtgccaggtagaagctagggaggggagtgtcttctctctccaggtttcaccttccagtgtgcagaagttagaagggtctggcgggggcagtgccttacacatgcttgattcccacgctaccccctgccttgggaggtgtgtggaataaattatttttgttaaggcaagcattggtgtgttctttaacttgctacttggagacctagtgtccagtctggacagaatgcacagagaccagcctcacctggaatgcagccagactcgatgtccctcagcacacacagctcctggccacagactgcccatagaactgtctgcacccaaaccccatggccttttcatgcacggagacaggcctctggatgtgcagccttgccaccccctgccccaatcctccctgagagctcctgcctcagtgccctgggctggtgagggagaagcctgtctgcacctgcctaattccagctcctccaggaagcaagggcttgtttgtcagagctgcagggttggccactcggtggggaggagtcagccaggattagagagcctgcccctaatccggcctgctgggttttacaaggatcagagctgctgataatgaacctcattaagggggagcaggagcctcaatccgatttggttttctctttgacatcttcactctgctcagatggcctgggtgctatgtggagcaggtgggatgccaaggccactcctgctatggggcagctggggctggggagggatggcagtctccctgcatgtttccctcgacctctttagctgcagcgccttgctgggctcctgggttggactccctctctgtgcccctgctccaggcacccattggctccatcctcctggttgtgctctgcaccccctgctcccttgggctggccctggctgggggcctgagagacagacaggaacccacaatcaggaggcaaccctggcctgcaagaggaagacagaggctcccagggccggtgccctgtgtgcccactgcaccaaggccgctgaataagcctgcccttcaccccctaagggctccttgcccaatgccaagtgctggggatttctgtcagcaagccctgtggctccagtgacggtatttctaaagccaaacttagttacctagaattagcgccatgttggaaacactgtcgcagcagcccgggctgcacagtgtgtagcccagcctccaggtccacggagtggtgtggacctcccacctcacagctgcctctggcagccaagcctcttttcgcccggccccagcccctctggttgataaacgggtgggcctcctcagcagcgtggctgcctttcaccttgatttccccagggctctcggcaacatcgataaaccagcctcgcccaccagctgggccctcccccacccagtctgccaggctgggagctggagcttgctgagtcttgaatgcccttctagatggcttctctagaggctctcctggcaagagagggtcccaaggggagccctgcaaagcaaaggctccttgtctggggcgggatagagaatctcgcctctgtctggtgtgttacctactgggggcacaggaacaatttcctcaaggagacagtggcatggagctttgaaagacgagtaggtgttagcaaggaaataaggaggaacgggggttacgggcagaggagaaagcacatgccaagtcagcaaagaaaagtagaattcgaaaactttttaaaaatattactaaggattttcacaatgctgcactgggctagaaactgaagctaaaacagatacgtggtccctgctgctatggggcttccgttctagaggcaaggacaggttgtgatgagggttctgaaggatagagaccaagcagggagggtgttgaggaggcttctgcgagacctgaaggatgggaagccaggaagtgggaggggtgggggtccaggctggaggggcccaatgtaggtgtagagggactacagccctgaggggctgctccatgcggcattcttggaggtccaagaggggcagcgccaccttgggccaggctcctctccagcagccttggtatggggtgggggtgggaagacccctgatgcagcctgtcctctgggtgtgggggtggaggagagggctccaggggacccagccagccttgaccctggaggaaagtcaggtgggctcagagagagccctcaaatctgggccctgggtcagggtggggtcaagtccagccttgaagagaatggactctggaatctgacgtctgggtttgaatccagcttccaacactcactggctgtgtgactttgggcaagataacttatccccttgtccccatgtgtcattggagataaactacccacctaccagattgttgtaccatgctgggcaaacactaagtgcttaataatggtagcccactgctcatgtcgtgtcgtctcctgtcttgatacctgaaaactcaaggggccctgttgtgcttggaggggggtgccgttcccacaggatattctgtgaagggtgtccctggagctgggcctccaggtggcaagccccaagccaccccggcaggtgccactggccagagttgaactgaggtgttgagtggaaagtgcctccccacccccatctgccacagtagtatggatttccttcatgagatggggctcctaaaatgcctgaaatgtgtatgctgttggagaattgatgtgtatgatttattgaactttgcactcatttaaatctcatttaatcctccaacaacgcaagatgaagaagctgaggcttaaagagattaagaaacatcctatcccctttactcccaccaaaataaatacatttgccctattctccc

SEQ ID NO: 102 - DNA, 5291 bp, Homo sapiens
cgtggctcctccttgcgggcggaggcaggcggtgccgcggcgccgggacccgactcatccggtgcttgcgtgtggtggtgagcgcagcgccgaggatgaggaggtgcaacagcggctccgggccgccgccgtcgctgctgctgctgctgctgtggctgctcgcggttcccggcgctaacgcggccccgcggtcggcgctctattcgccttccgacccgctgacgctgctgcaggcggacacggtgcgcggcgcggtgctgggctcccgcagcgcctgggccgtggagttcttcgcctcctggtgcggccactgcatcgccttcgccccgacgtggaaggcgctggccgaagacgtcaaagcctggaggccggccctgtatctcgccgccctggactgtgctgaggagaccaacagtgcagtctgcagagacttcaacatccctggcttcccgactgtgaggttcttcaaggcctttaccaagaacggctcgggagcagtatttccagtggctggtgctgacgtgcagacgctgcgggagaggctcattgacgccctggagtcccatcatgacacgtggcccccagcctgtcccccactggagcctgccaagctggaggagattgatggattctttgcgagaaataacgaagagtacctggctctgatctttgaaaagggaggctcctacctgggtagagaggtggctctggacctgtcccagcacaaaggcgtggcggtgcgcagggtgctgaacacagaggccaatgtggtgagaaagtttggtgtcaccgacttcccctcttgctacctgctgttccggaatggctctgtctcccgagtccccgtgctcatggaatccaggtccttctataccgcttacctgcagagactctctgggctcaccagggaggctgcccagaccacagttgcaccaaccactgctaacaagatagctcccactgtttggaaattggcagatcgctccaagatctacatggctgacctggaatctgcactgcactacatcctgcggatagaagtgggcaggttcccggtcctggaagggcagcgcctggtggccctgaaaaagtttgtggcagtgctggccaagtatttccctggccggcccttagtccagaacttcctgcactccgtgaatgaatggctcaagaggcagaagagaaataaaattccctacagtttctttaaaactgccctggacgacaggaaagagggtgccgttcttgccaagaaggtgaactggattggctgccaggggagtgagccgcatttccggggctttccctgctccctgtgggtcctcttccacttcttgactgtgcaggcagctcggcaaaatgtagaccactcacaggaagcagccaaggccaaggaggtcctcccagccatccgaggctacgtgcactacttcttcggctgccgagactgcgctagccacttcgagcagatggctgctgcctccatgcaccgggtggggagtcccaacgccgctgtcctctggctctggtctagccacaacagggtcaatgctcgccttgcaggtgcccccagcgaggacccccagttccccaaggtgcagtggccaccccgtgaactttgttctgcctgccacaatgaacgcctggatgtgcccgtgtgggacgtggaagccaccctcaacttcctcaaggcccacttctccccaagcaacatcatcctggacttccctgcagctgggtcagctgcccggagggatgtgcagaatgtggcagccgccccagagctggcgatgggagccctggagctggaaagccggaattcaactctggaccctgggaagcctgagatgatgaagtcccccacaaacaccaccccacatgtgccggctgagggacctgagcttatttgaagtcctgcctcattctcactggagcctcagtctctcctgcttggtcttggccctcaactggggcaagtgaagccagaggagggtcccccagctgggtgggctggaatggaactcctcactagctgctggggctccgcccaccctgctcccttccggacaatgaagaagcctttgcaccctgggaggaaggaccaccccgggccctctatgcctggccagcctccagctcctcagacctcctgggtggggtttggcttcagggtggggtttggaagcttctggaagtcgtgctggtctcccaggtgaggcaagccatggttgctgggctgtagggtgagtggcttgcttggtgggacctgacgagttggtggcatgggaaggatgtgggtctctagtgccttgccctggcttagctgcaggagaagatggctgctttcacttccccccattgagctctgctccctctgagcctggtcttttgtccttttttattttggtctccaagatgaatgctcatctttggagggtgccaggtagaagctagggaggggagtgtcttctctctccaggtttcaccttccagtgtgcagaagttagaagggtctggcgggggcagtgccttacacatgcttgattcccacgctaccccctgccttgggaggtgtgtggaataaattatttttgttaaggcaagcattggtgtgttctttaacttgctacttggagacctagtgtccagtctggacagaatgcacagagaccagcctcacctggaatgcagccagactcgatgtccctcagcacacacagctcctggccacagactgcccatagaactgtctgcacccaaaccccatggccttttcatgcacggagacaggcctctggatgtgcagccttgccaccccctgccccaatcctccctgagagctcctgcctcagtgccctgggctggtgagggagaagcctgtctgcacctgcctaattccagctcctccaggaagcaagggcttgtttgtcagagctgcagggttggccactcggtggggaggagtcagccaggattagagagcctgcccctaatccggcctgctgggttttacaaggatcagagctgctgataatgaacctcattaagggggagcaggagcctcaatccgatttggttttctctttgacatcttcactctgctcagatggcctgggtgctatgtggagcaggtgggatgccaaggccactcctgctatggggcagctggggctggggagggatggcagtctccctgcatgtttccctcgacctctttagctgcagcgccttgctgggctcctgggttggactccctctctgtgcccctgctccaggcacccattggctccatcctcctggttgtgctctgcaccccctgctcccttgggctggccctggctgggggcctgagagacagacaggaacccacaatcaggaggcaaccctggcctgcaagaggaagacagaggctcccagggccggtgccctgtgtgcccactgcaccaaggccgctgaataagcctgcccttcaccccctaagggctccttgcccaatgccaagtgctggggatttctgtcagcaagccctgtggctccagtgacggtatttctaaagccaaacttagttacctagaattagcgccatgttggaaacactgtcgcagcagcccgggctgcacagtgtgtagcccagcctccaggtccacggagtggtgtggacctcccacctcacagctgcctctggcagccaagcctcttttcgcccggccccagcccctctggttgataaacgggtgggcctcctcagcagcgtggctgcctttcaccttgatttccccagggctctcggcaacatcgataaaccagcctcgcccaccagctgggccctcccccacccagtctgccaggctgggagctggagcttgctgagtcttgaatgcccttctagatggcttctctagaggctctcctggcaagagagggtcccaaggggagccctgcaaagcaaaggctccttgtctggggcgggatagagaatctcgcctctgtctggtgtgttacctactgggggcacaggaacaatttcctcaaggagacagtggcatggagctttgaaagacgagtaggtgttagcaaggaaataaggaggaacgggggttacgggcagaggagaaagcacatgccaagtcagcaaagaaaagtagaattcgaaaactttttaaaaatattactaaggattttcacaatgctgcactgggctagaaactgaagctaaaacagatacgtggtccctgctgctatggggcttccgttctagaggcaaggacaggttgtgatgagggttctgaaggatagagaccaagcagggagggtgttgaggaggcttctgcgagacctgaaggatgggaagccaggaagtgggaggggtgggggtccaggctggaggggcccaatgtaggtgtagagggactacagccctgaggggctgctccatgcggcattcttggaggtccaagaggggcagcgccaccttgggccaggctcctctccagcagccttggtatggggtgggggtgggaagacccctgatgcagcctgtcctctgggtgtgggggtggaggagagggctccaggggacccagccagccttgaccctggaggaaagtcaggtgggctcagagagagccctcaaatctgggccctgggtcagggtggggtcaagtccagccttgaagagaatggactctggaatctgacgtctgggtttgaatccagcttccaacactcactggctgtgtgactttgggcaagataacttatccccttgtccccatgtgtcattggagataaactacccacctaccagattgttgtaccatgctgggcaaacactaagtgcttaataatggtagcccactgctcatgtcgtgtcgtctcctgtcttgatacctgaaaactcaaggggccctgttgtgcttggaggggggtgccgttcccacaggatattctgtgaagggtgtccctggagctgggcctccaggtggcaagccccaagccaccccggcaggtgccactggccagagttgaactgaggtgttgagtggaaagtgcctccccacccccatctgccacagtagtatggatttccttcatgagatggggctcctaaaatgcctgaaatgtgtatgctgttggagaattgatgtgtatgatttattgaactttgcactcatttaaatctcatttaatcctccaacaacgcaagatgaagaagctgaggcttaaagagattaagaaacatcctatcccctttactcccaccaaaataaatacatttgccctattctccc

SEQ ID NO: 103 - DNA, 4265 bp, Homo sapiens
attttgtctttacattttacataatttcagatacattttcctcatatcaaataattcagcattttttagtactaacatcatagtctgtaagccattcaaaaaatgtatttcacaaaataggctatctcatcctttgagctattgagatgaattaatttatactcctcctaagatccctctcgtcactaagattcttttattttatgacaaaaccatagttctagaagcttgtttctcccacctgaaaagactggatttgggacatgatcctgtagaacttcggagccgcccacggacgccagagccgggaaccctgacggcacttagctgctgacaaacaacctgctccgtggagcgcctgaaacaccagtctttggggccagtgcctcagtttcaatccaggtaacctttaaatgaaacttgcctaaaatcttaggtcatacacagaagagactccaatcgacaagaagctggaaaagaatgatgttgtccttaaacaacctacagaatatcatctataacccggtaatcccgtatgttggcaccattcctgatcagctggatcctggaactttgattgtgatacgtgggcatgttcctagtgacgcagacagattccaggtggatctgcagaatggcagcagcatgaaacctcgagccgatgtggcctttcatttcaatcctcgtttcaaaagggccggctgcattgtttgcaatactttgataaatgaaaaatggggacgggaagagatcacctatgacacgcctttcaaaagagaaaagtcttttgagatcgtgattatggtgctgaaggacaaattccaggtggctgtaaatggaaaacatactctgctctatggccacaggatcggcccagagaaaatagacactctgggcatttatggcaaagtgaatattcactcaattggttttagcttcagctcggacttacaaagtacccaagcatctagtctggaactgacagagataagtagagaaaatgttccaaagtctggcacgccccagcttaggctgccattcgctgcaaggttgaacacccccatgggccctggacgaactgtcgtcgttaaaggagaagtgaatgcaaatgccaaaagctttaatgttgacctactagcaggaaaatcaaaggatattgctctacacttgaacccacgcctgaatattaaagcatttgtaagaaattcttttcttcaggagtcctggggagaagaagagagaaatattacctctttcccatttagtcctgggatgtactttgagatgataatttattgtgatgttagagaattcaaggttgcagtaaatggcgtacacagcctggagtacaaacacagatttaaagagctcagcagtattgacacgctggaaattaatggagacatccacttactggaagtaaggagctggtagcctacctacacagctgctacaaaaaccaaaatacagaatggcttctgtgatactggccttgctgaaacgcatctcactgtcattctattgtttatattgttaaaatgagcttgtgcaccattaggtcctgctgggtgttctcagtccttgccatgaagtatggtggtgtctagcactgaatggggaaactgggggcagcaacacttatagccagttaaagccactctgccctctctcctactttggctgactcttcaagaatgccattcaacaagtatttatggagtacctactataatacagtagctaacatgtattgagcacagattttttttggtaaaactgtgaagagctaggatatatacttggtgaaacaaaccagtatgttccctgttctcttgagcttcgactcttctgtgcgctactgctgcgcactgctttttctacaggcattacatcaactcctaaggggtcctctgggattagttatgcagatattaaatcacccgaagacactaacttacagaagacacaactccttccccagtgatcactgtcataaccagtgctctaccgtatcccatcactgaggactgatgttgactgacatcattttctttatcgtaataaacatgtggctctattagctgcaagctttaccaagtaattggcatgacatctgagcacagaaattaaggcaaaaaaccaaagcaaaacaaatacatggtgctgaaattaacttgatgccaagcccaaggcagctgatttctgtgtatttgaacttagggcaaatcagagtctacacagacgcctacagaaagtttcaggaagaggcaagatgcattcaatttgaaagatatttatgggcaacaaagtaaggtcaggattagacttcaggcattcataaggcaggcactatcagaaagtgtacgccaactaagggacccacaaagcaggcagaggtaatgcagaaatctgttttgttcccatgaaatcaccaatcaaggcctccgttcttctaaagattagtccatcatcattagcaactgagatcaaagcactcttccactttacgtgattaaaatcaaacctgtatcagcaagttaaatggttccatttctgtgatttttctattatttgaggggagttggcagaagttccatgtatatgggatctttacaggtcagatcttgttacaggaaatttcaaaggtttgggagtggggagggaaaaaagctcagtcagtgaggatcattttatcacattagactggggcagaactctgccaggatttaggaatattttcagaacagattttagatattatttctatccatatattgaaaagaataccattgtcaatcttatttttttaaaagtactcagtgtagaaatcgctagcccttaattcttttccagcttttcatattaatgtatgcagagtctcaccaagctcaaagacactggttgggggtggagggtgccacagggaaagctgtagaaggcaagaagactcgagaatcccccagagttatttttctccataaagaccatcagagtgcttaactgagctgttggagactgtgaggcatttaggaaaaaaatagcccactcacatcattccttgtaagtcttaagttcattttcattttacgtggaggaaaaaaatttaaaaagctattagtatttattaatgaattttactgagacatttcttagaaatatgcacttctatactagcaagctctgtctctaaaatgcaagttggccttttgcttgccacatttctgcattaaacttctatattagcttcaaaggcttttaaactcaatgcgaacattctacgggatgttcttagatgcctttaaaaagggggcagatctaattttatttgaaccctcactttccaacttcaccatgacccagtactagagattagggcacttcaaagcattgaaaaaaatctactgatacttactttcttagacaagtagttcttagttaaccaccaatggaactgggttcattctgaatcctggaggagcttcctcgtgccacccagtgtttctgggccctctgtgtgagcagccaggtgtgagctgttttagaagcagcgtgttgccttcatctctcccgtttcccaaaagaacaaaggataaaggtgacagtcacactcctgggttaaaaaaagcattccagaaccacttctctttatgggcacaacaaagaaacgaaggctgaagttcgcctacccaaaatgaaaagtaggctttacagtcaaaagtacttctgttgattgctaaataacttcattttcttgaaatagagcaactttgagtgaaatctgcaacatggataccatgtatgtaagatactgctgtacagaagagttaaggcttacagtgcaaatgaggcgtcagctttgggtgctaaaattaacaagtctaatattattaccatcaatcaggaagagaataataaatgtttaaacaaacacagcagtctgtataaaaataccgtgtatcatttactctttctgcagctctatacgataggcaggagaggcttatgtggcagcacaagccaggtggggattttgtaaagaagtgataaaacatttgtaagtaatccaagtaggtgtattaaggcaccaaaagtaacatggcacccaacacccaaaaataaaaatatgaaatatgagtgtgaactctgagtagagtatgaaacaccacagaaagtcttagaaatagctctggagtggctctcccaggacagtttccagttgctgaatagtcttttggcactgatgttctacttcttcacattcatct

SEQ ID NO: 104 - DNA, 4391 bp, Homo sapiens
attttgtctttacattttacataatttcagatacattttcctcatatcaaataattcagcattttttagtactaacatcatagtctgtaagccattcaaaaaatgtatttcacaaaataggctatctcatcctttgagctattgagatgaattaatttatactcctcctaagatccctctcgtcactaagattcttttattttatgacaaaaccatagttctagaagcttgtttctcccacctgaaaagactggatttgggacatgatcctgtagaacttcggagccgcccacggacgccagagccgggaaccctgacggcacttagctgctgacaaacaacctgctccgtggagcgcctgaaacaccagtctttggggccagtgcctcagtttcaatccaggtaacctttaaatgaaacttgcctaaaatcttaggtcatacacagaagagactccaatcgacaagaagctggaaaagaatgatgttgtccttaaacaacctacagaatatcatctataacccggtaatcccgtatgttggcaccattcctgatcagctggatcctggaactttgattgtgatacgtgggcatgttcctagtgacgcagacagattccaggtggatctgcagaatggcagcagcatgaaacctcgagccgatgtggcctttcatttcaatcctcgtttcaaaagggccggctgcattgtttgcaatactttgataaatgaaaaatggggacgggaagagatcacctatgacacgcctttcaaaagagaaaagtcttttgagatcgtgattatggtgctgaaggacaaattccaggtggctgtaaatggaaaacatactctgctctatggccacaggatcggcccagagaaaatagacactctgggcatttatggcaaagtgaatattcactcaattggttttagcttcagctcggacttacaaagtacccaagcatctagtctggaactgacagagataagtagagaaaatgttccaaagtctggcacgccccagcttcctagtaatagaggaggagacatttctaaaatcgcacccagaactgtctacaccaagagcaaagattcgactgtcaatcacactttgacttgcaccaaaataccacctatgaactatgtgtcaaagaggctgccattcgctgcaaggttgaacacccccatgggccctggacgaactgtcgtcgttaaaggagaagtgaatgcaaatgccaaaagctttaatgttgacctactagcaggaaaatcaaaggatattgctctacacttgaacccacgcctgaatattaaagcatttgtaagaaattcttttcttcaggagtcctggggagaagaagagagaaatattacctctttcccatttagtcctgggatgtactttgagatgataatttattgtgatgttagagaattcaaggttgcagtaaatggcgtacacagcctggagtacaaacacagatttaaagagctcagcagtattgacacgctggaaattaatggagacatccacttactggaagtaaggagctggtagcctacctacacagctgctacaaaaaccaaaatacagaatggcttctgtgatactggccttgctgaaacgcatctcactgtcattctattgtttatattgttaaaatgagcttgtgcaccattaggtcctgctgggtgttctcagtccttgccatgaagtatggtggtgtctagcactgaatggggaaactgggggcagcaacacttatagccagttaaagccactctgccctctctcctactttggctgactcttcaagaatgccattcaacaagtatttatggagtacctactataatacagtagctaacatgtattgagcacagattttttttggtaaaactgtgaagagctaggatatatacttggtgaaacaaaccagtatgttccctgttctcttgagcttcgactcttctgtgcgctactgctgcgcactgctttttctacaggcattacatcaactcctaaggggtcctctgggattagttatgcagatattaaatcacccgaagacactaacttacagaagacacaactccttccccagtgatcactgtcataaccagtgctctaccgtatcccatcactgaggactgatgttgactgacatcattttctttatcgtaataaacatgtggctctattagctgcaagctttaccaagtaattggcatgacatctgagcacagaaattaaggcaaaaaaccaaagcaaaacaaatacatggtgctgaaattaacttgatgccaagcccaaggcagctgatttctgtgtatttgaacttagggcaaatcagagtctacacagacgcctacagaaagtttcaggaagaggcaagatgcattcaatttgaaagatatttatgggcaacaaagtaaggtcaggattagacttcaggcattcataaggcaggcactatcagaaagtgtacgccaactaagggacccacaaagcaggcagaggtaatgcagaaatctgttttgttcccatgaaatcaccaatcaaggcctccgttcttctaaagattagtccatcatcattagcaactgagatcaaagcactcttccactttacgtgattaaaatcaaacctgtatcagcaagttaaatggttccatttctgtgatttttctattatttgaggggagttggcagaagttccatgtatatgggatctttacaggtcagatcttgttacaggaaatttcaaaggtttgggagtggggagggaaaaaagctcagtcagtgaggatcattttatcacattagactggggcagaactctgccaggatttaggaatattttcagaacagattttagatattatttctatccatatattgaaaagaataccattgtcaatcttatttttttaaaagtactcagtgtagaaatcgctagcccttaattcttttccagcttttcatattaatgtatgcagagtctcaccaagctcaaagacactggttgggggtggagggtgccacagggaaagctgtagaaggcaagaagactcgagaatcccccagagttatttttctccataaagaccatcagagtgcttaactgagctgttggagactgtgaggcatttaggaaaaaaatagcccactcacatcattccttgtaagtcttaagttcattttcattttacgtggaggaaaaaaatttaaaaagctattagtatttattaatgaattttactgagacatttcttagaaatatgcacttctatactagcaagctctgtctctaaaatgcaagttggccttttgcttgccacatttctgcattaaacttctatattagcttcaaaggcttttaaactcaatgcgaacattctacgggatgttcttagatgcctttaaaaagggggcagatctaattttatttgaaccctcactttccaacttcaccatgacccagtactagagattagggcacttcaaagcattgaaaaaaatctactgatacttactttcttagacaagtagttcttagttaaccaccaatggaactgggttcattctgaatcctggaggagcttcctcgtgccacccagtgtttctgggccctctgtgtgagcagccaggtgtgagctgttttagaagcagcgtgttgccttcatctctcccgtttcccaaaagaacaaaggataaaggtgacagtcacactcctgggttaaaaaaagcattccagaaccacttctctttatgggcacaacaaagaaacgaaggctgaagttcgcctacccaaaatgaaaagtaggctttacagtcaaaagtacttctgttgattgctaaataacttcattttcttgaaatagagcaactttgagtgaaatctgcaacatggataccatgtatgtaagatactgctgtacagaagagttaaggcttacagtgcaaatgaggcgtcagctttgggtgctaaaattaacaagtctaatattattaccatcaatcaggaagagaataataaatgtttaaacaaacacagcagtctgtataaaaataccgtgtatcatttactctttctgcagctctatacgataggcaggagaggcttatgtggcagcacaagccaggtggggattttgtaaagaagtgataaaacatttgtaagtaatccaagtaggtgtattaaggcaccaaaagtaacatggcacccaacacccaaaaataaaaatatgaaatatgagtgtgaactctgagtagagtatgaaacaccacagaaagtcttagaaatagctctggagtggctctcccaggacagtttccagttgctgaatagtcttttggcactgatgttctacttcttcacattcatct

SEQ ID NO: 105 - DNA, 4047 bp, Homo sapiens
acctgctccgtggagcgcctgaaacaccagtctttggatggagtctcgttctgttgcccaggctggagtgcagtggcacaatctcggctcacttcaacctccgtctcccaggttcaagcaattctcctgtctcagcctcctgagtagctgggactacagggccagtgcctcagtttcaatccaggtaacctttaaatgaaacttgcctaaaatcttaggtcatacacagaagagactccaatcgacaagaagctggaaaagaatgatgttgtccttaaacaacctacagaatatcatctataacccggtaatcccgtatgttggcaccattcctgatcagctggatcctggaactttgattgtgatacgtgggcatgttcctagtgacgcagacagattccaggtggatctgcagaatggcagcagcatgaaacctcgagccgatgtggcctttcatttcaatcctcgtttcaaaagggccggctgcattgtttgcaatactttgataaatgaaaaatggggacgggaagagatcacctatgacacgcctttcaaaagagaaaagtcttttgagatcgtgattatggtgctgaaggacaaattccaggtggctgtaaatggaaaacatactctgctctatggccacaggatcggcccagagaaaatagacactctgggcatttatggcaaagtgaatattcactcaattggttttagcttcagctcggacttacaaagtacccaagcatctagtctggaactgacagagataagtagagaaaatgttccaaagtctggcacgccccagcttaggctgccattcgctgcaaggttgaacacccccatgggccctggacgaactgtcgtcgttaaaggagaagtgaatgcaaatgccaaaagctttaatgttgacctactagcaggaaaatcaaaggatattgctctacacttgaacccacgcctgaatattaaagcatttgtaagaaattcttttcttcaggagtcctggggagaagaagagagaaatattacctctttcccatttagtcctgggatgtactttgagatgataatttattgtgatgttagagaattcaaggttgcagtaaatggcgtacacagcctggagtacaaacacagatttaaagagctcagcagtattgacacgctggaaattaatggagacatccacttactggaagtaaggagctggtagcctacctacacagctgctacaaaaaccaaaatacagaatggcttctgtgatactggccttgctgaaacgcatctcactgtcattctattgtttatattgttaaaatgagcttgtgcaccattaggtcctgctgggtgttctcagtccttgccatgaagtatggtggtgtctagcactgaatggggaaactgggggcagcaacacttatagccagttaaagccactctgccctctctcctactttggctgactcttcaagaatgccattcaacaagtatttatggagtacctactataatacagtagctaacatgtattgagcacagattttttttggtaaaactgtgaagagctaggatatatacttggtgaaacaaaccagtatgttccctgttctcttgagcttcgactcttctgtgcgctactgctgcgcactgctttttctacaggcattacatcaactcctaaggggtcctctgggattagttatgcagatattaaatcacccgaagacactaacttacagaagacacaactccttccccagtgatcactgtcataaccagtgctctaccgtatcccatcactgaggactgatgttgactgacatcattttctttatcgtaataaacatgtggctctattagctgcaagctttaccaagtaattggcatgacatctgagcacagaaattaaggcaaaaaaccaaagcaaaacaaatacatggtgctgaaattaacttgatgccaagcccaaggcagctgatttctgtgtatttgaacttagggcaaatcagagtctacacagacgcctacagaaagtttcaggaagaggcaagatgcattcaatttgaaagatatttatgggcaacaaagtaaggtcaggattagacttcaggcattcataaggcaggcactatcagaaagtgtacgccaactaagggacccacaaagcaggcagaggtaatgcagaaatctgttttgttcccatgaaatcaccaatcaaggcctccgttcttctaaagattagtccatcatcattagcaactgagatcaaagcactcttccactttacgtgattaaaatcaaacctgtatcagcaagttaaatggttccatttctgtgatttttctattatttgaggggagttggcagaagttccatgtatatgggatctttacaggtcagatcttgttacaggaaatttcaaaggtttgggagtggggagggaaaaaagctcagtcagtgaggatcattttatcacattagactggggcagaactctgccaggatttaggaatattttcagaacagattttagatattatttctatccatatattgaaaagaataccattgtcaatcttatttttttaaaagtactcagtgtagaaatcgctagcccttaattcttttccagcttttcatattaatgtatgcagagtctcaccaagctcaaagacactggttgggggtggagggtgccacagggaaagctgtagaaggcaagaagactcgagaatcccccagagttatttttctccataaagaccatcagagtgcttaactgagctgttggagactgtgaggcatttaggaaaaaaatagcccactcacatcattccttgtaagtcttaagttcattttcattttacgtggaggaaaaaaatttaaaaagctattagtatttattaatgaattttactgagacatttcttagaaatatgcacttctatactagcaagctctgtctctaaaatgcaagttggccttttgcttgccacatttctgcattaaacttctatattagcttcaaaggcttttaaactcaatgcgaacattctacgggatgttcttagatgcctttaaaaagggggcagatctaattttatttgaaccctcactttccaacttcaccatgacccagtactagagattagggcacttcaaagcattgaaaaaaatctactgatacttactttcttagacaagtagttcttagttaaccaccaatggaactgggttcattctgaatcctggaggagcttcctcgtgccacccagtgtttctgggccctctgtgtgagcagccaggtgtgagctgttttagaagcagcgtgttgccttcatctctcccgtttcccaaaagaacaaaggataaaggtgacagtcacactcctgggttaaaaaaagcattccagaaccacttctctttatgggcacaacaaagaaacgaaggctgaagttcgcctacccaaaatgaaaagtaggctttacagtcaaaagtacttctgttgattgctaaataacttcattttcttgaaatagagcaactttgagtgaaatctgcaacatggataccatgtatgtaagatactgctgtacagaagagttaaggcttacagtgcaaatgaggcgtcagctttgggtgctaaaattaacaagtctaatattattaccatcaatcaggaagagaataataaatgtttaaacaaacacagcagtctgtataaaaataccgtgtatcatttactctttctgcagctctatacgataggcaggagaggcttatgtggcagcacaagccaggtggggattttgtaaagaagtgataaaacatttgtaagtaatccaagtaggtgtattaaggcaccaaaagtaacatggcacccaacacccaaaaataaaaatatgaaatatgagtgtgaactctgagtagagtatgaaacaccacagaaagtcttagaaatagctctggagtggctctcccaggacagtttccagttgctgaatagtcttttggcactgatgttctacttcttcacattcatct

SEQ ID NO: 106 - DNA, 4299 bp, Homo sapiens
tggacttggatccgaggcagacgaggaagctgagaaaaccctggcgttgaccccgtggacctgggcgccccgggaaggccagcgcttggtccaggcaggcggggcctgtgcggtgaccaccctggtcctgaaaagtcccagccccgagcgccctccctcctagacctggaggcctggaacagccagccgcccacggacgccagagccgggaaccctgacggcacttagctgctgacaaacaacctgctccgtggagcgcctgaaacaccagtctttggggccagtgcctcagtttcaatccaggtaacctttaaatgaaacttgcctaaaatcttaggtcatacacagaagagactccaatcgacaagaagctggaaaagaatgatgttgtccttaaacaacctacagaatatcatctataacccggtaatcccgtatgttggcaccattcctgatcagctggatcctggaactttgattgtgatacgtgggcatgttcctagtgacgcagacagattccaggtggatctgcagaatggcagcagcatgaaacctcgagccgatgtggcctttcatttcaatcctcgtttcaaaagggccggctgcattgtttgcaatactttgataaatgaaaaatggggacgggaagagatcacctatgacacgcctttcaaaagagaaaagtcttttgagatcgtgattatggtgctgaaggacaaattccaggtggctgtaaatggaaaacatactctgctctatggccacaggatcggcccagagaaaatagacactctgggcatttatggcaaagtgaatattcactcaattggttttagcttcagctcggacttacaaagtacccaagcatctagtctggaactgacagagataagtagagaaaatgttccaaagtctggcacgccccagcttgcagactgtctctcccctcctgggatttacagggtcatggctctgaaacattccgtagtgttctttggacacgagttttccctggagatcgctttctgcaggcctcttggtcctgactgtggcttcttttcagaggctgccattcgctgcaaggttgaacacccccatgggccctggacgaactgtcgtcgttaaaggagaagtgaatgcaaatgccaaaagctttaatgttgacctactagcaggaaaatcaaaggatattgctctacacttgaacccacgcctgaatattaaagcatttgtaagaaattcttttcttcaggagtcctggggagaagaagagagaaatattacctctttcccatttagtcctgggatgtactttgagatgataatttattgtgatgttagagaattcaaggttgcagtaaatggcgtacacagcctggagtacaaacacagatttaaagagctcagcagtattgacacgctggaaattaatggagacatccacttactggaagtaaggagctggtagcctacctacacagctgctacaaaaaccaaaatacagaatggcttctgtgatactggccttgctgaaacgcatctcactgtcattctattgtttatattgttaaaatgagcttgtgcaccattaggtcctgctgggtgttctcagtccttgccatgaagtatggtggtgtctagcactgaatggggaaactgggggcagcaacacttatagccagttaaagccactctgccctctctcctactttggctgactcttcaagaatgccattcaacaagtatttatggagtacctactataatacagtagctaacatgtattgagcacagattttttttggtaaaactgtgaagagctaggatatatacttggtgaaacaaaccagtatgttccctgttctcttgagcttcgactcttctgtgcgctactgctgcgcactgctttttctacaggcattacatcaactcctaaggggtcctctgggattagttatgcagatattaaatcacccgaagacactaacttacagaagacacaactccttccccagtgatcactgtcataaccagtgctctaccgtatcccatcactgaggactgatgttgactgacatcattttctttatcgtaataaacatgtggctctattagctgcaagctttaccaagtaattggcatgacatctgagcacagaaattaaggcaaaaaaccaaagcaaaacaaatacatggtgctgaaattaacttgatgccaagcccaaggcagctgatttctgtgtatttgaacttagggcaaatcagagtctacacagacgcctacagaaagtttcaggaagaggcaagatgcattcaatttgaaagatatttatgggcaacaaagtaaggtcaggattagacttcaggcattcataaggcaggcactatcagaaagtgtacgccaactaagggacccacaaagcaggcagaggtaatgcagaaatctgttttgttcccatgaaatcaccaatcaaggcctccgttcttctaaagattagtccatcatcattagcaactgagatcaaagcactcttccactttacgtgattaaaatcaaacctgtatcagcaagttaaatggttccatttctgtgatttttctattatttgaggggagttggcagaagttccatgtatatgggatctttacaggtcagatcttgttacaggaaatttcaaaggtttgggagtggggagggaaaaaagctcagtcagtgaggatcattttatcacattagactggggcagaactctgccaggatttaggaatattttcagaacagattttagatattatttctatccatatattgaaaagaataccattgtcaatcttatttttttaaaagtactcagtgtagaaatcgctagcccttaattcttttccagcttttcatattaatgtatgcagagtctcaccaagctcaaagacactggttgggggtggagggtgccacagggaaagctgtagaaggcaagaagactcgagaatcccccagagttatttttctccataaagaccatcagagtgcttaactgagctgttggagactgtgaggcatttaggaaaaaaatagcccactcacatcattccttgtaagtcttaagttcattttcattttacgtggaggaaaaaaatttaaaaagctattagtatttattaatgaattttactgagacatttcttagaaatatgcacttctatactagcaagctctgtctctaaaatgcaagttggccttttgcttgccacatttctgcattaaacttctatattagcttcaaaggcttttaaactcaatgcgaacattctacgggatgttcttagatgcctttaaaaagggggcagatctaattttatttgaaccctcactttccaacttcaccatgacccagtactagagattagggcacttcaaagcattgaaaaaaatctactgatacttactttcttagacaagtagttcttagttaaccaccaatggaactgggttcattctgaatcctggaggagcttcctcgtgccacccagtgtttctgggccctctgtgtgagcagccaggtgtgagctgttttagaagcagcgtgttgccttcatctctcccgtttcccaaaagaacaaaggataaaggtgacagtcacactcctgggttaaaaaaagcattccagaaccacttctctttatgggcacaacaaagaaacgaaggctgaagttcgcctacccaaaatgaaaagtaggctttacagtcaaaagtacttctgttgattgctaaataacttcattttcttgaaatagagcaactttgagtgaaatctgcaacatggataccatgtatgtaagatactgctgtacagaagagttaaggcttacagtgcaaatgaggcgtcagctttgggtgctaaaattaacaagtctaatattattaccatcaatcaggaagagaataataaatgtttaaacaaacacagcagtctgtataaaaataccgtgtatcatttactctttctgcagctctatacgataggcaggagaggcttatgtggcagcacaagccaggtggggattttgtaaagaagtgataaaacatttgtaagtaatccaagtaggtgtattaaggcaccaaaagtaacatggcacccaacacccaaaaataaaaatatgaaatatgagtgtgaactctgagtagagtatgaaacaccacagaaagtcttagaaatagctctggagtggctctcccaggacagtttccagttgctgaatagtcttttggcactgatgttctacttcttcacattcatct

SEQ ID NO: 107 - DNA, 7846 bp, Homo sapiens
ggtttccgggtgagggttgggctccttggtaccatgtgggaagcgctgtgaagagttgttgccttccaagatatacccaaattcccagttccagcccgtgtcattaaaactccgctggcgtgaaagatgacgtccttagcccagcagctgcaacgactcgccctccctcaaagtgatgccagcctcttatctagagatgaagttgcttctttgttatttgaccctaaggaagcggccacaatcgacagggacaccgccttcgccattggatgtactggcctggaagagttgcttggaattgatccttcctttgagcagtttgaagcaccgttgttcagtcagctagcaaaaaccttggagcgaagtgttcagaccaaagcagtaaacaaacagttggatgaaaacatttcattattccttattcacttgtcgccttacttcctgcttaagccagcacagaagtgtctggagtggttgattcacaggttccatatacatctctataatcaagatagcctcattgcttgtgttctgccataccacgagacaagaatatttgtgcgagtcatacagcttctaaaaattaataattcaaagcacagatggttctggttgttgccagttaagcaatctggagtgccgttagctaaaggaactttgattacccactgctacaaagatcttggattcatggatttcatttgcagtttggtgacaaaatctgtgaaggtttttgctgagtacccgggcagctcagctcagttgagggtgctcttggctttctatgcttctaccatagtgtcggcgctggtagctgcagaggacgtatcagacaatatcatcgccaaactatttccctatatccaaaagtctttgtacctcactggaaggaggacggagcagacagtctctttgaggcatcatcaaaacattgaccaagattccctctttgatcaaggatgggttaagttgcttgatagtgctcctgcagagacagaagccagagagccttgggaaaaagtatgtacaattgaattgagaaatggtgctagtcagaggccattccctcacttatgtaatgttcctgatcttattacaatacttcatgggatttctgaaacttacgatgtcagtcctcttctgcattacatgcttccccatctggtcgtctccatcattcatcatgttacaggagaagaaactgaaggaatggatggtcaaatctacaagagacacttagaagctatacttacaaaaatatcactgaagaacaacttagaccatttgttggctagccttctatttgaagagtatatttcatatagttcacaggaagaaatggattctaataaagtgtctttgcttaatgaacaatttcttccactcattaggcttttagaaagcaaataccccagaacattagatgttgtattagaggaacacttaaaggaaattgcagatctgaaaaaacaagagcttttccatcagtttgtttctctttctacaagtggaggaaagtatcaggagggtgttgatgaatctttcataaaagaagctgttttagcccgattaggtgatgataatatagatgttgttttgtcggctataagtgcttttgagattttcaaagaacacttcagttcagaagtgacgatttcaaatcttctgaatctctttcaaagagcagaactttcaaagaatggagaatggtacgaggtacttaagatagccgctgacatattaattaaagaagagatactgagtgaaaatgatcagttgtcaaatcaggtggttgtatgtttgctgccatttatggttatcaataatgatgatacggaatctgctgagatgaaaattgctatatatttatcaaaatcaggaatctgctccctgcaccctctattaagaggctgggaagaagctcttgaaaatgtaattaaaagcacaaagccaggaaaactaatcggtgtagcaaatcagaagatgattgagttgttggctgataatataaatttaggagatccttcttcaatgttaaagatggaaatcccctcagaatggcacattgaactgatgttagacagagggatcccagtggagctgtgggcacattatgtagaagagctcaacagcactcagagggtggccgtggaggactcggtttttcttgtattttccttgaaaaaatttatttatgcactgaaagctcctaaatcttttcctaaaggtgatatatggtggaatcctgaacaactgaaagaagacagcagggactatctgcacttgctcattgggctgtttgagatgatgctcaatggtgccgatgctgttcatttcagagttctgatgaaacttttcataaaggtgcatctagaagatgtttttcagttattcaagttctgttctgttttatggacctatggttctagcctttcaaatccactaaactgcagtgtgaaaacagtgctgcagactcaagctctttatgtgggctgtgcaatgctttcttctcagaagacacagtgtaaacaccaactggcatccatatcttctccagtggtgacatctttactcattaacctgggaagccccgtaaaagaagttcgtagggctgccattcagtgtctccaggccctcagtggagtggcatccccgttttatctgataatagatcatttgatttctaaagcagaggagatcacttcagatgctgcctatgttattcaggatttggctactttatttgaggaactacagagagaaaagaaactgaaatctcatcagaagttgtctgaaactttgaaaaacttacttagttgtgtgtatagttgcccatcttatatagcaaaagatttgatgaaagtacttcagggagtcaacggtgagatggtgctttctcagctattgcctatggctgaacaactgctagaaaagatccagaaggagcccacagctgtgctgaaagatgaggccatggttctgcatctcactctgggaaagtataatgaattttcagtttcccttttaaatgaggatccgaagagtctagatatatttataaaagctgtgcacacaacaaaggaactttacgcgggaatgccaaccattcagatcacagcccttgaaaagattacaaaaccattttttgcagccatatcagatgaaaaagttcagcagaagcttttaagaatgttgtttgatttattggtgaactgtaaaaactcacattgtgctcagactgtcagcagtgtttttaaagggatttccgttaatgctgaacaagtccgaatagaactggagccaccagataaagctaaacccttgggcacagttcagcaaaaaagaaggcaaaaaatgcagcagaaaaaatcacaagatctagaatctgttcaggaagttggaggttcttactggcaaagagtaactctcatcctggaattactgcagcacaaaaagaagctcagaagtcctcagatattggtgccaactctttttaacttgctatcaagatgtttagaacccttgccacaagagcagggaaatatggaatacaccaaacaattaattcttagttgtctgctcaacatctgccaaaaactatctccagatggtggcaaaatacccaaagatattttagatgaggagaagttcaacgtggagttgatagttcagtgcatccgcctttcggagatgccgcagacccatcaccatgcccttttacttttgggcactgttgctggaatatttccggataaagttttacacaatatcatgtctatttttacatttatgggagccaatgtcatgcgcctagatgatacttacagttttcaagttattaacaagacagtgaaaatggttattcccgcacttattcagtctgatagtggagattctatagaagtttcaagaaacgttgaagagattgtggtaaaaatcattagtgtatttgtggatgcgctgccacacgtcccggagcacaggcgcctgcccatccttgttcaacttgttgatacactgggtgcagagaaattcctctggattctcctcatcttgctttttgaacagtatgtcacaaaaacagtgctggcggctgcctgtggcgaaaaggatgctattttagaagcagacactgaattttggttttcagtctgttgtgagtttagtgtccagcatcagatacaaagcttgatgaatatcctccagtacttactaaagctgccagaggaaaaagaagaaaccattcccaaagcagtgtcatttaataagagtgaatcacaagaagaaatgctacaggtttttaatgtagagactcacactagcaagcaactgcggcattttaaatttttgtcagtgtccttcatgtctcagctcctgtcttccaataattttctgaaaaaggtagttgagagtggtggtcctgagattttaaaaggccttgaagagaggttgctggagaccgttctcggctatatcagtgcagttgcacagtccatggaaaggaacgcagacaaactcaccgtgaagttctggcgcgcgctccttagtaaagcttacgacctgttagataaggtcaatgccttgctgcccacagagacattcattcctgtgatcagagggctggtgggcaatcccctgccatctgttcgccgcaaagcgctggaccttttgaataacaagctgcagcaaaatatatcctggaagaagacaatagttacccgtttcctaaaactggttccagaccttttggccattgtgcagcgtaagaaaaaggaaggggaagaagaacaagcaatcaacagacagacagcgttgtataccttaaagcttttatgcaagaattttggtgcagaaaatccagatccttttgtcccagtgctgaacactgctgtgaaactgattgctccagagagaaaggaggagaagaatgtcctgggaagcgcgctgctgtgcatagcagaggtgacctccaccctggaggcgctggccatcccccagcttcccagcctgatgccatcgttgctgacaacaatgaagaacaccagcgagctggtctccagcgaggtctacctgctcagtgccttggctgctctgcagaaggttgtggagactctcccgcacttcatcagcccctatctggaaggcattctctcccaggtgattcatctggagaaaatcactagtgaaatgggttctgcgtcacaggctaatatccgtctcacatctcttaaaaagacactggctaccacacttgcaccccgagtcctgttgcccgccatcaaaaaaacttacaagcagattgagaagaactggaagaatcacatgggtccgtttatgagcatcttgcaagagcatattggggtgatgaagaaggaagagctcacctcccatcagtctcagctaaccgcctttttcctggaagccctggacttccgagcccagcactctgagaacgatctggaggaagttggaaaaacggaaaattgtatcattgactgtctagtagccatggttgtcaaactttccgaggtcacattcaggcccctgttcttcaagctgtttgattgggctaaaacagaagatgccccaaaggacaggttgttgacattttacaacttggcagattgcattgctgaaaagctgaaagggctttttactctgtttgccggccacttagtgaagccttttgctgacaccttgaaccaggtgaacatctccaaaacagatgaagcattttttgactctgaaaatgaccctgaaaagtgctgcttgctgttgcagtttattttgaactgtttatacaaaatcttcctttttgatacccagcattttataagtaaagagagagcagaagccttgatgatgcctctggtggatcagctggaaaacaggcttgggggagaagagaaattccaggaacgggtgacaaagcacctgataccatgcatcgcacagttttcggtggccatggcggatgactctctttggaaaccactgaactaccagattctgctaaagacgagagactcctcgcctaaggttcgatttgctgctttgattactgtgttagcactggctgaaaaactaaaggagaattatattgtcttgctaccagaatccattcctttcttagcagagttgatggaagatgaatgtgaagaagtagaacatcagtgccaaaagactattcagcaactggaaactgtcctgggagagccactccagagctatttctaagactttctgtggtgtttcatactctactcagagttcacactcatatttcatatttttatttttgggtgttgggtgccatgttacttttggtgccttaatacacctacttggattacttacaaatgttttatcacttctttacaaaatccccacctggcttgtgctgccacataagcctctcctgcctatcgtatagagctgcagaaagagtaaatgatacacggtatttttatacagactgctgtgtttgtttaaacatttattattctcttcctgattgatggtaataatattagacttgttaattttagcacccaaagctgacgcctcatttgcactgtaagccttaactcttctgtacagcagtatcttacatacatggtatccatgttgcagatttcactcaaagttgctctatttcaagaaaatgaagttatttagcaatcaacagaagtacttttgactgtaaagcctacttttcattttgggtaggcgaacttcagccttcgtttctttgttgtgcccataaagagaagtggttctggaatgctttttttaacccaggagtgtgactgtcacctttatcctttgttcttttgggaaacgggagagatgaaggcaacacgctgcttctaaaacagctcacacctggctgctcacacagagggcccagaaacactgggtggcacgaggaagctcctccaggattcagaatgaacccagttccattggtggttaactaagaactacttgtctaagaaagtaagtatcagtagatttttttcaatgctttgaagtgccctaatctctagtactgggtcatggtgaagttggaaagtgagggttcaaataaaattagatctgccccctttttaaaggcatctaagaacatcccgtagaatgttcgcattgagtttaaaagcctttgaagctaatatagaagtttaatgcagaaatgtggcaagcaaaaggccaacttgcattttagagacagagcttgctagtatagaagtgcatatttctaagaaatgtctcagtaaaattcattaataaatactaatagctttttaaatttttttcctccacgtaaaatgaaaatgaacttaagacttacaaggaatgatgtgagtgggctatttttttcctaaatgcctcacagtctccaacagctcagttaagcactctgatggtctttatggagaaaaataactctgggggattctcgagtcttcttgccttctacagctttccctgtggcaccctccacccccaaccagtgtctttgagcttggtgagactctgcatacattaatatgaaaagctggaaaagaattaagggctagcgatttctacactgagtacttttaaaaaaataagattgacaatggtattcttttcaatatatggatagaaataatatctaaaatctgttctgaaaatattcctaaatcctggcagagttctgccccagtctaatgtgataaaatgatcctcactgactgagcttttttccctccccactcccaaacctttgaaatttcctgtaacaagatctgacctgtaaagatcccatatacatggaacttctgccaactcccctcaaataata

SEQ ID NO: 108 - DNA, 8238 bp, Homo sapiens
ggtttccgggtgagggttgggctccttggtaccatgtgggaagcgctgtgaagagttgttgccttccaagatatacccaaattcccagttccagcccgtgtcattaaaactccgctggcgtgaaagatgacgtccttagcccagcagctgcaacgactcgccctccctcaaagtgatgccagcctcttatctagagatgaagttgcttctttgttatttgaccctaaggaagcggccacaatcgacagggacaccgccttcgccattggatgtactggcctggaagagttgcttggaattgatccttcctttgagcagtttgaagcaccgttgttcagtcagctagcaaaaaccttggagcgaagtgttcagaccaaagcagtaaacaaacagttggatgaaaacatttcattattccttattcacttgtcgccttacttcctgcttaagccagcacagaagtgtctggagtggttgattcacaggttccatatacatctctataatcaagatagcctcattgcttgtgttctgccataccacgagacaagaatatttgtgcgagtcatacagcttctaaaaattaataattcaaagcacagatggttctggttgttgccagttaagcaatctggagtgccgttagctaaaggaactttgattacccactgctacaaagatcttggattcatggatttcatttgcagtttggtgacaaaatctgtgaaggtttttgctgagtacccgggcagctcagctcagttgagggtgctcttggctttctatgcttctaccatagtgtcggcgctggtagctgcagaggacgtatcagacaatatcatcgccaaactatttccctatatccaaaagggattgaaatcatctttaccagattacagagctgcaacatacatgataatatgtcagatttctgtgaaagtgaccatggaaaatacctttgtgaattcattggcatcacagatcatcaaaacattgaccaagattccctctttgatcaaggatgggttaagttgcttgatagtgctcctgcagagacagaagccagagagccttgggaaaaagccattccctcacttatgtaatgttcctgatcttattacaatacttcatgggatttctgaaacttacgatgtcagtcctcttctgcattacatgcttccccatctggtcgtctccatcattcatcatgttacaggagaagaaactgaaggaatggatggtcaaatctacaagagacacttagaagctatacttacaaaaatatcactgaagaacaacttagaccatttgttggctagccttctatttgaagagtatatttcatatagttcacaggaagaaatggattctaataaagtgtctttgcttaatgaacaatttcttccactcattaggcttttagaaagcaaataccccagaacattagatgttgtattagaggaacacttaaaggaaattgcagatctgaaaaaacaagagcttttccatcagtttgtttctctttctacaagtggaggaaagtatcagtttttagcagattctgatacttctttgatgctcagcctgaatcatccacttgctcctgtgagaattctggccatgaatcatttgaaaaagatcatgaaaacatcaaaggagggtgttgatgaatctttcataaaagaagctgttttagcccgattaggtgatgataatatagatgttgttttgtcggctataagtgcttttgagattttcaaagaacacttcagttcagaagtgacgatttcaaatcttctgaatctctttcaaagagcagaactttcaaagaatggagaatggtacgaggtacttaagatagccgctgacatattaattaaagaagagatactgagtgaaaatgatcagttgtcaaatcaggtggttgtatgtttgctgccatttatggttatcaataatgatgatacggaatctgctgagatgaaaattgctatatatttatcaaaatcaggaatctgctccctgcaccctctattaagaggctgggaagaagctcttgaaaatgtaattaaaagcacaaagccaggaaaactaatcggtgtagcaaatcagaagatgattgagttgttggctgataatataaatttaggagatccttcttcaatgttaaagatggtggaggatttaataagcgtgggtgaggaggagtcctttaacctgaagcagaaagtaacgtttcatgtgatcctgtctgtgctcgtctcttgttgttcatctttaaaagaaacccactttccatttgcgataagagtcttcagtttgttgcagaaaaaaataaagaagcttgaaagtgtcattactgcagtggaaatcccctcagaatggcacattgaactgatgttagacagagggatcccagtggagctgtgggcacattatgtagaagagctcaacagcactcagagggtggccgtggaggactcggtttttcttgtattttccttgaaaaaatttatttatgcactgaaagctcctaaatcttttcctaaaggtgatatatggtggaatcctgaacaactgaaagaagacagcagggactatctgcacttgctcattgggctgtttgagatgatgctcaatggtgccgatgctgttcatttcagagttctgatgaaacttttcataaaggtgcatctagaagatgtttttcagttattcaagttctgttctgttttatggacctatggttctagcctttcaaatccactaaactgcagtgtgaaaacagtgctgcagactcaagctctttatgtgggctgtgcaatgctttcttctcagaagacacagtgtaaacaccaactggcatccatatcttctccagtggtgacatctttactcattaacctgggaagccccgtaaaagaagttcgtagggctgccattcagtgtctccaggccctcagtggagtggcatccccgttttatctgataatagatcatttgatttctaaagcagaggagatcacttcagatgctgcctatgttattcaggatttggctactttatttgaggaactacagagagaaaagaaactgaaatctcatcagaagttgtctgaaactttgaaaaacttacttagttgtgtgtatagttgcccatcttatatagcaaaagatttgatgaaagtacttcagggagtcaacggtgagatggtgctttctcagctattgcctatggctgaacaactgctagaaaagatccagaaggagcccacagctgtgctgaaagatgaggccatggttctgcatctcactctgggaaagtataatgaattttcagtttcccttttaaatgaggatccgaagagtctagatatatttataaaagctgtgcacacaacaaaggaactttacgcgggaatgccaaccattcagatcacagcccttgaaaagattacaaaaccattttttgcagccatatcagatgaaaaagttcagcagaagcttttaagaatgttgtttgatttattggtgaactgtaaaaactcacattgtgctcagactgtcagcagtgtttttaaagggatttccgttaatgctgaacaagtccgaatagaactggagccaccagataaagctaaacccttgggcacagttcagcaaaaaagaaggcaaaaaatgcagcagaaaaaatcacaagatctagaatctgttcaggaagttggaggttcttactggcaaagagtaactctcatcctggaattactgcagcacaaaaagaagctcagaagtcctcagatattggtgccaactctttttaacttgctatcaagatgtttagaacccttgccacaagagcagggaaatatggaatacaccaaacaattaattcttagttgtctgctcaacatctgccaaaaactatctccagatggtggcaaaatacccaaagatattttagatgaggagaagttcaacgtggagttgatagttcagtgcatccgcctttcggagatgccgcagacccatcaccatgcccttttacttttgggcactgttgctggaatatttccggataaagttttacacaatatcatgtctatttttacatttatgggagccaatgtcatgcgcctagatgatacttacagttttcaagttattaacaagacagtgaaaatggttattcccgcacttattcagtctgatagtggagattctatagaagtttcaagaaacgttgaagagattgtggtaaaaatcattagtgtatttgtggatgcgctgccacacgtcccggagcacaggcgcctgcccatccttgttcaacttgttgatacactgggtgcagagaaattcctctggattctcctcatcttgctttttgaacagtatgtcacaaaaacagtgctggcggctgcctgtggcgaaaaggatgctattttagaagcagacactgaattttggttttcagtctgttgtgagtttagtgtccagcatcagatacaaagcttgatgaatatcctccagtacttactaaagctgccagaggaaaaagaagaaaccattcccaaagcagtgtcatttaataagagtgaatcacaagaagaaatgctacaggtttttaatgtagagactcacactagcaagcaactgcggcattttaaatttttgtcagtgtccttcatgtctcagctcctgtcttccaataattttctgaaaaaggtagttgagagtggtggtcctgagattttaaaaggccttgaagagaggttgctggagaccgttctcggctatatcagtgcagttgcacagtccatggaaaggaacgcagacaaactcaccgtgaagttctggcgcgcgctccttagtaaagcttacgacctgttagataaggtcaatgccttgctgcccacagagacattcattcctgtgatcagagggctggtgggcaatcccctgccatctgttcgccgcaaagcgctggaccttttgaataacaagctgcagcaaaatatatcctggaagaagacaatagttacccgtttcctaaaactggttccagaccttttggccattgtgcagcgtaagaaaaaggaaggggaagaagaacaagcaatcaacagacagacagcgttgtataccttaaagcttttatgcaagaattttggtgcagaaaatccagatccttttgtcccagtgctgaacactgctgtgaaactgattgctccagagagaaaggaggagaagaatgtcctgggaagcgcgctgctgtgcatagcagaggtgacctccaccctggaggcgctggccatcccccagcttcccagcctgatgccatcgttgctgacaacaatgaagaacaccagcgagctggtctccagcgaggtctacctgctcagtgccttggctgctctgcagaaggttgtggagactctcccgcacttcatcagcccctatctggaaggcattctctcccaggtgattcatctggagaaaatcactagtgaaatgggttctgcgtcacaggctaatatccgtctcacatctcttaaaaagacactggctaccacacttgcaccccgagtcctgttgcccgccatcaaaaaaacttacaagcagattgagaagaactggaagaatcacatgggtccgtttatgagcatcttgcaagagcatattggggtgatgaagaaggaagagctcacctcccatcagtctcagctaaccgcctttttcctggaagccctggacttccgagcccagcactctgagaacgatctggaggaagttggaaaaacggaaaattgtatcattgactgtctagtagccatggttgtcaaactttccgaggtcacattcaggcccctgttcttcaagctgtttgattgggctaaaacagaagatgccccaaaggacaggttgttgacattttacaacttggcagattgcattgctgaaaagctgaaagggctttttactctgtttgccggccacttagtgaagccttttgctgacaccttgaaccaggtgaacatctccaaaacagatgaagcattttttgactctgaaaatgaccctgaaaagtgctgcttgctgttgcagtttattttgaactgtttatacaaaatcttcctttttgatacccagcattttataagtaaagagagagcagaagccttgatgatgcctctggtggatcagctggaaaacaggcttgggggagaagagaaattccaggaacgggtgacaaagcacctgataccatgcatcgcacagttttcggtggccatggcggatgactctctttggaaaccactgaactaccagattctgctaaagacgagagactcctcgcctaaggttcgatttgctgctttgattactgtgttagcactggctgaaaaactaaaggagaattatattgtcttgctaccagaatccattcctttcttagcagagttgatggaagatgaatgtgaagaagtagaacatcagtgccaaaagactattcagcaactggaaactgtcctgggagagccactccagagctatttctaagactttctgtggtgtttcatactctactcagagttcacactcatatttcatatttttatttttgggtgttgggtgccatgttacttttggtgccttaatacacctacttggattacttacaaatgttttatcacttctttacaaactgcagaaagagtaaatgatacacggtatttttatacagactgctgtgtttgtttaaacatttattattctcttcctgattgatggtaataatattagacttgttaattttagcacccaaagctgacgcctcatttgcactgtaagccttaactcttctgtacagcagtatcttacatacatggtatccatgttgcagatttcactcaaagttgctctatttcaagaaaatgaagttatttagcaatcaacagaagtacttttgactgtaaagcctacttttcattttgggtaggcgaacttcagccttcgtttctttgttgtgcccataaagagaagtggttctggaatgctttttttaacccaggagtgtgactgtcacctttatcctttgttcttttgggaaacgggagagatgaaggcaacacgctgcttctaaaacagctcacacctggctgctcacacagagggcccagaaacactgggtggcacgaggaagctcctccaggattcagaatgaacccagttccattggtggttaactaagaactacttgtctaagaaagtaagtatcagtagatttttttcaatgctttgaagtgccctaatctctagtactgggtcatggtgaagttggaaagtgagggttcaaataaaattagatctgccccctttttaaaggcatctaagaacatcccgtagaatgttcgcattgagtttaaaagcctttgaagctaatatagaagtttaatgcagaaatgtggcaagcaaaaggccaacttgcattttagagacagagcttgctagtatagaagtgcatatttctaagaaatgtctcagtaaaattcattaataaatactaatagctttttaaatttttttcctccacgtaaaatgaaaatgaacttaagacttacaaggaatgatgtgagtgggctatttttttcctaaatgcctcacagtctccaacagctcagttaagcactctgatggtctttatggagaaaaataactctgggggattctcgagtcttcttgccttctacagctttccctgtggcaccctccacccccaaccagtgtctttgagcttggtgagactctgcatacattaatatgaaaagctggaaaagaattaagggctagcgatttctacactgagtacttttaaaaaaataagattgacaatggtattcttttcaatatatggatagaaataatatctaaaatctgttctgaaaatattcctaaatcctggcagagttctgccccagtctaatgtgataaaatgatcctcactgactgagcttttttccctccccactcccaaacctttgaaatttcctgtaacaagatctgacctgtaaagatcccatatacatggaacttctgccaactcccctcaaataatagtaaagtggaagagtgctttgatctcagttgctaatgatgatggactaatctttagaagaacggaggccttgattggtgatttcatgggaacaaaacagatttctgcattacctctgcctg

SEQ ID NO: 109 - DNA, 7870 bp, Homo sapiens
ggtttccgggtgagggttgggctccttggtaccatgtgggaagcgctgtgaagagttgttgccttccaagatatacccaaattcccagttccagcccgtgtcattaaaactccgctggcgtgaaagatgacgtccttagcccagcagctgcaacgactcgccctccctcaaagtgatgccagcctcttatctagagatgaagttgcttctttgttatttgaccctaaggaagcggccacaatcgacagggacaccgccttcgccattggatgtactggcctggaagagttgcttggaattgatccttcctttgagcagtttgaagcaccgttgttcagtcagctagcaaaaaccttggagcgaagtgttcagaccaaagcagtaaacaaacagttggatgaaaacatttcattattccttattcacttgtcgccttacttcctgcttaagccagcacagaagtgtctggagtggttgattcacaggttccatatacatctctataatcaagatagcctcattgcttgtgttctgccataccacgagacaagaatatttgtgcgagtcatacagcttctaaaaattaataattcaaagcacagatggttctggttgttgccagttaagcaatctggagtgccgttagctaaaggaactttgattacccactgctacaaagatcttggattcatggatttcatttgcagtttggtgacaaaatctgtgaaggtttttgctgagtacccgggcagctcagctcagttgagggtgctcttggctttctatgcttctaccatagtgtcggcgctggtagctgcagaggacgtatcagacaatatcatcgccaaactatttccctatatccaaaagggattgaaatcatctttaccagattacagagctgcaacatacatgataatatgtcagatttctgtgaaagtgaccatggaaaatacctttgtgaattcattggcatcacagatcatcaaaacattgaccaagattccctctttgatcaaggatgggttaagttgcttgatagtgctcctgcagagacagaagccagagagccttgggaaaaagccattccctcacttatgtaatgttcctgatcttattacaatacttcatgggatttctgaaacttacgatgtcagtcctcttctgcattacatgcttccccatctggtcgtctccatcattcatcatgttacaggagaagaaactgaaggaatggatggtcaaatctacaagagacacttagaagctatacttacaaaaatatcactgaagaacaacttagaccatttgttggctagccttctatttgaagagtatatttcatatagttcacaggaagaaatggattctaataaagtgtctttgcttaatgaacaatttcttccactcattaggcttttagaaagcaaataccccagaacattagatgttgtattagaggaacacttaaaggaaattgcagatctgaaaaaacaagagcttttccatcagtttgtttctctttctacaagtggaggaaagtatcaggagggtgttgatgaatctttcataaaagaagctgttttagcccgattaggtgatgataatatagatgttgttttgtcggctataagtgcttttgagattttcaaagaacacttcagttcagaagtgacgatttcaaatcttctgaatctctttcaaagagcagaactttcaaagaatggagaatggtacgaggtacttaagatagccgctgacatattaattaaagaagagatactgagtgaaaatgatcagttgtcaaatcaggtggttgtatgtttgctgccatttatggttatcaataatgatgatacggaatctgctgagatgaaaattgctatatatttatcaaaatcaggaatctgctccctgcaccctctattaagaggctgggaagaagctcttgaaaatgtaattaaaagcacaaagccaggaaaactaatcggtgtagcaaatcagaagatgattgagttgttggctgataatataaatttaggagatccttcttcaatgttaaagatggaaatcccctcagaatggcacattgaactgatgttagacagagggatcccagtggagctgtgggcacattatgtagaagagctcaacagcactcagagggtggccgtggaggactcggtttttcttgtattttccttgaaaaaatttatttatgcactgaaagctcctaaatcttttcctaaaggtgatatatggtggaatcctgaacaactgaaagaagacagcagggactatctgcacttgctcattgggctgtttgagatgatgctcaatggtgccgatgctgttcatttcagagttctgatgaaacttttcataaaggtgcatctagaagatgtttttcagttattcaagttctgttctgttttatggacctatggttctagcctttcaaatccactaaactgcagtgtgaaaacagtgctgcagactcaagctctttatgtgggctgtgcaatgctttcttctcagaagacacagtgtaaacaccaactggcatccatatcttctccagtggtgacatctttactcattaacctgggaagccccgtaaaagaagttcgtagggctgccattcagtgtctccaggccctcagtggagtggcatccccgttttatctgataatagatcatttgatttctaaagcagaggagatcacttcagatgctgcctatgttattcaggatttggctactttatttgaggaactacagagagaaaagaaactgaaatctcatcagaagttgtctgaaactttgaaaaacttacttagttgtgtgtatagttgcccatcttatatagcaaaagatttgatgaaagtacttcagggagtcaacggtgagatggtgctttctcagctattgcctatggctgaacaactgctagaaaagatccagaaggagcccacagctgtgctgaaagatgaggccatggttctgcatctcactctgggaaagtataatgaattttcagtttcccttttaaatgaggatccgaagagtctagatatatttataaaagctgtgcacacaacaaaggaactttacgcgggaatgccaaccattcagatcacagcccttgaaaagattacaaaaccattttttgcagccatatcagatgaaaaagttcagcagaagcttttaagaatgttgtttgatttattggtgaactgtaaaaactcacattgtgctcagactgtcagcagtgtttttaaagggatttccgttaatgctgaacaagtccgaatagaactggagccaccagataaagctaaacccttgggcacagttcagcaaaaaagaaggcaaaaaatgcagcagaaaaaatcacaagatctagaatctgttcaggaagttggaggttcttactggcaaagagtaactctcatcctggaattactgcagcacaaaaagaagctcagaagtcctcagatattggtgccaactctttttaacttgctatcaagatgtttagaacccttgccacaagagcagggaaatatggaatacaccaaacaattaattcttagttgtctgctcaacatctgccaaaaactatctccagatggtggcaaaatacccaaagatattttagatgaggagaagttcaacgtggagttgatagttcagtgcatccgcctttcggagatgccgcagacccatcaccatgcccttttacttttgggcactgttgctggaatatttccggataaagttttacacaatatcatgtctatttttacatttatgggagccaatgtcatgcgcctagatgatacttacagttttcaagttattaacaagacagtgaaaatggttattcccgcacttattcagtctgatagtggagattctatagaagtttcaagaaacgttgaagagattgtggtaaaaatcattagtgtatttgtggatgcgctgccacacgtcccggagcacaggcgcctgcccatccttgttcaacttgttgatacactgggtgcagagaaattcctctggattctcctcatcttgctttttgaacagtatgtcacaaaaacagtgctggcggctgcctgtggcgaaaaggatgctattttagaagcagacactgaattttggttttcagtctgttgtgagtttagtgtccagcatcagatacaaagcttgatgaatatcctccagtacttactaaagctgccagaggaaaaagaagaaaccattcccaaagcagtgtcatttaataagagtgaatcacaagaagaaatgctacaggtttttaatgtagagactcacactagcaagcaactgcggcattttaaatttttgtcagtgtccttcatgtctcagctcctgtcttccaataattttctgaaaaaggtagttgagagtggtggtcctgagattttaaaaggccttgaagagaggttgctggagaccgttctcggctatatcagtgcagttgcacagtccatggaaaggaacgcagacaaactcaccgtgaagttctggcgcgcgctccttagtaaagcttacgacctgttagataaggtcaatgccttgctgcccacagagacattcattcctgtgatcagagggctggtgggcaatcccctgccatctgttcgccgcaaagcgctggaccttttgaataacaagctgcagcaaaatatatcctggaagaagacaatagttacccgtttcctaaaactggttccagaccttttggccattgtgcagcgtaagaaaaaggaaggggaagaagaacaagcaatcaacagacagacagcgttgtataccttaaagcttttatgcaagaattttggtgcagaaaatccagatccttttgtcccagtgctgaacactgctgtgaaactgattgctccagagagaaaggaggagaagaatgtcctgggaagcgcgctgctgtgcatagcagaggtgacctccaccctggaggcgctggccatcccccagcttcccagcctgatgccatcgttgctgacaacaatgaagaacaccagcgagctggtctccagcgaggtctacctgctcagtgccttggctgctctgcagaaggttgtggagactctcccgcacttcatcagcccctatctggaaggcattctctcccaggtgattcatctggagaaaatcactagtgaaatgggttctgcgtcacaggctaatatccgtctcacatctcttaaaaagacactggctaccacacttgcaccccgagtcctgttgcccgccatcaaaaaaacttacaagcagattgagaagaactggaagaatcacatgggtccgtttatgagcatcttgcaagagcatattggggtgatgaagaaggaagagctcacctcccatcagtctcagctaaccgcctttttcctggaagccctggacttccgagcccagcactctgagaacgatctggaggaagttggaaaaacggaaaattgtatcattgactgtctagtagccatggttgtcaaactttccgaggtcacattcaggcccctgttcttcaagctgtttgattgggctaaaacagaagatgccccaaaggacaggttgttgacattttacaacttggcagattgcattgctgaaaagctgaaagggctttttactctgtttgccggccacttagtgaagccttttgctgacaccttgaaccaggtgaacatctccaaaacagatgaagcattttttgactctgaaaatgaccctgaaaagtgctgcttgctgttgcagtttattttgaactgtttatacaaaatcttcctttttgatacccagcattttataagtaaagagagagcagaagccttgatgatgcctctggtggatcagctggaaaacaggcttgggggagaagagaaattccaggaacgggtgacaaagcacctgataccatgcatcgcacagttttcggtggccatggcggatgactctctttggaaaccactgaactaccagattctgctaaagacgagagactcctcgcctaaggttcgatttgctgctttgattactgtgttagcactggctgaaaaactaaaggagaattatattgtcttgctaccagaatccattcctttcttagcagagttgatggaagatgaatgtgaagaagtagaacatcagtgccaaaagactattcagcaactggaaactgtcctgggagagccactccagagctatttctaagactttctgtggtgtttcatactctactcagagttcacactcatatttcatatttttatttttgggtgttgggtgccatgttacttttggtgccttaatacacctacttggattacttacaaatgttttatcacttctttacaaaatccccacctggcttgtgctgccacataagcctctcctgcctatcgtatagagctgcagaaagagtaaatgatacacggtatttttatacagactgctgtgtttgtttaaacatttattattctcttcctgattgatggtaataatattagacttgttaattttagcacccaaagctgacgcctcatttgcactgtaagccttaactcttctgtacagcagtatcttacatacatggtatccatgttgcagatttcactcaaagttgctctatttcaagaaaatgaagttatttagcaatcaacagaagtacttttgactgtaaagcctacttttcattttgggtaggcgaacttcagccttcgtttctttgttgtgcccataaagagaagtggttctggaatgctttttttaacccaggagtgtgactgtcacctttatcctttgttcttttgggaaacgggagagatgaaggcaacacgctgcttctaaaacagctcacacctggctgctcacacagagggcccagaaacactgggtggcacgaggaagctcctccaggattcagaatgaacccagttccattggtggttaactaagaactacttgtctaagaaagtaagtatcagtagatttttttcaatgctttgaagtgccctaatctctagtactgggtcatggtgaagttggaaagtgagggttcaaataaaattagatctgccccctttttaaaggcatctaagaacatcccgtagaatgttcgcattgagtttaaaagcctttgaagctaatatagaagtttaatgcagaaatgtggcaagcaaaaggccaacttgcattttagagacagagcttgctagtatagaagtgcatatttctaagaaatgtctcagtaaaattcattaataaatactaatagctttttaaatttttttcctccacgtaaaatgaaaatgaacttaagacttacaaggaatgatgtgagtgggctatttttttcctaaatgcctcacagtctccaacagctcagttaagcactctgatggtctttatggagaaaaataactctgggggattctcgagtcttcttgccttctacagctttccctgtggcaccctccacccccaaccagtgtctttgagcttggtgagactctgcatacattaatatgaaaagctggaaaagaattaagggctagcgatttctacactgagtacttttaaaaaaataagattgacaatggtattcttttcaatatatggatagaaataatatctaaaatctgttctgaaaatattcctaaatcctggcagagttctgccccagtctaatgtgataaaatgatcctcactgactgagcttttttccctccccactcccaaacctttgaaatttcctgtaacaagatctgacctgtaaagatcccatatacatggaacttctgccaactcccctcaaataata

SEQ ID NO: 110 - DNA, 2840 bp, Homo sapiens
cctgatgccatcgttgctgacaacaatgaagaacaccagcgagctggtctccagcgaggtctacctgctcagtgccttggctgctctgcagaaggttgtggagactctcccgcacttcatcagcccctatctggaaggcattctctcccaggtgattcatctggagaaaatcactagtgaaatgggttctgcgtcacaggctaatatccgtctcacatctcttaaaaagacactggctaccacacttgcaccccgagtcctgttgcccgccatcaaaaaaacttacaagcagattgagaagaactggaagaatcacatgggtccgtttatgagcatcttgcaagagcatattggggtgatgaagaaggaagagctcacctcccatcagtctcagctaaccgcctttttcctggaagccctggacttccgagcccagcactctgagaacgatctggaggaagttggaaaaacggaaaattgtatcattgactgtctagtagccatggttgtcaaactttccgaggtcacattcaggcccctgttcttcaagctgtttgattgggctaaaacagaagatgccccaaaggacaggttgttgacattttacaacttggcagattgcattgctgaaaagctgaaagggctttttactctgtttgccggccacttagtgaagccttttgctgacaccttgaaccaggtgaacatctccaaaacagatgaagcattttttgactctgaaaatgaccctgaaaagtgctgcttgctgttgcagtttattttgaactgtttatacaaaatcttcctttttgatacccagcattttataagtaaagagagagcagaagccttgatgatgcctctggtggatcagctggaaaacaggcttgggggagaagagaaattccaggaacgggtgacaaagcacctgataccatgcatcgcacagttttcggtggccatggcggatgactctctttggaaaccactgaactaccagattctgctaaagacgagagactcctcgcctaaggttcgatttgctgctttgattactgtgttagcactggctgaaaaactaaaggagaattatattgtcttgctaccagaatccattcctttcttagcagagttgatggaagatgaatgtgaagaagtagaacatcagtgccaaaagactattcagcaactggaaactgtcctgggagagccactccagagctatttctaagactttctgtggtgtttcatactctactcagagttcacactcatatttcatatttttatttttgggtgttgggtgccatgttacttttggtgccttaatacacctacttggattacttacaaatgttttatcacttctttacaaaatccccacctggcttgtgctgccacataagcctctcctgcctatcgtatagagctgcagaaagagtaaatgatacacggtatttttatacagactgctgtgtttgtttaaacatttattattctcttcctgattgatggtaataatattagacttgttaattttagcacccaaagctgacgcctcatttgcactgtaagccttaactcttctgtacagcagtatcttacatacatggtatccatgttgcagatttcactcaaagttgctctatttcaagaaaatgaagttatttagcaatcaacagaagtacttttgactgtaaagcctacttttcattttgggtaggcgaacttcagccttcgtttctttgttgtgcccataaagagaagtggttctggaatgctttttttaacccaggagtgtgactgtcacctttatcctttgttcttttgggaaacgggagagatgaaggcaacacgctgcttctaaaacagctcacacctggctgctcacacagagggcccagaaacactgggtggcacgaggaagctcctccaggattcagaatgaacccagttccattggtggttaactaagaactacttgtctaagaaagtaagtatcagtagatttttttcaatgctttgaagtgccctaatctctagtactgggtcatggtgaagttggaaagtgagggttcaaataaaattagatctgccccctttttaaaggcatctaagaacatcccgtagaatgttcgcattgagtttaaaagcctttgaagctaatatagaagtttaatgcagaaatgtggcaagcaaaaggccaacttgcattttagagacagagcttgctagtatagaagtgcatatttctaagaaatgtctcagtaaaattcattaataaatactaatagctttttaaatttttttcctccacgtaaaatgaaaatgaacttaagacttacaaggaatgatgtgagtgggctatttttttcctaaatgcctcacagtctccaacagctcagttaagcactctgatggtctttatggagaaaaataactctgggggattctcgagtcttcttgccttctacagctttccctgtggcaccctccacccccaaccagtgtctttgagcttggtgagactctgcatacattaatatgaaaagctggaaaagaattaagggctagcgatttctacactgagtacttttaaaaaaataagattgacaatggtattcttttcaatatatggatagaaataatatctaaaatctgttctgaaaatattcctaaatcctggcagagttctgccccagtctaatgtgataaaatgatcctcactgactgagcttttttccctccccactcccaaacctttgaaatttcctgtaacaagatctgacctgtaaagatcccatatacatggaacttctgccaactcccctcaaataata

SEQ ID NO: 111 - DNA, 7967 bp, Homo sapiens
ggtttccgggtgagggttgggctccttggtaccatgtgggaagcgctgtgaagagttgttgccttccaagatatacccaaattcccagttccagcccgtgtcattaaaactccgctggcgtgaaagatgacgtccttagcccagcagctgcaacgactcgccctccctcaaagtgatgccagcctcttatctagagatgaagttgcttctttgttatttgaccctaaggaagcggccacaatcgacagggacaccgccttcgccattggatgtactggcctggaagagttgcttggaattgatccttcctttgagcagtttgaagcaccgttgttcagtcagctagcaaaaaccttggagcgaagtgttcagaccaaagcagtaaacaaacagttggatgaaaacatttcattattccttattcacttgtcgccttacttcctgcttaagccagcacagaagtgtctggagtggttgattcacaggttccatatacatctctataatcaagatagcctcattgcttgtgttctgccataccacgagacaagaatatttgtgcgagtcatacagcttctaaaaattaataattcaaagcacagatggttctggttgttgccagttaagcaatctggagtgccgttagctaaaggaactttgattacccactgctacaaagatcttggattcatggatttcatttgcagtttggtgacaaaatctgtgaaggtttttgctgagtacccgggcagctcagctcagttgagggtgctcttggctttctatgcttctaccatagtgtcggcgctggtagctgcagaggacgtatcagacaatatcatcgccaaactatttccctatatccaaaagtctttgtacctcactggaaggaggacggagcagacagtctctttgaggcatcatcaaaacattgaccaagattccctctttgatcaaggatgggttaagttgcttgatagtgctcctgcagagacagaagccagagagccttgggaaaaagtatgtacaattgaattgagaaatggtgctagtcagaggccattccctcacttatgtaatgttcctgatcttattacaatacttcatgggatttctgaaacttacgatgtcagtcctcttctgcattacatgcttccccatctggtcgtctccatcattcatcatgttacaggagaagaaactgaaggaatggatggtcaaatctacaagagacacttagaagctatacttacaaaaatatcactgaagaacaacttagaccatttgttggctagccttctatttgaagagtatatttcatatagttcacaggaagaaatggattctaataaagtgtctttgcttaatgaacaatttcttccactcattaggcttttagaaagcaaataccccagaacattagatgttgtattagaggaacacttaaaggaaattgcagatctgaaaaaacaagagcttttccatcagtttgtttctctttctacaagtggaggaaagtatcaggagggtgttgatgaatctttcataaaagaagctgttttagcccgattaggtgatgataatatagatgttgttttgtcggctataagtgcttttgagattttcaaagaacacttcagttcagaagtgacgatttcaaatcttctgaatctctttcaaagagcagaactttcaaagaatggagaatggtacgaggtacttaagatagccgctgacatattaattaaagaagagatactgagtgaaaatgatcagttgtcaaatcaggtggttgtatgtttgctgccatttatggttatcaataatgatgatacggaatctgctgagatgaaaattgctatatatttatcaaaatcaggaatctgctccctgcaccctctattaagaggctgggaagaagctcttgaaaatgtaattaaaagcacaaagccaggaaaactaatcggtgtagcaaatcagaagatgattgagttgttggctgataatataaatttaggagatccttcttcaatgttaaagatggaaatcccctcagaatggcacattgaactgatgttagacagagggatcccagtggagctgtgggcacattatgtagaagagctcaacagcactcagagggtggccgtggaggactcggtttttcttgtattttccttgaaaaaatttatttatgcactgaaagctcctaaatcttttcctaaaggtgatatatggtggaatcctgaacaactgaaagaagacagcagggactatctgcacttgctcattgggctgtttgagatgatgctcaatggtgccgatgctgttcatttcagagttctgatgaaacttttcataaaggtgcatctagaagatgtttttcagttattcaagttctgttctgttttatggacctatggttctagcctttcaaatccactaaactgcagtgtgaaaacagtgctgcagactcaagctctttatgtgggctgtgcaatgctttcttctcagaagacacagtgtaaacaccaactggcatccatatcttctccagtggtgacatctttactcattaacctgggaagccccgtaaaagaagttcgtagggctgccattcagtgtctccaggccctcagtggagtggcatccccgttttatctgataatagatcatttgatttctaaagcagaggagatcacttcagatgctgcctatgttattcaggatttggctactttatttgaggaactacagagagaaaagaaactgaaatctcatcagaagttgtctgaaactttgaaaaacttacttagttgtgtgtatagttgcccatcttatatagcaaaagatttgatgaaagtacttcagggagtcaacggtgagatggtgctttctcagctattgcctatggctgaacaactgctagaaaagatccagaaggagcccacagctgtgctgaaagatgaggccatggttctgcatctcactctgggaaagtataatgaattttcagtttcccttttaaatgaggatccgaagagtctagatatatttataaaagctgtgcacacaacaaaggaactttacgcgggaatgccaaccattcagatcacagcccttgaaaagattacaaaaccattttttgcagccatatcagatgaaaaagttcagcagaagcttttaagaatgttgtttgatttattggtgaactgtaaaaactcacattgtgctcagactgtcagcagtgtttttaaagggatttccgttaatgctgaacaagtccgaatagaactggagccaccagataaagctaaacccttgggcacagttcagcaaaaaagaaggcaaaaaatgcagcagaaaaaatcacaagatctagaatctgttcaggaagttggaggttcttactggcaaagagtaactctcatcctggaattactgcagcacaaaaagaagctcagaagtcctcagatattggtgccaactctttttaacttgctatcaagatgtttagaacccttgccacaagagcagggaaatatggaatacaccaaacaattaattcttagttgtctgctcaacatctgccaaaaactatctccagatggtggcaaaatacccaaagatattttagatgaggagaagttcaacgtggagttgatagttcagtgcatccgcctttcggagatgccgcagacccatcaccatgcccttttacttttgggcactgttgctggaatatttccggataaagttttacacaatatcatgtctatttttacatttatgggagccaatgtcatgcgcctagatgatacttacagttttcaagttattaacaagacagtgaaaatggttattcccgcacttattcagtctgatagtggagattctatagaagtttcaagaaacgttgaagagattgtggtaaaaatcattagtgtatttgtggatgcgctgccacacgtcccggagcacaggcgcctgcccatccttgttcaacttgttgatacactgggtgcagagaaattcctctggattctcctcatcttgctttttgaacagtatgtcacaaaaacagtgctggcggctgcctgtggcgaaaaggatgctattttagaagcagacactgaattttggttttcagtctgttgtgagtttagtgtccagcatcagatacaaagcttgatgaatatcctccagtacttactaaagctgccagaggaaaaagaagaaaccattcccaaagcagtgtcatttaataagagtgaatcacaagaagaaatgctacaggtttttaatgtagagactcacactagcaagcaactgcggcattttaaatttttgtcagtgtccttcatgtctcagctcctgtcttccaataattttctgaaaaaggtagttgagagtggtggtcctgagattttaaaaggccttgaagagaggttgctggagaccgttctcggctatatcagtgcagttgcacagtccatggaaaggaacgcagacaaactcaccgtgaagttctggcgcgcgctccttagtaaagcttacgacctgttagataaggtcaatgccttgctgcccacagagacattcattcctgtgatcagagggctggtgggcaatcccctgccatctgttcgccgcaaagcgctggaccttttgaataacaagctgcagcaaaatatatcctggaagaagacaatagttacccgtttcctaaaactggttccagaccttttggccattgtgcagcgtaagaaaaaggaaggggaagaagaacaagcaatcaacagacagacagcgttgtataccttaaagcttttatgcaagaattttggtgcagaaaatccagatccttttgtcccagtgctgaacactgctgtgaaactgattgctccagagagaaaggaggagaagaatgtcctgggaagcgcgctgctgtgcatagcagaggtgacctccaccctggaggcgctggccatcccccagcttcccagcctgatgccatcgttgctgacaacaatgaagaacaccagcgagctggtctccagcgaggtctacctgctcagtgccttggctgctctgcagaaggttgtggagactctcccgcacttcatcagcccctatctggaaggcattctctcccaggtgattcatctggagaaaatcactagtgaaatgggttctgcgtcacaggctaatatccgtctcacatctcttaaaaagacactggctaccacacttgcaccccgagtcctgttgcccgccatcaaaaaaacttacaagcagattgagaagaactggaagaatcacatgggtccgtttatgagcatcttgcaagagcatattggggtgatgaagaaggaagagctcacctcccatcagtctcagctaaccgcctttttcctggaagccctggacttccgagcccagcactctgagaacgatctggaggaagttggaaaaacggaaaattgtatcattgactgtctagtagccatggttgtcaaactttccgaggtcacattcaggcccctgttcttcaagctgtttgattgggctaaaacagaagatgccccaaaggacaggttgttgacattttacaacttggcagattgcattgctgaaaagctgaaagggctttttactctgtttgccggccacttagtgaagccttttgctgacaccttgaaccaggtgaacatctccaaaacagatgaagcattttttgactctgaaaatgaccctgaaaagtgctgcttgctgttgcagtttattttgaactgtttatacaaaatcttcctttttgatacccagcattttataagtaaagagagagcagaagccttgatgatgcctctggtggatcagctggaaaacaggcttgggggagaagagaaattccaggaacgggtgacaaagcacctgataccatgcatcgcacagttttcggtggccatggcggatgactctctttggaaaccactgaactaccagattctgctaaagacgagagactcctcgcctaaggttcgatttgctgctttgattactgtgttagcactggctgaaaaactaaaggagaattatattgtcttgctaccagaatccattcctttcttagcagagttgatggaagatgaatgtgaagaagtagaacatcagtgccaaaagactattcagcaactggaaactgtcctgggagagccactccagagctatttctaagactttctgtggtgtttcatactctactcagagttcacactcatatttcatatttttatttttgggtgttgggtgccatgttacttttggtgccttaatacacctacttggattacttacaaatgttttatcacttctttacaaaatccccacctggcttgtgctgccacataagcctctcctgcctatcgtatagagctgcagaaagagtaaatgatacacggtatttttatacagactgctgtgtttgtttaaacatttattattctcttcctgattgatggtaataatattagacttgttaattttagcacccaaagctgacgcctcatttgcactgtaagccttaactcttctgtacagcagtatcttacatacatggtatccatgttgcagatttcactcaaagttgctctatttcaagaaaatgaagttatttagcaatcaacagaagtacttttgactgtaaagcctacttttcattttgggtaggcgaacttcagccttcgtttctttgttgtgcccataaagagaagtggttctggaatgctttttttaacccaggagtgtgactgtcacctttatcctttgttcttttgggaaacgggagagatgaaggcaacacgctgcttctaaaacagctcacacctggctgctcacacagagggcccagaaacactgggtggcacgaggaagctcctccaggattcagaatgaacccagttccattggtggttaactaagaactacttgtctaagaaagtaagtatcagtagatttttttcaatgctttgaagtgccctaatctctagtactgggtcatggtgaagttggaaagtgagggttcaaataaaattagatctgccccctttttaaaggcatctaagaacatcccgtagaatgttcgcattgagtttaaaagcctttgaagctaatatagaagtttaatgcagaaatgtggcaagcaaaaggccaacttgcattttagagacagagcttgctagtatagaagtgcatatttctaagaaatgtctcagtaaaattcattaataaatactaatagctttttaaatttttttcctccacgtaaaatgaaaatgaacttaagacttacaaggaatgatgtgagtgggctatttttttcctaaatgcctcacagtctccaacagctcagttaagcactctgatggtctttatggagaaaaataactctgggggattctcgagtcttcttgccttctacagctttccctgtggcaccctccacccccaaccagtgtctttgagcttggtgagactctgcatacattaatatgaaaagctggaaaagaattaagggctagcgatttctacactgagtacttttaaaaaaataagattgacaatggtattcttttcaatatatggatagaaataatatctaaaatctgttctgaaaatattcctaaatcctggcagagttctgccccagtctaatgtgataaaatgatcctcactgactgagcttttttccctccccactcccaaacctttgaaatttcctgtaacaagatctgacctgtaaagatcccatatacatggaacttctgccaactcccctcaaataatagtaaagtggaagagtgctttgatctcagttgctaatgatgatggactaatctttagaagaacggaggccttgattggtgatttcatgggaacaaaacagatttctgcattacctctgcctg

SEQ ID NO: 112 - DNA, 7914 bp, Homo sapiens
ggtttccgggtgagggttgggctccttggtaccatgtgggaagcgctgtgaagagttgttgccttccaagatatacccaaattcccagttccagcccgtgtcattaaaactccgctggcgtgaaagatgacgtccttagcccagcagctgcaacgactcgccctccctcaaagtgatgccagcctcttatctagagatgaagttgcttctttgttatttgaccctaaggaagcggccacaatcgacagggacaccgccttcgccattggatgtactggcctggaagagttgcttggaattgatccttcctttgagcagtttgaagcaccgttgttcagtcagctagcaaaaaccttggagcgaagtgttcagaccaaagcagtaaacaaacagttggatgaaaacatttcattattccttattcacttgtcgccttacttcctgcttaagccagcacagaagtgtctggagtggttgattcacaggttccatatacatctctataatcaagatagcctcattgcttgtgttctgccataccacgagacaagaatatttgtgcgagtcatacagcttctaaaaattaataattcaaagcacagatggttctggttgttgccagttaagcaatctggagtgccgttagctaaaggaactttgattacccactgctacaaagatcttggattcatggatttcatttgcagtttggtgacaaaatctgtgaaggtttttgctgagtacccgggcagctcagctcagttgagggtgctcttggctttctatgcttctaccatagtgtcggcgctggtagctgcagaggacgtatcagacaatatcatcgccaaactatttccctatatccaaaagtctttgtacctcactggaaggaggacggagcagacagtctctttgaggcatcatcaaaacattgaccaagattccctctttgatcaaggatgggttaagttgcttgatagtgctcctgcagagacagaagccagagagccttgggaaaaagtatgtacaattgaattgagaaatggtgctagtcagaggccattccctcacttatgtaatgttcctgatcttattacaatacttcatgggatttctgaaacttacgatgtcagtcctcttctgcattacatgcttccccatctggtcgtctccatcattcatcatgttacaggagaagaaactgaaggaatggatggtcaaatctacaagagacacttagaagctatacttacaaaaatatcactgaagaacaacttagaccatttgttggctagccttctatttgaagagtatatttcatatagttcacaggaagaaatggattctaataaagtgtctttgcttaatgaacaatttcttccactcattaggcttttagaaagcaaataccccagaacattagatgttgtattagaggaacacttaaaggaaattgcagatctgaaaaaacaagagcttttccatcagtttgtttctctttctacaagtggaggaaagtatcaggagggtgttgatgaatctttcataaaagaagctgttttagcccgattaggtgatgataatatagatgttgttttgtcggctataagtgcttttgagattttcaaagaacacttcagttcagaagtgacgatttcaaatcttctgaatctctttcaaagagcagaactttcaaagaatggagaatggtacgaggtacttaagatagccgctgacatattaattaaagaagagatactgagtgaaaatgatcagttgtcaaatcaggtggttgtatgtttgctgccatttatggttatcaataatgatgatacggaatctgctgagatgaaaattgctatatatttatcaaaatcaggaatctgctccctgcaccctctattaagaggctgggaagaagctcttgaaaatgtaattaaaagcacaaagccaggaaaactaatcggtgtagcaaatcagaagatgattgagttgttggctgataatataaatttaggagatccttcttcaatgttaaagatggaaatcccctcagaatggcacattgaactgatgttagacagagggatcccagtggagctgtgggcacattatgtagaagagctcaacagcactcagagggtggccgtggaggactcggtttttcttgtattttccttgaaaaaatttatttatgcactgaaagctcctaaatcttttcctaaaggtgatatatggtggaatcctgaacaactgaaagaagacagcagggactatctgcacttgctcattgggctgtttgagatgatgctcaatggtgccgatgctgttcatttcagagttctgatgaaacttttcataaaggtgcatctagaagatgtttttcagttattcaagttctgttctgttttatggacctatggttctagcctttcaaatccactaaactgcagtgtgaaaacagtgctgcagactcaagctctttatgtgggctgtgcaatgctttcttctcagaagacacagtgtaaacaccaactggcatccatatcttctccagtggtgacatctttactcattaacctgggaagccccgtaaaagaagttcgtagggctgccattcagtgtctccaggccctcagtggagtggcatccccgttttatctgataatagatcatttgatttctaaagcagaggagatcacttcagatgctgcctatgttattcaggatttggctactttatttgaggaactacagagagaaaagaaactgaaatctcatcagaagttgtctgaaactttgaaaaacttacttagttgtgtgtatagttgcccatcttatatagcaaaagatttgatgaaagtacttcagggagtcaacggtgagatggtgctttctcagctattgcctatggctgaacaactgctagaaaagatccagaaggagcccacagctgtgctgaaagatgaggccatggttctgcatctcactctgggaaagtataatgaattttcagtttcccttttaaatgaggatccgaagagtctagatatatttataaaagctgtgcacacaacaaaggaactttacgcgggaatgccaaccattcagatcacagcccttgaaaagattacaaaaccattttttgcagccatatcagatgaaaaagttcagcagaagcttttaagaatgttgtttgatttattggtgaactgtaaaaactcacattgtgctcagactgtcagcagtgtttttaaagggatttccgttaatgctgaacaagtccgaatagaactggagccaccagataaagctaaacccttgggcacagttcagcaaaaaagaaggcaaaaaatgcagcagaaaaaatcacaagatctagaatctgttcaggaagttggaggttcttactggcaaagagtaactctcatcctggaattactgcagcacaaaaagaagctcagaagtcctcagatattggtgccaactctttttaacttgctatcaagatgtttagaacccttgccacaagagcagggaaatatggaatacaccaaacaattaattcttagttgtctgctcaacatctgccaaaaactatctccagatggtggcaaaatacccaaagatattttagatgaggagaagttcaacgtggagttgatagttcagtgcatccgcctttcggagatgccgcagacccatcaccatgcccttttacttttgggcactgttgctggaatatttccggataaagttttacacaatatcatgtctatttttacatttatgggagccaatgtcatgcgcctagatgatacttacagttttcaagttattaacaagacagtgaaaatggttattcccgcacttattcagtctgatagtggagattctatagaagtttcaagaaacgttgaagagattgtggtaaaaatcattagtgtatttgtggatgcgctgccacacgtcccggagcacaggcgcctgcccatccttgttcaacttgttgatacactgggtgcagagaaattcctctggattctcctcatcttgctttttgaacagtatgtcacaaaaacagtgctggcggctgcctgtggcgaaaaggatgctattttagaagcagacactgaattttggttttcagtctgttgtgagtttagtgtccagcatcagatacaaagcttgatgaatatcctccagtacttactaaagctgccagaggaaaaagaagaaaccattcccaaagcagtgtcatttaataagagtgaatcacaagaagaaatgctacaggtttttaatgtagagactcacactagcaagcaactgcggcattttaaatttttgtcagtgtccttcatgtctcagctcctgtcttccaataattttctgaaaaaggtagttgagagtggtggtcctgagattttaaaaggccttgaagagaggttgctggagaccgttctcggctatatcagtgcagttgcacagtccatggaaaggaacgcagacaaactcaccgtgaagttctggcgcgcgctccttagtaaagcttacgacctgttagataaggtcaatgccttgctgcccacagagacattcattcctgtgatcagagggctggtgggcaatcccctgccatctgttcgccgcaaagcgctggaccttttgaataacaagctgcagcaaaatatatcctggaagaagacaatagttacccgtttcctaaaactggttccagaccttttggccattgtgcagcgtaagaaaaaggaaggggaagaagaacaagcaatcaacagacagacagcgttgtataccttaaagcttttatgcaagaattttggtgcagaaaatccagatccttttgtcccagtgctgaacactgctgtgaaactgattgctccagagagaaaggaggagaagaatgtcctgggaagcgcgctgctgtgcatagcagaggtgacctccaccctggaggcgctggccatcccccagcttcccagcctgatgccatcgttgctgacaacaatgaagaacaccagcgagctggtctccagcgaggtctacctgctcagtgccttggctgctctgcagaaggttgtggagactctcccgcacttcatcagcccctatctggaaggcattctctcccaggtgattcatctggagaaaatcactagtgaaatgggttctgcgtcacaggctaatatccgtctcacatctcttaaaaagacactggctaccacacttgcaccccgagtcctgttgcccgccatcaaaaaaacttacaagcagattgagaagaactggaagaatcacatgggtccgtttatgagcatcttgcaagagcatattggggtgatgaagaaggaagagctcacctcccatcagtctcagctaaccgcctttttcctggaagccctggacttccgagcccagcactctgagaacgatctggaggaagttggaaaaacggaaaattgtatcattgactgtctagtagccatggttgtcaaactttccgaggtcacattcaggcccctgttcttcaagctgtttgattgggctaaaacagaagatgccccaaaggacaggttgttgacattttacaacttggcagattgcattgctgaaaagctgaaagggctttttactctgtttgccggccacttagtgaagccttttgctgacaccttgaaccaggtgaacatctccaaaacagatgaagcattttttgactctgaaaatgaccctgaaaagtgctgcttgctgttgcagtttattttgaactgtttatacaaaatcttcctttttgatacccagcattttataagtaaagagagagcagaagccttgatgatgcctctggtggatcagctggaaaacaggcttgggggagaagagaaattccaggaacgggtgacaaagcacctgataccatgcatcgcacagttttcggtggccatggcggatgactctctttggaaaccactgaactaccagattctgctaaagacgagagactcctcgcctaaggttcgatttgctgctttgattactgtgttagcactggctgaaaaactaaaggagaattatattgtcttgctaccagaatccattcctttcttagcagagttgatggaagatgaatgtgaagaagtagaacatcagtgccaaaagactattcagcaactggaaactgtcctgggagagccactccagagctatttctaagactttctgtggtgtttcatactctactcagagttcacactcatatttcatatttttatttttgggtgttgggtgccatgttacttttggtgccttaatacacctacttggattacttacaaatgttttatcacttctttacaaactgcagaaagagtaaatgatacacggtatttttatacagactgctgtgtttgtttaaacatttattattctcttcctgattgatggtaataatattagacttgttaattttagcacccaaagctgacgcctcatttgcactgtaagccttaactcttctgtacagcagtatcttacatacatggtatccatgttgcagatttcactcaaagttgctctatttcaagaaaatgaagttatttagcaatcaacagaagtacttttgactgtaaagcctacttttcattttgggtaggcgaacttcagccttcgtttctttgttgtgcccataaagagaagtggttctggaatgctttttttaacccaggagtgtgactgtcacctttatcctttgttcttttgggaaacgggagagatgaaggcaacacgctgcttctaaaacagctcacacctggctgctcacacagagggcccagaaacactgggtggcacgaggaagctcctccaggattcagaatgaacccagttccattggtggttaactaagaactacttgtctaagaaagtaagtatcagtagatttttttcaatgctttgaagtgccctaatctctagtactgggtcatggtgaagttggaaagtgagggttcaaataaaattagatctgccccctttttaaaggcatctaagaacatcccgtagaatgttcgcattgagtttaaaagcctttgaagctaatatagaagtttaatgcagaaatgtggcaagcaaaaggccaacttgcattttagagacagagcttgctagtatagaagtgcatatttctaagaaatgtctcagtaaaattcattaataaatactaatagctttttaaatttttttcctccacgtaaaatgaaaatgaacttaagacttacaaggaatgatgtgagtgggctatttttttcctaaatgcctcacagtctccaacagctcagttaagcactctgatggtctttatggagaaaaataactctgggggattctcgagtcttcttgccttctacagctttccctgtggcaccctccacccccaaccagtgtctttgagcttggtgagactctgcatacattaatatgaaaagctggaaaagaattaagggctagcgatttctacactgagtacttttaaaaaaataagattgacaatggtattcttttcaatatatggatagaaataatatctaaaatctgttctgaaaatattcctaaatcctggcagagttctgccccagtctaatgtgataaaatgatcctcactgactgagcttttttccctccccactcccaaacctttgaaatttcctgtaacaagatctgacctgtaaagatcccatatacatggaacttctgccaactcccctcaaataatagtaaagtggaagagtgctttgatctcagttgctaatgatgatggactaatctttagaagaacggaggccttgattggtgatttcatgggaacaaaacagatttctgcattacctctgcctg

SEQ ID NO: 113 - DNA, 3101 bp, Homo sapiens
gctcggaggctgttcccacccccaggctccgcgttcccgccggccccagctccagccccgcagcccaccgtgcaaacatgcttagacagagaagagattaacttcagtggcttcccactaattacagagattaagaagtggctgcctgaactattttccaaaggatacacattacaaattattgaatagggcagctaaccaagaagatcctattggtttggggggaacacaacttccagcagccacaagggatgctgctactcaggtgccaactgaaacaagctcctccacagaaggtttcgtttaggttttgtgtcgtgatggggaaacagcaaagcaaactcaaacacagcacttataaatacgggcctgatgaaattatagaagagagaattcaaactaaagcttttcaagagtatagcccagctcacatggataccgtctctgtcgtggctgctttgaactcagacctttgtgtctctggagggaaagataagacagttgtggcctataattggaaaactggaaatgtggtgaaaaggttcaaaggacatgaacatgagatcaccaaggtagcctgtattcccaaatccagccagttcttcagtgcctctcgtgacaggatggtcatgatgtgggacttgcacggttcctcacaaccaaggcagcaattgtgtggccatgccatggtggtcaccggattggctgtgagtccagactcatcacagctgtgcactggctctcgggacaacaccctgcttctgtgggatgtggtgacaggacagagtgtggaaagagcatctgtctccaggaacgtggtcactcacctgtgctgggtccccagagaaccatacatactacagacctctgaagataaaaccctcagattatgggacagtcgggggctgcaggtagctcatatgtttcctgcaaagcagcacattcagacctactgtgaagtcagtgtggatggacacaagtgtatctcctgcagcaatggctttggaggagaaggctgtgaagccacgttgtgggacctaagacagactcgaaacagaatatgtgagtataaggggcatttccagactgtcgcatcctgcgtctttctaccaagagcattggccttgatgcctttaattgctacctcatcacatgattgcaaggtgaagatttggaaccaagatactggagcctgccttttcaccttgtctctggatggatcaggacccttgacttctctggctgttggtgacgccatctccttattgtgtgcaagttttaacagaggaattcacttactcagaatggaccacagccaagggctggaactgcaggaagtggcagcattctgaggccaagagacactcactggacaatatcaaaccatggctcctcctcagcatggctttgtgtctttcccagttatcttgaggggagtgggatgtagggctggtattctttgcttaggttcatttacaagatgtatcagtgttgtaagtccaataatttaagtccagtgattcaaaatcaggtatagagtccagaaacatggactacacataaggttctctatttaagttaaatacaaatgcaactttttagtgagcttttaggactactcttcaaaaaaagtgtattgctcagaatgatgacctgtaaatgtaagagtggcaggcctctgtctgtgaaagtcagaacacagggctcgagcctctggaactgaccctttgcaagtctttacaaaagaaaaaaggcagtggggagagagagtgttttggttacatcagaaataattgagatgggaaagaatagtgcagctccatagaggagacggactgtagacaatgagattaagcttcaatcactgctcctcagcaatgtgaagaatcaaagtcagggcaagaaagcgaaagcttggacttctattcaaagtggcagcagagtgggagggcggtacccttctagcccagtgctgctgagcttgtgtgaaaatcagacctgagatggcttgaagcagccaagaaccacatgggcattgcccagaattacaggagttagcacaccagctctacagataagaaaacattgaaattcaaagattaaggccaaaaatatctcacttgcaattttaatattttcatttggatttatataaatgaaacatatatatgttttggaatggccagagtgaggcaaaggggatccctgaatcccagcactttgtgaggcctaggatggtctcaatctcctgacctcgtgatccgcccgcctaagtgctgggattacaggcgtgagccactgcgcccggcctccttcatccattcttagatcttatcctctaaacctttagtcatcgtttcactctcctttgattccttgttatgggtctttcaactctggaaagacaaagagatagtgggagaggaagcccggtcactgagcatctacagagggctaaatatatttattctcatttgttattcccaatattctctgtattgtgatttccatttcacagatgaggaagctgagggctagaaacatgcagtactttgcccaaagtcacacacatattaagaagagctgaggtatgaatctgggtctgcctgactcaaagcccaaacgctttcctttgcatcgtgtcacaaagtcatagaccatgacattgtttgtatcttcaagaccagttattaactttctggctccaaggagatcccctgcccaagtgcctaggggcagtagacagctgtctcagggacagtcgtagcatgtgctggattattagtgcagcagctgacactttttcccagaagggagagaggcagcaagtcagaaagttcacgggaatgagttgggagggggtcccagggaagggggacaggctgccaggagaaggaaagtacacgggagaaaatagtggggctctgatgagttagtagggttctgttaccaataaaattgtttccataaactgtacatgtgcttgatgtcaaattatctatgcattttaagtagaaaatagattagtaaattctagtgtttgtagaggactttttttagtctgatatgccctaatcagatactctcagcacctaagatac

SEQ ID NO: 114 - DNA, 2656 bp, Homo sapiens
ttcccacccccaggctccgcgttcccgccggccccagctccagccccgcagcccaccgggaacacaacttccagcagccacaagggatgctgctactcaggtgccaactgaaacaagctcctccacagaaggtttcgtttaggttttgtgtcgtgatggggaaacagcaaagcaaactcaaacacagcacttataaatacggcaggcctgatgaaattatagaagagagaattcaaactaaagcttttcaagagtatagcccagctcacatggataccgtctctgtcgtggctgctttgaactcagacctttgtgtctctggagggaaagataagacagttgtggcctataattggaaaactggaaatgtggtgaaaaggttcaaaggacatgaacatgagatcaccaaggtagcctgtattcccaaatccagccagttcttcagtgcctctcgtgacaggatggtcatgatgtgggacttgcacggttcctcacaaccaaggcagcaattgtgtggccatgccatggtggtcaccggattggctgtgagtccagactcatcacagctgtgcactggctctcgggacaacaccctgcttctgtgggatgtggtgacaggacagagtgtggaaagagcatctgtctccaggaacgtggtcactcacctgtgctgggtccccagagaaccatacatactacagacctctgaagataaaaccctcagattatgggacagtcgggggctgcaggtagctcatatgtttcctgcaaagcagcacattcagacctactgtgaagtcagtgtggatggacacaagtgtatctcctgcagcaatggctttggaggagaaggctgtgaagccacgttgtgggacctaagacagactcgaaacagaatatgtgagtataaggggcatttccagactgtcgcatcctgcgtctttctaccaagagcattggccttgatgcctttaattgctacctcatcacatgattgcaaggtgaagatttggaaccaagatactggagcctgccttttcaccttgtctctggatggatcaggacccttgacttctctggctgttggtgacgccatctccttattgtgtgcaagttttaacagaggaattcacttactcagaatggaccacagccaagggctggaactgcaggaagtggcagcattctgaggccaagagacactcactggacaatatcaaaccatggctcctcctcagcatggctttgtgtctttcccagttatcttgaggggagtgggatgtagggctggtattctttgcttaggttcatttacaagatgtatcagtgttgtaagtccaataatttaagtccagtgattcaaaatcaggtatagagtccagaaacatggactacacataaggttctctatttaagttaaatacaaatgcaactttttagtgagcttttaggactactcttcaaaaaaagtgtattgctcagaatgatgacctgtaaatgtaagagtggcaggcctctgtctgtgaaagtcagaacacagggctcgagcctctggaactgaccctttgcaagtctttacaaaagaaaaaaggcagtggggagagagagtgttttggttacatcagaaataattgagatgggaaagaatagtgcagctccatagaggagacggactgtagacaatgagattaagcttcaatcactgctcctcagcaatgtgaagaatcaaagtcagggcaagaaagcgaaagcttggacttctattcaaagtggcagcagagtgggagggcggtacccttctagcccagtgctgctgagcttgtgtgaaaatcagacctgagatggcttgaagcagccaagaaccacatgggcattgcccagaattacaggagttagcacaccagctctacagataagaaaacattgaaattcaaagattaaggccaaaaatatctcacttgcaattttaatattttcatttggatttatataaatgaaacatatatatgttttggaatggccagagtgaggcaaaggggatccctgaaataacattagaacatacaggaaaaacgaggcaggcagatcactttaggtcaggagttcaagaccagcctgtacgtgcgtgcctgtagtcccagctactcgggaggctgagatgggagaatcacttgaacctgggaggcagagtttgcagtgagctgagattgtgccactgcactccagtctgtgtgacagaatgagaccttgtcttgaaaaaaaaaaaaacaaaaaaccacatacaggaaaaaagagagggatggagtcaactgtgccccagacattaagcccccttcagtgaggaggggcaaggtgctcaggcctgcctgtgtggcccccaggagtcagacctcagcctcatgctcactggtccattttcctccagggaaaatggagttctttctgccttcagagatgcccacacataaggcacatgaggctgttggtgacaccatcaccaacactggagattccctttctgacaagtcccagccaaagaaagattttgcatttgtcttctctgtcctctgcttgtctctgataccagtgactgacagccaccttccttcttccctctcttggtgtgatcatggctaactgcagcctcaatcaccag

SEQ ID NO: 115 - DNA, 2939 bp, Homo sapiens
ttcccacccccaggctccgcgttcccgccggccccagctccagccccgcagcccaccgggaacacaacttccagcagccacaagggatgctgctactcaggtgccaactgaaacaagctcctccacagaaggtttcgtttaggttttgtgtcgtgatggggaaacagcaaagcaaactcaaacacagcacttataaatacggcaggcctgatgaaattatagaagagagaattcaaactaaagcttttcaagagtatagcccagctcacatggataccgtctctgtcgtggctgctttgaactcagacctttgtgtctctggagggaaagataagacagttgtggcctataattggaaaactggaaatgtggtgaaaaggttcaaaggacatgaacatgagatcaccaaggtagcctgtattcccaaatccagccagttcttcagtgcctctcgtgacaggatggtcatgatgtgggacttgcacggttcctcacaaccaaggcagcaattgtgtggccatgccatggtggtcaccggattggctgtgagtccagactcatcacagctgtgcactggctctcgggacaacaccctgcttctgtgggatgtggtgacaggacagagtgtggaaagagcatctgtctccaggaacgtggtcactcacctgtgctgggtccccagagaaccatacatactacagacctctgaagataaaaccctcagattatgggacagtcgggggctgcaggtagctcatatgtttcctgcaaagcagcacattcagacctactgtgaagtcagtgtggatggacacaagtgtatctcctgcagcaatggctttggaggagaaggctgtgaagccacgttgtgggacctaagacagactcgaaacagaatatgtgagtataaggggcatttccagactgtcgcatcctgcgtctttctaccaagagcattggccttgatgcctttaattgctacctcatcacatgattgcaaggtgaagatttggaaccaagatactggagcctgccttttcaccttgtctctggatggatcaggacccttgacttctctggctgttggtgacgccatctccttattgtgtgcaagttttaacagaggaattcacttactcagaatggaccacagccaagggctggaactgcaggaagtggcagcattctgaggccaagagacactcactggacaatatcaaaccatggctcctcctcagcatggctttgtgtctttcccagttatcttgaggggagtgggatgtagggctggtattctttgcttaggttcatttacaagatgtatcagtgttgtaagtccaataatttaagtccagtgattcaaaatcaggtatagagtccagaaacatggactacacataaggttctctatttaagttaaatacaaatgcaactttttagtgagcttttaggactactcttcaaaaaaagtgtattgctcagaatgatgacctgtaaatgtaagagtggcaggcctctgtctgtgaaagtcagaacacagggctcgagcctctggaactgaccctttgcaagtctttacaaaagaaaaaaggcagtggggagagagagtgttttggttacatcagaaataattgagatgggaaagaatagtgcagctccatagaggagacggactgtagacaatgagattaagcttcaatcactgctcctcagcaatgtgaagaatcaaagtcagggcaagaaagcgaaagcttggacttctattcaaagtggcagcagagtgggagggcggtacccttctagcccagtgctgctgagcttgtgtgaaaatcagacctgagatggcttgaagcagccaagaaccacatgggcattgcccagaattacaggagttagcacaccagctctacagataagaaaacattgaaattcaaagattaaggccaaaaatatctcacttgcaattttaatattttcatttggatttatataaatgaaacatatatatgttttggaatggccagagtgaggcaaaggggatccctgaatcccagcactttgtgaggcctaggatggtctcaatctcctgacctcgtgatccgcccgcctaagtgctgggattacaggcgtgagccactgcgcccggcctccttcatccattcttagatcttatcctctaaacctttagtcatcgtttcactctcctttgattccttgttatgggtctttcaactctggaaagacaaagagatagtgggagaggaagcccggtcactgagcatctacagagggctaaatatatttattctcatttgttattcccaatattctctgtattgtgatttccatttcacagatgaggaagctgagggctagaaacatgcagtactttgcccaaagtcacacacatattaagaagagctgaggtatgaatctgggtctgcctgactcaaagcccaaacgctttcctttgcatcgtgtcacaaagtcatagaccatgacattgtttgtatcttcaagaccagttattaactttctggctccaaggagatcccctgcccaagtgcctaggggcagtagacagctgtctcagggacagtcgtagcatgtgctggattattagtgcagcagctgacactttttcccagaagggagagaggcagcaagtcagaaagttcacgggaatgagttgggagggggtcccagggaagggggacaggctgccaggagaaggaaagtacacgggagaaaatagtggggctctgatgagttagtagggttctgttaccaataaaattgtttccataaactgtacatgtgcttgatgtcaaattatctatgcattttaagtagaaaatagattagtaaattctagtgtttgtagaggactttttttagtctgatatgccctaatcagatactctcagcacctaagatac

SEQ ID NO: 116 - DNA, 1766 bp, Homo sapiens
aacgagacggcgtcggaactcgctggaagactcggcccgggtggctcaacagttcgcaaagtccgggcttgcggccgggcggcgcagaggcgcggaggctccccgggcggctgcatcccggggctgccccggacatgccccgcaccccttgtcggacgcccgcgccgcttcaccggctgccactccccggagtgctctgggactagagcgccctccgccccaacttctgactttggggtcccccagccctagaggaacgggcgcccggctgggggagccccgggcatggtgtgacggggcagtcaggtcagctttgcggcgcccccaaactccagccacccgtcgtctccgtgccctccagaatgtagctgctgaccccgcgccccccggactccagcagcagtctccgccacctccgggctccagcagccaactcttgtgtctctcaggaacccgccgacgtctccgcgtcccccggattccaggttcgcgacccccgccgtcttcgcgcctccgggactctagcagcggtctccgcgaccccctaggatccagccactgtacccgtgctccccaaacccaggctccagccgtcgtctccgcgctcccggggatccagctgtcgcgccagtacccgcgaggacagcggcaccgcccacaccccgcgcgctcagagcccggccgggcctcggcgtggagatgaacgcgccgctggacggcctgtcggtgagctcgtcctccaccggctcgctgggctcggcggccggggcgggcggcggcgggggcgcggggctgcggttactgtctgccaacgtgcgccagctgcaccaagcgctgaccgcgctgctgagcgaggcggagcgggagcagttcacccactgcctgaacgcttaccacgcgcgccgcaacgtcttcgacctggtgcgcaccctgcgcgtgctgctggacagtccggtcaagcggcgcctgctgcccatgcttcgtctggtcatcccgcgctccgaccagctgctcttcgaccaatacacggccgagggcctctacctgcccgccaccaccccctacaggcagcccgcctggggcggccccgacagcgcggggccaggggaggtgcgcctggtgagtttgcggcgtgccaaggcccacgagggcttgggcttcagcatccgtgggggctcggagcacggcgtgggcatctacgtgtctctggtggaaccaggctctctagctgagaaggaaggactgcgggtcggggaccagattctgcgcgtcaacgacaaatccctggcccgggtgacccacgcggaggccgtcaaggctctgaagggctccaagaagctggtgctgtctgtgtactcagcagggcgcatccctgggggctacgtcaccaaccacatctacacctgggtggacccgcagggccgcagcatctccccaccctcgggcctgccccagccccacggtggtgccctgaggcagcaggagggtgaccggaggagcaccctgcacctcctgcaaggaggggatgagaaaaaggtgagtggggtggggaaaggaggccagcctctcagacaccgtattctccctccgaacccagaacagcagagctgcttggaggccgcaagaagaggctggttctgtccaggctctgtcttccctcaagtctgtactgaagggtggtgttttttctttgcttttctttttgacctgtgtagtgtatgttataatacaggctaagctgccacaataaaagagcttaaatactg

SEQ ID NO: 117 - DNA, 2849 bp, Homo sapiens
aaactcctaggcagcagaggcccacgactacttcctcctgagtgccgttcagtggcctgtgtccaggctctgaagggctccaagaagctggtgctgtctgtgtactcagcagggcgcatccctgggggctacgtcaccaaccacatctacacctgggtggacccgcagggccgcagcatctccccaccctcgggcctgccccagccccacggtggtgccctgaggcagcaggagggtgaccggaggagcaccctgcacctcctgcaaggaggggatgagaaaaaggtgaacctggtgctgggggacggccggtccctgggcctcacgatccgtgggggagctgagtacggccttggcatttacatcactggcgtggacccaggctctgaagcagaaggcagcgggctcaaggttggggaccagattctagaagtgaatgggcggagctttctcaacatcctacacgacgaggctgtcaggctgcttaagtcatctcggcacctcatcctgacagtgaaggacgtcgggaggctgccccatgcccgcaccactgtggacgagaccaagtggatcgccagttcccggatcagggagaccatggcgaactcggcagggtttcttggcgatctcacaacagaaggaataaacaagccaggattttacaagggcccagccggctcccaggtgaccctgagcagcctggggaaccagacacgagtgctgctggaggagcaggctcggcacctgctgaacgagcaggaacacgccaccatggcctactacctggatgagtaccgtggcggcagcgtctctgtggaggccctcgtcatggccctgttcaagctgctcaacacccacgccaagttctcactcctctctgaggtgagaggcaccatttccccgcaagacctagaacgcttcgaccacctggtgctgaggcgtgagattgagtccatgaaggcgcggcagcccccaggccccggggctggggacacctactccatggtctcctacagtgacacgggttcatccacaggcagccacggcacctccaccaccgtcagctcggccaggaacactctggacctggaggaaactggcgaggctgtccagggcaatatcaacgccctcccagatgtgtccgtggatgatgtcagatccacctcccaggggctgtcaagcttcaagccactgcctcgcccaccacctctggcccaaggcaacgacctcccactaggccagccaaggaagctggggagagaggacctccagccaccttcctccatgccttcctgctcgggcactgtcttctcggctccacagaaccgcagcccgccagcgggcaccgcacccaccccagggacctcctctgcacaggacttgccctcttcccccatctatgcctccgtctcccctgccaaccccagctccaagaggccgctggacgcccatctggccctggtcaaccaacaccccatcggccccttcccacgggtccagtcacccccgcacctgaaaagcccctctgcagaggccacagtggctgggggctgccttctgcccccatcaccctctggccacccagaccagacaggcacaaaccagcactttgtcatggtggaggtccaccgccccgacagcgagccagacgtcaatgaagtgagggcgctgccccagacgcgcacagcctctacgctctcccagctctcggacagcgggcagactctaagcgaggacagtggtgtggatgctggcgaggcagaggccagcgccccaggccgaggaaggcagtcggtgtccaccaagagcaggagtagcaaggagctgcctcggaacgagaggcccacagatggggccaacaaaccgcctggacttctggagcccacgtccactctggtccgtgtgaagaaaagtgcggccaccctgggcatcgccatcgagggtggcgccaacacccgccagcccctgcctaggattgtcactattcagagaggcggctcagctcacaactgtgggcagctcaaggtgggccacgtgattctggaagtgaatgggctgacgcttcggggcaaggagcaccgggaggccgcccgcattatcgccgaggccttcaagactaaggaccgtgactacattgactttctggtcactgagttcaatgtgatgctctagaggccaaggcctgagggcctcccaccactgcccagcccctggtcccagtccctttccaccgttggcttcatcaagctccttgcggggttggggctgcatggccagggtggcaggaagacatcccccctccatcccagcccactggaccagaactgggagaggaagagagcaggacaaggcagacagaaggtcaggtcaggaactggtgctgtactgggtacacagtaggcgcccaggacaagtgggttgcaagacaggaagaaaggaaaaggaagggcagagtgctggtttctccaggttgggttgggggcactgctgtcccccctccagctaggacccagcccatccccagatgcctgagcctttgtccaaagtgaggtcactcgagaattcatggacacggcccccagtcagggggcatcttgcaagacctttagtgccacaaataagcatcgagcacctccccattcacacccccattcctcctggctccttatcccccatggtgtttattatttatttccctccccatgcccctggggaccccaaggccccagcttccctctgcacccccagcctatcccagaggccttgcaggtgaccagcagtgtcattgtatttatatacagagcttatgactttaatttttcaataaagaaatctgaacaaggttagac

SEQ ID NO: 118 - DNA, 2770 bp, Homo sapiens
tagtattaaacattttcaaagttacttgccaacatctagaaagataccaggttttctataaaaaaaaaaactggatttctggatgcttcttaaaaatcaggaagtctggcagcctgagcccacatcggctggagctgagccgcacctgcgagttgcatctgggatctccagttcaccggcccctaagctcctgagggttggcctgaccctgaggttgcctgtcaatcaccatttcttccctccactccttgtgttacctgcctggtcctgcggggttggcaacaactcaggagcccacctcgggtggttttggaggtgccgtgcacactgctgattgggaggctggacgctgccagtctgtccggagtttcctttacccctgagtagcccccagactgaactggcagcgagtggaggccacgatgcatggttctcttgaagctttgctcttcctgccccaagtcaccctgtcccttgcccacgcccatttgatctgctcaaatgcacaactggagatgtgtgtctttccccacaggtttcttggcgatctcacaacagaaggaataaacaagccaggattttacaagggcccagccggctcccaggtgaccctgagcagcctggggaaccagacacgagtgctgctggaggagcaggctcggcacctgctgaacgagcaggaacacgccaccatggcctactacctggatgagtaccgtggcggcagcgtctctgtggaggccctcgtcatggccctgttcaagctgctcaacacccacgccaagttctcactcctctctgaggtgagaggcaccatttccccgcaagacctagaacgcttcgaccacctggtgctgaggcgtgagattgagtccatgaaggcgcggcagcccccaggccccggggctggggacacctactccatggtctcctacagtgacacgggttcatccacaggcagccacggcacctccaccaccgtcagctcggccaggaacactctggacctggaggaaactggcgaggctgtccagggcaatatcaacgccctcccagatgtgtccgtggatgatgtcagatccacctcccaggggctgtcaagcttcaagccactgcctcgcccaccacctctggcccaaggcaacgacctcccactaggccagccaaggaagctggggagagaggacctccagccaccttcctccatgccttcctgctcgggcactgtcttctcggctccacagaaccgcagcccgccagcgggcaccgcacccaccccagggacctcctctgcacaggacttgccctcttcccccatctatgcctccgtctcccctgccaaccccagctccaagaggccgctggacgcccatctggccctggtcaaccaacaccccatcggccccttcccacgggtccagtcacccccgcacctgaaaagcccctctgcagaggccacagtggctgggggctgccttctgcccccatcaccctctggccacccagaccagacaggcacaaaccagcactttgtcatggtggaggtccaccgccccgacagcgagccagacgtcaatgaagtgagggcgctgccccagacgcgcacagcctctacgctctcccagctctcggacagcgggcagactctaagcgaggacagtggtgtggatgctggcgaggcagaggccagcgccccaggccgaggaaggcagtcggtgtccaccaagagcaggagtagcaaggagctgcctcggaacgagaggcccacagatggggccaacaaaccgcctggacttctggagcccacgtccactctggtccgtgtgaagaaaagtgcggccaccctgggcatcgccatcgagggtggcgccaacacccgccagcccctgcctaggattgtcactattcagagaggcggctcagctcacaactgtgggcagctcaaggtgggccacgtgattctggaagtgaatgggctgacgcttcggggcaaggagcaccgggaggccgcccgcattatcgccgaggccttcaagactaaggaccgtgactacattgactttctggtcactgagttcaatgtgatgctctagaggccaaggcctgagggcctcccaccactgcccagcccctggtcccagtccctttccaccgttggcttcatcaagctccttgcggggttggggctgcatggccagggtggcaggaagacatcccccctccatcccagcccactggaccagaactgggagaggaagagagcaggacaaggcagacagaaggtcaggtcaggaactggtgctgtactgggtacacagtaggcgcccaggacaagtgggttgcaagacaggaagaaaggaaaaggaagggcagagtgctggtttctccaggttgggttgggggcactgctgtcccccctccagctaggacccagcccatccccagatgcctgagcctttgtccaaagtgaggtcactcgagaattcatggacacggcccccagtcagggggcatcttgcaagacctttagtgccacaaataagcatcgagcacctccccattcacacccccattcctcctggctccttatcccccatggtgtttattatttatttccctccccatgcccctggggaccccaaggccccagcttccctctgcacccccagcctatcccagaggccttgcaggtgaccagcagtgtcattgtatttatatacagagcttatgactttaatttttcaataaagaaatctgaacaaggttagac

SEQ ID NO: 119 - DNA, 4100 bp, Homo sapiens
aacgagacggcgtcggaactcgctggaagactcggcccgggtggctcaacagttcgcaaagtccgggcttgcggccgggcggcgcagaggcgcggaggctccccgggcggctgcatcccggggctgccccggacatgccccgcaccccttgtcggacgcccgcgccgcttcaccggctgccactccccggagtgctctgggactagagcgccctccgccccaacttctgactttggggtcccccagccctagaggaacgggcgcccggctgggggagccccgggcatggtgtgacggggcagtcaggtcagctttgcggcgcccccaaactccagccacccgtcgtctccgtgccctccagaatgtagctgctgaccccgcgccccccggactccagcagcagtctccgccacctccgggctccagcagccaactcttgtgtctctcaggaacccgccgacgtctccgcgtcccccggattccaggttcgcgacccccgccgtcttcgcgcctccgggactctagcagcggtctccgcgaccccctaggatccagccactgtacccgtgctccccaaacccaggctccagccgtcgtctccgcgctcccggggatccagctgtcgcgccagtacccgcgaggacagcggcaccgcccacaccccgcgcgctcagagcccggccgggcctcggcgtggagatgaacgcgccgctggacggcctgtcggtgagctcgtcctccaccggctcgctgggctcggcggccggggcgggcggcggcgggggcgcggggctgcggttactgtctgccaacgtgcgccagctgcaccaagcgctgaccgcgctgctgagcgaggcggagcgggagcagttcacccactgcctgaacgcttaccacgcgcgccgcaacgtcttcgacctggtgcgcaccctgcgcgtgctgctggacagtccggtcaagcggcgcctgctgcccatgcttcgtctggtcatcccgcgctccgaccagctgctcttcgaccaatacacggccgagggcctctacctgcccgccaccaccccctacaggcagcccgcctggggcggccccgacagcgcggggccaggggaggtgcgcctggtgagtttgcggcgtgccaaggcccacgagggcttgggcttcagcatccgtgggggctcggagcacggcgtgggcatctacgtgtctctggtggaaccaggctctctagctgagaaggaaggactgcgggtcggggaccagattctgcgcgtcaacgacaaatccctggcccgggtgacccacgcggaggccgtcaaggctctgaagggctccaagaagctggtgctgtctgtgtactcagcagggcgcatccctgggggctacgtcaccaaccacatctacacctgggtggacccgcagggccgcagcatctccccaccctcgggcctgccccagccccacggtggtgccctgaggcagcaggagggtgaccggaggagcaccctgcacctcctgcaaggaggggatgagaaaaaggtgaacctggtgctgggggacggccggtccctgggcctcacgatccgtgggggagctgagtacggccttggcatttacatcactggcgtggacccaggctctgaagcagaaggcagcgggctcaaggttggggaccagattctagaagtgaatgggcggagctttctcaacatcctacacgacgaggctgtcaggctgcttaagtcatctcggcacctcatcctgacagtgaaggacgtcgggaggctgccccatgcccgcaccactgtggacgagaccaagtggatcgccagttcccggatcagggagaccatggcgaactcggcagggtttcttggcgatctcacaacagaaggaataaacaagccaggattttacaagggcccagccggctcccaggtgaccctgagcagcctggggaaccagacacgagtgctgctggaggagcaggctcggcacctgctgaacgagcaggaacacgccaccatggcctactacctggatgagtaccgtggcggcagcgtctctgtggaggccctcgtcatggccctgttcaagctgctcaacacccacgccaagttctcactcctctctgaggtgagaggcaccatttccccgcaagacctagaacgcttcgaccacctggtgctgaggcgtgagattgagtccatgaaggcgcggcagcccccaggccccggggctggggacacctactccatggtctcctacagtgacacgggttcatccacaggcagccacggcacctccaccaccgtcagctcggccaggaacactctggacctggaggaaactggcgaggctgtccagggcaatatcaacgccctcccagatgtgtccgtggatgatgtcagatccacctcccaggggctgtcaagcttcaagccactgcctcgcccaccacctctggcccaaggcaacgacctcccactaggccagccaaggaagctggggagagaggacctccagccaccttcctccatgccttcctgctcgggcactgtcttctcggctccacagaaccgcagcccgccagcgggcaccgcacccaccccagggacctcctctgcacaggacttgccctcttcccccatctatgcctccgtctcccctgccaaccccagctccaagaggccgctggacgcccatctggccctggtcaaccaacaccccatcggccccttcccacgggtccagtcacccccgcacctgaaaagcccctctgcagaggccacagtggctgggggctgccttctgcccccatcaccctctggccacccagaccagacaggcacaaaccagcactttgtcatggtggaggtccaccgccccgacagcgagccagacgtcaatgaagtgagggcgctgccccagacgcgcacagcctctacgctctcccagctctcggacagcgggcagactctaagcgaggacagtggtgtggatgctggcgaggcagaggccagcgccccaggccgaggaaggcagtcggtgtccaccaagagcaggagtagcaaggagctgcctcggaacgagaggcccacagatggggccaacaaaccgcctggacttctggagcccacgtccactctggtccgtgtgaagaaaagtgcggccaccctgggcatcgccatcgagggtggcgccaacacccgccagcccctgcctaggattgtcactattcagagaggcggctcagctcacaactgtgggcagctcaaggtgggccacgtgattctggaagtgaatgggctgacgcttcggggcaaggagcaccgggaggccgcccgcattatcgccgaggccttcaagactaaggaccgtgactacattgactttctggtcactgagttcaatgtgatgctctagaggccaaggcctgagggcctcccaccactgcccagcccctggtcccagtccctttccaccgttggcttcatcaagctccttgcggggttggggctgcatggccagggtggcaggaagacatcccccctccatcccagcccactggaccagaactgggagaggaagagagcaggacaaggcagacagaaggtcaggtcaggaactggtgctgtactgggtacacagtaggcgcccaggacaagtgggttgcaagacaggaagaaaggaaaaggaagggcagagtgctggtttctccaggttgggttgggggcactgctgtcccccctccagctaggacccagcccatccccagatgcctgagcctttgtccaaagtgaggtcactcgagaattcatggacacggcccccagtcagggggcatcttgcaagacctttagtgccacaaataagcatcgagcacctccccattcacacccccattcctcctggctccttatcccccatggtgtttattatttatttccctccccatgcccctggggaccccaaggccccagcttccctctgcacccccagcctatcccagaggccttgcaggtgaccagcagtgtcattgtatttatatacagagcttatgactttaatttttcaataaagaaatctgaacaaggttagac

SEQ ID NO: 120 - DNA, 3244 bp, Homo sapiens
gtacctcagtgtgaagtctctcccagaagccatgagaatggaggaggaggaagaaggagaggaggaggaggaggaagaggggggaggtgactccctggaagttgatggggtggctgcaactccagggaaagcagaggccaccagggtcctcccaaggcagtgcccggtgcaggctgagaaaagtcatggggctcccctggaggaggccacggagaagatggtatctatgaagccaccaggtttccaggcatccctggctagagacgggcacatgtcaggcctgggcaaggctgaggcagcccctccaggccctggcgtgccaccccaccctccaggcaccaagtccgcagcatcccaccaaagtagtatgaccagcctggagggaagcggcatctctgagcgccttccacagaagcctttgcaccgaggcggtgggccccacctggaggagacctggatggcgtccccagagacagacagtggctttgtgggctcagaaacaagcagagtttcacccctcacccagactccagagcaccggctctcccacatcagcacagcaggaacattagcccagccctttgctgcatctgtgcccagggatggagcttcctaccccaaggccaggggttctctgattcccagaagagccacagagcccagcacaccccggagccaagcacagaggtacctctccagcccaagtgggcctctccggcagagggcacccaacttcagcctggagcggacactggcagccgagatggcggttcctggctcagagtttgaggggcacaaacggatttctgaacagccccttcccaacaagacaatcagcccacccccagcccccgcccctgccgctgcgcctctaccctgtggaccaacagagaccatccccagcttcctgctcaccagggcagggcgagaccaggccatctgtgagctgcaagaagaggtgtcccggcttcgtctgcggctggaagacagcctgcaccagccactccagggcagcccgacacgcccagcatctgcctttgaccgccccgcccggacccgcggccggccagcagactccccagccacctggggctcccattatggcagtaaatccacagagagattgcctggtgagcctagaggtgaagagcagattgtccctccaggaaggcagcgagccaggtcttcctcagtgcctcgggaggtgctccgactgtccctgagttcagaatctgagctgccctccctaccactgttctctgagaagagcaagaccaccaaggacagtccacaggcagctcgggatggaaagagaggggtgggcagtgctggatggccagacagggtcaccttccggggccaatacacaggccacgaataccatgttctgtcccctaaggcggtcccaaaaggcaatggcacagtctcctgtccccactgccggcccattaggacccaggatgcgggtggtgctgtcacaggggacccactgggaccgcctcccgctgatacccttcagtgtcccctgtgtggtcaagttgggtctcccccagaggcagatggtccaggctcagccacctctggggcagagaaggccaccacgaggagaaaagcaccttcaactcccagccccaagcagaggagcaagcaggcggggtcgtcgccacgcccaccccccggactgtggtatctggcaacagcgcccccagcaccagcccctccagcctttgcctacatctcctcggttcccatcatgccttatccacctgccgctgtgtactatgcgcctgcaggacctacctcagcccaaccagctgccaagtggccgcccacagcctctcccccaccagcccggagacaccggcactccatccagctcgacctgggcgacctagaggagctcaacaaggccctgagccgggccgtgcaggctgccgagagcgtccgctctaccaccaggcagatgagaagctcgctgtcagccgacctgcgccaggctcacagcctgcggggctcctgcctcttctgacttcactgggggcccagaggcagatgggtgggtgggtgggcaggtggcctgccaggccaggagtgggctggagctgctgaggcccagaaggcccgcatagttcctcaccaggagggtctccctccagcacaggtcccgcctgctcagtccctgtgctttccaagtggagggggtgtcagctcggtcaccaagagaagtgacttcccaggagcaccagtcccctcacagaggtgctgtgagcgaggcctccttcggtccaggcagaacctcaggcagtctctcctggtcctgcatgtgtgcaactccagctaataataggtattttatatacagatggacagatatttttttaaactggggagttttcctgatcttgggtcctctttagggggccagacaagaaaggcctacggtttctggagcaaacctgtcccccacctgtgaccagtcactctggggcaagcatcactgggaagggcatagccggagacctttctcctagtgactggtagtcagtggggcattttaggatgtcagggccccagggtgacatgtgtccagcttttctatggcagcagaggcctttccctcagacaagctacaaagtgcccaggatgccatccaccatggtccccttcagtacctcacgcatggtccccagcttctcctaggatcccagtggcatttatcagtggccagctacctgccaggcccgggctggggcacggtctgcggccatgaggccaggccgcctcccgcacccctaccccgtggcagcagcatacctctgcatttctggaatgtgtgtgcatcaatgatgtttgtatatttgaggcatttaaaaatctattttcgttacgagggcaaatgaagaatgaatattgatcttaaaaaaagaaaagaagacaaaaaaaatacccaaagccatccgtgtctctgctgtatgtcattaacttttgccttcaatgtcaagtttatggggtggtaggtttgatgcccagccaagccctttcccaggggacctgttgggtgctctgcctgcctccctctggtggcttctgtttctccagttttccccctttgcctatctcagaaccataaatctttcaactgcggagggccttgaggtggggctgcctagccaagtcccttttgactgaggccagagatgtaaatgaggcacacagcaagttgctgtctacaagagtatgcacc

SEQ ID NO: 121 - DNA, 4149 bp, Homo sapiens
cccaccccagcccaaccacagcatccacacgggaatggtgccccaggggaccaaggtcttgtccttcaccatcccacagccccgctctgcagagtggtggccgggcccggccgaggacccccaggcctctgcggcctcagcctgggggcagccctggccctgccacttggcatcttggtgaccctggggtggccatcagctcgaggagacttgagcccctcctcgcttaccagcatgcccaccctggggtggcttccggagaaccgggacatctctgaggaccagtcctcagcagagcagacccaggcactggcttctcaggccagccagttcctggccaaggtggagtcctttgaaagactgatacaggcaggacgtctcatgccccaggaccaagtcaagggcttccagcggctgaaggctgcccacgcggccctagaggaggagtacctgaaggcttgtcgggagcaacaccctgcccagccgcttgccggctccaaggggacgcctggaagatttgatcctcgcagggagctggaggcagagatataccgtctgggaagctgcctggaagagctgaaggaacacatagaccagacccagcaagagcctgagccgcccgggtcagactcagctctggacagcaccccagccctgccctgcctccatcagccaacgcacctgcctgctccttctggacaagcccccatgccagccatcaagacctcctgccctgagcctgctaccaccactgccgccgccagcactggcccctgcccattgcacgtaaatgtggaggtgagctctggcaacagtgaggtggaggacaggccacaggaccccctggcccgactcaggcacaaggagctgcagatggagcaagtttaccatggcctcatggagcggtacctcagtgtgaagtctctcccagaagccatgagaatggaggaggaggaagaaggagaggaggaggaggaggaagaggggggaggtgactccctggaagttgatggggtggctgcaactccagggaaagcagaggccaccagggtcctcccaaggcagtgcccggtgcaggctgagaaaagtcatggggctcccctggaggaggccacggagaagatggtatctatgaagccaccaggtttccaggcatccctggctagagacgggcacatgtcaggcctgggcaaggctgaggcagcccctccaggccctggcgtgccaccccaccctccaggcaccaagtccgcagcatcccaccaaagtagtatgaccagcctggagggaagcggcatctctgagcgccttccacagaagcctttgcaccgaggcggtgggccccacctggaggagacctggatggcgtccccagagacagacagtggctttgtgggctcagaaacaagcagagtttcacccctcacccagactccagagcaccggctctcccacatcagcacagcaggaacattagcccagccctttgctgcatctgtgcccagggatggagcttcctaccccaaggccaggggttctctgattcccagaagagccacagagcccagcacaccccggagccaagcacagaggtacctctccagcccaagtgggcctctccggcagagggcacccaacttcagcctggagcggacactggcagccgagatggcggttcctggctcagagtttgaggggcacaaacggatttctgaacagccccttcccaacaagacaatcagcccacccccagcccccgcccctgccgctgcgcctctaccctgtggaccaacagagaccatccccagcttcctgctcaccagggcagggcgagaccaggccatctgtgagctgcaagaagaggtgtcccggcttcgtctgcggctggaagacagcctgcaccagccactccagggcagcccgacacgcccagcatctgcctttgaccgccccgcccggacccgcggccggccagcagactccccagccacctggggctcccattatggcagtaaatccacagagagattgcctggtgagcctagaggtgaagagcagattgtccctccaggaaggcagcgagccaggtcttcctcagtgcctcgggaggtgctccgactgtccctgagttcagaatctgagctgccctccctaccactgttctctgagaagagcaagaccaccaaggacagtccacaggcagctcgggatggaaagagaggggtgggcagtgctggatggccagacagggtcaccttccggggccaatacacaggccacgaataccatgttctgtcccctaaggcggtcccaaaaggcaatggcacagtctcctgtccccactgccggcccattaggacccaggatgcgggtggtgctgtcacaggggacccactgggaccgcctcccgctgatacccttcagtgtcccctgtgtggtcaagttgggtctcccccagaggcagatggtccaggctcagccacctctggggcagagaaggccaccacgaggagaaaagcaccttcaactcccagccccaagcagaggagcaagcaggcggggtcgtcgccacgcccaccccccggactgtggtatctggcaacagcgcccccagcaccagcccctccagcctttgcctacatctcctcggttcccatcatgccttatccacctgccgctgtgtactatgcgcctgcaggacctacctcagcccaaccagctgccaagtggccgcccacagcctctcccccaccagcccggagacaccggcactccatccagctcgacctgggcgacctagaggagctcaacaaggccctgagccgggccgtgcaggctgccgagagcgtccgctctaccaccaggcagatgagaagctcgctgtcagccgacctgcgccaggctcacagcctgcggggctcctgcctcttctgacttcactgggggcccagaggcagatgggtgggtgggtgggcaggtggcctgccaggccaggagtgggctggagctgctgaggcccagaaggcccgcatagttcctcaccaggagggtctccctccagcacaggtcccgcctgctcagtccctgtgctttccaagtggagggggtgtcagctcggtcaccaagagaagtgacttcccaggagcaccagtcccctcacagaggtgctgtgagcgaggcctccttcggtccaggcagaacctcaggcagtctctcctggtcctgcatgtgtgcaactccagctaataataggtattttatatacagatggacagatatttttttaaactggggagttttcctgatcttgggtcctctttagggggccagacaagaaaggcctacggtttctggagcaaacctgtcccccacctgtgaccagtcactctggggcaagcatcactgggaagggcatagccggagacctttctcctagtgactggtagtcagtggggcattttaggatgtcagggccccagggtgacatgtgtccagcttttctatggcagcagaggcctttccctcagacaagctacaaagtgcccaggatgccatccaccatggtccccttcagtacctcacgcatggtccccagcttctcctaggatcccagtggcatttatcagtggccagctacctgccaggcccgggctggggcacggtctgcggccatgaggccaggccgcctcccgcacccctaccccgtggcagcagcatacctctgcatttctggaatgtgtgtgcatcaatgatgtttgtatatttgaggcatttaaaaatctattttcgttacgagggcaaatgaagaatgaatattgatcttaaaaaaagaaaagaagacaaaaaaaatacccaaagccatccgtgtctctgctgtatgtcattaacttttgccttcaatgtcaagtttatggggtggtaggtttgatgcccagccaagccctttcccaggggacctgttgggtgctctgcctgcctccctctggtggcttctgtttctccagttttccccctttgcctatctcagaaccataaatctttcaactgcggagggccttgaggtggggctgcctagccaagtcccttttgactgaggccagagatgtaaatgaggcacacagcaagttgctgtctacaagagtatgcacc

SEQ ID NO: 122 - DNA, 5874 bp, Homo sapiens
gattggaggcctttgtttgccgctcaactccaggaaaccacccgcgctcggcggccgccagcagtcctggaaggtgggaatgatctggagaccaggagtaagaagacctgagtttagatccccagcctggattcagttctgagtgcctcagttttcccttccacaaaatgaggaggggcaactgaagacggaggtgcccaaggtcagaaggaagcaccacacagagggcacaggcaggatggccgatgctgacaggaaccagcggtgactctggggcccctggcagcagctctgtctcctgaagatgaagtggcccaggtgaagcccaggccagccccaatggccagctcggagactgagatccgctgggctgagcctggcctggggaagggcccccagcggcggcgctgggcctgggccgaggacaagagggatgtggatagaagtagttcacaaagctgggaagaagagagactctttcccaatgccaccagccccgagctcctagaggacttccgcctggcccagcagcacctgccgcccctggagtgggacccacacccgcagcccgatgggcatcaggattccgagtcaggagagacttcgggagaagaggctgaagcagaggatgtggacagcccagcaagttcccatgagcctcttgcctggctcccccagcagggccgtcagctggacatgactgaagaggagccagatgggaccctcggaagtctggaggttgaggaggctggagagagctcctcaaggttggggtatgaggctggtctcagcttggaaggccatggaaacaccagccccatggctcttgggcatggtcaggccaggggctgggtggcttctggcgaacaagccagtggggacaaactttctgaacattccgaggtcaacccatccgttgaactcagcccggcaaggtcctggagcagtgggacagtgagcctcgaccaccctagtgacagccttgattctacctgggaaggagagaccgatggcccccagcccactgccctggcagaaaccttgccagagggccccagccaccacctcctaagcccagatggcagaactggaggcagtgttgctcgggcaacccccatggaattccaggactcctcagctcccccagcccagagtccgcagcatgccacagatagatggaggagagaaacgaccagattcttctgccctcagcccaaggaacacatctggaagcagacaaagacgtcacctaagccactcccttcccgattcattggctccatcagccccctgaatccccagcccaggccaacgcggcagggcaggccgctgcccagacagggagccactctggctggccgctcctcttctaatgcccccaagtatggccgggggcagttgaactacccactccctgatttctccaaggtagggccccgggtgagattccccaaagatgagagctaccgtccccccaagtccagaagccacaacaggaagcctcaggcccctgccaggcccctcatcttcaagtctccagctgagattgtgcaggaggtgctgttgagcagtggagaagcagccctggcaaaggacacgcctcctgcccaccctatcaccagggtaccccaagaatttcagacgcctgagcaagccactgagctggtccatcagctccaggaagactaccacaggctcctcaccaagtacgctgaggccgagaacaccattgaccagctacgcctcggggccaaggtgaacctgttctctgacccaccccagcccaaccacagcatccacacgggaatggtgccccaggggaccaaggtcttgtccttcaccatcccacagccccgctctgcagagtggtggccgggcccggccgaggacccccaggcctctgcggcctcagggtggccatcagctcgaggagacttgagcccctcctcgcttaccagcatgcccaccctggggtggcttccggagaaccgggacatctctgaggaccagtcctcagcagagcagacccaggcactggcttctcaggccagccagttcctggccaaggtggagtcctttgaaagactgatacaggcaggacgtctcatgccccaggaccaagtcaagggcttccagcggctgaaggctgcccacgcggccctagaggaggagtacctgaaggcttgtcgggagcaacaccctgcccagccgcttgccggctccaaggggacgcctggaagatttgatcctcgcagggagctggaggcagagatataccgtctgggaagctgcctggaagagctgaaggaacacatagaccagacccagcaagagcctgagccgcccgggtcagactcagctctggacagcaccccagccctgccctgcctccatcagccaacgcacctgcctgctccttctggacaagcccccatgccagccatcaagacctcctgccctgagcctgctaccaccactgccgccgccagcactggcccctgcccattgcacgtaaatgtggaggtgagctctggcaacagtgaggtggaggacaggccacaggaccccctggcccgactcaggcacaaggagctgcagatggagcaagtttaccatggcctcatggagcggtacctcagtgtgaagtctctcccagaagccatgagaatggaggaggaggaagaaggagaggaggaggaggaggaagaggggggaggtgactccctggaagttgatggggtggctgcaactccagggaaagcagaggccaccagggtcctcccaaggcagtgcccggtgcaggctgagaaaagtcatggggctcccctggaggaggccacggagaagatggtatctatgaagccaccaggtttccaggcatccctggctagagacgggcacatgtcaggcctgggcaaggctgaggcagcccctccaggccctggcgtgccaccccaccctccaggcaccaagtccgcagcatcccaccaaagtagtatgaccagcctggagggaagcggcatctctgagcgccttccacagaagcctttgcaccgaggcggtgggccccacctggaggagacctggatggcgtccccagagacagacagtggctttgtgggctcagaaacaagcagagtttcacccctcacccagactccagagcaccggctctcccacatcagcacagcaggaacattagcccagccctttgctgcatctgtgcccagggatggagcttcctaccccaaggccaggggttctctgattcccagaagagccacagagcccagcacaccccggagccaagcacagaggtacctctccagcccaagtgggcctctccggcagagggcacccaacttcagcctggagcggacactggcagccgagatggcggttcctggctcagagtttgaggggcacaaacggatttctgaacagccccttcccaacaagacaatcagcccacccccagcccccgcccctgccgctgcgcctctaccctgtggaccaacagagaccatccccagcttcctgctcaccagggcagggcgagaccaggccatctgtgagctgcaagaagaggtgtcccggcttcgtctgcggctggaagacagcctgcaccagccactccagggcagcccgacacgcccagcatctgcctttgaccgccccgcccggacccgcggccggccagcagactccccagccacctggggctcccattatggcagtaaatccacagagagattgcctggtgagcctagaggtgaagagcagattgtccctccaggaaggcagcgagccaggtcttcctcagtgcctcgggaggtgctccgactgtccctgagttcagaatctgagctgccctccctaccactgttctctgagaagagcaagaccaccaaggacagtccacaggcagctcgggatggaaagagaggggtgggcagtgctggatggccagacagggtcaccttccggggccaatacacaggccacgaataccatgttctgtcccctaaggcggtcccaaaaggcaatggcacagtctcctgtccccactgccggcccattaggacccaggatgcgggtggtgctgtcacaggggacccactgggaccgcctcccgctgatacccttcagtgtcccctgtgtggtcaagttgggtctcccccagaggcagatggtccaggctcagccacctctggggcagagaaggccaccacgaggagaaaagcaccttcaactcccagccccaagcagaggagcaagcaggcggggtcgtcgccacgcccaccccccggactgtggtatctggcaacagcgcccccagcaccagcccctccagcctttgcctacatctcctcggttcccatcatgccttatccacctgccgctgtgtactatgcgcctgcaggacctacctcagcccaaccagctgccaagtggccgcccacagcctctcccccaccagcccggagacaccggcactccatccagctcgacctgggcgacctagaggagctcaacaaggccctgagccgggccgtgcaggctgccgagagcgtccgctctaccaccaggcagatgagaagctcgctgtcagccgacctgcgccaggctcacagcctgcggggctcctgcctcttctgacttcactgggggcccagaggcagatgggtgggtgggtgggcaggtggcctgccaggccaggagtgggctggagctgctgaggcccagaaggcccgcatagttcctcaccaggagggtctccctccagcacaggtcccgcctgctcagtccctgtgctttccaagtggagggggtgtcagctcggtcaccaagagaagtgacttcccaggagcaccagtcccctcacagaggtgctgtgagcgaggcctccttcggtccaggcagaacctcaggcagtctctcctggtcctgcatgtgtgcaactccagctaataataggtattttatatacagatggacagatatttttttaaactggggagttttcctgatcttgggtcctctttagggggccagacaagaaaggcctacggtttctggagcaaacctgtcccccacctgtgaccagtcactctggggcaagcatcactgggaagggcatagccggagacctttctcctagtgactggtagtcagtggggcattttaggatgtcagggccccagggtgacatgtgtccagcttttctatggcagcagaggcctttccctcagacaagctacaaagtgcccaggatgccatccaccatggtccccttcagtacctcacgcatggtccccagcttctcctaggatcccagtggcatttatcagtggccagctacctgccaggcccgggctggggcacggtctgcggccatgaggccaggccgcctcccgcacccctaccccgtggcagcagcatacctctgcatttctggaatgtgtgtgcatcaatgatgtttgtatatttgaggcatttaaaaatctattttcgttacgagggcaaatgaagaatgaatattgatcttaaaaaaagaaaagaagacaaaaaaaatacccaaagccatccgtgtctctgctgtatgtcattaacttttgccttcaatgtcaagtttatggggtggtaggtttgatgcccagccaagccctttcccaggggacctgttgggtgctctgcctgcctccctctggtggcttctgtttctccagttttccccctttgcctatctcagaaccataaatctttcaactgcggagggccttgaggtggggctgcctagccaagtcccttttgactgaggccagagatgtaaatgaggcacacagcaagttgctgtctacaagagtatgcacc

SEQ ID NO: 123 - DNA, 2870 bp, Homo sapiens
cctggcaatcccatgtggacttctggtagaatgagcaatgcaaagaactggcttggacttggcatgtccttgtacttctgggggctgatggaccttacgaccaccgttctctcggacaccccaacaccacaaggtgaattagaagcactcctgtcagacaagccacagtcacatcagcggaccaagaggagctgggtttggaaccagtttttcgttctggaagagtacactgggaccgaccctttgtatgtcggcaagcttcattcagatatggacaggggagacggatccatcaaatacatcctctcgggagaaggtgctggcatcgtgtttaccatcgacgacaccactggagacatccacgccattcagaggctcgaccgagaggaaagagcccagtatactctaagggctcaagccctagacaggcggacgggcaggccaatggagcccgagtcagagttcatcatcaaaattcaagacatcaatgacaatgagcccaagttcctggacggaccttatgtggccactgtgccagaaatgtcccctgtgggtacctccgtcatccaagtgacagccacagatgcagatgacccgacctacggcaacagtgccagggtggtgtacagcattcttcagggccagccatatttttctgtggactctaaaacaggtgtaattaggacagcgctcatgaacatggacagagaagccaaagaatactacgaagtgattatccaagccaaggacatgggagggcagcttggaggattagctgggaccacaacagtgaacatcaccctctcagatgtcaatgataacccaccccgctttccccagaaacattaccagatgagtgtgttggaatcagctccaattagctccactgtcgggagagtgtttgccaaggacttggatgaaggcatcaatgcagagatgaaatatactattgtggatggagatggtgcagatgcctttgacattagcacagatcccaatttccaagttggtatcataactgtgaagaagcccctgagttttgaaagcaagaaaagctacaccttaaaggtggagggagccaatcctcacctagagatgcgttttctgaacttgggcccatttcaggacacaacaacagtgcacatcagtgtggaagacgtggacgagccccctgtgtttgaacctggcttttactttgtggaggtgcctgaggatgtggcgattggaacaaccatacagatcatttctgccaaggacccagatgtgaccaacaactcaatcagatactccattgatagaagcagtgaccctggaagatttttctatgttgacattacaacaggtgccctaatgacagcaagacccctagaccgggaagaattttcttggcataatatcactgtccttgctatggaaatgaacaatccctcccaggttggaagtgttcctgtcacaatcaaagtcttagatgtgaatgacaatgctccagagttccccagattctatgaagcttttgtctgtgagaacgccaaggcaggacagctgatccagacagtgagtgcggtggaccaagatgacccacgcaatggtcagcatttctactacagcttggctcctgaggctgctaacaaccccaactttaccataagggacaaccaagataacacagcacggattctaaccaggaggtctggtttccggcagcaggagcagagtgtctttcacctgcctatcctgatagcagatagcgggcagcccgtgctgagcagcacaggcacactgaccatccaagtgtgcagctgtgatgacgacggccacgtcatgtcctgcagcccagaggcctacatgctcccagtcagtttgagccggggcgccctcattgccatcctcgcctgcatctttgtcctcttagtgctggtgttgctcattttgtccatgaggcggcaccggaaacaaccatacatcatcgacgacgaggaaaacatccacgagaacatcgtccgctacgacgacgagggcggcggcgaggaggacaccgaggccttcgacatcgcggccatgtggaacccccgggaggcgcaggcgggggccgcccccaagacgcggcaggacatgctgcccgagatcgagagcctctcccgctacgtgcctcagacgtgcgcagtgaacagcactgtccacagctacgtgctggccaagctctacgaggccgacatggacctgtgggcaccgcccttcgactccctccagacgtatatgttcgagggggacggctctgtggcggggtcgctgagctccctgcagtcggccacgtcggactcggaacagagcttcgacttcctgacggactgggggccccgcttccggaagctggccgagctctacggggcgtcggagggacccgcgccgctgtggtgacggaagccaggaggcaggcgcgcgtccaaatccagacgttctccgcgggtgcttcgcggacaaggtgcagccaaccacacgagcaatactgtgctggagagtgagaatgggggtgagcaggcgaacagagctctctctggatcagctttacttgggtagattaagttaaataagcaaaaggaaacccagaaggaagagggcagaatctttaattacctttttttcttttctttttgatttttctgacactgtgtgcgaaggcttggagtccaaggtgttctgacaagggtggcttttctctgccattcgctaaggcctttgtcacttttccaccacagaaaggctctggccttggatacagagatgccaattgaaagcagaaagttctactctcgtatctgttttttatcttatcttattctccatttaagagttttgctggctcaaaccac

SEQ ID NO: 124 - DNA, 3516 bp, Homo sapiens
gcacagattgcttcacctgtggtatcagacatcacaacatggggctcaccaagcagtacctacgctatgttgctagtgcggtctttggcgttatcggcagccaaaaaggtaatattgtctttgtgacacttcgtggtgagaaaggacgttatgtggcagtaccagcttgtgaacacgttttcatctgggacttaaggaaaggagagaagattcttatccttcaggggcttaaacaagaagttacttgcttatgcccctccccagatgggctacacttagctgttgggtatgaggatgggtcgatccgaatcttcagtctcctgagtggggaaggaaatgtgaccttcaatggtcacaaagcagctatcactaccttgaagtatgatcagctaggaggcagactggcatctgggtccaaggacacagatattattgtatgggatgtgatcaatgaaagtggtctgtaccgtctaaaggggcacaaggatgccatcacacaagcattgtttctacgagaaaagaacctgctagttactagtgggaaagataccatggtgaaatggtgggaccttgatactcagcactgctttaaaacaatggttggccaccggactgaggtatgggggttggttctgttgtcagaagaaaagcgactcatcactggggcctcagacagtgaactgagggtatgggacatagcttatctgcaagagattgaagacccggaagaaccagaccccaagaaaatcaaaggatcttctcctggaatacaagatactcttgaggcagaggatggtgcctttgagacggatgaagcccctgaggatcgaatcctttcatgcagaaaagctggttccataatgcgggaaggaagagacagagttgtaaaccttgcagtcgacaagacaggcaggattcttgcttgccatggaactgactctgtgctagaattgttttgtatcctttccaaaaaggaaattcagaagaaaatggataagaagatgaagaaagctagaaagaaagcaaaattacattctagcaaaggagaggaggaagatcctgaggttaatgttgaaatgagtctgcaagatgaaatccagcgggtgactaatataaaaacttctgccaaaatcaagtcctttgacttgattcattcacctcacggagagttaaaggctgtcttcctgctgcagaacaacctggtggaattgtattcactgaatccatccttgcctactcctcagcctgtcaggacaagcagaatcactattgggggtcatcgcagtgatgtgcggactttgtcattcagctcagacaatattgctgttctttcagctgcagctgattccattaaaatatggaacaggtctacactgcagtgtattcgcacaatgacctgtgaatatgcactttgctcattctttgtacctggtgatagacaggtagtcataggaacaaagacagggaagctgcagctttatgacttggcttcagggaatctgctggagacaatagatgcacatgatggagctttgtggtccatgtccctctctccagatcagcgtggctttgtgacaggtggtgcagataaatctgtcaaattctgggattttgagttagtgaaagatgaaaatagtacccaaaagagactttctgtgaagcaaacccgaactttgcaactagatgaagatgttctgtgtgtcagttactctcccaatcaaaagctattggctgtgtctttgctggactgtactgtgaaaattttctacgttgatactttaaagttttttctgtcactgtatggacacaaactgcctgttatatgcatggacatctctcatgatggagcactcatagcaactggctccgctgataggaatgtgaaaatctggggtttggactttggggactgccacaagtctctctttgcacatgatgacagtgtgatgtacctacagtttgtacccaagtctcacctcttcttcactgccggaaaagatcataagattaaacagtgggatgcagacaaatttgaacacatacagactctggagggtcatcaccaggaaatatggtgtttggctgtaagccccagtggagactatgttgtatcatcgtcccatgacaaatctctgagactttgggagagaacaagggagcctcttattcttgaggaagaaagggagatggaaagagaagcagaatatgaggagagtgtggccaaagaagaccaaccagcagttccaggagagactcaaggtgacagttactttactggaaagaaaactattgaaacagtgaaagcagctgagaggattatggaggctattgagttgtaccgagaagaaactgcaaaaatgaaggaacacaaagccatttgtaaagctgcagggaaagaggttccacttcccagcaaccccatcctaatggcttatggcagtatctcaccttcagcttatgtattagagatttttaaagggatcaagtcgagtgagctggaagaatctctacttgtgctgcctttctcttatgtcccagacattcttaaactctttaacgaattcattcagctgggctctgatgttgaacttatatgccggtgcctcttcttcctccttaggattcactttggacagatcactagcaatcaaatgcttgtgccagtgatagaaaaattaagggaaacaactatttcaaaagtcagccaagtccgggatgttatcggcttcaatatggctggtcttgattatctcaagagggaatgcgaggcaaaaagtgaagttatgttttttgctgatgctactagccacttggaagagaagaagaggaagaggaaaaagagggagaagttgattctaacgttgacttagaactgaaatttggcgtcatcttaaaaataccaaataacagaagatcgcattgcagatgatatcaggatgtggtttccagctttgcctgagggaattccaacatgagattatgggctggctccatttcttggacttaaaatgcattattagtttaaaaatctttctgtgctctcaaagcttgagccttgcagctcaagcttgttgttccctttatattctagcagggaataaataattgttttaattaggtatttgtttcattggagttgaaattaacatttcaaaagtttttcgtatttttttatggcagatgatttgtcatttatttatattaggttttactgcctattgagacaaccaggtgcataattgattgccctttggccataaaaatgcagtgtcatggatcttagagctaaaaaggactgtaaaaattacccagaacagcgtcctcagacttaaccttctgcaagttatgtctgtatataagaagattctaattgctaactgtttatacttttctgaataaaatagttgtttctaattaaaaagtagccaagctaagatgcctggctgggcttctgaggaattaatacactcgtgtgtgtgtgtgtgtgtgtgtgtgtgtgtgtgtgtgtatgtgtat

SEQ ID NO: 125 - DNA, 3454 bp, Homo sapiens
atggggctcaccaagcagtacctacgctatgttgctagtgcggtctttggcgttatcggcagccaaaaaggtaatattgtctttgtgacacttcgtggtgagaaaggacgttatgtggcagtaccagcttgtgaacacgttttcatctgggacttaaggaaaggagagaaggggcttaaacaagaagttacttgcttatgcccctccccagatgggctacacttagctgttgggtatgaggatgggtcgatccgaatcttcagtctcctgagtggggaaggaaatgtgaccttcaatggtcacaaagcagctatcactaccttgaagtatgatcagctaggaggcagactggcatctgggtccaaggacacagatattattgtatgggatgtgatcaatgaaagtggtctgtaccgtctaaaggggcacaaggatgccatcacacaagcattgtttctacgagaaaagaacctgctagttactagtgggaaagataccatggtgaaatggtgggaccttgatactcagcactgctttaaaacaatggttggccaccggactgaggtatgggggttggttctgttgtcagaagaaaagcgactcatcactggggcctcagacagtgaactgagggtatgggacatagcttatctgcaagagattgaagacccggaagaaccagaccccaagaaaatcaaaggatcttctcctggaatacaagatactcttgaggcagaggatggtgcctttgagacggatgaagcccctgaggatgtaattcattttcatttcttaagtttaattgtgttgaataatgggaaacgaatcctttcatgcagaaaagctggttccataatgcgggaaggaagagacagagttgtaaaccttgcagtcgacaagacaggcaggattcttgcttgccatggaactgactctgtgctagaattgttttgtatcctttccaaaaaggaaattcagaagaaaatggataagaagatgaagaaagctagaaagaaagcaaaattacattctagcaaaggagaggaggaagatcctgaggttaatgttgaaatgagtctgcaagatgaaatccagcgggtgactaatataaaaacttctgccaaaatcaagtcctttgacttgattcattcacctcacggagagttaaaggctgtcttcctgctgcagaacaacctggtggaattgtattcactgaatccatccttgcctactcctcagcctgtcaggacaagcagaatcactattgggggtcatcgcagtgatgtgcggactttgtcattcagctcagacaatattgctgttctttcagctgcagctgattccattaaaatatggaacaggtctacactgcagtgtattcgcacaatgacctgtgaatatgcactttgctcattctttgtacctggtgatagacaggtagtcataggaacaaagacagggaagctgcagctttatgacttggcttcagggaatctgctggagacaatagatgcacatgatggagctttgtggtccatgtccctctctccagatcagcgtggctttgtgacaggtggtgcagataaatctgtcaaattctgggattttgagttagtgaaagatgaaaatagtacccaaaagagactttctgtgaagcaaacccgaactttgcaactagatgaagatgttctgtgtgtcagttactctcccaatcaaaagctattggctgtgtctttgctggactgtactgtgaaaattttctacgttgatactttaaaggatggagcactcatagcaactggctccgctgataggaatgtgaaaatctggggtttggactttggggactgccacaagtctctctttgcacatgatgacagtgtgatgtacctacagtttgtacccaagtctcacctcttcttcactgccggaaaagatcataagattaaacagtgggatgcagacaaatttgaacacatacagactctggagggtcatcaccaggaaatatggtgtttggctgtaagccccagtggagactatgttgtatcatcgtcccatgacaaatctctgagactttgggagagaacaagggagcctcttattcttgaggaagaaagggagatggaaagagaagcagaatatgaggagagtgtggccaaagaagaccaaccagcagttccaggagagactcaaggtgacagttactttactggaaagaaaactattgaaacagtgaaagcagctgagaggattatggaggctattgagttgtaccgagaagaaactgcaaaaatgaaggaacacaaagccatttgtaaagctgcagggaaagaggttccacttcccagcaaccccatcctaatggcttatggcagtatctcaccttcagcttatgtattagagatttttaaagggatcaagtcgagtgagctggaagaatctctacttgtgctgcctttctcttatgtcccagacattcttaaactctttaacgaattcattcagctgggctctgatgttgaacttatatgccggtgcctcttcttcctccttaggattcactttggacagatcactagcaatcaaatgcttgtgccagtgatagaaaaattaagggaaacaactatttcaaaagtcagccaagtccgggatgttatcggcttcaatatggctggtcttgattatctcaagagggaatgcgaggcaaaaagtgaagttatgttttttgctgatgctactagccacttggaagagaagaagaggaagaggaaaaagagggagaagttgattctaacgttgacttagaactgaaatttggcgtcatcttaaaaataccaaataacagaagatcgcattgcagatgatatcaggatgtggtttccagctttgcctgagggaattccaacatgagattatgggctggctccatttcttggacttaaaatgcattattagtttaaaaatctttctgtgctctcaaagcttgagccttgcagctcaagcttgttgttccctttatattctagcagggaataaataattgttttaattaggtatttgtttcattggagttgaaattaacatttcaaaagtttttcgtatttttttatggcagatgatttgtcatttatttatattaggttttactgcctattgagacaaccaggtgcataattgattgccctttggccataaaaatgcagtgtcatggatcttagagctaaaaaggactgtaaaaattacccagaacagcgtcctcagacttaaccttctgcaagttatgtctgtatataagaagattctaattgctaactgtttatacttttctgaataaaatagttgtttctaattaaaaagtagccaagctaagatgcctggctgggcttctgaggaattaatacactcgtgtgtgtgtgtgtgtgtgtgtgtgtgtgtgtgtgtgtatgtgtat

SEQ ID NO: 126 - DNA, 3849 bp, Homo sapiens
gcacagattgcttcacctgtggtatcagacatcacaacatggggctcaccaagcagtacctacgctatgttgctagtgcggtctttggcgttatcggcagccaaaaaggtaatattgtctttgtgacacttcgtggtgagaaaggacgttatgtggcagtaccagcttgtgaacacgttttcatctgggacttaaggaaaggagagaagattcttatccttcaggggcttaaacaagaagttacttgcttatgcccctccccagatgggctacacttagctgttgggtatgaggatgggtcgatccgaatcttcagtctcctgagtggggaaggaaatgtgaccttcaatggtcacaaagcagctatcactaccttgaagtatgatcagctaggaggcagactggcatctgggtccaaggacacagatattattgtatgggatgtgatcaatgaaagtggtctgtaccgtctaaaggggcacaaggatgccatcacacaagcattgtttctacgagaaaagaacctgctagttactagtgggaaagataccatggtgaaatggtgggaccttgatactcagcactgctttaaaacaatggttggccaccggactgaggtatgggggttggttctgttgtcagaagaaaagcgactcatcactggggcctcagacagtgaactgagggtatgggacatagcttatctgcaagagattgaagacccggaagaaccagaccccaagaaaatcaaaggatcttctcctggaatacaagatactcttgaggcagaggatggtgcctttgagacggatgaagcccctgaggatcgaatcctttcatgcagaaaagctggttccataatgcgggaaggaagagacagagttgtaaaccttgcagtcgacaagacaggcaggattcttgcttgccatggaactgactctgtgctagaattgttttgtatcctttccaaaaaggaaattcagaagaaaatggataagaagatgaagaaagctagaaagaaagcaaaattacattctagcaaaggagaggaggaagatcctgaggttaatgttgaaatgagtctgcaagatgaaatccagcgggtgactaatataaaaacttctgccaaaatcaagtcctttgacttgattcattcacctcacggagagttaaaggctgtcttcctgctgcagaacaacctggtggaattgtattcactgaatccatccttgcctactcctcagcctgtcaggacaagcagaatcactattgggggtcatcgcagtgatgtgcggactttgtcattcagctcagacaatattgctgttctttcagctgcagctgattccattaaaatatggaacaggtctacactgcagtgtattcgcacaatgacctgtgaatatgcactttgctcattctttgtacctggtgatagacaggtagtcataggaacaaagacagggaagctgcagctttatgacttggcttcagggaatctgctggagacaatagatgcacatgatggagctttgtggtccatgtccctctctccagatcagcgtggctttgtgacaggtggtgcagataaatctgtcaaattctgggattttgagttagtgaaagatgaaaatagtacccaaaagagactttctgtgaagcaaacccgaactttgcaactagatgaagatgttctgtgtgtcagttactctcccaatcaaaagctattggctgtgtctttgctggactgtactgtgaaaattttctacgttgatactttaaagttttttctgtcactgtatggacacaaactgcctgttatatgcatggacatctctcatgatggagcactcatagcaactggctccgctgataggaatgtgaaaatctggggtttggactttggggactgccacaagtctctctttgcacatgatgacagtgtgatgtacctacagtttgtacccaagtctcacctcttcttcactgccggaaaagatcataagattaaacagtgggatgcagacaaatttgaacacatacagactctggagggtcatcaccaggaaatatggtgtttggctgtaagccccagtggagactatgttgtatcatcgtcccatgacaaatctctgagactttgggagagaacaagggagcctcttattcttgaggaagaaagggagatggaaagagaagcagaatatgaggagagtgtggccaaagaagaccaaccagcagttccaggagagactcaaggtgacagttactttactggaaagaaaactattgaaacagtgaaagcagctgagaggattatggaggctattgagttgtaccgagaagaaactgcaaaaatgaaggaacacaaagccatttgtaaagctgcagggaaagaggttccacttcccagcaaccccatcctaatggcttatggcagtatctcaccttcagcttatgtattagagatttttaaagggatcaagtcgagtgagctggaagaatctctacttgtgctgcctttctcttatgtcccagacattcttaaactctttaacgaattcattcagctgggctctgatgttgaacttatatgccggtgcctcttcttcctccttaggattcactttggacagatcactagcaatcaaatgcttgtgccagtgatagaaaaattaagggaaacaactatttcaaaagtcagccaagtccgggatgttatcggcttcaatatggctggtcttgattatctcaagagggaatgcgaggcaaaaagtgaagttatgttttttgctgatgctactagccacttggaagagaagaagaggaagaggaaaaagagggagaagttgattctaacgttgacttagaactgaaatgtggtatctttttttttttcaactttttcctttaaaggactcctaaactaagcacagaagagttggcgtcatcttaaaaataccaaataacagaagatcgcattgcagatgatatcaggatgtggtttccagctttgcctgagggaattccaacatgagattatgggctggctccatttcttggacttaaaatgcattattagtttaaaaatctttctgtgctctcaaagcttgagccttgcagctcaagcttgttgttccctttatattctagcagggaataaataattgttttaattaggtatttgtttcattggagttgaaattaacatttcaaaagtttttcgtatttttttatggcagatgatttgtcatttatttatattaggttttactgcctattgagacaaccaggtgcataattgattgccctttggccataaaaatgcagtgtcatggatcttagagctaaaaaggactgtaaaaattacccagaacagcgtcctcagacttaaccttctgcaagttatgtctgtatataagaagattctaattgctaactgtttatacttttctgaataaaatagttgtttctaattaaaaagtagccaagctaagatgcctggctgggcttctgaggaattaatacactcgtgtgtgtgtgtgtgtgtgtgtgtgtgtgtgtgtgtgtatgtgtatgtgtatgtacacatacatatatatagttgacacttgaaaaatgcaggtggtaggggcactgacccacccctacgccccgcacagtcaaaaatctgcatataacttttgattccccaaagtcttaagtactagtagcctgttattgactgggagcctgactgatgtattatatatattgtatactgtattcttaaagtaagctagagaaaagaaaatgttacttagaaaatcataaggaagagaaaatatatttactgtgtttatcaatact

SEQ ID NO: 127 - DNA, 2631 bp, Homo sapiens
aagaggcagtgcccgccactcccactgagattgagagacgcggcaaggaggcagcctgtggaggaactggaaagataaaaactctccagatgtcttccagtaatgtcgaagtttttatcccagtgtcacaaggaaacaccaatggcttccccgcgacagcttccaatgacctgaaggcatttactgaaggagctgtgttaagttttcataacatctgctatcgagtaaaactgaagagtggctttctaccttgtcgaaaaccagttgagaaagaaatattatcgaatatcaatgggatcatgaaacctggtctcaacgccatcctgggacccacaggtggaggcaaatcttcgttattagatgtcttagctgcaaggaaagatccaagtggattatctggagatgttctgataaatggagcaccgcgacctgccaatttcaaatgtaattcaggttacgtggtacaagatgatgttgtgatgggcactctgacggtgagagaaaacttacagttctcagcagctcttcggcttgcaacaactatgacgaatcatgaaaaaaacgaacggattaacagggtcattcaagagttaggtctggataaagtggcagactccaaggttggaactcagtttatccgtggtgtgtctggaggagaaagaaaaaggactagtataggaatggagcttatcactgatccttccatcttgttcttggatgagcctacaactggcttagactcaagcacagcaaatgctgtccttttgctcctgaaaaggatgtctaagcagggacgaacaatcatcttctccattcatcagcctcgatattccatcttcaagttgtttgatagcctcaccttattggcctcaggaagacttatgttccacgggcctgctcaggaggccttgggatactttgaatcagctggttatcactgtgaggcctataataaccctgcagacttcttcttggacatcattaatggagattccactgctgtggcattaaacagagaagaagactttaaagccacagagatcatagagccttccaagcaggataagccactcatagaaaaattagcggagatttatgtcaactcctccttctacaaagagacaaaagctgaattacatcaactttccgggggtgagaagaagaagaagatcacagtcttcaaggagatcagctacaccacctccttctgtcatcaactcagatgggtttccaagcgttcattcaaaaacttgctgggtaatccccaggcctctatagctcagatcattgtcacagtcgtactgggactggttataggtgccatttactttgggctaaaaaatgattctactggaatccagaacagagctggggttctcttcttcctgacgaccaaccagtgtttcagcagtgtttcagccgtggaactctttgtggtagagaagaagctcttcatacatgaatacatcagcggatactacagagtgtcatcttatttccttggaaaactgttatctgatttattacccatgaggatgttaccaagtattatatttacctgtatagtgtacttcatgttaggattgaagccaaaggcagatgccttcttcgttatgatgtttacccttatgatggtggcttattcagccagttccatggcactggccatagcagcaggtcagagtgtggtttctgtagcaacacttctcatgaccatctgttttgtgtttatgatgattttttcaggtctgttggtcaatctcacaaccattgcatcttggctgtcatggcttcagtacttcagcattccacgatatggatttacggctttgcagcataatgaatttttgggacaaaacttctgcccaggactcaatgcaacaggaaacaatccttgtaactatgcaacatgtactggcgaagaatatttggtaaagcagggcatcgatctctcaccctggggcttgtggaagaatcacgtggccttggcttgtatgattgttattttcctcacaattgcctacctgaaattgttatttcttaaaaaatattcttaaatttccccttaattcagtatgatttatcctcacataaaaaagaagcactttgattgaagtattcaatcaagtttttttgttgttttctgttcccttgccatcacactgttgcacagcagcaattgttttaaagagatacatttttagaaatcacaacaaactgaattaaacatgaaagaacccaagacatcatgtatcgcatattagttaatctcctcagacagtaaccatggggaagaaatctggtctaatttattaatctaaaaaaggagaattgaattctggaaactcctgacaagttattactgtctctggcatttgtttcctcatctttaaaatgaataggtaggttagtagcccttcagtcttaatactttatgatgctatggtttgccattatttaataaatgacaaatgtattaatgctatactggaaatgtaaaattgaaaatatgttggaaaaaagattctgtcttatagggtaaaaaaagccaccgtgatagaaaaaaaatctttttgataagcacattaaagttaatagaacttactgatattcctgtctagtggtataata

SEQ ID NO: 128 - DNA, 2806 bp, Homo sapiens
cactcccactgagattgagagacgcggcaaggaggcagcctgtggaggaactgggtaggatttaggaacgcaccgtgcacatgcttggtggtcttgttaagtggaaactgctgctttagagtttgtttggaaggtccgggtgactcatcccaacatttacatccttaattgttaaagcgctgcctccgagcgcacgcatcctgagatcctgagcctttggttaagaccgagctctattaagctgaaaagataaaaactctccagatgtcttccagtaatgtcgaagtttttatcccagtgtcacaaggaaacaccaatggcttccccgcgacagcttccaatgacctgaaggcatttactgaaggagctgtgttaagttttcataacatctgctatcgagtaaaactgaagagtggctttctaccttgtcgaaaaccagttgagaaagaaatattatcgaatatcaatgggatcatgaaacctggtctcaacgccatcctgggacccacaggtggaggcaaatcttcgttattagatgtcttagctgcaaggaaagatccaagtggattatctggagatgttctgataaatggagcaccgcgacctgccaatttcaaatgtaattcaggttacgtggtacaagatgatgttgtgatgggcactctgacggtgagagaaaacttacagttctcagcagctcttcggcttgcaacaactatgacgaatcatgaaaaaaacgaacggattaacagggtcattcaagagttaggtctggataaagtggcagactccaaggttggaactcagtttatccgtggtgtgtctggaggagaaagaaaaaggactagtataggaatggagcttatcactgatccttccatcttgttcttggatgagcctacaactggcttagactcaagcacagcaaatgctgtccttttgctcctgaaaaggatgtctaagcagggacgaacaatcatcttctccattcatcagcctcgatattccatcttcaagttgtttgatagcctcaccttattggcctcaggaagacttatgttccacgggcctgctcaggaggccttgggatactttgaatcagctggttatcactgtgaggcctataataaccctgcagacttcttcttggacatcattaatggagattccactgctgtggcattaaacagagaagaagactttaaagccacagagatcatagagccttccaagcaggataagccactcatagaaaaattagcggagatttatgtcaactcctccttctacaaagagacaaaagctgaattacatcaactttccgggggtgagaagaagaagaagatcacagtcttcaaggagatcagctacaccacctccttctgtcatcaactcagatgggtttccaagcgttcattcaaaaacttgctgggtaatccccaggcctctatagctcagatcattgtcacagtcgtactgggactggttataggtgccatttactttgggctaaaaaatgattctactggaatccagaacagagctggggttctcttcttcctgacgaccaaccagtgtttcagcagtgtttcagccgtggaactctttgtggtagagaagaagctcttcatacatgaatacatcagcggatactacagagtgtcatcttatttccttggaaaactgttatctgatttattacccatgaggatgttaccaagtattatatttacctgtatagtgtacttcatgttaggattgaagccaaaggcagatgccttcttcgttatgatgtttacccttatgatggtggcttattcagccagttccatggcactggccatagcagcaggtcagagtgtggtttctgtagcaacacttctcatgaccatctgttttgtgtttatgatgattttttcaggtctgttggtcaatctcacaaccattgcatcttggctgtcatggcttcagtacttcagcattccacgatatggatttacggctttgcagcataatgaatttttgggacaaaacttctgcccaggactcaatgcaacaggaaacaatccttgtaactatgcaacatgtactggcgaagaatatttggtaaagcagggcatcgatctctcaccctggggcttgtggaagaatcacgtggccttggcttgtatgattgttattttcctcacaattgcctacctgaaattgttatttcttaaaaaatattcttaaatttccccttaattcagtatgatttatcctcacataaaaaagaagcactttgattgaagtattcaatcaagtttttttgttgttttctgttcccttgccatcacactgttgcacagcagcaattgttttaaagagatacatttttagaaatcacaacaaactgaattaaacatgaaagaacccaagacatcatgtatcgcatattagttaatctcctcagacagtaaccatggggaagaaatctggtctaatttattaatctaaaaaaggagaattgaattctggaaactcctgacaagttattactgtctctggcatttgtttcctcatctttaaaatgaataggtaggttagtagcccttcagtcttaatactttatgatgctatggtttgccattatttaataaatgacaaatgtattaatgctatactggaaatgtaaaattgaaaatatgttggaaaaaagattctgtcttatagggtaaaaaaagccaccgtgatagaaaaaaaatctttttgataagcacattaaagttaatagaacttactgatattcctgtctagtggtataata

SEQ ID NO: 129 - DNA, 7584 bp, Homo sapiens
ccgacgtctgcgccaggacctggctggctgagcccggcgcagcagcagcagccagggcagcgcggcccctactccctgtcaggtcgtagaggcgagcagggaccagctggtcgccggcccctcgggcaagatggggaaccgggagatggaggagctgatcccgctggtgaaccgtctgcaggacgcgttttcggcgctgggacagagctgcctgctggagctgccgcagatcgccgtggtgggcggccagagcgccggcaagagctcggtgctcgagaacttcgtgggcagggactttctccctcgagggtcgggcattgtaacaagacgacctcttgtgctgcagcttgttacttctaaagcagaatatgccgagtttctacattgcaaaggaaagaaatttacagattttgatgaagttcgccttgagattgaagcagaaacagatcgcgtgactggaatgaataaaggcatttcctccatacccattaatttacgagtctattccccacacgtgttaaatctaacccttattgatctacctggaataactaaagtgcctgtgggagatcagccaccagatatcgagtatcagatcagagaaatgattatgcagttcatcacgagggagaactgtctgattttagctgttactccagccaacactgatcttgcaaactcagatgcgctgaagctagctaaagaagttgatcctcaaggtctgagaaccattggagttatcaccaaactggaccttatggatgaaggaacggatgccagggatgttctagagaacaaactgttgcctcttcgcaggggttacgtgggggtggtaaacagaagccagaaggacatagatgggaagaaggacataaaggcagccatgctggcagagaggaagtttttcctttcccacccggcttacagacatatcgctgaccgaatgggaaccccacacctgcagaaggtccttaatcagcaacttaccaaccacattcgggataccctaccaaacttcaggaacaaactacagggacagttgctctccatagaacatgaagtagaagcctacaaaaatttcaaaccagaagacccaacaaggaagaccaaagcattgctgcagatggttcagcaatttgctgtggactttgagaagagaattgaagggtcaggggatcaagtagataccctggaactctcaggtggtgctaaaatcaatcgtatttttcatgaacgctttccttttgagatagtaaagatggagttcaatgagaaagaattgcgaagagaaataagctatgcaatcaaaaacatacatggtatcaggacagggttgtttactccagacatggcatttgaagcgatagtcaagaaacagattgtaaagttgaaagggccttccttgaagagtgtggatctggtaatacaagaattaatcaacactgtgaagaagtgtaccaaaaaactggcaaacttccccagactctgcgaggaaacggaaaggattgttgctaaccacattcgtgagcgagaagggaagacaaaggaccaggtattgctattgattgacattcaagtctcttacatcaacaccaaccatgaagacttcattggcttcgcaaatgctcagcagaggagcagtcaggttcacaagaaaaccacagttggaaatcaggtgattcgcaaggggtggctcaccatcagcaacattggcatcatgaaaggcggctcgaagggatactggttcgtccttactgcggaaagcttgtcctggtataaagatgatgaggaaaaagaaaagaagtacatgcttcccttggacaacctgaaagttcgggatgtggaaaagagctttatgtctagcaagcacatctttgcactctttaatacagagcaaaggaatgtatacaaagactatcgcttccttgagctggcatgtgattcccaggaggatgtcgacagctggaaggcatctctactaagagctggggtctatcctgacaaatctgtagctgaaaatgatgagaatggacaagcagaaaacttttccatggacccacaattggagaggcaagtggagaccattcgcaacctcgtagactcctacatgtccattatcaacaaatgtatccgagatctaattccaaaaacaataatgcaccttatgatcaataacgttaaagatttcataaattccgagctcctagcacagttgtattcttcagaggaccaaaataccctgatggaggaatctgctgagcaggctcagcgccgggatgagatgcttcgaatgtatcaagcactgaaagaagcccttgggataattggggacatcagcacggccaccgtgtccactccggcaccccctccagtggatgactcctggatacagcactctcgcaggtcacctcctccaagccccacaacccaaaggaggccaacactaagtgctcccctcgcaaggcccacatccggccgaggaccagctcctgccattccctctcctggcccccactctggggctcctccagtcccattccgtccaggcccattacctcctttccccagcagcagtgactccttcggagcccctccacaagttccatctaggcctacgagggccccgcccagtgtcccaagccggagaccacccccatcaccaactcgtcccactataatccgcccactagaatcctccctgttagactaaacgaagtgtctggcatggcaattaatcactaatgaattatgcgaaagcaacatatttgataaccgttgcagtaaatcatgagtagtcgcatgtgtggacatcagtaggcaagtaaccagttttactaatgcattcatcgctcatcttcattgctcatggtatgtcaaacctttggggtttgactcagaaactgctaaccttttagaggctttatatgttgtactgaccaaggtaggtttgtatagcagccctatactttggggatcatttgcctaccatggcatatatttgaaattgctttggacaagttttctaggctatctaccaggtagctcattaaacgtaattcttcagatatgagatagtgggcttagacctaagccatacatatttcttttcccacattctgtttaggatgacagtaattctgttgtctaccattaatgctactacctactccataattgcctatttagctcctcttttcttcctttttatttcataagactgctaggaagtgattttttaaaattaggactccttaagaataaacttttccagaagcacgaggtagtttgcaaaggaaaagtctgcactgtttgctctaaagagcttctcctcattccaatgtgttttgcttcatgctagaagcatatgcaacagtgaataaaagcttctttttttgttaatcagtcaataaatttggctaattagtttcagagttcaaggaagaagcaaaatatcacatctctagaagtgttgggaaaaatataatttctttctttacttatattcacctcatggtaggttatattgaaggctgacatggagaatgtttacttttctatttggcatagctaactacactttgatactaactccagttttactattattattttggttggaaaaaaaattcactctttacgtgctaatttgtaatcttgttttgtaagaatttatcctacccttgaaacaggctcagtgtaactgtatatccattctaggctttcttaataaatcttgaggctatgggataatcacatttaaagaatggttcctgaaatgaagtcagtagaaatggcatgggataagagcagagctcacacttttacagttgcagtatttcaaagtccctatccaggtcactccagaaaagggtattgaaacgttgaaatctaaagcaaatttgcaatttcttaagatttctaaaatttaccagaacagtttagcctgggggttaatagttaagtcttgaggctaagttttggactaccaaggaccagatgattcacatgtaggaaacagccagaagccaactggaattttgtgtgctaactgttcccagacagcagagcaagtattcactgagtaggggtgtcccatgacactatttcatattctacagaagtaaatcaggtttcaccaactgaaatgtctccctttgaaagtagcaaacatgatttgtatgttaacttaactttaatttcctgtgtagtttacacccagagcagatactcataaagtataaagtaaaaacttttaaccattattaaacagagaacttgccatgttgagtgccattgtattgaacttattctaaaggcttatgctaacccatttataattggtaaaaatcagaaaatacaagatttacataaaggtcatttcaacttttaaggttaccagtgattgtataaaaacatcacaatcctaaatcctctcgtatctcaccccaaaccccaaactgggggaaaaaaagttaactctttgtgaatggaaccaatgtgcaagatacatactgcatttttaaaatagtgtctcagctaaatggaaaactgttaagcaaacatccatagtaaaacaaataatcttcagtgagatctttttataaaacttcttgtttttaggattccctttgcttcttcctttgaattctctaaaataggcagctaacggattatatacttcagggtttggctttgtgctaaatgtggttttgtgttttgctgtatttcaaaattttccttctgttaaaggaaaatattgtgaataaccactggtgtgttcttagatcagcacaaaccatgtcaaaaaaaattggagatttttttccaattttccttccactgatcttaggcagtaataaacaatggcatttgtcatctttggcacttgcttttagattatagtcccacagttgcactgccccaattgtctacctttgtgggtacatttttgttctttactcctaagttatttctcatagaacccagcctactctagaatttcagcagtgacattggagaatatttttaatttgctgcagtactatgtcatattattagtatgaatctcatttcccaaagggtttgtattctgctaaaaggagatgccaatgttgaatgaagtctgaaactctagtatgtgcatagtttgacgtgcagcatgcacaccaggccttaagatgggaatgtagcttaatgattttctgtttcccataccatttctaatcttttgtgtaattttctcttaactgattgctctgatattgtaaacacaatagatgtagctctatcatgtctagcataatttaaaaaatcagtgtttttaggatttgggaaaataaactgtaaatgtttatttgataggtaaatatagttttattgtcacatgctaaatattgcatgcatattgactaattggaataaccatttactcaattatggacagcttattgaaatagtattgatttagaaaaagtatattgcatttctaaaaaacatctaccaaggttactcgtctgaatattgcttttagccgtgttttataacatagacgagcagtagggtctgtttattagcaaatttcctatttgttccaatacaaactcactttattctaaagtatattaatgaaaccagttcctgtgatgtaactgtaagccttctcgacttagacttaaaaagtggtcacatagattaattttgtgactttttagtatagactgtagccataattctcaaatatgaaatgggacctaataccagtatgtgataaatgttgatgttttctgtgtacaaacacattttctatgcatgtgtctctgtgtatatggcatatacctagtaagtatgtttctgtaagtatgtgtattttatgtccatttgagtaggtaggtaggttttaaaaatactagttaaaatgccacaagcatgagtgtgattgtatgtgcactgtgtgtatatatataaatatatgtatatgtatggttgtaaatatctatgtatacatgtacttagtatgtgtggtatcaggatattttttaaactgtgataatacaacagatagctttgaatgatctgccataacatgtggtaacaatagttcatttctcataacatatatgaggtatacaaaattttctaactccagattgtagtcattttgagaggtacaaagctcataattaccatgacaacatggtaatgtccatagacatttgtatctgaatccacaagaagatctgaatctaagaaggaattacctttgacaatatttttcggtaagaagtaaaacctctggagacctatctttaagatctctaattggaattataaattatttttggattgctgagctgaatcttaaaaagccaagttgatatacatagtcatttttcctctatggtagaagtaaaaaaaaaaaaaaaggacatagcaacattaaagtagtggatttttctgagtaaatttgctgaaaatataagagagaagctatctaataccttggaggtaggtcatccactttttcaggtaaacatttttcatttggcaaatggcataattatttgaaagtgacaggaatctcctcagaatgaagaataaagcctaataggtctctaactgttgaactcatgaaagaagatagtgtatgagacttaagccatgagttttgtatcatttcaattagaagactactagctgtgagctcagagtttaatgtaaatgaatctagatgattttgaagaaatgattattcgttcaccagatcactcattgtacattctaaaaagctcaaatgagtcttctagatactcttactcatcctgtctggttgctatgtttaaaattatgtggtgctgtgtaggtgaaactttaagaatatttttgaagcatatgtaatatatgcactgctatttgtgtgtgtgtgtgtgtctttgtatatatgtaagaatgtgtgtatgtgtgagagcaagagagaggaaactcaaagaggagtgtttgtcttaagacctgttcatactggtatattggtgagacttctcacttctggttggaggtttcacatatggctcaactcaagtcattaatctctttttaatttttactcttgaattccttaaacttcgctcattatgaaatgttttaaaattatgacaaaaattactctgtctaaccacttgccttgtctgctaccagtttgttaaaaattattccccccaaccagtaattccaccagtactacttgatttgtgttatatttcctatgtacatgtacagcctttgttttgcttgcttgtctatttttactttcccttttttgggtcaaatttttcttttgctttgtttgaagaaggaatatacagaagtaaaatcttgtcttctctgctgattctttaattaatatgagccggatactttccactgtcttcttggcactttcaggatttcttaatgctgatatatggactcttagaatggaatttttgaagaaaaatctcaaagcctgtatcgttcttgaaggtcacatgtacctattgtgaaaatgtgaagctgtatttctgaagctgaaataaattataacatttgaag

SEQ ID NO: 130 - DNA, 7344 bp, Homo sapiens
tctgcatcctactgctattttcattttatagatggaatactttgaagcacgaaaaatcattatatcttgaaataatttttaaaataatccaataacaaactcagaactactgaagaataataaagaatatgccgagtttctacattgcaaaggaaagaaatttacagattttgatgaagttcgccttgagattgaagcagaaacagatcgcgtgactggaatgaataaaggcatttcctccatacccattaatttacgagtctattccccacacgtgttaaatctaacccttattgatctacctggaataactaaagtgcctgtgggagatcagccaccagatatcgagtatcagatcagagaaatgattatgcagttcatcacgagggagaactgtctgattttagctgttactccagccaacactgatcttgcaaactcagatgcgctgaagctagctaaagaagttgatcctcaaggtctgagaaccattggagttatcaccaaactggaccttatggatgaaggaacggatgccagggatgttctagagaacaaactgttgcctcttcgcaggggttacgtgggggtggtaaacagaagccagaaggacatagatgggaagaaggacataaaggcagccatgctggcagagaggaagtttttcctttcccacccggcttacagacatatcgctgaccgaatgggaaccccacacctgcagaaggtccttaatcagcaacttaccaaccacattcgggataccctaccaaacttcaggaacaaactacagggacagttgctctccatagaacatgaagtagaagcctacaaaaatttcaaaccagaagacccaacaaggaagaccaaagcattgctgcagatggttcagcaatttgctgtggactttgagaagagaattgaagggtcaggggatcaagtagataccctggaactctcaggtggtgctaaaatcaatcgtatttttcatgaacgctttccttttgagatagtaaagatggagttcaatgagaaagaattgcgaagagaaataagctatgcaatcaaaaacatacatggtatcaggacagggttgtttactccagacatggcatttgaagcgatagtcaagaaacagattgtaaagttgaaagggccttccttgaagagtgtggatctggtaatacaagaattaatcaacactgtgaagaagtgtaccaaaaaactggcaaacttccccagactctgcgaggaaacggaaaggattgttgctaaccacattcgtgagcgagaagggaagacaaaggaccaggtattgctattgattgacattcaagtctcttacatcaacaccaaccatgaagacttcattggcttcgcaaatgctcagcagaggagcagtcaggttcacaagaaaaccacagttggaaatcaggtgattcgcaaggggtggctcaccatcagcaacattggcatcatgaaaggcggctcgaagggatactggttcgtccttactgcggaaagcttgtcctggtataaagatgatgaggaaaaagaaaagaagtacatgcttcccttggacaacctgaaagttcgggatgtggaaaagagctttatgtctagcaagcacatctttgcactctttaatacagagcaaaggaatgtatacaaagactatcgcttccttgagctggcatgtgattcccaggaggatgtcgacagctggaaggcatctctactaagagctggggtctatcctgacaaatctgtagctgaaaatgatgagaatggacaagcagaaaacttttccatggacccacaattggagaggcaagtggagaccattcgcaacctcgtagactcctacatgtccattatcaacaaatgtatccgagatctaattccaaaaacaataatgcaccttatgatcaataacgttaaagatttcataaattccgagctcctagcacagttgtattcttcagaggaccaaaataccctgatggaggaatctgctgagcaggctcagcgccgggatgagatgcttcgaatgtatcaagcactgaaagaagcccttgggataattggggacatcagcacggccaccgtgtccactccggcaccccctccagtggatgactcctggatacagcactctcgcaggtcacctcctccaagccccacaacccaaaggaggccaacactaagtgctcccctcgcaaggcccacatccggccgaggaccagctcctgccattccctctcctggcccccactctggggctcctccagtcccattccgtccaggcccattacctcctttccccagcagcagtgactccttcggagcccctccacaagttccatctaggcctacgagggccccgcccagtgtcccaagccggagaccacccccatcaccaactcgtcccactataatccgcccactagaatcctccctgttagactaaacgaagtgtctggcatggcaattaatcactaatgaattatgcgaaagcaacatatttgataaccgttgcagtaaatcatgagtagtcgcatgtgtggacatcagtaggcaagtaaccagttttactaatgcattcatcgctcatcttcattgctcatggtatgtcaaacctttggggtttgactcagaaactgctaaccttttagaggctttatatgttgtactgaccaaggtaggtttgtatagcagccctatactttggggatcatttgcctaccatggcatatatttgaaattgctttggacaagttttctaggctatctaccaggtagctcattaaacgtaattcttcagatatgagatagtgggcttagacctaagccatacatatttcttttcccacattctgtttaggatgacagtaattctgttgtctaccattaatgctactacctactccataattgcctatttagctcctcttttcttcctttttatttcataagactgctaggaagtgattttttaaaattaggactccttaagaataaacttttccagaagcacgaggtagtttgcaaaggaaaagtctgcactgtttgctctaaagagcttctcctcattccaatgtgttttgcttcatgctagaagcatatgcaacagtgaataaaagcttctttttttgttaatcagtcaataaatttggctaattagtttcagagttcaaggaagaagcaaaatatcacatctctagaagtgttgggaaaaatataatttctttctttacttatattcacctcatggtaggttatattgaaggctgacatggagaatgtttacttttctatttggcatagctaactacactttgatactaactccagttttactattattattttggttggaaaaaaaattcactctttacgtgctaatttgtaatcttgttttgtaagaatttatcctacccttgaaacaggctcagtgtaactgtatatccattctaggctttcttaataaatcttgaggctatgggataatcacatttaaagaatggttcctgaaatgaagtcagtagaaatggcatgggataagagcagagctcacacttttacagttgcagtatttcaaagtccctatccaggtcactccagaaaagggtattgaaacgttgaaatctaaagcaaatttgcaatttcttaagatttctaaaatttaccagaacagtttagcctgggggttaatagttaagtcttgaggctaagttttggactaccaaggaccagatgattcacatgtaggaaacagccagaagccaactggaattttgtgtgctaactgttcccagacagcagagcaagtattcactgagtaggggtgtcccatgacactatttcatattctacagaagtaaatcaggtttcaccaactgaaatgtctccctttgaaagtagcaaacatgatttgtatgttaacttaactttaatttcctgtgtagtttacacccagagcagatactcataaagtataaagtaaaaacttttaaccattattaaacagagaacttgccatgttgagtgccattgtattgaacttattctaaaggcttatgctaacccatttataattggtaaaaatcagaaaatacaagatttacataaaggtcatttcaacttttaaggttaccagtgattgtataaaaacatcacaatcctaaatcctctcgtatctcaccccaaaccccaaactgggggaaaaaaagttaactctttgtgaatggaaccaatgtgcaagatacatactgcatttttaaaatagtgtctcagctaaatggaaaactgttaagcaaacatccatagtaaaacaaataatcttcagtgagatctttttataaaacttcttgtttttaggattccctttgcttcttcctttgaattctctaaaataggcagctaacggattatatacttcagggtttggctttgtgctaaatgtggttttgtgttttgctgtatttcaaaattttccttctgttaaaggaaaatattgtgaataaccactggtgtgttcttagatcagcacaaaccatgtcaaaaaaaattggagatttttttccaattttccttccactgatcttaggcagtaataaacaatggcatttgtcatctttggcacttgcttttagattatagtcccacagttgcactgccccaattgtctacctttgtgggtacatttttgttctttactcctaagttatttctcatagaacccagcctactctagaatttcagcagtgacattggagaatatttttaatttgctgcagtactatgtcatattattagtatgaatctcatttcccaaagggtttgtattctgctaaaaggagatgccaatgttgaatgaagtctgaaactctagtatgtgcatagtttgacgtgcagcatgcacaccaggccttaagatgggaatgtagcttaatgattttctgtttcccataccatttctaatcttttgtgtaattttctcttaactgattgctctgatattgtaaacacaatagatgtagctctatcatgtctagcataatttaaaaaatcagtgtttttaggatttgggaaaataaactgtaaatgtttatttgataggtaaatatagttttattgtcacatgctaaatattgcatgcatattgactaattggaataaccatttactcaattatggacagcttattgaaatagtattgatttagaaaaagtatattgcatttctaaaaaacatctaccaaggttactcgtctgaatattgcttttagccgtgttttataacatagacgagcagtagggtctgtttattagcaaatttcctatttgttccaatacaaactcactttattctaaagtatattaatgaaaccagttcctgtgatgtaactgtaagccttctcgacttagacttaaaaagtggtcacatagattaattttgtgactttttagtatagactgtagccataattctcaaatatgaaatgggacctaataccagtatgtgataaatgttgatgttttctgtgtacaaacacattttctatgcatgtgtctctgtgtatatggcatatacctagtaagtatgtttctgtaagtatgtgtattttatgtccatttgagtaggtaggtaggttttaaaaatactagttaaaatgccacaagcatgagtgtgattgtatgtgcactgtgtgtatatatataaatatatgtatatgtatggttgtaaatatctatgtatacatgtacttagtatgtgtggtatcaggatattttttaaactgtgataatacaacagatagctttgaatgatctgccataacatgtggtaacaatagttcatttctcataacatatatgaggtatacaaaattttctaactccagattgtagtcattttgagaggtacaaagctcataattaccatgacaacatggtaatgtccatagacatttgtatctgaatccacaagaagatctgaatctaagaaggaattacctttgacaatatttttcggtaagaagtaaaacctctggagacctatctttaagatctctaattggaattataaattatttttggattgctgagctgaatcttaaaaagccaagttgatatacatagtcatttttcctctatggtagaagtaaaaaaaaaaaaaaaggacatagcaacattaaagtagtggatttttctgagtaaatttgctgaaaatataagagagaagctatctaataccttggaggtaggtcatccactttttcaggtaaacatttttcatttggcaaatggcataattatttgaaagtgacaggaatctcctcagaatgaagaataaagcctaataggtctctaactgttgaactcatgaaagaagatagtgtatgagacttaagccatgagttttgtatcatttcaattagaagactactagctgtgagctcagagtttaatgtaaatgaatctagatgattttgaagaaatgattattcgttcaccagatcactcattgtacattctaaaaagctcaaatgagtcttctagatactcttactcatcctgtctggttgctatgtttaaaattatgtggtgctgtgtaggtgaaactttaagaatatttttgaagcatatgtaatatatgcactgctatttgtgtgtgtgtgtgtgtctttgtatatatgtaagaatgtgtgtatgtgtgagagcaagagagaggaaactcaaagaggagtgtttgtcttaagacctgttcatactggtatattggtgagacttctcacttctggttggaggtttcacatatggctcaactcaagtcattaatctctttttaatttttactcttgaattccttaaacttcgctcattatgaaatgttttaaaattatgacaaaaattactctgtctaaccacttgccttgtctgctaccagtttgttaaaaattattccccccaaccagtaattccaccagtactacttgatttgtgttatatttcctatgtacatgtacagcctttgttttgcttgcttgtctatttttactttcccttttttgggtcaaatttttcttttgctttgtttgaagaaggaatatacagaagtaaaatcttgtcttctctgctgattctttaattaatatgagccggatactttccactgtcttcttggcactttcaggatttcttaatgctgatatatggactcttagaatggaatttttgaagaaaaatctcaaagcctgtatcgttcttgaaggtcacatgtacctattgtgaaaatgtgaagctgtatttctgaagctgaaataaattataacatttgaag

SEQ ID NO: 131 - DNA, 2320 bp, Homo sapiens
agagccaagcggcgggctggcggcgggctccgacgtctgcgccaggacctggctggctgagcccggcgcagcagcagcagccagggcagcgcggcccctactccctgtcaggtcgtagaggcgagcagggaccagctggtcgccggcccctcgggcaagatggggaaccgggagatggaggagctgatcccgctggtgaaccgtctgcaggacgcgttttcggcgctgggacagagctgcctgctggagctgccgcagatcgccgtggtgggcggccagagcgccggcaagagctcggtgctcgagaacttcgtgggcagggactttctccctcgagggtcgggcattgtaacaagacgacctcttgtgctgcagcttgttacttctaaagcagaatatgccgagtttctacattgcaaaggaaagaaatttacagattttgatgaagttcgccttgagattgaagcagaaacagatcgcgtgactggaatgaataaaggcatttcctccatacccattaatttacgagtctattccccacacgtgttaaatctaacccttattgatctacctggaataactaaagtgcctgtgggagatcagccaccagatatcgagtatcagatcagagaaatgattatgcagttcatcacgagggagaactgtctgattttagctgttactccagccaacactgatcttgcaaactcagatgcgctgaagctagctaaagaagttgatcctcaaggtctgagaaccattggagttatcaccaaactggaccttatggatgaaggaacggatgccagggatgttctagagaacaaactgttgcctcttcgcaggggttacgtgggggtggtaaacagaagccagaaggacatagatgggaagaaggacataaaggcagccatgctggcagagaggaagtttttcctttcccacccggcttacagacatatcgctgaccgaatgggaaccccacacctgcagaaggtccttaatcagcaacttaccaaccacattcgggataccctaccaaacttcaggaacaaactacagggacagttgctctccatagaacatgaagtagaagcctacaaaaatttcaaaccagaagacccaacaaggaagaccaaagcattgctgcagatggttcagcaatttgctgtggactttgagaagagaattgaagggtcaggggatcaagtagataccctggaactctcaggtggtgctaaaatcaatcgtatttttcatgaacgctttccttttgagatagtaaagatggagttcaatgagaaagaattgcgaagagaaataagctatgcaatcaaaaacatacatggtatcaggacagggttgtttactccagacatggcatttgaagcgatagtcaagaaacagattgtaaagttgaaagggccttccttgaagagtgtggatctggtaatacaagaattaatcaacactgtgaagaagtgtaccaaaaaactggcaaacttccccagactctgcgaggaaacggaaaggattgttgctaaccacattcgtgagcgagaagggaagacaaaggaccaggtattgctattgattgacattcaagtctcttacatcaacaccaaccatgaagacttcattggcttcgcaaatgctcagcagaggagcagtcaggttcacaagaaaaccacagttggaaatcaggtgattcgcaaggggtggctcaccatcagcaacattggcatcatgaaaggcggctcgaagggatactggttcgtccttactgcggaaagcttgtcctggtataaagatgatgagaacatttagtcttggcgaggataaccaacttaccaaagtcacacagctagttggtggcaaagcagaaatttgaacccaggctgttgagctccagagcctatgctttcaaccacaaataaaggcaagaatcccagagatgcctggagttgtccaagccaacctcatcccacagaggacttatgaagatgaattccaggcatctcagcattgacatgttcctgggtgttagcagcagagacactgaagactctggagtagctactgctgttggagtgtggcattagtctggctctgtgagtcctgaaaataagcccattggaaggtataggatgctctctgtagggaaggaagaagctttgaaggcttggtgagctcttggttattggctcatctcctctcctccagactcaggataattctttacaaaatcactgcccttgtagcttccttatgagtacttgattacaacaaatggaaaataaatatgcacagttataatatt

SEQ ID NO: 132 - DNA, 5959 bp, Homo sapiens
tcagggaaccaatcttccgccttcaaggcaaattgtacgagctaagttctgtgattcgcaaggggtggctcaccatcagcaacattggcatcatgaaaggcggctcgaagggatactggttcgtccttactgcggaaagcttgtcctggtataaagatgatgaggaaaaagaaaagaagtacatgcttcccttggacaacctgaaagttcgggatgtggaaaagagctttatgtctagcaagcacatctttgcactctttaatacagagcaaaggaatgtatacaaagactatcgcttccttgagctggcatgtgattcccaggaggatgtcgacagctggaaggcatctctactaagagctggggtctatcctgacaaatctgtagctgaaaatgatgagaatggacaagcagaaaacttttccatggacccacaattggagaggcaagtggagaccattcgcaacctcgtagactcctacatgtccattatcaacaaatgtatccgagatctaattccaaaaacaataatgcaccttatgatcaataacgttaaagatttcataaattccgagctcctagcacagttgtattcttcagaggaccaaaataccctgatggaggaatctgctgagcaggctcagcgccgggatgagatgcttcgaatgtatcaagcactgaaagaagcccttgggataattggggacatcagcacggccaccgtgtccactccggcaccccctccagtggatgactcctggatacagcactctcgcaggtcacctcctccaagccccacaacccaaaggaggccaacactaagtgctcccctcgcaaggcccacatccggccgaggaccagctcctgccattccctctcctggcccccactctggggctcctccagtcccattccgtccaggcccattacctcctttccccagcagcagtgactccttcggagcccctccacaagttccatctaggcctacgagggccccgcccagtgtcccaagccggagaccacccccatcaccaactcgtcccactataatccgcccactagaatcctccctgttagactaaacgaagtgtctggcatggcaattaatcactaatgaattatgcgaaagcaacatatttgataaccgttgcagtaaatcatgagtagtcgcatgtgtggacatcagtaggcaagtaaccagttttactaatgcattcatcgctcatcttcattgctcatggtatgtcaaacctttggggtttgactcagaaactgctaaccttttagaggctttatatgttgtactgaccaaggtaggtttgtatagcagccctatactttggggatcatttgcctaccatggcatatatttgaaattgctttggacaagttttctaggctatctaccaggtagctcattaaacgtaattcttcagatatgagatagtgggcttagacctaagccatacatatttcttttcccacattctgtttaggatgacagtaattctgttgtctaccattaatgctactacctactccataattgcctatttagctcctcttttcttcctttttatttcataagactgctaggaagtgattttttaaaattaggactccttaagaataaacttttccagaagcacgaggtagtttgcaaaggaaaagtctgcactgtttgctctaaagagcttctcctcattccaatgtgttttgcttcatgctagaagcatatgcaacagtgaataaaagcttctttttttgttaatcagtcaataaatttggctaattagtttcagagttcaaggaagaagcaaaatatcacatctctagaagtgttgggaaaaatataatttctttctttacttatattcacctcatggtaggttatattgaaggctgacatggagaatgtttacttttctatttggcatagctaactacactttgatactaactccagttttactattattattttggttggaaaaaaaattcactctttacgtgctaatttgtaatcttgttttgtaagaatttatcctacccttgaaacaggctcagtgtaactgtatatccattctaggctttcttaataaatcttgaggctatgggataatcacatttaaagaatggttcctgaaatgaagtcagtagaaatggcatgggataagagcagagctcacacttttacagttgcagtatttcaaagtccctatccaggtcactccagaaaagggtattgaaacgttgaaatctaaagcaaatttgcaatttcttaagatttctaaaatttaccagaacagtttagcctgggggttaatagttaagtcttgaggctaagttttggactaccaaggaccagatgattcacatgtaggaaacagccagaagccaactggaattttgtgtgctaactgttcccagacagcagagcaagtattcactgagtaggggtgtcccatgacactatttcatattctacagaagtaaatcaggtttcaccaactgaaatgtctccctttgaaagtagcaaacatgatttgtatgttaacttaactttaatttcctgtgtagtttacacccagagcagatactcataaagtataaagtaaaaacttttaaccattattaaacagagaacttgccatgttgagtgccattgtattgaacttattctaaaggcttatgctaacccatttataattggtaaaaatcagaaaatacaagatttacataaaggtcatttcaacttttaaggttaccagtgattgtataaaaacatcacaatcctaaatcctctcgtatctcaccccaaaccccaaactgggggaaaaaaagttaactctttgtgaatggaaccaatgtgcaagatacatactgcatttttaaaatagtgtctcagctaaatggaaaactgttaagcaaacatccatagtaaaacaaataatcttcagtgagatctttttataaaacttcttgtttttaggattccctttgcttcttcctttgaattctctaaaataggcagctaacggattatatacttcagggtttggctttgtgctaaatgtggttttgtgttttgctgtatttcaaaattttccttctgttaaaggaaaatattgtgaataaccactggtgtgttcttagatcagcacaaaccatgtcaaaaaaaattggagatttttttccaattttccttccactgatcttaggcagtaataaacaatggcatttgtcatctttggcacttgcttttagattatagtcccacagttgcactgccccaattgtctacctttgtgggtacatttttgttctttactcctaagttatttctcatagaacccagcctactctagaatttcagcagtgacattggagaatatttttaatttgctgcagtactatgtcatattattagtatgaatctcatttcccaaagggtttgtattctgctaaaaggagatgccaatgttgaatgaagtctgaaactctagtatgtgcatagtttgacgtgcagcatgcacaccaggccttaagatgggaatgtagcttaatgattttctgtttcccataccatttctaatcttttgtgtaattttctcttaactgattgctctgatattgtaaacacaatagatgtagctctatcatgtctagcataatttaaaaaatcagtgtttttaggatttgggaaaataaactgtaaatgtttatttgataggtaaatatagttttattgtcacatgctaaatattgcatgcatattgactaattggaataaccatttactcaattatggacagcttattgaaatagtattgatttagaaaaagtatattgcatttctaaaaaacatctaccaaggttactcgtctgaatattgcttttagccgtgttttataacatagacgagcagtagggtctgtttattagcaaatttcctatttgttccaatacaaactcactttattctaaagtatattaatgaaaccagttcctgtgatgtaactgtaagccttctcgacttagacttaaaaagtggtcacatagattaattttgtgactttttagtatagactgtagccataattctcaaatatgaaatgggacctaataccagtatgtgataaatgttgatgttttctgtgtacaaacacattttctatgcatgtgtctctgtgtatatggcatatacctagtaagtatgtttctgtaagtatgtgtattttatgtccatttgagtaggtaggtaggttttaaaaatactagttaaaatgccacaagcatgagtgtgattgtatgtgcactgtgtgtatatatataaatatatgtatatgtatggttgtaaatatctatgtatacatgtacttagtatgtgtggtatcaggatattttttaaactgtgataatacaacagatagctttgaatgatctgccataacatgtggtaacaatagttcatttctcataacatatatgaggtatacaaaattttctaactccagattgtagtcattttgagaggtacaaagctcataattaccatgacaacatggtaatgtccatagacatttgtatctgaatccacaagaagatctgaatctaagaaggaattacctttgacaatatttttcggtaagaagtaaaacctctggagacctatctttaagatctctaattggaattataaattatttttggattgctgagctgaatcttaaaaagccaagttgatatacatagtcatttttcctctatggtagaagtaaaaaaaaaaaaaaaggacatagcaacattaaagtagtggatttttctgagtaaatttgctgaaaatataagagagaagctatctaataccttggaggtaggtcatccactttttcaggtaaacatttttcatttggcaaatggcataattatttgaaagtgacaggaatctcctcagaatgaagaataaagcctaataggtctctaactgttgaactcatgaaagaagatagtgtatgagacttaagccatgagttttgtatcatttcaattagaagactactagctgtgagctcagagtttaatgtaaatgaatctagatgattttgaagaaatgattattcgttcaccagatcactcattgtacattctaaaaagctcaaatgagtcttctagatactcttactcatcctgtctggttgctatgtttaaaattatgtggtgctgtgtaggtgaaactttaagaatatttttgaagcatatgtaatatatgcactgctatttgtgtgtgtgtgtgtgtctttgtatatatgtaagaatgtgtgtatgtgtgagagcaagagagaggaaactcaaagaggagtgtttgtcttaagacctgttcatactggtatattggtgagacttctcacttctggttggaggtttcacatatggctcaactcaagtcattaatctctttttaatttttactcttgaattccttaaacttcgctcattatgaaatgttttaaaattatgacaaaaattactctgtctaaccacttgccttgtctgctaccagtttgttaaaaattattccccccaaccagtaattccaccagtactacttgatttgtgttatatttcctatgtacatgtacagcctttgttttgcttgcttgtctatttttactttcccttttttgggtcaaatttttcttttgctttgtttgaagaaggaatatacagaagtaaaatcttgtcttctctgctgattctttaattaatatgagccggatactttccactgtcttcttggcactttcaggatttcttaatgctgatatatggactcttagaatggaatttttgaagaaaaatctcaaagcctgtatcgttcttgaaggtcacatgtacctattgtgaaaatgtgaagctgtatttctgaagctgaaataaattataacatttgaag

SEQ ID NO: 133 - DNA, 7697 bp, Homo sapiens
gcgcaggcgcgctgcgggtcgttagctgtcagagccaagcggcgggctggcggcgggctccgacgtctgcgccaggacctggctggctgagcccggcgcagcagcagcagccagggcagcgcggcccctactccctgtcaggtcgtagaggcgagcagggaccagctggtcgccggcccctcgggcaagatggggaaccgggagatggaggagctgatcccgctggtgaaccgtctgcaggacgcgttttcggcgctgggacagagctgcctgctggagctgccgcagatcgccgtggtgggcggccagagcgccggcaagagctcggtgctcgagaacttcgtgggcagggactttctccctcgagggtcgggcattgtaacaagacgacctcttgtgctgcagcttgttacttctaaagcagaatatgccgagtttctacattgcaaaggaaagaaatttacagattttgatgaagttcgccttgagattgaagcagaaacagatcgcgtgactggaatgaataaaggcatttcctccatacccattaatttacgagtctattccccacacgcattgaaggtgtatgtaagactcctttatcctttccacacagtgttaaatctaacccttattgatctacctggaataactaaagtgcctgtgggagatcagccaccagatatcgagtatcagatcagagaaatgattatgcagttcatcacgagggagaactgtctgattttagctgttactccagccaacactgatcttgcaaactcagatgcgctgaagctagctaaagaagttgatcctcaagtttatgatgcaggtctgagaaccattggagttatcaccaaactggaccttatggatgaaggaacggatgccagggatgttctagagaacaaactgttgcctcttcgcaggggttacgtgggggtggtaaacagaagccagaaggacatagatgggaagaaggacataaaggcagccatgctggcagagaggaagtttttcctttcccacccggcttacagacatatcgctgaccgaatgggaaccccacacctgcagaaggtccttaatcagcaacttaccaaccacattcgggataccctaccaaacttcaggaacaaactacagggacagttgctctccatagaacatgaagtagaagcctacaaaaatttcaaaccagaagacccaacaaggaagaccaaagcattgctgcagatggttcagcaatttgctgtggactttgagaagagaattgaagggtcaggggatcaagtagataccctggaactctcaggtggtgctaaaatcaatcgtatttttcatgaacgctttccttttgagatagtaaagatggagttcaatgagaaagaattgcgaagagaaataagctatgcaatcaaaaacatacatggtatcaggacagggttgtttactccagacatggcatttgaagcgatagtcaagaaacagattgtaaagttgaaagggccttccttgaagagtgtggatctggtaatacaagaattaatcaacactgtgaagaagtgtaccaaaaaactggcaaacttccccagactctgcgaggaaacggaaaggattgttgctaaccacattcgtgagcgagaagggaagacaaaggaccaggtattgctattgattgacattcaagtctcttacatcaacaccaaccatgaagacttcattggcttcgcaaatgctcagcagaggagcagtcaggttcacaagaaaaccacagttggaaatcaggtgattcgcaaggggtggctcaccatcagcaacattggcatcatgaaaggcggctcgaagggatactggttcgtccttactgcggaaagcttgtcctggtataaagatgatgaggaaaaagaaaagaagtacatgcttcccttggacaacctgaaagttcgggatgtggaaaagagctttatgtctagcaagcacatctttgcactctttaatacagagcaaaggaatgtatacaaagactatcgcttccttgagctggcatgtgattcccaggaggatgtcgacagctggaaggcatctctactaagagctggggtctatcctgacaaatctgtagctgaaaatgatgagaatggacaagcagaaaacttttccatggacccacaattggagaggcaagtggagaccattcgcaacctcgtagactcctacatgtccattatcaacaaatgtatccgagatctaattccaaaaacaataatgcaccttatgatcaataacgttaaagatttcataaattccgagctcctagcacagttgtattcttcagaggaccaaaataccctgatggaggaatctgctgagcaggctcagcgccgggatgagatgcttcgaatgtatcaagcactgaaagaagcccttgggataattggggacatcagcacggccaccgtgtccactccggcaccccctccagtggatgactcctggatacagcactctcgcaggtcacctcctccaagccccacaacccaaaggaggccaacactaagtgctcccctcgcaaggcccacatccggccgaggaccagctcctgccattccctctcctggcccccactctggggctcctccagtcccattccgtccaggcccattacctcctttccccagcagcagtgactccttcggagcccctccacaagttccatctaggcctacgagggccccgcccagtgtcccaagccggagaccacccccatcaccaactcgtcccactataatccgcccactagaatcctccctgttagactaaacgaagtgtctggcatggcaattaatcactaatgaattatgcgaaagcaacatatttgataaccgttgcagtaaatcatgagtagtcgcatgtgtggacatcagtaggcaagtaaccagttttactaatgcattcatcgctcatcttcattgctcatggtatgtcaaacctttggggtttgactcagaaactgctaaccttttagaggctttatatgttgtactgaccaaggtaggtttgtatagcagccctatactttggggatcatttgcctaccatggcatatatttgaaattgctttggacaagttttctaggctatctaccaggtagctcattaaacgtaattcttcagatatgagatagtgggcttagacctaagccatacatatttcttttcccacattctgtttaggatgacagtaattctgttgtctaccattaatgctactacctactccataattgcctatttagctcctcttttcttcctttttatttcataagactgctaggaagtgattttttaaaattaggactccttaagaataaacttttccagaagcacgaggtagtttgcaaaggaaaagtctgcactgtttgctctaaagagcttctcctcattccaatgtgttttgcttcatgctagaagcatatgcaacagtgaataaaagcttctttttttgttaatcagtcaataaatttggctaattagtttcagagttcaaggaagaagcaaaatatcacatctctagaagtgttgggaaaaatataatttctttctttacttatattcacctcatggtaggttatattgaaggctgacatggagaatgtttacttttctatttggcatagctaactacactttgatactaactccagttttactattattattttggttggaaaaaaaattcactctttacgtgctaatttgtaatcttgttttgtaagaatttatcctacccttgaaacaggctcagtgtaactgtatatccattctaggctttcttaataaatcttgaggctatgggataatcacatttaaagaatggttcctgaaatgaagtcagtagaaatggcatgggataagagcagagctcacacttttacagttgcagtatttcaaagtccctatccaggtcactccagaaaagggtattgaaacgttgaaatctaaagcaaatttgcaatttcttaagatttctaaaatttaccagaacagtttagcctgggggttaatagttaagtcttgaggctaagttttggactaccaaggaccagatgattcacatgtaggaaacagccagaagccaactggaattttgtgtgctaactgttcccagacagcagagcaagtattcactgagtaggggtgtcccatgacactatttcatattctacagaagtaaatcaggtttcaccaactgaaatgtctccctttgaaagtagcaaacatgatttgtatgttaacttaactttaatttcctgtgtagtttacacccagagcagatactcataaagtataaagtaaaaacttttaaccattattaaacagagaacttgccatgttgagtgccattgtattgaacttattctaaaggcttatgctaacccatttataattggtaaaaatcagaaaatacaagatttacataaaggtcatttcaacttttaaggttaccagtgattgtataaaaacatcacaatcctaaatcctctcgtatctcaccccaaaccccaaactgggggaaaaaaagttaactctttgtgaatggaaccaatgtgcaagatacatactgcatttttaaaatagtgtctcagctaaatggaaaactgttaagcaaacatccatagtaaaacaaataatcttcagtgagatctttttataaaacttcttgtttttaggattccctttgcttcttcctttgaattctctaaaataggcagctaacggattatatacttcagggtttggctttgtgctaaatgtggttttgtgttttgctgtatttcaaaattttccttctgttaaaggaaaatattgtgaataaccactggtgtgttcttagatcagcacaaaccatgtcaaaaaaaattggagatttttttccaattttccttccactgatcttaggcagtaataaacaatggcatttgtcatctttggcacttgcttttagattatagtcccacagttgcactgccccaattgtctacctttgtgggtacatttttgttctttactcctaagttatttctcatagaacccagcctactctagaatttcagcagtgacattggagaatatttttaatttgctgcagtactatgtcatattattagtatgaatctcatttcccaaagggtttgtattctgctaaaaggagatgccaatgttgaatgaagtctgaaactctagtatgtgcatagtttgacgtgcagcatgcacaccaggccttaagatgggaatgtagcttaatgattttctgtttcccataccatttctaatcttttgtgtaattttctcttaactgattgctctgatattgtaaacacaatagatgtagctctatcatgtctagcataatttaaaaaatcagtgtttttaggatttgggaaaataaactgtaaatgtttatttgataggtaaatatagttttattgtcacatgctaaatattgcatgcatattgactaattggaataaccatttactcaattatggacagcttattgaaatagtattgatttagaaaaagtatattgcatttctaaaaaacatctaccaaggttactcgtctgaatattgcttttagccgtgttttataacatagacgagcagtagggtctgtttattagcaaatttcctatttgttccaatacaaactcactttattctaaagtatattaatgaaaccagttcctgtgatgtaactgtaagccttctcgacttagacttaaaaagtggtcacatagattaattttgtgactttttagtatagactgtagccataattctcaaatatgaaatgggacctaataccagtatgtgataaatgttgatgttttctgtgtacaaacacattttctatgcatgtgtctctgtgtatatggcatatacctagtaagtatgtttctgtaagtatgtgtattttatgtccatttgagtaggtaggtaggttttaaaaatactagttaaaatgccacaagcatgagtgtgattgtatgtgcactgtgtgtatatatataaatatatgtatatgtatggttgtaaatatctatgtatacatgtacttagtatgtgtggtatcaggatattttttaaactgtgataatacaacagatagctttgaatgatctgccataacatgtggtaacaatagttcatttctcataacatatatgaggtatacaaaattttctaactccagattgtagtcattttgagaggtacaaagctcataattaccatgacaacatggtaatgtccatagacatttgtatctgaatccacaagaagatctgaatctaagaaggaattacctttgacaatatttttcggtaagaagtaaaacctctggagacctatctttaagatctctaattggaattataaattatttttggattgctgagctgaatcttaaaaagccaagttgatatacatagtcatttttcctctatggtagaagtaaaaaaaaaaaaaaaggacatagcaacattaaagtagtggatttttctgagtaaatttgctgaaaatataagagagaagctatctaataccttggaggtaggtcatccactttttcaggtaaacatttttcatttggcaaatggcataattatttgaaagtgacaggaatctcctcagaatgaagaataaagcctaataggtctctaactgttgaactcatgaaagaagatagtgtatgagacttaagccatgagttttgtatcatttcaattagaagactactagctgtgagctcagagtttaatgtaaatgaatctagatgattttgaagaaatgattattcgttcaccagatcactcattgtacattctaaaaagctcaaatgagtcttctagatactcttactcatcctgtctggttgctatgtttaaaattatgtggtgctgtgtaggtgaaactttaagaatatttttgaagcatatgtaatatatgcactgctatttgtgtgtgtgtgtgtgtctttgtatatatgtaagaatgtgtgtatgtgtgagagcaagagagaggaaactcaaagaggagtgtttgtcttaagacctgttcatactggtatattggtgagacttctcacttctggttggaggtttcacatatggctcaactcaagtcattaatctctttttaatttttactcttgaattccttaaacttcgctcattatgaaatgttttaaaattatgacaaaaattactctgtctaaccacttgccttgtctgctaccagtttgttaaaaattattccccccaaccagtaattccaccagtactacttgatttgtgttatatttcctatgtacatgtacagcctttgttttgcttgcttgtctatttttactttcccttttttgggtcaaatttttcttttgctttgtttgaagaaggaatatacagaagtaaaatcttgtcttctctgctgattctttaattaatatgagccggatactttccactgtcttcttggcactttcaggatttcttaatgctgatatatggactcttagaatggaatttttgaagaaaaatctcaaagcctgtatcgttcttgaaggtcacatgtacctattgtgaaaatgtgaagctgtatttctgaagctgaaataaattataacatttgaag

SEQ ID NO: 134 - DNA, 2733 bp, Homo sapiens
aggaaaaagtcacaaaagtcagtcatcaatggcccataagggtgaaatccatgaccctcctccagaggcagttcaaactgtaactcctgtggaggttcacataggcacctggtttacaaccacacctgaaggaaatcggatcggcaccaaaggattagaaagaatagcagacttgaccccattgttatcctttcaggccacagatcctgtcaatggaacggttatgacaactcgagaagacaaagttgtcatagttgaaaggaaagatggtactcggatagtggatcatgctgatggtaccagaatcacaaccttttatcaagtttatgaagatcaaattattctgccagatgatcaagaaacaaccgagggtcctcggactgtcaccaggcaggtgaagtgtatgcgggtagaaagctcacgctatgccactgttatcgccaactgtgaggacagtagctgctgtgccacctttggagatggaacaactattattgcaaagccacagggaacataccaggtgttacctccaaacacaggctctctttatattgacaaggattgttcagctgtgtactgccatgagtcaagcagtaatatatactatccttttcaaaagcgtgagcagctgcgagctggcaggtacatcatgaggcatacttcagaggttatctgtgaggttctggatcctgagggaaacacttttcaggtcatggctgatggtagcatatcaactatattacctgaaaaaaaattggaagatgatttaaatgagaaaactgagggctatgatagtctgtcctctatgcaccttgaaaagaatcatcagcaaatctatggtgaacatgtccccaggttttttgttatgtatgctgatggatcaggaatggaacttcttcgagacagtgacatagaagaatatctatctttggcatataaagaatcaaatactgttgttctccaagagccagtgcaggaacagccaggcaccctaaccatcacagtccttcgccctttccatgaagcatcaccatggcaagtaaaaaaggaagatacaattgtccctcctaatctccggtcaaggtcatgggaaacatttccctcagttgagaaaaaaactccaggacctccgtttggtactcagatttggaaaggcctttgcattgagtccaaacagctagtgagtgccccgggtgccatactcaagagccccagtgtgctacagatgcgccaattcattcagcatgaggtcataaagaatgaggtgaaactgaggctgcaggtttcccttaaggattacataaactatattctaaagaaagaagatgagctgcaggaaatgatggttaaagattccagaactgaggaggagagaggcaatgctgctgatctcctcaagctggttatgtataatcacctggacagtctttccaaaaaactgccttcttttacaaagaaaaatgaagatgcaaacgaaacagctgttcaagatacatctgatcttaatctagaatccctgcctcttaatggctttcttatatttagtctttctaaagagagtggcagaaaaggtacctcattcattgtaaaacaccttcttcaatgtttgttcatgcaaacattagtagtcattatatcattttacaaaatatcactttataaggttcattttgggttttctagatttcaagccacataaggtttcagaacagaaatcctcaagtgtgcctagtcttccaaaaccagagatttctgcagataagaaggatttcactgctcagaaccaaactgaaaatttaacaaaatctcctgaagaagcagaatcttatgagcccgtgaaaattccaacccagtccttgctgcaggatgttgcgggacaaacaagaaaagaaaaagtgaagttgcctcattatttgctgagttccaagcctaagtctcaacctcttgcaaaggtgcaagattctgttggaggaaaagtgaacacatcctctgttgcatctgctgccattaataatgcaaagtcatccctttttgggttccatcttctcccatcatcagtcaagtttggagtgcttaaggaaggacatacctatgccacagttgtaaagctcaagaatgttggagtggacttctgcaggtttaaagtaaagcagcccccacccagcacaggactgaaagtgacttacaaacctggacctgtggcagctggtatgcagacagaactgaatatagagttatttgccacagctgttggagaggatggggccaagggatcagcacacatctctcacaatatcgagattatgacagagcatgagtgtcttcagccaaacagatattagatagatatcaagaacctattacctccaagatgccgaaacgcctgcctttatgtagcttacattccagtgggaggacagacaatacataaacaattatgataaacgaccaaaagactttccccagggaaaagaaaatccaatggtccagagaacttctacaatttattcctccacacttggagtcttcatgtctcgtaaagtttctccacattagtttcttctcggtacaactcaatagcctccataatcctctcagcctacagaggatgagaaaggaaagaagtcatcacaacatactccatcatcccaggacactgaaactggaagaactgaccagaaatttgccaaatgaaatagcttcaatctgtttaataaagacgtgcgaatagag

SEQ ID NO: 135 - DNA, 12678 bp, Homo sapiens
gggcgggaggactcgactcggtgggagccgctagagccgggcgcccggggacgtagcctgtagggccaccgggtccccgtcagaggcggcggcgggagcagcggggactgcaggccggggtgcagcgaacgcgaccccgcgggctgcggcccggtgtgtgcggagcgtggcgggcgcagcttaccgggcggaggtgagcgcggcgccggctcctcctgcggcggactttgggtgcgacttgacgagcggtggttcgacaagtggccttgcgggccggatcgtcccagtggaagagttgtaaatttgcttctggccttcccctacggattatacctggccttcccctacggattatactcaacttactgtttagaaaatgtggcccacgagacgcctggttactatcaaaaggagcggggtcgacggtccccactttcccctgagcctcagcacctgcttgtttggaaggggtattgaatgtgacatccgtatccagcttcctgttgtgtcaaaacaacattgcaaaattgaaatccatgagcaggaggcaatattacataatttcagttccacaaatccaacacaagtaaatgggtctgttattgatgagcctgtacggctaaaacatggagatgtaataactattattgatcgttccttcaggtatgaaaatgaaagtcttcagagtggaaggaagtcaactgaatttccaagaaaaatacgtgaacaggagccagcacgtcgtgtctcaagatctagcttctcttctgaccctgatgagaaagctcaagattccaaggcctattcaaaaatcactgaaggaaaagtttcaggaaatcctcaggtacatatcaagaatgtcaaagaagacagtaccgcagatgactcaaaagacagtgttgctcagggaacaactaatgttcattcctcagaacatgctggacgtaatggcagaaatgcagctgatcccatttctggggattttaaagaaatttccagcgttaaattagtgagccgttatggagaattgaagtctgttcccactacacaatgtcttgacaatagcaaaaaaaatgaatctcccttttggaagctttatgagtcagtgaagaaagagttggatgtaaaatcacaaaaagaaaatgtcctacagtattgtagaaaatctggattacaaactgattacgcaacagagaaagaaagtgctgatggtttacagggggagacccaactgttggtctcgcgtaagtcaagaccaaaatctggtgggagcggccacgctgtggcagagcctgcttcacctgaacaagagcttgaccagaacaaggggaagggaagagacgtggagtctgttcagactcccagcaaggctgtgggcgccagctttcctctctatgagccggctaaaatgaagacccctgtacaatattcacagcaacaaaattctccacaaaaacataagaacaaagacctgtatactactggtagaagagaatctgtgaatctgggtaaaagtgaaggcttcaaggctggtgataaaactcttactcccaggaagctttcaactagaaatcgaacaccagctaaagttgaagatgcagctgactctgccactaagccagaaaatctctcttccaaaaccagaggaagtattcctacagatgtggaagttctgcctacggaaactgaaattcacaatgagccatttttaactctgtggctcactcaagttgagaggaagatccaaaaggattccctcagcaagcctgagaaattgggcactacagctggacagatgtgctctgggttacctggtcttagttcagttgatatcaacaactttggtgattccattaatgagagtgacggaatacctttgaaaagaaggcgtgtgtcctttggtgggcacctaagacctgaactatttgatgaaaacttgcctcctaatacgcctctcaaaaggggagaagccccaaccaaaagaaagtctctggtaatgcacactccacctgtcctgaagaaaatcatcaaggaacagcctcaaccatcaggaaaacaagagtcaggttcagaaatccatgtggaagtgaaggcacaaagcttggttataagccctccagctcctagtcctaggaaaactccagttgccagtgatcaacgccgtaggtcctgcaaaacagcccctgcttccagcagcaaatctcagacagaggttcctaagagaggagggagaaagagtggcaacctgccttcaaagagagtgtctatcagccgaagtcaacatgatattttacagatgatatgttccaaaagaagaagtggtgcttcggaagcaaatctgattgttgcaaaatcatgggcagatgtagtaaaacttggtgcaaaacaaacacaaactaaagtcataaaacatggtcctcaaaggtcaatgaacaaaaggcaaagaagacctgctactccaaagaagcctgtgggcgaagttcacagtcaatttagtacaggccacgcaaactctccttgtaccataataatagggaaagctcatactgaaaaagtacatgtgcctgctcgaccctacagagtgctcaacaacttcatttccaaccaaaaaatggactttaaggaagatctttcaggaatagctgaaatgttcaagaccccagtgaaggagcaaccgcagttgacaagcacatgtcacatcgctatttcaaattcagagaatttgcttggaaaacagtttcaaggaactgattcaggagaagaacctctgctccccacctcagagagttttggaggaaatgtgttcttcagtgcacagaatgcagcaaaacagccatctgataaatgctctgcaagccctcccttaagacggcagtgtattagagaaaatggaaacgtagcaaaaacgcccaggaacacctacaaaatgacttctctggagacaaaaacttcagatactgagacagagccttcaaaaacagtatccactgcaaacaggtcaggaaggtctacagagttcaggaatatacagaagctacctgtggaaagtaagagtgaagaaacaaatacagaaattgttgagtgcatcctaaaaagaggtcagaaggcaacactactacaacaaaggagagaaggagagatgaaggaaatagaaagaccttttgagacatataaggaaaatattgaattaaaagaaaacgatgaaaagatgaaagcaatgaagagatcaagaacttgggggcagaaatgtgcaccaatgtctgacctgacagacctcaagagcttgcctgatacagaactcatgaaagacacggcacgtggccagaatctcctccaaacccaagatcatgccaaggcaccaaagagtgagaaaggcaaaatcactaaaatgccctgccagtcattacaaccagaaccaataaacaccccaacacacacaaaacaacagttgaaggcatccctggggaaagtaggtgtgaaagaagagctcctagcagtcggcaagttcacacggacgtcaggggagaccacgcacacgcacagagagccagcaggagatggcaagagcatcagaacgtttaaggagtctccaaagcagatcctggacccagcagcccgtgtaactggaatgaagaagtggccaagaacgcctaaggaagaggcccagtcactagaagacctggctggcttcaaagagctcttccagacaccaggtccctctgaggaatcaatgactgatgagaaaactaccaaaatagcctgcaaatctccaccaccagaatcagtggacactccaacaagcacaaagcaatggcctaagagaagtctcaggaaagcagatgtagaggaagaattcttagcactcaggaaactaacaccatcagcagggaaagccatgcttacgcccaaaccagcaggaggtgatgagaaagacattaaagcatttatgggaactccagtgcagaaactggacctggcaggaactttacctggcagcaaaagacagctacagactcctaaggaaaaggcccaggctctagaagacctggctggctttaaagagctcttccagactcctggtcacaccgaggaattagtggctgctggtaaaaccactaaaataccctgcgactctccacagtcagacccagtggacaccccaacaagcacaaagcaacgacccaagagaagtatcaggaaagcagatgtagagggagaactcttagcgtgcaggaatctaatgccatcagcaggcaaagccatgcacacgcctaaaccatcagtaggtgaagagaaagacatcatcatatttgtgggaactccagtgcagaaactggacctgacagagaacttaaccggcagcaagagacggccacaaactcctaaggaagaggcccaggctctggaagacctgactggctttaaagagctcttccagacccctggtcatactgaagaagcagtggctgctggcaaaactactaaaatgccctgcgaatcttctccaccagaatcagcagacaccccaacaagcacaagaaggcagcccaagacacctttggagaaaagggacgtacagaaggagctctcagccctgaagaagctcacacagacatcaggggaaaccacacacacagataaagtaccaggaggtgaggataaaagcatcaacgcgtttagggaaactgcaaaacagaaactggacccagcagcaagtgtaactggtagcaagaggcacccaaaaactaaggaaaaggcccaacccctagaagacctggctggcttgaaagagctcttccagacaccagtatgcactgacaagcccacgactcacgagaaaactaccaaaatagcctgcagatcacaaccagacccagtggacacaccaacaagctccaagccacagtccaagagaagtctcaggaaagtggacgtagaagaagaattcttcgcactcaggaaacgaacaccatcagcaggcaaagccatgcacacacccaaaccagcagtaagtggtgagaaaaacatctacgcatttatgggaactccagtgcagaaactggacctgacagagaacttaactggcagcaagagacggctacaaactcctaaggaaaaggcccaggctctagaagacctggctggctttaaagagctcttccagacacgaggtcacactgaggaatcaatgactaacgataaaactgccaaagtagcctgcaaatcttcacaaccagacccagacaaaaacccagcaagctccaagcgacggctcaagacatccctggggaaagtgggcgtgaaagaagagctcctagcagttggcaagctcacacagacatcaggagagactacacacacacacacagagccaacaggagatggtaagagcatgaaagcatttatggagtctccaaagcagatcttagactcagcagcaagtctaactggcagcaagaggcagctgagaactcctaagggaaagtctgaagtccctgaagacctggccggcttcatcgagctcttccagacaccaagtcacactaaggaatcaatgactaacgaaaaaactaccaaagtatcctacagagcttcacagccagacctagtggacaccccaacaagctccaagccacagcccaagagaagtctcaggaaagcagacactgaagaagaatttttagcatttaggaaacaaacgccatcagcaggcaaagccatgcacacacccaaaccagcagtaggtgaagagaaagacatcaacacgtttttgggaactccagtgcagaaactggaccagccaggaaatttacctggcagcaatagacggctacaaactcgtaaggaaaaggcccaggctctagaagaactgactggcttcagagagcttttccagacaccatgcactgataaccccacgactgatgagaaaactaccaaaaaaatactctgcaaatctccgcaatcagacccagcggacaccccaacaaacacaaagcaacggcccaagagaagcctcaagaaagcagacgtagaggaagaatttttagcattcaggaaactaacaccatcagcaggcaaagccatgcacacgcctaaagcagcagtaggtgaagagaaagacatcaacacatttgtggggactccagtggagaaactggacctgctaggaaatttacctggcagcaagagacggccacaaactcctaaagaaaaggccaaggctctagaagatctggctggcttcaaagagctcttccagacaccaggtcacactgaggaatcaatgaccgatgacaaaatcacagaagtatcctgcaaatctccacaaccagacccagtcaaaaccccaacaagctccaagcaacgactcaagatatccttggggaaagtaggtgtgaaagaagaggtcctaccagtcggcaagctcacacagacgtcagggaagaccacacagacacacagagagacagcaggagatggaaagagcatcaaagcgtttaaggaatctgcaaagcagatgctggacccagcaaactatggaactgggatggagaggtggccaagaacacctaaggaagaggcccaatcactagaagacctggccggcttcaaagagctcttccagacaccagaccacactgaggaatcaacaactgatgacaaaactaccaaaatagcctgcaaatctccaccaccagaatcaatggacactccaacaagcacaaggaggcggcccaaaacacctttggggaaaagggatatagtggaagagctctcagccctgaagcagctcacacagaccacacacacagacaaagtaccaggagatgaggataaaggcatcaacgtgttcagggaaactgcaaaacagaaactggacccagcagcaagtgtaactggtagcaagaggcagccaagaactcctaagggaaaagcccaacccctagaagacttggctggcttgaaagagctcttccagacaccaatatgcactgacaagcccacgactcatgagaaaactaccaaaatagcctgcagatctccacaaccagacccagtgggtaccccaacaatcttcaagccacagtccaagagaagtctcaggaaagcagacgtagaggaagaatccttagcactcaggaaacgaacaccatcagtagggaaagctatggacacacccaaaccagcaggaggtgatgagaaagacatgaaagcatttatgggaactccagtgcagaaattggacctgccaggaaatttacctggcagcaaaagatggccacaaactcctaaggaaaaggcccaggctctagaagacctggctggcttcaaagagctcttccagacaccaggcactgacaagcccacgactgatgagaaaactaccaaaatagcctgcaaatctccacaaccagacccagtggacaccccagcaagcacaaagcaacggcccaagagaagcctcaggaaagcagacgtagaggaagaatttttagcactcaggaaacgaacaccatcagcaggcaaagccatggacacaccaaaaccagcagtaagtgatgagaaaaatatcaacacatttgtggaaactccagtgcagaaactggacctgctaggaaatttacctggcagcaagagacagccacagactcctaaggaaaaggctgaggctctagaggacctggttggcttcaaagaactcttccagacaccaggtcacactgaggaatcaatgactgatgacaaaatcacagaagtatcctgtaaatctccacagccagagtcattcaaaacctcaagaagctccaagcaaaggctcaagatacccctggtgaaagtggacatgaaagaagagcccctagcagtcagcaagctcacacggacatcaggggagactacgcaaacacacacagagccaacaggagatagtaagagcatcaaagcgtttaaggagtctccaaagcagatcctggacccagcagcaagtgtaactggtagcaggaggcagctgagaactcgtaaggaaaaggcccgtgctctagaagacctggttgacttcaaagagctcttctcagcaccaggtcacactgaagagtcaatgactattgacaaaaacacaaaaattccctgcaaatctcccccaccagaactaacagacactgccacgagcacaaagagatgccccaagacacgtcccaggaaagaagtaaaagaggagctctcagcagttgagaggctcacgcaaacatcagggcaaagcacacacacacacaaagaaccagcaagcggtgatgagggcatcaaagtattgaagcaacgtgcaaagaagaaaccaaacccagtagaagaggaacccagcaggagaaggccaagagcacctaaggaaaaggcccaacccctggaagacctggccggcttcacagagctctctgaaacatcaggtcacactcaggaatcactgactgctggcaaagccactaaaataccctgcgaatctcccccactagaagtggtagacaccacagcaagcacaaagaggcatctcaggacacgtgtgcagaaggtacaagtaaaagaagagccttcagcagtcaagttcacacaaacatcaggggaaaccacggatgcagacaaagaaccagcaggtgaagataaaggcatcaaagcattgaaggaatctgcaaaacagacaccggctccagcagcaagtgtaactggcagcaggagacggccaagagcacccagggaaagtgcccaagccatagaagacctagctggcttcaaagacccagcagcaggtcacactgaagaatcaatgactgatgacaaaaccactaaaataccctgcaaatcatcaccagaactagaagacaccgcaacaagctcaaagagacggcccaggacacgtgcccagaaagtagaagtgaaggaggagctgttagcagttggcaagctcacacaaacctcaggggagaccacgcacaccgacaaagagccggtaggtgagggcaaaggcacgaaagcatttaagcaacctgcaaagcggaagctggacgcagaagatgtaattggcagcaggagacagccaagagcacctaaggaaaaggcccaacccctggaagatctggccagcttccaagagctctctcaaacaccaggccacactgaggaactggcaaatggtgctgctgatagctttacaagcgctccaaagcaaacacctgacagtggaaaacctctaaaaatatccagaagagttcttcgggcccctaaagtagaacccgtgggagacgtggtaagcaccagagaccctgtaaaatcacaaagcaaaagcaacacttccctgcccccactgcccttcaagaggggaggtggcaaagatggaagcgtcacgggaaccaagaggctgcgctgcatgccagcaccagaggaaattgtggaggagctgccagccagcaagaagcagagggttgctcccagggcaagaggcaaatcatccgaacccgtggtcatcatgaagagaagtttgaggacttctgcaaaaagaattgaacctgcggaagagctgaacagcaacgacatgaaaaccaacaaagaggaacacaaattacaagactcggtccctgaaaataagggaatatccctgcgctccagacgccaaaataagactgaggcagaacagcaaataactgaggtctttgtattagcagaaagaatagaaataaacagaaatgaaaagaagcccatgaagacctccccagagatggacattcagaatccagatgatggagcccggaaacccatacctagagacaaagtcagtgagaacaaaaggtgcttgaggtctgctagacagaatgagagctcccagcctaaggtggcagaggagagcggagggcagaagagtgcgaaggttctcatgcagaatcagaaagggaaaggagaagcaggaaattcagactccatgtgcctgagatcaagaaagacaaaaagccagcctgcagcaagcactttggagagcgaatctgtgcagagagtaacgcggagtgtcaagagatgtgcagaaaatccaaagaaggctgaggacaatgtgtgtgtcaagaaaataagaaccagaagtcatagggacagtgaagatatttgacagaaaaatcgaactgggaaaaatataataaagttagttttgtgataagttctagtgcagtttttgtcataaattacaagtgaattctgtaagtaaggctgtcagtctgcttaagggaagaaaactttggatttgctgggtctgaatcggcttcataaactccactgggagcactgctgggctcctggactgagaatagttgaacaccgggggctttgtgaaggagtctgggccaaggtttgccctcagctttgcagaatgaagccttgaggtctgtcaccacccacagccaccctacagcagccttaactgtgacacttgccacactgtgtcgtcgtttgtttgcctatgtcctccagggcacggtggcaggaacaactatcctcgtctgtcccaacactgagcaggcactcggtaaacacgaatgaatggatgagcgcacggatgaatggagcttacaagatctgtctttccaatggccgggggcatttggtccccaaattaaggctattggacatctgcacaggacagtcctatttttgatgtcctttcctttctgaaaataaagttttgtgctttggagaatgactcgtgagcacatctttagggaccaagagtgactttctgtaaggagtgactcgtggcttgccttggtctcttgggaatacttttctaactagggttgctctcacctgagacattctccacccgcggaatctcagggtcccaggctgtgggccatcacgacctcaaactggctcctaatctccagctttcctgtcattgaaagcttcggaagtttactggctctgctcccgcctgttttctttctgactctatctggcagcccgatgccacccagtacaggaagtgacaccagtactctgtaaagcatcatcatccttggagagactgagcactcagcaccttcagccacgatttcaggatcgcttccttgtgagccgctgcctccgaaatctcctttgaagcccagacatctttctccagcttcagacttgtagatataactcgttcatcttcatttactttccactttgccccctgtcctctctgtgttccccaaatcagagaatagcccgccatcccccaggtcacctgtctggattcctccccattcacccaccttgccaggtgcaggtgaggatggtgcaccagacagggtagctgtcccccaaaatgtgccctgtgcgggcagtgccctgtctccacgtttgtttccccagtgtctggcggggagccaggtgacatcataaatacttgctgaatgaatgcagaaatcagcggtactgacttgtactatattggctgccatgatagggttctcacagcgtcatccatgatcgtaagggagaatgacattctgcttgagggagggaatagaaaggggcagggaggggacatctgagggcttcacagggctgcaaagggtacagggattgcaccagggcagaacaggggagggtgttcaaggaagagtggctcttagcagaggcactttggaaggtgtgaggcataaatgcttccttctacgtaggccaacctcaaaactttcagtaggaatgttgctatgatcaagttgttctaacactttagacttagtagtaattatgaacctcacatagaaaaatttcatccagccatatgcctgtggagtggaatattctgtttagtagaaaaatcctttagagttcagctctaaccagaaatcttgctgaagtatgtcagcaccttttctcaccctggtaagtacagtatttcaagagcacgctaagggtggttttcattttacagggctgttgatgatgggttaaaaatgttcatttaagggctacccccgtgtttaatagatgaacaccacttctacacaaccctccttggtactgggggagggagagatctgacaaatactgcccattcccctaggctgactggatttgagaacaaatacccacccatttccaccatggtatggtaacttctctgagcttcagtttccaagtgaatttccatgtaataggacattcccattaaatacaagctgtttttactttttcgcctcccagggcctgtgggatctggtcccccagcctctcttgggctttcttacactaactctgtacctaccatctcctgcctcccttaggcaggcacctccaaccaccacacactccctgctgttttccctgcctggaactttccctcctgccccaccaagatcatttcatccagtcctgagctcagcttaagggaggcttcttgcctgtgggttccctcacccccatgcctgtcctccaggctggggcaggttcttagtttgcctggaattgttctgtacctctttgtagcacgtagtgttgtggaaactaagccactaattgagtttctggctcccctcctggggttgtaagttttgttcattcatgagggccgactgtatttcctggttactgtatcccagtgaccagccacaggagatgtccaataaagtatgtgatgaaatggtcttaaaa

SEQ ID NO: 136 - DNA, 11602 bp, Homo sapiens
gggcgggaggactcgactcggtgggagccgctagagccgggcgcccggggacgtagcctgtagggccaccgggtccccgtcagaggcggcggcgggagcagcggggactgcaggccggggtgcagcgaacgcgaccccgcgggctgcggcccggtgtgtgcggagcgtggcgggcgcagcttaccgggcggaggtgagcgcggcgccggctcctcctgcggcggactttgggtgcgacttgacgagcggtggttcgacaagtggccttgcgggccggatcgtcccagtggaagagttgtaaatttgcttctggccttcccctacggattatacctggccttcccctacggattatactcaacttactgtttagaaaatgtggcccacgagacgcctggttactatcaaaaggagcggggtcgacggtccccactttcccctgagcctcagcacctgcttgtttggaaggggtattgaatgtgacatccgtatccagcttcctgttgtgtcaaaacaacattgcaaaattgaaatccatgagcaggaggcaatattacataatttcagttccacaaatccaacacaagtaaatgggtctgttattgatgagcctgtacggctaaaacatggagatgtaataactattattgatcgttccttcaggtatgaaaatgaaagtcttcagagtggaaggaagtcaactgaatttccaagaaaaatacgtgaacaggagccagcacgtcgtgtctcaagatctagcttctcttctgaccctgatgagaaagctcaagattccaaggcctattcaaaaatcactgaaggaaaagtttcaggaaatacctgaactatttgatgaaaacttgcctcctaatacgcctctcaaaaggggagaagccccaaccaaaagaaagtctctggtaatgcacactccacctgtcctgaagaaaatcatcaaggaacagcctcaaccatcaggaaaacaagagtcaggttcagaaatccatgtggaagtgaaggcacaaagcttggttataagccctccagctcctagtcctaggaaaactccagttgccagtgatcaacgccgtaggtcctgcaaaacagcccctgcttccagcagcaaatctcagacagaggttcctaagagaggagggagaaagagtggcaacctgccttcaaagagagtgtctatcagccgaagtcaacatgatattttacagatgatatgttccaaaagaagaagtggtgcttcggaagcaaatctgattgttgcaaaatcatgggcagatgtagtaaaacttggtgcaaaacaaacacaaactaaagtcataaaacatggtcctcaaaggtcaatgaacaaaaggcaaagaagacctgctactccaaagaagcctgtgggcgaagttcacagtcaatttagtacaggccacgcaaactctccttgtaccataataatagggaaagctcatactgaaaaagtacatgtgcctgctcgaccctacagagtgctcaacaacttcatttccaaccaaaaaatggactttaaggaagatctttcaggaatagctgaaatgttcaagaccccagtgaaggagcaaccgcagttgacaagcacatgtcacatcgctatttcaaattcagagaatttgcttggaaaacagtttcaaggaactgattcaggagaagaacctctgctccccacctcagagagttttggaggaaatgtgttcttcagtgcacagaatgcagcaaaacagccatctgataaatgctctgcaagccctcccttaagacggcagtgtattagagaaaatggaaacgtagcaaaaacgcccaggaacacctacaaaatgacttctctggagacaaaaacttcagatactgagacagagccttcaaaaacagtatccactgcaaacaggtcaggaaggtctacagagttcaggaatatacagaagctacctgtggaaagtaagagtgaagaaacaaatacagaaattgttgagtgcatcctaaaaagaggtcagaaggcaacactactacaacaaaggagagaaggagagatgaaggaaatagaaagaccttttgagacatataaggaaaatattgaattaaaagaaaacgatgaaaagatgaaagcaatgaagagatcaagaacttgggggcagaaatgtgcaccaatgtctgacctgacagacctcaagagcttgcctgatacagaactcatgaaagacacggcacgtggccagaatctcctccaaacccaagatcatgccaaggcaccaaagagtgagaaaggcaaaatcactaaaatgccctgccagtcattacaaccagaaccaataaacaccccaacacacacaaaacaacagttgaaggcatccctggggaaagtaggtgtgaaagaagagctcctagcagtcggcaagttcacacggacgtcaggggagaccacgcacacgcacagagagccagcaggagatggcaagagcatcagaacgtttaaggagtctccaaagcagatcctggacccagcagcccgtgtaactggaatgaagaagtggccaagaacgcctaaggaagaggcccagtcactagaagacctggctggcttcaaagagctcttccagacaccaggtccctctgaggaatcaatgactgatgagaaaactaccaaaatagcctgcaaatctccaccaccagaatcagtggacactccaacaagcacaaagcaatggcctaagagaagtctcaggaaagcagatgtagaggaagaattcttagcactcaggaaactaacaccatcagcagggaaagccatgcttacgcccaaaccagcaggaggtgatgagaaagacattaaagcatttatgggaactccagtgcagaaactggacctggcaggaactttacctggcagcaaaagacagctacagactcctaaggaaaaggcccaggctctagaagacctggctggctttaaagagctcttccagactcctggtcacaccgaggaattagtggctgctggtaaaaccactaaaataccctgcgactctccacagtcagacccagtggacaccccaacaagcacaaagcaacgacccaagagaagtatcaggaaagcagatgtagagggagaactcttagcgtgcaggaatctaatgccatcagcaggcaaagccatgcacacgcctaaaccatcagtaggtgaagagaaagacatcatcatatttgtgggaactccagtgcagaaactggacctgacagagaacttaaccggcagcaagagacggccacaaactcctaaggaagaggcccaggctctggaagacctgactggctttaaagagctcttccagacccctggtcatactgaagaagcagtggctgctggcaaaactactaaaatgccctgcgaatcttctccaccagaatcagcagacaccccaacaagcacaagaaggcagcccaagacacctttggagaaaagggacgtacagaaggagctctcagccctgaagaagctcacacagacatcaggggaaaccacacacacagataaagtaccaggaggtgaggataaaagcatcaacgcgtttagggaaactgcaaaacagaaactggacccagcagcaagtgtaactggtagcaagaggcacccaaaaactaaggaaaaggcccaacccctagaagacctggctggcttgaaagagctcttccagacaccagtatgcactgacaagcccacgactcacgagaaaactaccaaaatagcctgcagatcacaaccagacccagtggacacaccaacaagctccaagccacagtccaagagaagtctcaggaaagtggacgtagaagaagaattcttcgcactcaggaaacgaacaccatcagcaggcaaagccatgcacacacccaaaccagcagtaagtggtgagaaaaacatctacgcatttatgggaactccagtgcagaaactggacctgacagagaacttaactggcagcaagagacggctacaaactcctaaggaaaaggcccaggctctagaagacctggctggctttaaagagctcttccagacacgaggtcacactgaggaatcaatgactaacgataaaactgccaaagtagcctgcaaatcttcacaaccagacccagacaaaaacccagcaagctccaagcgacggctcaagacatccctggggaaagtgggcgtgaaagaagagctcctagcagttggcaagctcacacagacatcaggagagactacacacacacacacagagccaacaggagatggtaagagcatgaaagcatttatggagtctccaaagcagatcttagactcagcagcaagtctaactggcagcaagaggcagctgagaactcctaagggaaagtctgaagtccctgaagacctggccggcttcatcgagctcttccagacaccaagtcacactaaggaatcaatgactaacgaaaaaactaccaaagtatcctacagagcttcacagccagacctagtggacaccccaacaagctccaagccacagcccaagagaagtctcaggaaagcagacactgaagaagaatttttagcatttaggaaacaaacgccatcagcaggcaaagccatgcacacacccaaaccagcagtaggtgaagagaaagacatcaacacgtttttgggaactccagtgcagaaactggaccagccaggaaatttacctggcagcaatagacggctacaaactcgtaaggaaaaggcccaggctctagaagaactgactggcttcagagagcttttccagacaccatgcactgataaccccacgactgatgagaaaactaccaaaaaaatactctgcaaatctccgcaatcagacccagcggacaccccaacaaacacaaagcaacggcccaagagaagcctcaagaaagcagacgtagaggaagaatttttagcattcaggaaactaacaccatcagcaggcaaagccatgcacacgcctaaagcagcagtaggtgaagagaaagacatcaacacatttgtggggactccagtggagaaactggacctgctaggaaatttacctggcagcaagagacggccacaaactcctaaagaaaaggccaaggctctagaagatctggctggcttcaaagagctcttccagacaccaggtcacactgaggaatcaatgaccgatgacaaaatcacagaagtatcctgcaaatctccacaaccagacccagtcaaaaccccaacaagctccaagcaacgactcaagatatccttggggaaagtaggtgtgaaagaagaggtcctaccagtcggcaagctcacacagacgtcagggaagaccacacagacacacagagagacagcaggagatggaaagagcatcaaagcgtttaaggaatctgcaaagcagatgctggacccagcaaactatggaactgggatggagaggtggccaagaacacctaaggaagaggcccaatcactagaagacctggccggcttcaaagagctcttccagacaccagaccacactgaggaatcaacaactgatgacaaaactaccaaaatagcctgcaaatctccaccaccagaatcaatggacactccaacaagcacaaggaggcggcccaaaacacctttggggaaaagggatatagtggaagagctctcagccctgaagcagctcacacagaccacacacacagacaaagtaccaggagatgaggataaaggcatcaacgtgttcagggaaactgcaaaacagaaactggacccagcagcaagtgtaactggtagcaagaggcagccaagaactcctaagggaaaagcccaacccctagaagacttggctggcttgaaagagctcttccagacaccaatatgcactgacaagcccacgactcatgagaaaactaccaaaatagcctgcagatctccacaaccagacccagtgggtaccccaacaatcttcaagccacagtccaagagaagtctcaggaaagcagacgtagaggaagaatccttagcactcaggaaacgaacaccatcagtagggaaagctatggacacacccaaaccagcaggaggtgatgagaaagacatgaaagcatttatgggaactccagtgcagaaattggacctgccaggaaatttacctggcagcaaaagatggccacaaactcctaaggaaaaggcccaggctctagaagacctggctggcttcaaagagctcttccagacaccaggcactgacaagcccacgactgatgagaaaactaccaaaatagcctgcaaatctccacaaccagacccagtggacaccccagcaagcacaaagcaacggcccaagagaagcctcaggaaagcagacgtagaggaagaatttttagcactcaggaaacgaacaccatcagcaggcaaagccatggacacaccaaaaccagcagtaagtgatgagaaaaatatcaacacatttgtggaaactccagtgcagaaactggacctgctaggaaatttacctggcagcaagagacagccacagactcctaaggaaaaggctgaggctctagaggacctggttggcttcaaagaactcttccagacaccaggtcacactgaggaatcaatgactgatgacaaaatcacagaagtatcctgtaaatctccacagccagagtcattcaaaacctcaagaagctccaagcaaaggctcaagatacccctggtgaaagtggacatgaaagaagagcccctagcagtcagcaagctcacacggacatcaggggagactacgcaaacacacacagagccaacaggagatagtaagagcatcaaagcgtttaaggagtctccaaagcagatcctggacccagcagcaagtgtaactggtagcaggaggcagctgagaactcgtaaggaaaaggcccgtgctctagaagacctggttgacttcaaagagctcttctcagcaccaggtcacactgaagagtcaatgactattgacaaaaacacaaaaattccctgcaaatctcccccaccagaactaacagacactgccacgagcacaaagagatgccccaagacacgtcccaggaaagaagtaaaagaggagctctcagcagttgagaggctcacgcaaacatcagggcaaagcacacacacacacaaagaaccagcaagcggtgatgagggcatcaaagtattgaagcaacgtgcaaagaagaaaccaaacccagtagaagaggaacccagcaggagaaggccaagagcacctaaggaaaaggcccaacccctggaagacctggccggcttcacagagctctctgaaacatcaggtcacactcaggaatcactgactgctggcaaagccactaaaataccctgcgaatctcccccactagaagtggtagacaccacagcaagcacaaagaggcatctcaggacacgtgtgcagaaggtacaagtaaaagaagagccttcagcagtcaagttcacacaaacatcaggggaaaccacggatgcagacaaagaaccagcaggtgaagataaaggcatcaaagcattgaaggaatctgcaaaacagacaccggctccagcagcaagtgtaactggcagcaggagacggccaagagcacccagggaaagtgcccaagccatagaagacctagctggcttcaaagacccagcagcaggtcacactgaagaatcaatgactgatgacaaaaccactaaaataccctgcaaatcatcaccagaactagaagacaccgcaacaagctcaaagagacggcccaggacacgtgcccagaaagtagaagtgaaggaggagctgttagcagttggcaagctcacacaaacctcaggggagaccacgcacaccgacaaagagccggtaggtgagggcaaaggcacgaaagcatttaagcaacctgcaaagcggaagctggacgcagaagatgtaattggcagcaggagacagccaagagcacctaaggaaaaggcccaacccctggaagatctggccagcttccaagagctctctcaaacaccaggccacactgaggaactggcaaatggtgctgctgatagctttacaagcgctccaaagcaaacacctgacagtggaaaacctctaaaaatatccagaagagttcttcgggcccctaaagtagaacccgtgggagacgtggtaagcaccagagaccctgtaaaatcacaaagcaaaagcaacacttccctgcccccactgcccttcaagaggggaggtggcaaagatggaagcgtcacgggaaccaagaggctgcgctgcatgccagcaccagaggaaattgtggaggagctgccagccagcaagaagcagagggttgctcccagggcaagaggcaaatcatccgaacccgtggtcatcatgaagagaagtttgaggacttctgcaaaaagaattgaacctgcggaagagctgaacagcaacgacatgaaaaccaacaaagaggaacacaaattacaagactcggtccctgaaaataagggaatatccctgcgctccagacgccaaaataagactgaggcagaacagcaaataactgaggtctttgtattagcagaaagaatagaaataaacagaaatgaaaagaagcccatgaagacctccccagagatggacattcagaatccagatgatggagcccggaaacccatacctagagacaaagtcagtgagaacaaaaggtgcttgaggtctgctagacagaatgagagctcccagcctaaggtggcagaggagagcggagggcagaagagtgcgaaggttctcatgcagaatcagaaagggaaaggagaagcaggaaattcagactccatgtgcctgagatcaagaaagacaaaaagccagcctgcagcaagcactttggagagcgaatctgtgcagagagtaacgcggagtgtcaagagatgtgcagaaaatccaaagaaggctgaggacaatgtgtgtgtcaagaaaataagaaccagaagtcatagggacagtgaagatatttgacagaaaaatcgaactgggaaaaatataataaagttagttttgtgataagttctagtgcagtttttgtcataaattacaagtgaattctgtaagtaaggctgtcagtctgcttaagggaagaaaactttggatttgctgggtctgaatcggcttcataaactccactgggagcactgctgggctcctggactgagaatagttgaacaccgggggctttgtgaaggagtctgggccaaggtttgccctcagctttgcagaatgaagccttgaggtctgtcaccacccacagccaccctacagcagccttaactgtgacacttgccacactgtgtcgtcgtttgtttgcctatgtcctccagggcacggtggcaggaacaactatcctcgtctgtcccaacactgagcaggcactcggtaaacacgaatgaatggatgagcgcacggatgaatggagcttacaagatctgtctttccaatggccgggggcatttggtccccaaattaaggctattggacatctgcacaggacagtcctatttttgatgtcctttcctttctgaaaataaagttttgtgctttggagaatgactcgtgagcacatctttagggaccaagagtgactttctgtaaggagtgactcgtggcttgccttggtctcttgggaatacttttctaactagggttgctctcacctgagacattctccacccgcggaatctcagggtcccaggctgtgggccatcacgacctcaaactggctcctaatctccagctttcctgtcattgaaagcttcggaagtttactggctctgctcccgcctgttttctttctgactctatctggcagcccgatgccacccagtacaggaagtgacaccagtactctgtaaagcatcatcatccttggagagactgagcactcagcaccttcagccacgatttcaggatcgcttccttgtgagccgctgcctccgaaatctcctttgaagcccagacatctttctccagcttcagacttgtagatataactcgttcatcttcatttactttccactttgccccctgtcctctctgtgttccccaaatcagagaatagcccgccatcccccaggtcacctgtctggattcctccccattcacccaccttgccaggtgcaggtgaggatggtgcaccagacagggtagctgtcccccaaaatgtgccctgtgcgggcagtgccctgtctccacgtttgtttccccagtgtctggcggggagccaggtgacatcataaatacttgctgaatgaatgcagaaatcagcggtactgacttgtactatattggctgccatgatagggttctcacagcgtcatccatgatcgtaagggagaatgacattctgcttgagggagggaatagaaaggggcagggaggggacatctgagggcttcacagggctgcaaagggtacagggattgcaccagggcagaacaggggagggtgttcaaggaagagtggctcttagcagaggcactttggaaggtgtgaggcataaatgcttccttctacgtaggccaacctcaaaactttcagtaggaatgttgctatgatcaagttgttctaacactttagacttagtagtaattatgaacctcacatagaaaaatttcatccagccatatgcctgtggagtggaatattctgtttagtagaaaaatcctttagagttcagctctaaccagaaatcttgctgaagtatgtcagcaccttttctcaccctggtaagtacagtatttcaagagcacgctaagggtggttttcattttacagggctgttgatgatgggttaaaaatgttcatttaagggctacccccgtgtttaatagatgaacaccacttctacacaaccctccttggtactgggggagggagagatctgacaaatactgcccattcccctaggctgactggatttgagaacaaatacccacccatttccaccatggtatggtaacttctctgagcttcagtttccaagtgaatttccatgtaataggacattcccattaaatacaagctgtttttactttttcgcctcccagggcctgtgggatctggtcccccagcctctcttgggctttcttacactaactctgtacctaccatctcctgcctcccttaggcaggcacctccaaccaccacacactccctgctgttttccctgcctggaactttccctcctgccccaccaagatcatttcatccagtcctgagctcagcttaagggaggcttcttgcctgtgggttccctcacccccatgcctgtcctccaggctggggcaggttcttagtttgcctggaattgttctgtacctctttgtagcacgtagtgttgtggaaactaagccactaattgagtttctggctcccctcctggggttgtaagttttgttcattcatgagggccgactgtatttcctggttactgtatcccagtgaccagccacaggagatgtccaataaagtatgtgatgaaatggtcttaaaa

SEQ ID NO: 137 - DNA, 11598 bp, Homo sapiens
gggcgggaggactcgactcggtgggagccgctagagccgggcgcccggggacgtagcctgtagggccaccgggtccccgtcagaggcggcggcgggagcagcggggactgcaggccggggtgcagcgaacgcgaccccgcgggctgcggcccggtgtgtgcggagcgtggcgggcgcagcttaccgggcggaggtgagcgcggcgccggctcctcctgcggcggactttgggtgcgacttgacgagcggtggttcgacaagtggccttgcgggccggatcgtcccagtggaagagttgtaaatttgcttctggccttcccctacggattatacctggccttcccctacggattatactcaacttactgtttagaaaatgtggcccacgagacgcctggttactatcaaaaggagcggggtcgacggtccccactttcccctgagcctcagcacctgcttgtttggaaggggtattgaatgtgacatccgtatccagcttcctgttgtgtcaaaacaacattgcaaaattgaaatccatgagcaggaggcaatattacataatttcagttccacaaatccaacacaagtaaatgggtctgttattgatgagcctgtacggctaaaacatggagatgtaataactattattgatcgttccttcaggtatgaaaatgaaagtcttcagagtggaaggaagtcaactgaatttccaagaaaaatacgtgaacaggagccagcacgtcgtgtctcaagatctagcttctcttctgaccctgatgagagtgacggaatacctttgaaaagaaggcgtgtgtcctttggtgggcacctaagacctgaactatttgatgaaaacttgcctcctaatacgcctctcaaaaggggagaagccccaaccaaaagaaagtctctggtaatgcacactccacctgtcctgaagaaaatcatcaaggaacagcctcaaccatcaggaaaacaagagtcaggttcagaaatccatgtggaagtgaaggcacaaagcttggttataagccctccagctcctagtcctaggaaaactccagttgccagtgatcaacgccgtaggtcctgcaaaacagcccctgcttccagcagcaaatctcagacagaggttcctaagagaggagggagaaagagtggcaacctgccttcaaagagagtgtctatcagccgaagtcaacatgatattttacagatgatatgttccaaaagaagaagtggtgcttcggaagcaaatctgattgttgcaaaatcatgggcagatgtagtaaaacttggtgcaaaacaaacacaaactaaagtcataaaacatggtcctcaaaggtcaatgaacaaaaggcaaagaagacctgctactccaaagaagcctgtgggcgaagttcacagtcaatttagtacaggccacgcaaactctccttgtaccataataatagggaaagctcatactgaaaaagtacatgtgcctgctcgaccctacagagtgctcaacaacttcatttccaaccaaaaaatggactttaaggaagatctttcaggaatagctgaaatgttcaagaccccagtgaaggagcaaccgcagttgacaagcacatgtcacatcgctatttcaaattcagagaatttgcttggaaaacagtttcaaggaactgattcaggagaagaacctctgctccccacctcagagagttttggaggaaatgtgttcttcagtgcacagaatgcagcaaaacagccatctgataaatgctctgcaagccctcccttaagacggcagtgtattagagaaaatggaaacgtagcaaaaacgcccaggaacacctacaaaatgacttctctggagacaaaaacttcagatactgagacagagccttcaaaaacagtatccactgcaaacaggtcaggaaggtctacagagttcaggaatatacagaagctacctgtggaaagtaagagtgaagaaacaaatacagaaattgttgagtgcatcctaaaaagaggtcagaaggcaacactactacaacaaaggagagaaggagagatgaaggaaatagaaagaccttttgagacatataaggaaaatattgaattaaaagaaaacgatgaaaagatgaaagcaatgaagagatcaagaacttgggggcagaaatgtgcaccaatgtctgacctgacagacctcaagagcttgcctgatacagaactcatgaaagacacggcacgtggccagaatctcctccaaacccaagatcatgccaaggcaccaaagagtgagaaaggcaaaatcactaaaatgccctgccagtcattacaaccagaaccaataaacaccccaacacacacaaaacaacagttgaaggcatccctggggaaagtaggtgtgaaagaagagctcctagcagtcggcaagttcacacggacgtcaggggagaccacgcacacgcacagagagccagcaggagatggcaagagcatcagaacgtttaaggagtctccaaagcagatcctggacccagcagcccgtgtaactggaatgaagaagtggccaagaacgcctaaggaagaggcccagtcactagaagacctggctggcttcaaagagctcttccagacaccaggtccctctgaggaatcaatgactgatgagaaaactaccaaaatagcctgcaaatctccaccaccagaatcagtggacactccaacaagcacaaagcaatggcctaagagaagtctcaggaaagcagatgtagaggaagaattcttagcactcaggaaactaacaccatcagcagggaaagccatgcttacgcccaaaccagcaggaggtgatgagaaagacattaaagcatttatgggaactccagtgcagaaactggacctggcaggaactttacctggcagcaaaagacagctacagactcctaaggaaaaggcccaggctctagaagacctggctggctttaaagagctcttccagactcctggtcacaccgaggaattagtggctgctggtaaaaccactaaaataccctgcgactctccacagtcagacccagtggacaccccaacaagcacaaagcaacgacccaagagaagtatcaggaaagcagatgtagagggagaactcttagcgtgcaggaatctaatgccatcagcaggcaaagccatgcacacgcctaaaccatcagtaggtgaagagaaagacatcatcatatttgtgggaactccagtgcagaaactggacctgacagagaacttaaccggcagcaagagacggccacaaactcctaaggaagaggcccaggctctggaagacctgactggctttaaagagctcttccagacccctggtcatactgaagaagcagtggctgctggcaaaactactaaaatgccctgcgaatcttctccaccagaatcagcagacaccccaacaagcacaagaaggcagcccaagacacctttggagaaaagggacgtacagaaggagctctcagccctgaagaagctcacacagacatcaggggaaaccacacacacagataaagtaccaggaggtgaggataaaagcatcaacgcgtttagggaaactgcaaaacagaaactggacccagcagcaagtgtaactggtagcaagaggcacccaaaaactaaggaaaaggcccaacccctagaagacctggctggcttgaaagagctcttccagacaccagtatgcactgacaagcccacgactcacgagaaaactaccaaaatagcctgcagatcacaaccagacccagtggacacaccaacaagctccaagccacagtccaagagaagtctcaggaaagtggacgtagaagaagaattcttcgcactcaggaaacgaacaccatcagcaggcaaagccatgcacacacccaaaccagcagtaagtggtgagaaaaacatctacgcatttatgggaactccagtgcagaaactggacctgacagagaacttaactggcagcaagagacggctacaaactcctaaggaaaaggcccaggctctagaagacctggctggctttaaagagctcttccagacacgaggtcacactgaggaatcaatgactaacgataaaactgccaaagtagcctgcaaatcttcacaaccagacccagacaaaaacccagcaagctccaagcgacggctcaagacatccctggggaaagtgggcgtgaaagaagagctcctagcagttggcaagctcacacagacatcaggagagactacacacacacacacagagccaacaggagatggtaagagcatgaaagcatttatggagtctccaaagcagatcttagactcagcagcaagtctaactggcagcaagaggcagctgagaactcctaagggaaagtctgaagtccctgaagacctggccggcttcatcgagctcttccagacaccaagtcacactaaggaatcaatgactaacgaaaaaactaccaaagtatcctacagagcttcacagccagacctagtggacaccccaacaagctccaagccacagcccaagagaagtctcaggaaagcagacactgaagaagaatttttagcatttaggaaacaaacgccatcagcaggcaaagccatgcacacacccaaaccagcagtaggtgaagagaaagacatcaacacgtttttgggaactccagtgcagaaactggaccagccaggaaatttacctggcagcaatagacggctacaaactcgtaaggaaaaggcccaggctctagaagaactgactggcttcagagagcttttccagacaccatgcactgataaccccacgactgatgagaaaactaccaaaaaaatactctgcaaatctccgcaatcagacccagcggacaccccaacaaacacaaagcaacggcccaagagaagcctcaagaaagcagacgtagaggaagaatttttagcattcaggaaactaacaccatcagcaggcaaagccatgcacacgcctaaagcagcagtaggtgaagagaaagacatcaacacatttgtggggactccagtggagaaactggacctgctaggaaatttacctggcagcaagagacggccacaaactcctaaagaaaaggccaaggctctagaagatctggctggcttcaaagagctcttccagacaccaggtcacactgaggaatcaatgaccgatgacaaaatcacagaagtatcctgcaaatctccacaaccagacccagtcaaaaccccaacaagctccaagcaacgactcaagatatccttggggaaagtaggtgtgaaagaagaggtcctaccagtcggcaagctcacacagacgtcagggaagaccacacagacacacagagagacagcaggagatggaaagagcatcaaagcgtttaaggaatctgcaaagcagatgctggacccagcaaactatggaactgggatggagaggtggccaagaacacctaaggaagaggcccaatcactagaagacctggccggcttcaaagagctcttccagacaccagaccacactgaggaatcaacaactgatgacaaaactaccaaaatagcctgcaaatctccaccaccagaatcaatggacactccaacaagcacaaggaggcggcccaaaacacctttggggaaaagggatatagtggaagagctctcagccctgaagcagctcacacagaccacacacacagacaaagtaccaggagatgaggataaaggcatcaacgtgttcagggaaactgcaaaacagaaactggacccagcagcaagtgtaactggtagcaagaggcagccaagaactcctaagggaaaagcccaacccctagaagacttggctggcttgaaagagctcttccagacaccaatatgcactgacaagcccacgactcatgagaaaactaccaaaatagcctgcagatctccacaaccagacccagtgggtaccccaacaatcttcaagccacagtccaagagaagtctcaggaaagcagacgtagaggaagaatccttagcactcaggaaacgaacaccatcagtagggaaagctatggacacacccaaaccagcaggaggtgatgagaaagacatgaaagcatttatgggaactccagtgcagaaattggacctgccaggaaatttacctggcagcaaaagatggccacaaactcctaaggaaaaggcccaggctctagaagacctggctggcttcaaagagctcttccagacaccaggcactgacaagcccacgactgatgagaaaactaccaaaatagcctgcaaatctccacaaccagacccagtggacaccccagcaagcacaaagcaacggcccaagagaagcctcaggaaagcagacgtagaggaagaatttttagcactcaggaaacgaacaccatcagcaggcaaagccatggacacaccaaaaccagcagtaagtgatgagaaaaatatcaacacatttgtggaaactccagtgcagaaactggacctgctaggaaatttacctggcagcaagagacagccacagactcctaaggaaaaggctgaggctctagaggacctggttggcttcaaagaactcttccagacaccaggtcacactgaggaatcaatgactgatgacaaaatcacagaagtatcctgtaaatctccacagccagagtcattcaaaacctcaagaagctccaagcaaaggctcaagatacccctggtgaaagtggacatgaaagaagagcccctagcagtcagcaagctcacacggacatcaggggagactacgcaaacacacacagagccaacaggagatagtaagagcatcaaagcgtttaaggagtctccaaagcagatcctggacccagcagcaagtgtaactggtagcaggaggcagctgagaactcgtaaggaaaaggcccgtgctctagaagacctggttgacttcaaagagctcttctcagcaccaggtcacactgaagagtcaatgactattgacaaaaacacaaaaattccctgcaaatctcccccaccagaactaacagacactgccacgagcacaaagagatgccccaagacacgtcccaggaaagaagtaaaagaggagctctcagcagttgagaggctcacgcaaacatcagggcaaagcacacacacacacaaagaaccagcaagcggtgatgagggcatcaaagtattgaagcaacgtgcaaagaagaaaccaaacccagtagaagaggaacccagcaggagaaggccaagagcacctaaggaaaaggcccaacccctggaagacctggccggcttcacagagctctctgaaacatcaggtcacactcaggaatcactgactgctggcaaagccactaaaataccctgcgaatctcccccactagaagtggtagacaccacagcaagcacaaagaggcatctcaggacacgtgtgcagaaggtacaagtaaaagaagagccttcagcagtcaagttcacacaaacatcaggggaaaccacggatgcagacaaagaaccagcaggtgaagataaaggcatcaaagcattgaaggaatctgcaaaacagacaccggctccagcagcaagtgtaactggcagcaggagacggccaagagcacccagggaaagtgcccaagccatagaagacctagctggcttcaaagacccagcagcaggtcacactgaagaatcaatgactgatgacaaaaccactaaaataccctgcaaatcatcaccagaactagaagacaccgcaacaagctcaaagagacggcccaggacacgtgcccagaaagtagaagtgaaggaggagctgttagcagttggcaagctcacacaaacctcaggggagaccacgcacaccgacaaagagccggtaggtgagggcaaaggcacgaaagcatttaagcaacctgcaaagcggaagctggacgcagaagatgtaattggcagcaggagacagccaagagcacctaaggaaaaggcccaacccctggaagatctggccagcttccaagagctctctcaaacaccaggccacactgaggaactggcaaatggtgctgctgatagctttacaagcgctccaaagcaaacacctgacagtggaaaacctctaaaaatatccagaagagttcttcgggcccctaaagtagaacccgtgggagacgtggtaagcaccagagaccctgtaaaatcacaaagcaaaagcaacacttccctgcccccactgcccttcaagaggggaggtggcaaagatggaagcgtcacgggaaccaagaggctgcgctgcatgccagcaccagaggaaattgtggaggagctgccagccagcaagaagcagagggttgctcccagggcaagaggcaaatcatccgaacccgtggtcatcatgaagagaagtttgaggacttctgcaaaaagaattgaacctgcggaagagctgaacagcaacgacatgaaaaccaacaaagaggaacacaaattacaagactcggtccctgaaaataagggaatatccctgcgctccagacgccaaaataagactgaggcagaacagcaaataactgaggtctttgtattagcagaaagaatagaaataaacagaaatgaaaagaagcccatgaagacctccccagagatggacattcagaatccagatgatggagcccggaaacccatacctagagacaaagtcagtgagaacaaaaggtgcttgaggtctgctagacagaatgagagctcccagcctaaggtggcagaggagagcggagggcagaagagtgcgaaggttctcatgcagaatcagaaagggaaaggagaagcaggaaattcagactccatgtgcctgagatcaagaaagacaaaaagccagcctgcagcaagcactttggagagcgaatctgtgcagagagtaacgcggagtgtcaagagatgtgcagaaaatccaaagaaggctgaggacaatgtgtgtgtcaagaaaataagaaccagaagtcatagggacagtgaagatatttgacagaaaaatcgaactgggaaaaatataataaagttagttttgtgataagttctagtgcagtttttgtcataaattacaagtgaattctgtaagtaaggctgtcagtctgcttaagggaagaaaactttggatttgctgggtctgaatcggcttcataaactccactgggagcactgctgggctcctggactgagaatagttgaacaccgggggctttgtgaaggagtctgggccaaggtttgccctcagctttgcagaatgaagccttgaggtctgtcaccacccacagccaccctacagcagccttaactgtgacacttgccacactgtgtcgtcgtttgtttgcctatgtcctccagggcacggtggcaggaacaactatcctcgtctgtcccaacactgagcaggcactcggtaaacacgaatgaatggatgagcgcacggatgaatggagcttacaagatctgtctttccaatggccgggggcatttggtccccaaattaaggctattggacatctgcacaggacagtcctatttttgatgtcctttcctttctgaaaataaagttttgtgctttggagaatgactcgtgagcacatctttagggaccaagagtgactttctgtaaggagtgactcgtggcttgccttggtctcttgggaatacttttctaactagggttgctctcacctgagacattctccacccgcggaatctcagggtcccaggctgtgggccatcacgacctcaaactggctcctaatctccagctttcctgtcattgaaagcttcggaagtttactggctctgctcccgcctgttttctttctgactctatctggcagcccgatgccacccagtacaggaagtgacaccagtactctgtaaagcatcatcatccttggagagactgagcactcagcaccttcagccacgatttcaggatcgcttccttgtgagccgctgcctccgaaatctcctttgaagcccagacatctttctccagcttcagacttgtagatataactcgttcatcttcatttactttccactttgccccctgtcctctctgtgttccccaaatcagagaatagcccgccatcccccaggtcacctgtctggattcctccccattcacccaccttgccaggtgcaggtgaggatggtgcaccagacagggtagctgtcccccaaaatgtgccctgtgcgggcagtgccctgtctccacgtttgtttccccagtgtctggcggggagccaggtgacatcataaatacttgctgaatgaatgcagaaatcagcggtactgacttgtactatattggctgccatgatagggttctcacagcgtcatccatgatcgtaagggagaatgacattctgcttgagggagggaatagaaaggggcagggaggggacatctgagggcttcacagggctgcaaagggtacagggattgcaccagggcagaacaggggagggtgttcaaggaagagtggctcttagcagaggcactttggaaggtgtgaggcataaatgcttccttctacgtaggccaacctcaaaactttcagtaggaatgttgctatgatcaagttgttctaacactttagacttagtagtaattatgaacctcacatagaaaaatttcatccagccatatgcctgtggagtggaatattctgtttagtagaaaaatcctttagagttcagctctaaccagaaatcttgctgaagtatgtcagcaccttttctcaccctggtaagtacagtatttcaagagcacgctaagggtggttttcattttacagggctgttgatgatgggttaaaaatgttcatttaagggctacccccgtgtttaatagatgaacaccacttctacacaaccctccttggtactgggggagggagagatctgacaaatactgcccattcccctaggctgactggatttgagaacaaatacccacccatttccaccatggtatggtaacttctctgagcttcagtttccaagtgaatttccatgtaataggacattcccattaaatacaagctgtttttactttttcgcctcccagggcctgtgggatctggtcccccagcctctcttgggctttcttacactaactctgtacctaccatctcctgcctcccttaggcaggcacctccaaccaccacacactccctgctgttttccctgcctggaactttccctcctgccccaccaagatcatttcatccagtcctgagctcagcttaagggaggcttcttgcctgtgggttccctcacccccatgcctgtcctccaggctggggcaggttcttagtttgcctggaattgttctgtacctctttgtagcacgtagtgttgtggaaactaagccactaattgagtttctggctcccctcctggggttgtaagttttgttcattcatgagggccgactgtatttcctggttactgtatcccagtgaccagccacaggagatgtccaataaagtatgtgatgaaatggtcttaaaa

SEQ ID NO: 138 - DNA, 2715 bp, Homo sapiens
atggacattcactggctgaatcgaggagaggagaaaatgttgaacggatatcaggaaactcacagaccagctggaaatattagggaatcaggcttagaaaacacgcaggcgcaaagagtgaccatgaagcccagcactacagccaaaactgcaccacaaagcccatcagggatcagagtcaccaaggtggactggcagcggtcgaggaatggcgctgcccaccacacccaggagtacccctgccctgagctggtggttcgcaggggccagtcgttcagcctcacgctggagctgagcagagccctggactgtgaggagatcctcatcttcacggtggagacaggaccccgggcttctgaggccctccacaccaaagctgtgttccagacatcggagctggagcggggtgagggctggacagcagcaagggaggctcagatggagaaaactctgaccgtcagtctcgccagccctcccagtgctgtcattggccgctacctgctgagcatcaggctttcctctcaccgcaaacacagcaaccggaggctgggcgagtttgttctccttttcaacccatgcaaggccagagccccagtccacaccgggcctgatgactgcttttcagaggacgatgtgtttctggcctcagaggaggagagacaggagtacgtgctcagcgacagcggcatcatcttccgaggcgtggagaagcacatacgagcccagggctggaactacgggcaggtctccaggggcacaggccagacaaggatgtgggctggggcatggggagcctctaagcacagcctctctggggagcagtttgaggaggacatcctgaacatctgcctctccatcctggatcgaagccccggtcaccaaaacaacccagccaccgacgtgtcctgccgccacaaccccatctacgtcaccagggtcatcagtgccatggtgaacagcaacaacgaccgaggtgtggtgcaaggacagtggcagggcaagtacggcggcggcaccagcccgctgcactggcgcggcagcgtggccattctgcagaagtggctcaagggcaggtacaagccagtcaagtacggccagtgctgggtcttcgccggagtcctgtgcacagtcctcaggtgcttggggatagccacacgggtcgtgtccaacttcaactcagcccacgacacagaccagaacctgagtgtggacaaatacgtggactccttcgggcggaccctggaggacctgacagaagacagcatgtggaatttccatgtctggaatgagagctggtttgcccggcaggacctaggcccctcttacaatggctggcaggttctggatgccaccccccaggaggagagtgaaggtgtgttccggtgcggcccagcctcagtcaccgccatccgcgagggtgatgtgcacctggctcacgatggccccttcgtgtttgcggaggtcaacgccgactacatcacctggctgtggcacgaggatgagagccgggagcgtgtatactcaaacacgaagaagattgggagatgcatcagcaccaaggcggtgggcagtgactcccgcgtggacatcactgacctctacaagtatccggaagggtcccggaaagagaggcaggtgtacagcaaggcggtgaacaggctgttcggcgtggaagcctctggaaggagaatctggatccgcagggctgggggtcgctgtctctggcgtgacgacctcctggagcctgccaccaagcccagcatcgctggcaagttcaaggtgctagagcctcccatgctgggccacgacctgagactggccctgtgcttggccaacctcacctcccgggcccagcgggtgagggtcaacctgagcggtgccaccatcctctatacccgcaagccagtggcagagatcctgcatgaatcccacgccgtgaggctggggccgcaagaaggtagttatcagcttattgctattaaaaataacactaaacttttgtttatctacagagtgtcagagaagagaatcccaattacaatatcttactctaagtataaagaagacctgacagaggacaagaagatcctgttggctgccatgtgccttgtcaccaaaggagagaagcttctggtggagaaggacattactctagaggacttcatcaccatcaaggttctgggcccagccatggtgggagtggcagttacagtggaagtgacagtagtcaaccccctcatagagagagtgaaggactgtgcgctgatggtggagggcagcggccttctccaggaacagctcagcatcgacgtgcctaccctggagcctcaggagagggcctcagtccagtttgacatcaccccctccaaaagtggcccaaggcagctgcaggtggaccttccccagtggaaagcagaagccgccccaacagccaatgagaaagccctgcttgtgagtgggagaggtagagaaattgacagaagacagcttagaagtccaagggagagtgtgagtgggaatgtggttttggaaattacaaagaaaaatgtgcaggctgaggaagacagatctttctgcagcctgccctcagtacagcccacagtgggtgccttgactcagatggtgcatatgctccctcctggaacttggatcttaagagatcagaatggagagaagcttcagaaggcactaaaggtggtggtggtggtagtgccc

SEQ ID NO: 139 - DNA, 3808 bp, Homo sapiens
tttgacggtgagaacatgtatatgagcatgacagagccgagccaggactatgtgccagccagccagtcctaccctggtccaagcctggaaagtgaagacttcaacattccaccaattactcctccttccctcccagaccactcgctggtgcacctgaatgaagttgagtctggttaccattctctgtgtcaccccatgaaccataatggcctgctaccatttcatccacaaaacatggacctccctgaaatcacagtctccaatatgctgggccaggatggaacactgctttctaattccatttctgtgatgccagatatacgaaacccagaaggaactcagtacagttcccatcctcagatggcagccatgagaccaaggggccagcctgcagacatcaggcagcagccaggaatgatgccacatggccagctgactaccattaaccagtcacagctaagtgctcaacttggtttgaatatgggaggaagcaatgttccccacaactcaccatctccacctggaagcaagtctgcaactccttcaccatccagttcagtgcatgaagatgaaggcgatgatacctctaagatcaatggtggagagaagcggcctgcctctgatatggggaaaaaaccaaaaactcccaaaaagaagaagaagaaggatcccaatgagccccagaagcctgtgtctgcctatgcgttattctttcgtgatactcaggccgccatcaagggccaaaatccaaacgctacctttggcgaagtctctaaaattgtggcttcaatgtgggacggtttaggagaagagcaaaaacaggtctataaaaagaaaaccgaggctgcgaagaaggagtacctgaagcaactcgcagcatacagagccagccttgtatccaagagctacagtgaacctgttgacgtgaagacatctcaacctcctcagctgatcaattcgaagccgtcggtgttccatgggcccagccaggcccactcggccctgtacctaagttcccactatcaccaacaaccgggaatgaatcctcacctaactgccatgcatcctagtctccccaggaacatagcccccaagccgaataaccaaatgccagtgactgtctctatagcaaacatggctgtgtcccctcctcctcccctccagatcagcccgcctcttcaccagcatctcaacatgcagcagcaccagccgctcaccatgcagcagccccttgggaaccagctccccatgcaggtccagtctgccttacactcacccaccatgcagcaaggatttactcttcaacccgactatcagactattatcaatcctacatctacagctgcacaagttgtcacccaggcaatggagtatgtgcgttcggggtgcagaaatcctcccccacaaccggtggactggaataacgactactgcagtagtgggggcatgcagagggacaaagcactgtaccttacttgagaatctgaacacctcttctttccactgaggaattcagggaagtgttttcaccatggattgctttgtacagtcaaggcagttctccattttattagaaaatacaagttgctaagcacttaggaccatttgagcttgtgggtcacccactctggaagaaatagtcatgcttctttattatttttttaatcctttatggacattgtttttcttcttccctgaaggaaatttggaccattcagattttatgttggttttttgctgtgaagtgctgcgctctagtaactgccttagcaactgtagatgtctcggataaaagtcctggattttccattggttttcataatgggtgtttatatgaaactactaaagactttttaaatggcttgatgtagcagtcatagcaagtttgtaaatagcatctatgttacactctcctagagtataaaatgtgaatgtttttgtagctaaattgtaattgaaactggctcattccagtttattgatttcacaataggggttaaattggcaaacattcatatttttacttcatttttaaaacaactgactgatagttctatattttcaaaatatttgaaaataaaaagtattcccaagtgattttaatttaaaaacaaattggctttgtctcattgatcagacaaaaagaaactagtattaagggaagcgcaaacacatttattttgtactgcagaaaaattgcttttttgtatcactttttgtgtaatggttagtaaatgtcatttaagtccttttatgtataaaactgccaaatgcttacctggtattttattagatgcagaaacagattggaaacagctaaattacaacttttacatatggctctgtcttattgtttcttcatactgtgtctgtatttaatctttttttatggaacctgttgcgcctatttatgaaataataaatataggtgtttgtaagtaaatttgttagtatttgaaagaggtttctttgatgttttaacttttgctggcaaaaaaaaattcacgcttggtgtgaatactttattatttagtttttacagtaacatgaataaagccaaacctgcttttcatttagcagcaaattaaagtaaccagtccttatttctgcatttctttggttgatgcaaacaaaaaactattatatttaagaactttatttcttcatacgacataacagaattgccctccaagtcacacaagctccaagactaaacaaacagacaggtcctctgtcttaaaaaggttacttcttggttctcagctggttctagtcaattctgaaccaccaccccccgccccccgcaaaaaagtaaaagtcaaaccaaacttcctcaagctgcatgcttttcacaaaatccagaaagcatttaagaattgaactaggggctggaagaagtgaaagggaagcatctaaaaatgaaaggtgagtaaccagatagcaaaagaaaagggaaagccatccaaatttgaaagctgttgatagaaattgagattcttgctgtcttttgtgcctctacaagctactactcattccagaattcctgggtcttccaagaggattcttaaggtaccagagatttgctagggaaccaaaagtgcttgagaatctgcctgagggcttgcatagctttcacattaaaaaaagaaaaagctagcagatttactcctttttaggggatcatatcaagaaagttagtctggttggaaaccaagagaatggctgatgtctctttcttggaatatgtgaaataaatttagcagtttaactaaatacaaatatatgcattgtgtaatccactcagaattaaacagacaaaaggtatgcttgctttggaatgattttaggcattgtacaaccttgaatcacttgagcatgtaataactaataaataatgcagatccatgtgattattaaaatgactgtagctgagagctctaattttcctgtcttgaaactgtataagaactcatgtgattaagttcacagtttattgtttgtctgtttagtattttagaaatataccagcactactaattaactaatgtcttttatttattatattatgataaagtaaaaatttcacttgcattaagtctaaactgagaaggtaattactgggaggagaatgagcagctttgactttgacaggcggtttgtgcaggaaagcacagtgccgtgttgtttacagcttttctagagcagctgtgcgaccagggtagagagtgttgaaattcaataccaaatacagtaaaaacaaatgtaaataaaagaaaacacatcatcaataaaactgttattatgcgtg

SEQ ID NO: 140 - DNA, 3862 bp, Homo sapiens
ccaaacatacccgcagtcaagattgctgaatgtttactattatttcattcgcagtttgacggtgagaacatgtatatgagcatgacagagccgagccaggactatgtgccagccagccagtcctaccctggtccaagcctggaaagtgaagacttcaacattccaccaattactcctccttccctcccagaccactcgctggtgcacctgaatgaagttgagtctggttaccattctctgtgtcaccccatgaaccataatggcctgctaccatttcatccacaaaacatggacctccctgaaatcacagtctccaatatgctgggccaggatggaacactgctttctaattccatttctgtgatgccagatatacgaaacccagaaggaactcagtacagttcccatcctcagatggcagccatgagaccaaggggccagcctgcagacatcaggcagcagccaggaatgatgccacatggccagctgactaccattaaccagtcacagctaagtgctcaacttggtttgaatatgggaggaagcaatgttccccacaactcaccatctccacctggaagcaagtctgcaactccttcaccatccagttcagtgcatgaagatgaaggcgatgatacctctaagatcaatggtggagagaagcggcctgcctctgatatggggaaaaaaccaaaaactcccaaaaagaagaagaagaaggatcccaatgagccccagaagcctgtgtctgcctatgcgttattctttcgtgatactcaggccgccatcaagggccaaaatccaaacgctacctttggcgaagtctctaaaattgtggcttcaatgtgggacggtttaggagaagagcaaaaacaggtctataaaaagaaaaccgaggctgcgaagaaggagtacctgaagcaactcgcagcatacagagccagccttgtatccaagagctacagtgaacctgttgacgtgaagacatctcaacctcctcagctgatcaattcgaagccgtcggtgttccatgggcccagccaggcccactcggccctgtacctaagttcccactatcaccaacaaccgggaatgaatcctcacctaactgccatgcatcctagtctccccaggaacatagcccccaagccgaataaccaaatgccagtgactgtctctatagcaaacatggctgtgtcccctcctcctcccctccagatcagcccgcctcttcaccagcatctcaacatgcagcagcaccagccgctcaccatgcagcagccccttgggaaccagctccccatgcaggtccagtctgccttacactcacccaccatgcagcaaggatttactcttcaacccgactatcagactattatcaatcctacatctacagctgcacaagttgtcacccaggcaatggagtatgtgcgttcggggtgcagaaatcctcccccacaaccggtggactggaataacgactactgcagtagtgggggcatgcagagggacaaagcactgtaccttacttgagaatctgaacacctcttctttccactgaggaattcagggaagtgttttcaccatggattgctttgtacagtcaaggcagttctccattttattagaaaatacaagttgctaagcacttaggaccatttgagcttgtgggtcacccactctggaagaaatagtcatgcttctttattatttttttaatcctttatggacattgtttttcttcttccctgaaggaaatttggaccattcagattttatgttggttttttgctgtgaagtgctgcgctctagtaactgccttagcaactgtagatgtctcggataaaagtcctggattttccattggttttcataatgggtgtttatatgaaactactaaagactttttaaatggcttgatgtagcagtcatagcaagtttgtaaatagcatctatgttacactctcctagagtataaaatgtgaatgtttttgtagctaaattgtaattgaaactggctcattccagtttattgatttcacaataggggttaaattggcaaacattcatatttttacttcatttttaaaacaactgactgatagttctatattttcaaaatatttgaaaataaaaagtattcccaagtgattttaatttaaaaacaaattggctttgtctcattgatcagacaaaaagaaactagtattaagggaagcgcaaacacatttattttgtactgcagaaaaattgcttttttgtatcactttttgtgtaatggttagtaaatgtcatttaagtccttttatgtataaaactgccaaatgcttacctggtattttattagatgcagaaacagattggaaacagctaaattacaacttttacatatggctctgtcttattgtttcttcatactgtgtctgtatttaatctttttttatggaacctgttgcgcctatttatgaaataataaatataggtgtttgtaagtaaatttgttagtatttgaaagaggtttctttgatgttttaacttttgctggcaaaaaaaaattcacgcttggtgtgaatactttattatttagtttttacagtaacatgaataaagccaaacctgcttttcatttagcagcaaattaaagtaaccagtccttatttctgcatttctttggttgatgcaaacaaaaaactattatatttaagaactttatttcttcatacgacataacagaattgccctccaagtcacacaagctccaagactaaacaaacagacaggtcctctgtcttaaaaaggttacttcttggttctcagctggttctagtcaattctgaaccaccaccccccgccccccgcaaaaaagtaaaagtcaaaccaaacttcctcaagctgcatgcttttcacaaaatccagaaagcatttaagaattgaactaggggctggaagaagtgaaagggaagcatctaaaaatgaaaggtgagtaaccagatagcaaaagaaaagggaaagccatccaaatttgaaagctgttgatagaaattgagattcttgctgtcttttgtgcctctacaagctactactcattccagaattcctgggtcttccaagaggattcttaaggtaccagagatttgctagggaaccaaaagtgcttgagaatctgcctgagggcttgcatagctttcacattaaaaaaagaaaaagctagcagatttactcctttttaggggatcatatcaagaaagttagtctggttggaaaccaagagaatggctgatgtctctttcttggaatatgtgaaataaatttagcagtttaactaaatacaaatatatgcattgtgtaatccactcagaattaaacagacaaaaggtatgcttgctttggaatgattttaggcattgtacaaccttgaatcacttgagcatgtaataactaataaataatgcagatccatgtgattattaaaatgactgtagctgagagctctaattttcctgtcttgaaactgtataagaactcatgtgattaagttcacagtttattgtttgtctgtttagtattttagaaatataccagcactactaattaactaatgtcttttatttattatattatgataaagtaaaaatttcacttgcattaagtctaaactgagaaggtaattactgggaggagaatgagcagctttgactttgacaggcggtttgtgcaggaaagcacagtgccgtgttgtttacagcttttctagagcagctgtgcgaccagggtagagagtgttgaaattcaataccaaatacagtaaaaacaaatgtaaataaaagaaaacacatcatcaataaaactgttattatgcgtg

SEQ ID NO: 141 - DNA, 4131 bp, Homo sapiens
ggtgcgcgccgcggcttgggggagagttgagcgcttttcccccctcttttttttttttttcctcttcttcttaaacaaaccacaaacggatgtgagggaaggaaggtgtttcttttactcctgagcccagacacctcactctgttccgtctaagcttgttttgctgaacacttttttttaaaaaaggaaaaagaaaaggagttgcttgatgtgagagtgaaatggacgtaagattttatccacctccagcccagcccgccgctgcgcccgacgctccctgtctgggaccttctccctgcctggacccctactattgcaacaagtttgacggtgagaacatgtatatgagcatgacagagccgagccaggactatgtgccagccagccagtcctaccctggtccaagcctggaaagtgaagacttcaacattccaccaattactcctccttccctcccagaccactcgctggtgcacctgaatgaagttgagtctggttaccattctctgtgtcaccccatgaaccataatggcctgctaccatttcatccacaaaacatggacctccctgaaatcacagtctccaatatgctgggccaggatggaacactgctttctaattccatttctgtgatgccagatatacgaaacccagaaggaactcagtacagttcccatcctcagatggcagccatgagaccaaggggccagcctgcagacatcaggcagcagccaggaatgatgccacatggccagctgactaccattaaccagtcacagctaagtgctcaacttggtttgaatatgggaggaagcaatgttccccacaactcaccatctccacctggaagcaagtctgcaactccttcaccatccagttcagtgcatgaagatgaaggcgatgatacctctaagatcaatggtggagagaagcggcctgcctctgatatggggaaaaaaccaaaaactcccaaaaagaagaagaagaaggatcccaatgagccccagaagcctgtgtctgcctatgcgttattctttcgtgatactcaggccgccatcaagggccaaaatccaaacgctacctttggcgaagtctctaaaattgtggcttcaatgtgggacggtttaggagaagagcaaaaacaggtctataaaaagaaaaccgaggctgcgaagaaggagtacctgaagcaactcgcagcatacagagccagccttgtatccaagagctacagtgaacctgttgacgtgaagacatctcaacctcctcagctgatcaattcgaagccgtcggtgttccatgggcccagccaggcccactcggccctgtacctaagttcccactatcaccaacaaccgggaatgaatcctcacctaactgccatgcatcctagtctccccaggaacatagcccccaagccgaataaccaaatgccagtgactgtctctatagcaaacatggctgtgtcccctcctcctcccctccagatcagcccgcctcttcaccagcatctcaacatgcagcagcaccagccgctcaccatgcagcagccccttgggaaccagctccccatgcaggtccagtctgccttacactcacccaccatgcagcaaggatttactcttcaacccgactatcagactattatcaatcctacatctacagctgcacaagttgtcacccaggcaatggagtatgtgcgttcggggtgcagaaatcctcccccacaaccggtggactggaataacgactactgcagtagtgggggcatgcagagggacaaagcactgtaccttacttgagaatctgaacacctcttctttccactgaggaattcagggaagtgttttcaccatggattgctttgtacagtcaaggcagttctccattttattagaaaatacaagttgctaagcacttaggaccatttgagcttgtgggtcacccactctggaagaaatagtcatgcttctttattatttttttaatcctttatggacattgtttttcttcttccctgaaggaaatttggaccattcagattttatgttggttttttgctgtgaagtgctgcgctctagtaactgccttagcaactgtagatgtctcggataaaagtcctggattttccattggttttcataatgggtgtttatatgaaactactaaagactttttaaatggcttgatgtagcagtcatagcaagtttgtaaatagcatctatgttacactctcctagagtataaaatgtgaatgtttttgtagctaaattgtaattgaaactggctcattccagtttattgatttcacaataggggttaaattggcaaacattcatatttttacttcatttttaaaacaactgactgatagttctatattttcaaaatatttgaaaataaaaagtattcccaagtgattttaatttaaaaacaaattggctttgtctcattgatcagacaaaaagaaactagtattaagggaagcgcaaacacatttattttgtactgcagaaaaattgcttttttgtatcactttttgtgtaatggttagtaaatgtcatttaagtccttttatgtataaaactgccaaatgcttacctggtattttattagatgcagaaacagattggaaacagctaaattacaacttttacatatggctctgtcttattgtttcttcatactgtgtctgtatttaatctttttttatggaacctgttgcgcctatttatgaaataataaatataggtgtttgtaagtaaatttgttagtatttgaaagaggtttctttgatgttttaacttttgctggcaaaaaaaaattcacgcttggtgtgaatactttattatttagtttttacagtaacatgaataaagccaaacctgcttttcatttagcagcaaattaaagtaaccagtccttatttctgcatttctttggttgatgcaaacaaaaaactattatatttaagaactttatttcttcatacgacataacagaattgccctccaagtcacacaagctccaagactaaacaaacagacaggtcctctgtcttaaaaaggttacttcttggttctcagctggttctagtcaattctgaaccaccaccccccgccccccgcaaaaaagtaaaagtcaaaccaaacttcctcaagctgcatgcttttcacaaaatccagaaagcatttaagaattgaactaggggctggaagaagtgaaagggaagcatctaaaaatgaaaggtgagtaaccagatagcaaaagaaaagggaaagccatccaaatttgaaagctgttgatagaaattgagattcttgctgtcttttgtgcctctacaagctactactcattccagaattcctgggtcttccaagaggattcttaaggtaccagagatttgctagggaaccaaaagtgcttgagaatctgcctgagggcttgcatagctttcacattaaaaaaagaaaaagctagcagatttactcctttttaggggatcatatcaagaaagttagtctggttggaaaccaagagaatggctgatgtctctttcttggaatatgtgaaataaatttagcagtttaactaaatacaaatatatgcattgtgtaatccactcagaattaaacagacaaaaggtatgcttgctttggaatgattttaggcattgtacaaccttgaatcacttgagcatgtaataactaataaataatgcagatccatgtgattattaaaatgactgtagctgagagctctaattttcctgtcttgaaactgtataagaactcatgtgattaagttcacagtttattgtttgtctgtttagtattttagaaatataccagcactactaattaactaatgtcttttatttattatattatgataaagtaaaaatttcacttgcattaagtctaaactgagaaggtaattactgggaggagaatgagcagctttgactttgacaggcggtttgtgcaggaaagcacagtgccgtgttgtttacagcttttctagagcagctgtgcgaccagggtagagagtgttgaaattcaataccaaatacagtaaaaacaaatgtaaataaaagaaaacacatcatcaataaaactgttattatgcgtg

SEQ ID NO: 142 - DNA, 3574 bp, Homo sapiens
aaagtagatccggccaggcagacaaaagtttgggagagaagttcggtctgtggctagcgtgagagctaggggggcgggggccggggagagtggggcagtcgggcgagtcgacgcgtgaacagatagacctgcggactggacagccgcggccagagaccctgctagccccgctcagccccagatgcgcggggggacgcagcccctcccgctgggggatgctgtgggattcctggcgcagggcatccaggccgcccgctaagcccctgtgcctcccctgtgcccctggggaaccagagtccggctgcagggaaagagaaccggccgccgagacgccgcagggtgccaggcggggagggggcgagaggccccaggcccgagggcatggagcggttaggagagaaagccagtcgcctgctggagaagttcggccgcagaaagggtgaatctagccggtctgggtctgacgggacccccgggccgggcaaggggcgcctaagtgggttggggggacctaggaagtcagggccccgaggagctactgggggacctggggatgagccgttggagccggcccgggagcaaggttccctggacgctgagcgaaatcagcgcggctcctttgaggcgccgcgctacgaaggctcttttcccgcggggccgccgcccacccgggccttgcctctacctcagtcgttgccccccgattttcggctggagcccacggccccggccctcagcccccgctctagcttcgccagtagctcggccagcgacgcgagcaagccgtccagcccccggggcagcctgctgctggacggggcgggggctggcggagctggaggtagccggccctgcagcaatcgcaccagcggcatcagcatgggctacgaccagcgccacgggagccccttgccagcggggccgtgcctgtttggcccacccctggccggagcaccggcaggctattctcccggaggggtcccgtccgcctacccggagctccacgccgccctggaccgattgtacgctcagcggcccgcggggttcggctgccaggaaagccgccactcgtatcccccggccctgggcagccctggagctctagccggggccggagtgggagcggcggggcccttggagagacggggggcgcaacccggacgacactctgtgaccggctacggggactgcgccgtgggcgcccggtaccaggacgagctaacagctttgcttcgcctgacggtgggcaccggtgggcgagaagccggagcccgcggagaaccctcggggattgagccgtcgggtctggaggagccaccaggtcctttcgttccggaggccgcccgggcccggatgcgggagccagaggccagggaggactacttcggcacctgtatcaagtgcaacaaaggcatctatgggcagagcaatgcctgccaggccctggacagcctctaccacacccagtgctttgtttgctgctcttgtgggcgaactttgcgttgcaaggctttctacagtgtcaatggctctgtgtactgtgaggaagattatctgttttcagggtttcaggaggcagctgagaaatgctgtgtctgtggtcacttgattttggagaagatcctacaagcaatggggaagtcctatcatccaggctgtttccgatgcattgtttgcaacaagtgcctggatggcatccccttcacagtggacttctccaaccaagtatactgtgtcaccgactaccacaaaaattatgctcctaagtgtgcagcctgtggccaacccatcctcccctctgagggctgtgaggacatcgtgagggtgatatccatggaccgggattatcactttgagtgctaccactgtgaggactgccggatgcagctgagtgatgaggaaggctgctgctgtttccctctggatgggcacttgctctgccatggttgccacatgcagcggctcaatgcccgacaaccccctgccaactatatctgagctgcaatcactgctgctgctgtcaccctgcagacaaactgctgtggccagtgggcccctctgaggccagccaaggcaaagaatgcactctgcaggcctggcagaagagtcctctggggaggaccccaagggccggagacccaaagatcatgatattccaaatggattgtggaagagaaaccttatatttaccagggtgggggcgactggcctttttcccatgtgtgcagtctgagcttaggcacacacaggagggttccaggactttctgaacatctgattctgtatcttcagtatatatattttgtttgttttagagatgggatctcaccatgttgcccaggctagtcttgaactcctgggctcgaatgatcctcccaccttggcctcccaaagtgctgggattataggcgtaagccactgtgtctggcctagtgtatgattatgcatgagtcacgcaatgttctggtcctggattccaggagtagaggacctagctttaaatcaattagtttcagtttgcttgaaactagttcacctaaagctagatctcttaaaaccaatttactgaaaacttgtttgcttaaagttaatgacttaatgactaatttgccaaaagctcaattcctattttggtgtgtttatatccatttaggtgtcctattcttttttgtcatgctttggatatttcaaggatttatatctattcatccaagagtacttctgagctattatcagcaacataaatttatcaaatttgcagcactttgtaaatgatgagattgcttcctacctttatggatgtctttttctatgttatctaccattcaaaaacttttttaaaaagtttaaagtttctagcaataaatacaattggtacagacattttgtgtatcatttttttgtttcttaatccaatattcctttacaaattaaatgccttgaaaaatataatggagttcaatgtgattttgatgctttggtctaacttctacattcctactgttaaaaaggccagtatatcttaaacaaatgaataggcatgaggcatattcagttgacttacaatgaaaagttatacagacaacagtaataactaaaagggtgaatctgctaaatccttttgaaatgctgcagatttgataaatatttattttagactaattggttttaggtgaattggttttaggcaaattaatttagtaatctttgatctttagtcttcattttctgtcactcagtgagtttcttactggaaatgatgactcctgacaacagaatttccacatttgggggctattctaaggtgactatgccagccaacctgggaaatacataaaagagatctctgagtgagagggaaagaggtcagatttatacaactgagcgccagaggggaaaatgcaccttgttggagtgagaaatgttctgaaactgaattacttcttgtacagctgagatagcttcttctgaactattattaaataagtgaatacaaaggccctatgatgggaaatccagacaagcttgtgtaactttacatccatcccctcagggatatttttttttttttttt

SEQ ID NO: 143 - DNA, 3730 bp, Homo sapiens
aaagtagatccggccaggcagacaaaagtttgggagagaagttcggtctgtggctagcgtgagagctaggggggcgggggccggggagagtggggcagtcgggcgagtcgacgcgtgaacagatagacctgcggactggacagccgcggccagagaccctgctagccccgctcagccccagatgcgcggggggacgcagcccctcccgctgggggatgctgtgggattcctggcgcagggcatccaggccgcccgctaagcccctgtgcctcccctgtgcccctggggaaccagagtccggctgcagggaaagagaaccggccgccgagacgccgcagggtgccaggcggggagggggcgagaggccccaggcccgagggcatggagcggttaggagagaaagccagtcgcctgctggagaagttcggccgcagaaagggtgaatctagccggtctgggtctgacgggacccccgggccgggcaaggggcgcctaagtgggttggggggacctaggaagtcagggccccgaggagctactgggggacctggggatgagccgttggagccggcccgggagcaaggttccctggacgctgagcgaaatcagcgcggctcctttgaggcgccgcgctacgaaggctcttttcccgcggggccgccgcccacccgggccttgcctctacctcagtcgttgccccccgattttcggctggagcccacggccccggccctcagcccccgctctagcttcgccagtagctcggccagcgacgcgagcaagccgtccagcccccggggcagcctgctgctggacggggcgggggctggcggagctggaggtagccggccctgcagcaatcgcaccagcggcatcagcatgggctacgaccagcgccacgggagccccttgccagcggggccgtgcctgtttggcccacccctggccggagcaccggcaggctattctcccggaggggtcccgtccgcctacccggagctccacgccgccctggaccgattgtacgctcagcggcccgcggggttcggctgccaggaaagccgccactcgtatcccccggccctgggcagccctggagctctagccggggccggagtgggagcggcggggcccttggagagacggggggcgcaacccggacgacactctgtgaccggctacggggactgcgccgtgggcgcccggtaccaggacgagctaacagctttgcttcgcctgacggtgggcaccggtgggcgagaagccggagcccgcggagaaccctcggggattgagccgtcgggtctggaggagccaccaggtcctttcgttccggaggccgcccgggcccggatgcgggagccagaggccagggaggactacttcggcacctgtatcaagtgcaacaaaggcatctatgggcagagcaatgcctgccaggccctggacagcctctaccacacccagtgctttgtttgctgctcttgtgggcgaactttgcgttgcaaggctttctacagtgtcaatggctctgtgtactgtgaggaagattatctgttttcagggtttcaggaggcagctgagaaatgctgtgtctgtggtcacttgattttggagaagatcctacaagcaatggggaagtcctatcatccaggctgtttccgatgcattgtttgcaacaagtgcctggatggcatccccttcacagtggacttctccaaccaagtatactgtgtcaccgactaccacaaaaattatgctcctaagtgtgcagcctgtggccaacccatcctcccctctgagggctgtgaggacatcgtgagggtgatatccatggaccgggattatcactttgagtgctaccactgtgaggactgccggatgcagctgagtgatgaggaaggctgctgctgtttccctctggatgggcacttgctctgccatggttgccacatgcagcggctcaatgcccgacaaccccctgccaactatatctgagctgcaatcactgctgctgctgtcaccctgcagacaaactgctgtggccagtgggcccctctgaggccagccaaggcaaagaatgcactctgcaggcctggcagaagagtcctctggggaggaccccaagggccggagacccaaagatcatgatattccaaatggattgtggaagagaaaccttatatttaccagggtgggggcgactggcctttttcccatgtgtgcagtctgagcttaggcacacacaggagggttccaggactttctgaacatctgattctgtatcttcagtatatatattttgtttgttttagagatgggatctcaccatgttgcccaggctagtcttgaactcctgggctcgaatgatcctcccaccttggcctcccaaagtgctgggattataggcgtaagccactgtgtctggcctagtgtatgattatgcatgagtcacgcaatgttctggtcctggattccaggagtagaggacctagctttaaatcaattagtttcagtttgcttgaaactagttcacctaaagctagatctcttaaaaccaatttactgaaaacttgtttgcttaaagttaatgacttaatgactaatttgccaaaagctcaattcctattttggtgtgtttatatccatttaggtgtcctattcttttttgtcatgctttggatatttcaaggatttatatctattcatccaagagtacttctgagctattatcagcaacataaatttatcaaatttgcagcactttgtaaatgatgagattgcttcctacctttatggatgtctttttctatgttatctaccattcaaaaacttttttaaaaagtttaaagtttctagcaataaatacaattggtacagacattttgtgtatcatttttttgtttcttaatccaatattcctttacaaattaaatgccttgaaaaatataatggagttcaatgtgattttgatgctttggtctaacttctacattcctactgttaaaaaggccagtatatcttaaacaaatgaataggcatgaggcatattcagttgacttacaatgaaaagttatacagacaacagtaataactaaaagggtgaatctgctaaatccttttgaaatgctgcagatttgataaatatttattttagactaattggttttaggtgaattggttttaggcaaattaatttagtaatctttgatctttagtcttcattttctgtcactcagtgagtttcttactggaaatgatgactcctgacaacagaatttccacatttgggggctattctaaggtgactatgccagccaacctgggaaatacataaaagagatctctgagtgagagggaaagaggtcagatttatacaactgagcgccagaggggaaaatgcaccttgttggagtgagaaatgttctgaaactgaattacttcttgtacagctgagatagcttcttctgaactattattaaataagtgaatacaaaggccctatgatgggaaatccagacaagcttgtgtaactttacatccatcccctcagggatatttttttttttttttttgagactccatctcaaaaaaaaggaaaaggatggccaggcacagtggctcatgcctgtaatcccagcactttggaaggctgaggtgggaggatcgcttgagtccaggagttcaacaccagcctgggccacatagtgggaccctgactctacaaaaa

SEQ ID NO: 144 - DNA, 4318 bp, Homo sapiens
aaagtagatccggccaggcagacaaaagtttgggagagaagttcggtctgtggctagcgtgagagctaggggggcgggggccggggagagtggggcagtcgggcgagtcgacgcgtgaacagatagacctgcggactggacagccgcggccagagaccctgctagccccgctcagccccagatgcgcggggggacgcagcccctcccgctgggggatgctgtgggattcctggcgcagggcatccaggccgcccgctaagcccctgtgcctcccctgtgcccctggggaaccagagtccggctgcagggaaagagaaccggccgccgagacgccgcagggtgccaggcggggagggggcgagaggccccaggcccgagggcatggagcggttaggagagaaagccagtcgcctgctggagaagttcggccgcagaaagggtgaatctagccggtctgggtctgacgggacccccgggccgggcaaggggcgcctaagtgggttggggggacctaggaagtcagggccccgaggagctactgggggacctggggatgagccgttggagccggcccgggagcaaggttccctggacgctgagcgaaatcagcgcggctcctttgaggcgccgcgctacgaaggctcttttcccgcggggccgccgcccacccgggccttgcctctacctcagtcgttgccccccgattttcggctggagcccacggccccggccctcagcccccgctctagcttcgccagtagctcggccagcgacgcgagcaagccgtccagcccccggggcagcctgctgctggacggggcgggggctggcggagctggaggtagccggccctgcagcaatcgcaccagcggcatcagcatgggctacgaccagcgccacgggagccccttgccagcggggccgtgcctgtttggcccacccctggccggagcaccggcaggctattctcccggaggggtcccgtccgcctacccggagctccacgccgccctggaccgattgtacgctcagcggcccgcggggttcggctgccaggaaagccgccactcgtatcccccggccctgggcagccctggagctctagccggggccggagtgggagcggcggggcccttggagagacggggggcgcaacccggacgacactctgtgaccggctacggggactgcgccgtgggcgcccggtaccaggacgagctaacagctttgcttcgcctgacggtgggcaccggtgggcgagaagccggagcccgcggagaaccctcggggattgagccgtcgggtctggaggagccaccaggtcctttcgttccggaggccgcccgggcccggatgcgggagccagaggccagggaggactacttcggcacctgtatcaagtgcaacaaaggcatctatgggcagagcaatgcctgccaggccctggacagcctctaccacacccagtgctttgtttgctgctcttgtgggcgaactttgcgttgcaaggctttctacagtgtcaatggctctgtgtactgtgaggaagattatctgttttcagggtttcaggaggcagctgagaaatgctgtgtctgtggtcacttgattttggagaagatcctacaagcaatggggaagtcctatcatccaggctgtttccgatgcattgtttgcaacaagtgcctggatggcatccccttcacagtggacttctccaaccaagtatactgtgtcaccgactaccacaaaaattatgctcctaagtgtgcagcctgtggccaacccatcctcccctctgagggctgtgaggacatcgtgagggtgatatccatggaccgggattatcactttgagtgctaccactgtgaggactgccggatgcagctgagtgatgaggaaggctgctgctgtttccctctggatgggcacttgctctgccatggttgccacatgcagcggctcaatgcccgacaaccccctgccaactatatctgagctgcaatcactgctgctgctgtcaccctgcagacaaactgctgtggccagtgggcccctctgaggccagccaaggcaaagaatgcactctgcaggcctggcagaagagtcctctggggaggaccccaagggccggagacccaaagatcatgatattccaaatggattgtggaagagaaaccttatatttaccagggtgggggcgactggcctttttcccatgtgtgcagtctgagcttaggcacacacaggagggttccaggactttctgaacatctgattctgtatcttcagtatatatattttgtttgttttagagatgggatctcaccatgttgcccaggctagtcttgaactcctgggctcgaatgatcctcccaccttggcctcccaaagtgctgggattataggcgtaagccactgtgtctggcctagtgtatgattatgcatgagtcacgcaatgttctggtcctggattccaggagtagaggacctagctttaaatcaattagtttcagctaaactgactagaaccaaatcaaagtgtaattctccctccagctcccccaaaccccagagttttggggttgtggttgatgcagtgtgggatgtccctgagaggtagcaagtctagggtggtgagttcctgctaggcaaccaaatttaagctcctcactttttgtgacacatggtgtcagatatggggtcccgcacctatatctggatgaagaggtagaaactctggacctcattaatgagttatttcttggccttcttctaaggactaggagagctccttatctgtctgagaatggggaccagctctgagtggggttgctgcctgtattccctgtttctcaggaacttacatgggtctggggaggctaggtaggtgattgtacgtggttgctcttctccttggctgggggaggtaatgagcagatctctgtgggtgtggagcttgttggggggatgtctaggaagcttcagcttagccacattcccaagtttaggtgcactgagccatatagcccagtgtatgcatgtgtgggtgtgttcatgcacacacacactctctctcttgtctctctgtctctctctcactctttcttactctcttctcaggtcacttgtacacttggtttcctagtagaagctcacttgccacctctcagaggggtcccggattgcatccatcacaatcccaaaactagagttggggggaactggagggagcaaaacactgatttgatactagtcagtttgcttgaaactagttcacctaaagctagatctcttaaaaccaatttactgaaaacttgtttgcttaaagttaatgacttaatgactaatttgccaaaagctcaattcctattttggtgtgtttatatccatttaggtgtcctattcttttttgtcatgctttggatatttcaaggatttatatctattcatccaagagtacttctgagctattatcagcaacataaatttatcaaatttgcagcactttgtaaatgatgagattgcttcctacctttatggatgtctttttctatgttatctaccattcaaaaacttttttaaaaagtttaaagtttctagcaataaatacaattggtacagacattttgtgtatcatttttttgtttcttaatccaatattcctttacaaattaaatgccttgaaaaatataatggagttcaatgtgattttgatgctttggtctaacttctacattcctactgttaaaaaggccagtatatcttaaacaaatgaataggcatgaggcatattcagttgacttacaatgaaaagttatacagacaacagtaataactaaaagggtgaatctgctaaatccttttgaaatgctgcagatttgataaatatttattttagactaattggttttaggtgaattggttttaggcaaattaatttagtaatctttgatctttagtcttcattttctgtcactcagtgagtttcttactggaaatgatgactcctgacaacagaatttccacatttgggggctattctaaggtgactatgccagccaacctgggaaatacataaaagagatctctgagtgagagggaaagaggtcagatttatacaactgagcgccagaggggaaaatgcaccttgttggagtgagaaatgttctgaaactgaattacttcttgtacagctgagatagcttcttctgaactattattaaataagtgaatacaaaggccctatgatgggaaatccagacaagcttgtgtaactttacatccatcccctcagggatatttttttttttttttt

SEQ ID NO: 145 - DNA, 1975 bp, Homo sapiens
cagtccggccgggcggagctaggggcgggcccctgcgtctctgggcgctggagcgcggcgactatcacgccgcgtggcggacggacggactgacggacgcgcagccttacccgaaaggccatggcggagcacgcccctcgccgctgctgcctgggctgggacttcagcacgcagcaggtaaaggttgttgctgttgatgcagagttgaatgtcttctatgaggaaagtgtgcattttgacagagatcttccagaatttgggtatgtacttgatgtgcatgtgactcagggcggtgttcatgtgcacaaggatgggctgacggtcacttctccagtactaatgtgggtccaggcactggatatcatcttggagaagatgaaggcttcgggcttcgaattctctcaagtcctagccttgtccggggcgggccagcaacacggaagtatatactggaaggctggagcccagcaggcactgacaagcttatcaccagacctccggctacaccagcagcttcaggactgtttctccatcagcgactgcccggtgtggatggactccagcaccacagcccagtgccgccagctggaggctgctgtgggtggtgctcaggctctcagctgcctcacggggtcccgtgcctatgagcgttttacagggaaccaaattgcaaaaatttaccagcagaaccccgaggcctactcacatacagagagaatttctttggtcagtagctttgctgcttccctgttccttggctcttactcccctattgactacagtgatggttctggaatgaatttgttgcagatacaggataaagtctggtcccaggcttgccttggtgcctgtgcacctcatttagaggagaagcttagcccaccagtaccatcatgctcagttgtgggagccatttcttcctactacgtccagcgctacggatttcctccaggatgcaaagtggtggccttcactggggacaacccagcgtcgctggcaggcatgagactggaggaaggtgacattgcggtcagcctgggcaccagtgacaccctgtttctctggctccaagagcccatgcctgccctggaaggccacatcttctgcaacccggttgactcccagcactacatggcactcctgtgctttaaaaatggctccctcatgagagagaagatccgcaacgagtctgtatcccgttcctggagcgatttctctaaggcactgcagtccacagagatgggcaacggtggaaacctgggtttttattttgatgtaatggagatcacccctgaaattattggacgtcataggtttaacacagaaaaccacaaggttgcagcattccctggggatgtggaggttcgagcactaattgaaggacaattcatggccaagaggattcacgcagaaggcctgggctatcgagtcatgtccaagacaaagattttggccacaggaggagcatctcacaatagagaaatcttacaggtgcttgcagatgtgtttgatgccccggtgtatgttatagacactgccaactcggcctgtgtgggttctgcataccgagcttttcatggtcttgcaggtggaacagatgtgcccttttcagaggttgtgaagttagctccaaatcccagactagctgctaccccaagcccgggagcttctcaggtgagagaccatcagaatttgtttgtagcatttgcattatgaaagcccgctagggttttttcccccaccaaaaggtcacctacattgaacgtgatgtgctcaactaaaggagaaattctgctttattgaaattatcaagaaaatggagctaaagggccatgttgtcagctgcaagtcacagatactgctgattttacagccagggtcagatggattgctgggcatatttgtattgcttcttatgcctcacggtgggcccttccatgtcactgggctataaaagctactgaaaggatccatc

SEQ ID NO: 146 - DNA, 3694 bp, Homo sapiens
cagtccggccgggcggagctaggggcgggcccctgcgtctctgggcgctggagcgcggcgactatcacgccgcgtggcggacggacggactgacggacgcgcagccttacccgaaaggccatggcggagcacgcccctcgccgctgctgcctgggctgggacttcagcacgcagcaggtaaaggttgttgctgttgatgcagagttgaatgtcttctatgaggaaagtgtgcattttgacagagatcttccagaatttgggactcagggcggtgttcatgtgcacaaggatgggctgacggtcacttctccagtactaatgtgggtccaggcactggatatcatcttggagaagatgaaggcttcgggcttcgaattctctcaagtcctagccttgtccggggcgggccagcaacacggaagtatatactggaaggctggagcccagcaggcactgacaagcttatcaccagacctccggctacaccagcagcttcaggactgtttctccatcagcgactgcccggtgtggatggactccagcaccacagcccagtgccgccagctggaggctgctgtgggtggtgctcaggctctcagctgcctcacggggtcccgtgcctatgagcgttttacagggaaccaaattgcaaaaatttaccagcagaaccccgaggcctactcacatacagagagaatttctttggtcagtagctttgctgcttccctgttccttggctcttactcccctattgactacagtgatggttctggaatgaatttgttgcagatacaggataaagtctggtcccaggcttgccttggtgcctgtgcacctcatttagaggagaagcttagcccaccagtaccatcatgctcagttgtgggagccatttcttcctactacgtccagcgctacggatttcctccaggatgcaaagtggtggccttcactggggacaacccagcgtcgctggcaggcatgagactggaggaaggtgacattgcggtcagcctgggcaccagtgacaccctgtttctctggctccaagagcccatgcctgccctggaaggccacatcttctgcaacccggttgactcccagcactacatggcactcctgtgctttaaaaatggctccctcatgagagagaagatccgcaacgagtctgtatcccgttcctggagcgatttctctaaggcactgcagtccacagagatgggcaacggtggaaacctgggtttttattttgatgtaatggagatcacccctgaaattattggacgtcataggtttaacacagaaaaccacaaggttgcagcattccctggggatgtggaggttcgagcactaattgaaggacaattcatggccaagaggattcacgcagaaggcctgggctatcgagtcatgtccaagacaaagattttggccacaggaggagcatctcacaatagagaaatcttacaggtgcttgcagatgtgtttgatgccccggtgtatgttatagacactgccaactcggcctgtgtgggttctgcataccgagcttttcatggtcttgcaggtggaacagatgtgcccttttcagaggttgtgaagttagctccaaatcccagactagctgctaccccaagcccgggagcttctcaggtctacgaggcccttctcccccagtatgccaaactcgagcagagaatcttgtctcagacccgggggcctccggagtgaacaggcatccctgttgcccctgcctgcccagatttactgaccccatttgtcgacatggccccagacaggagggatccacttctctgttctgaacagctcttcctgcccctactgactccttggagtgtccaggaccatcttaaagccgccctcagcacatctgcatgaagatagataggcactcctgtccctgtgcccgtgtgccccagggcaggaaagcatctctcttttcctgtcttttatcccaggaggcaggacaacactgagactgggatatgtccaataaaaactatgacttttccccttgcagaggcagaattaaagctaatctagggactcaaatcagcagaatgggggagacaaagcccggtctcaccccctaacctcatcctatctctttctccaaccctgactgcccactcctccgcaaaccgtgacccatagccgcccccaccccataccttgatctaccatccatcctcttccccaatccaaaccccacagtctcttctctcccacaccctgccctccttgtttcagctgtctgaggtgcctcgcagggcctctcttacttgccccatgctcaccctttccatgctgtccccattctctcctttcaccatctctcctctccccctccttcatctctcctccctccccaaactcacttggcataattcacaacctcccacccaaacaatgggcctggtggacgtgcttcctgtgccctccctttagctatgcccacagatcactgagagggaccatctcccaagtggtgcagtttagaacttctctccctttttctccctcattccctctctcttcttgcagtccacttgctgaagaagttgtgtcatttctctggaagaatttccaaaattctggatttcttttttattttggagtatttcatcagctgaaaagtgattcttactttgagttttcttcctatatttgtatagtgagttcctttttccttcctctttatccctcctgttttactttatacctctctattccttgctcaaattattgcaaaagcctctatagaaagtcctctgtgatctgactcctgcagactcttccagatttttctgcccaaggcctttactgagctcaggactccagctaaatcaaaatactcatgttctcacccagagtgacaaaatcctgcagataggtttaagacctagtggatcagagcagtagctactgggaagttaaaaggaaggggcttagaaaatgaatgggaccaaaggcatcacttctgatggagatgaagccatcttgaaagtgagtggtgtcctttggaggcatggtggatgaaaggcgcaaaggaagcaagaggttaaagataatggcccattagatacaacagcaagcccaagattccgaagaagacagacaactccccctagtaccacctagacattactttttaaagacattttacattattgtccagcagaaaaaggctgtcttggaccatgaaacagtaaactgtaactaaacacttcaacatgaatttgaaaataaataattgtggatataaaagaacaccagagatcagaaattcaaaaactcagaataaaaatgaaaaagctacaagcatatatgagaagagaactgactgaacttgggaaataatttgaacaaaaagataaatcttcacagatatgaatactaaattatatcttaatgaaaatagatatggtcacaagtacattaaggcacgtagaaggtaggagtaagaaaagctaagagaagcaaaacaaacaaagcaatattaaaggaagagccaaaaagacccagaaataaaatgacagataaagaagattgtcaaagaaaagatgatacaggtaagattggaactcatgaagacaaaagataagacagtggcatagagttaatatttaaaattcaaatattaaaactcaaataaaccccaaagaacttttgg

SEQ ID NO: 147 - DNA, 1968 bp, Homo sapiens
cagtccggccgggcggagctaggggcgggcccctgcgtctctgggcgctggagcgcggcgactatcacgccgcgtggcggacggacggactgacggacgcgcagccttacccgaaaggccatggcggagcacgcccctcgccgctgctgcctgggctgggacttcagcacgcagcaggtaaaggttgttgctgttgatgcagagttgaatgtcttctatgaggaaagtgtgcattttgacagagatcttccagaatttgggtatgtacttgatgtgcatgtggcggtgttcatgtgcacaaggatgggctgacggtcacttctccagtactaatgtgggtccaggcactggatatcatcttggagaagatgaaggcttcgggcttcgaattctctcaagtcctagccttgtccggggcgggccagcaacacggaagtatatactggaaggctggagcccagcaggcactgacaagcttatcaccagacctccggctacaccagcagcttcaggactgtttctccatcagcgactgcccggtgtggatggactccagcaccacagcccagtgccgccagctggaggctgctgtgggtggtgctcaggctctcagctgcctcacggggtcccgtgcctatgagcgttttacagggaaccaaattgcaaaaatttaccagcagaaccccgaggcctactcacatacagagagaatttctttggtcagtagctttgctgcttccctgttccttggctcttactcccctattgactacagtgatggttctggaatgaatttgttgcagatacaggataaagtctggtcccaggcttgccttggtgcctgtgcacctcatttagaggagaagcttagcccaccagtaccatcatgctcagttgtgggagccatttcttcctactacgtccagcgctacggatttcctccaggatgcaaagtggtggccttcactggggacaacccagcgtcgctggcaggcatgagactggaggaaggtgacattgcggtcagcctgggcaccagtgacaccctgtttctctggctccaagagcccatgcctgccctggaaggccacatcttctgcaacccggttgactcccagcactacatggcactcctgtgctttaaaaatggctccctcatgagagagaagatccgcaacgagtctgtatcccgttcctggagcgatttctctaaggcactgcagtccacagagatgggcaacggtggaaacctgggtttttattttgatgtaatggagatcacccctgaaattattggacgtcataggtttaacacagaaaaccacaaggttgcagcattccctggggatgtggaggttcgagcactaattgaaggacaattcatggccaagaggattcacgcagaaggcctgggctatcgagtcatgtccaagacaaagattttggccacaggaggagcatctcacaatagagaaatcttacaggtgcttgcagatgtgtttgatgccccggtgtatgttatagacactgccaactcggcctgtgtgggttctgcataccgagcttttcatggtcttgcaggtggaacagatgtgcccttttcagaggttgtgaagttagctccaaatcccagactagctgctaccccaagcccgggagcttctcaggtgagagaccatcagaatttgtttgtagcatttgcattatgaaagcccgctagggttttttcccccaccaaaaggtcacctacattgaacgtgatgtgctcaactaaaggagaaattctgctttattgaaattatcaagaaaatggagctaaagggccatgttgtcagctgcaagtcacagatactgctgattttacagccagggtcagatggattgctgggcatatttgtattgcttcttatgcctcacggtgggcccttccatgtcactgggctataaaagctactgaaaggatccatc

SEQ ID NO: 148 - DNA, 1160 bp, Homo sapiens
ccgctgcgcgcagccaggggccaacgagagccgacgctgggcgggcagcgtccgggagcccctccgaccctgcgctcccctcgtccgcgccctgaccccgcgtctccggccgtccagcccgcgccgcgtcacctcccctcccggagcgaagggccctgctcgcccgaggacggaggcccgcacgggacacggggccccagtttccgccccggaagcccaggacacggctccagtggcggcgcggcccagggcgcaggcgcgggtgtcggtcccaccgcgcgtcgtcctcgccccggccccggccaatcccttcgaatttggccgaggccgggaaatactagctaatcacggcgcgcgctgttgacgccggccaatgggagctccggaaggctgcgtggagacgccagcggcgggcggtggacagtcatggcggcccggcgcggggctctcatagtgctggagggcgtggaccgcgccgggaagagcacgcagagccgcaagctggtggaagcgctgtgcgccgcgggccaccgcgccgaactgctccggttcccggaaagatcaactgaaatcggcaaacttctgagttcctacttgcaaaagaaaagtgacgtggaggatcactcggtgcacctgcttttttctgcaaatcgctgggaacaagtaatttttccctagactggtgtaaacagccagacgtgggccttcccaaacccgacctggtcctgttcctccagttacagctggcggatgctgccaagcggggagcgtttggccatgagcgctatgagaacggggctttccaggagcgggcgctccggtgtttccaccagctcatgaaagacacgactttgaactggaagatggtggatgcttccaaaagcatcgaagctgtccatgaggacatccgcgtgctctctgaggacgccatccgcactgccacagagaagccgctgggggagctatggaatgtggacatgagcagagcgatggagcagtctcctgccctctcccctgtcctgatggcactctgttgtattttcttactgaagttcagtgataactctgagcagtttcattgtgatcactgtaaatggtaatcagttggaattctcctaaatgtcttccagacactagtaaaaaaagacctgaaaattgtt

SEQ ID NO: 149 - DNA, 1009 bp, Homo sapiens
ggcccagggcgcaggcgcgggtgtcggtcccaccgcgcgtcgtcctcgccccggccccggccaatcccttcgaatttggccgaggccgggaaatactagctaatcacggcgcgcgctgttgacgccggccaatgggagctccggaaggctgcgtggagacgccagcggcgggcggtggacagtcatggcggcccggcgcggggctctcatagtgctggagggcgtggaccgcgccgggaagagcacgcagagccgcaagctggtggaagcgctgtgcgccgcgggccaccgcgccgaactgctccggttcccggaaagatcaactgaaatcggcaaacttctgagttcctacttgcaaaagaaaagtgacgtggaggatcactcggtgcacctgcttttttctgcaaatcgctgggaacaagtgccgttaattaaggaaaagttgagccagggcgtgaccctcgtcgtggacagatacgcattttctggtgtggccttcaccggtgccaaggagaatttttccctagactggtgtaaacagccagacgtgggccttcccaaacccgacctggtcctgttcctccagttacagctggcggatgctgccaagcggggagcgtttggccatgagcgctatgagaacggggctttccaggagcgggcgctccggtgtttccaccagctcatgaaagacacgactttgaactggaagatggtggatgcttccaaaagcatcgaagctgtccatgaggacatccgcgtgctctctgaggacgccatccgcactgccacagagaagccgctgggggagctatggaatgtggacatgagcagagcgatggagcagtctcctgccctctcccctgtcctgatggcactctgttgtattttcttactgaagttcagtgataactctgagcagtttcattgtgatcactgtaaatggtaatcagttggaattctcctaaatgtcttccagacactagtaaaaaaagacctgaaaattgtt

SEQ ID NO: 150 - DNA, 2323 bp, Homo sapiens
ccgctgcgcgcagccaggggccaacgagagccgacgctgggcgggcagcgtccgggagcccctccgaccctgcgctcccctcgtccgcgccctgaccccgcgtctccggccgtccagcccgcgccgcgtcacctcccctcccggagcgaagggccctgctcgcccgaggacggaggcccgcacgggacacggggccccagtttccgccccggaagcccaggacacggctccagtggcggcgcggcccagggcgcaggcgcgggtgtcggtcccaccgcgcgtcgtcctcgccccggccccggccaatcccttcgaatttggccgaggccgggaaatactagctaatcacggcgcgcgctgttgacgccggccaatgggagctccggaaggctgcgtggagacgccagcggcgggcggtggacagtcatggcggcccggcgcggggctctcatagtgctggagggcgtggaccgcgccgggaagagcacgcagagccgcaagctggtggaagcgctgtgcgccgcgggccaccgcgccgaactgctccggttcccggaaagatcaactgaaatcggcaaacttctgagttcctacttgcaaaagaaaagtgacgtggaggatcactcggtgcacctgcttttttctgcaaatcgctgggaacaagtgtaaaaaccattgcacactgctccctctgcccttgccactttccttcctcctgagattcagtgaacgcagcactcgattctgaatgacagtgacagtagtgctgggcctgatgttcttctgtttagcagtcctgtgggcagaggtggtgaagcgccctagttcccaaagggcgctaatgaatgctgtttcgtcctcctgctccccacaccccataactaatagacttcagtttttcgggtttttttagacggagttccgctctgtcgccaggcagaggtgtgatctcggctcactgcaacctccgcctcccaggttcaagcgattctcctgcgtcagcctcccgagtagctgggactacaggcgcgccccagcatgctcagctaatttttgcaattttaatttactttatttttaaatttaatttttgtatttttagtagagacagggtttcaccatgttggccaggatggtctctcttgaccttgtgatccactcgcctcggcctcccaaagttctgggattacgcaggtgtgagccaccgtacctggcccttttttttttatttttaagacaaggtattgctctgtggcccaggctggagtgcagtggcacccgatcatggctcactgcagcctcaacttcctaggctcaagcagtcctcccacctcagcatcctgagtagcttagggccataggggcatgctaccaagcccggctaatttttttttttttttttaatgtagagtcaaggtctcaccatatcacgcccaggctggtctcaaacccctggcctcatagacttaatgttttaaagatagctttaggtatatagaaaaactgatcaaaaagtagagtatgtagagcgctccctacatactacccctgccttccccccttccccattatttatgtgctgtgttatgttacatttgttaaaattgataaccaatattgatacattagtaactgagtttatatgaactctcctaccacctttttttgttttacatcattgtagtaggtttcctcttcattcaacacttaatgttgatgtgtgttctttcaatgtttttatttacatttatatacatatgtagaaactactatagttagaattttgttttttaacataaatgaggtcataccatacaaattatttggcagctttctttctaactctgccttacagatttctgcacttacagatcccctaactctgcccttctcattctctttaattgtcgtcgcattgtctctagaaccacggtacgtgtagccagttccctgctggtgaatcttcagtggttcctcatcatccgtgttacatgaaacactgcattactctcctccggcttagctttgtgtcttgcttggaaaggctgtccccactccaagtcttaaatgaaaatgagaccatttttaataatctttttaacacatctagaatttatggaggcaattgttcttctgattttgctttttgtggctttgtagaaaagtgatgaaacacgtatatgcccaatttaaaatgaagaataatcctgattttactttttagataataatcttatcccaggtacccagggctacgtctcttgtgtccatctattctcctacaggttacttgtttccctaatagatatttaagtttcctcta

SEQ ID NO: 151 - DNA, 1450 bp, Homo sapiens
ccgctgcgcgcagccaggggccaacgagagccgacgctgggcgggcagcgtccgggagcccctccgaccctgcgctcccctcgtccgcgccctgaccccgcgtctccggccgtccagcccgcgccgcgtcacctcccctcccggagcgaagggccctgctcgcccgaggacggaggcccgcacgggacacggggccccagtttccgccccggaagcccaggacacggctccagtggcggcgcggcccagggcgcaggcgcgggtgtcggtcccaccgcgcgtcgtcctcgccccggccccggccaatcccttcgaatttggccgaggccgggaaatactagctaatcacggcgcgcgctgttgacgccggccaatgggagctccggaaggctgcgtggagacgccagcggcgggcggtggacagtcatggcggcccggcgcggggctctcatagtgctggagggcgtggaccgcgccgggaagagcacgcagagccgcaagctggtggaagcgctgtgcgccgcgggccaccgcgccgaactgctccggttcccggaaagatcaactgaaatcggcaaacttctgagttcctacttgcaaaagaaaagtgacgtggaggatcactcggtgcacctgcttttttctgcaaatcgctgggaacaagtgccgttaattaaggaaaagttgagccagggcgtgaccctcgtcgtggacagatacgcattttctggtgtggccttcaccggtgccaaggagaatttttccctagactggtgtaaacagccagacgtgggccttcccaaacccgacctggtcctgttcctccagttacagctggcggatgctgccaagcggggagcgtttggccatgagcgctatgagaacggggctttccaggagcgggcgctccggtgtttccaccagctcatgaaagacacgactttgaactggaagatggtggatgcttccaaaagcatcgaagctgtccatgaggacatccgcgtgctctctgaggacgccatccgcactgccacagagaagccgctgggggagctatggaagtgacccaaggctgcccactggagacgcctctccctgcagtcccccgagaggtgggagactcgcggaaggccccgtccccagcggagtccagaccccacaacttcaggagctctttcccggcagcagagatctgcaggctgcctcttctgccccggagctggggtgcactggggacccccgtggtggggaccttggcagtgtggacatgagcagagcgatggagcagtctcctgccctctcccctgtcctgatggcactctgttgtattttcttactgaagttcagtgataactctgagcagtttcattgtgatcactgtaaatggtaatcagttggaattctcctaaatgtcttccagacactagtaaaaaaagacctgaaaattgtt

SEQ ID NO: 152 - DNA, 2543 bp, Homo sapiens
tagtcatatcttacttggatgaagccaaggttggcctggggtgacctgagggactggggcctatgtgtccatctttctagaatcgcccggaactgaggactgagagggtagggtattgtggtctatgggaactacagaccatagcgcatggtccatcactgtccagagcccaagggacccatcgggaccattgttctattcccttgcggctgcggttttctctgccttggcccagcctgcctcgcgccagctctggcatgggaccacaatgcgctgccttgccctggaaaagggtccagctggcagcctcgctgctccccgccttgatataatgctgcgctctcaagtggcaggtcgagtctccccagaggacgcctgagagcgaccgcgctccgcccaggattctctacggcctcggggccgctaagccccgcccatagttccgcccatccgagaatttgtccaatccaggcgaagtattcacgctccgcccaaagttttgtgttgtcacttccggcccgctccaggaagtcgtgctgcggagccaaatttgaagcaagcggaggcgcgggggcgcgtctacgaagccggacctgtagcagtttctttggctgcctgggccccttgagtccagccatcatgcctatccgtgctctgtgcactatctgctccgacttcttcgatcactcccgcgacgtggccgccatccactgcggccacaccttccacttgcagtgcctaattcagtggtttgagacagcaccaagtcggacctgcccacagtgccgaatccaggttggcaaaagaaccattatcaataagctcttctttgatcttgcccaggaggaggagaatgtcttggatgcagaattcttaaagaatgaactggacaatgtcagagcccagctttcccagaaagacaaggagaaacgagacagccaggtcatcatcgacactctgcgggatacgctggaagaacgcaatgctactgtggtatctctgcagcaggccttgggcaaggccgagatgctgtgctccacactgaaaaagcagatgaagtacttagagcagcagcaggatgagaccaaacaagcacaagaggaggcccgccggctcaggagcaagatgaagaccatggagcagattgagcttctactccagagccagcgccctgaggtggaggagatgatccgagacatgggtgtgggacagtcagcggtggaacagctggctgtgtactgtgtgtctctcaagaaagagtacgagaatctaaaagaggcacggaaggcctcaggggaggtggctgacaagctgaggaaggatttgttttcctccagaagcaagttgcagacagtctactctgaattggatcaggccaagttagaactgaagtcagcccagaaggacttacagagtgctgacaaggaaatcatgagcctgaaaaagaagctaacgatgctgcaggaaaccttgaacctgccaccagtggccagtgagactgtcgaccgcctggttttagagagcccagcccctgtggaggtgaatctgaagctccgccggccatccttccgtgatgatattgatctcaatgctacctttgatgtggatactcccccagcccggccctccagctcccagcatggttactacgaaaaactttgcctagagaagtcacactccccaattcaggatgtccccaagaagatatgcaaaggccccaggaaggagtcccagctctcactgggtggccagagctgtgcaggagagccagatgaggaactggttggtgccttccctatttttgtccggaatgccatcctaggccagaaacagcccaagaggcccaggtcagagtcctcttgcagcaaagatgtggtaaggacaggcttcgatgggctcggtggccggacaaaattcatccagcctactgacacagtcatgatccgcccattgcctgttaagcccaagaccaaggttaagcagagggtgagggtgaagacagtgccttctctcttccaggccaagctggacaccttcctgtggtcgtgagaacagtgagtctgaccaatggccagacacatgcctgcaacttgtaggtcaaggactgtccaggcaggggttttgtggacagagccccactttcgggaccagcctgaggtgtaagggcagacaaacaggtgagggtgagtgtgacacccagagactgctcttcctgccctcaccctgccccactcctacgactgggagctgacatgaccagcccactgatcctgtcagcaggtcctgctcctgttgccaggctcctgtttatagccatgatcagatgtggtcagactctttctgggcctggagaccacggtcacttgttgactgtctctgtggaccagagtgcttgaggcatctcaggcagcctcagcccaagcttctacctgcctttgacttgcttctaggcatagcctgggccaagcagggtggggaatggaggatagcatgggatgtatggagaggatggaagattttcatgtaaaataaaattaaaaaaa

SEQ ID NO: 153 - DNA, 1513 bp, Homo sapiens
atgaatcaggaagacccagggtggagaggaggagtagtcgcccaaggtccttggccattcctattgtgtgtccctgccttatgggagaccacgtggaggtcagctatgatgctttcctgctgcttattgtgggtattgcctttcagaatgaactggacaatgtcagagcccagctttcccagaaagacaaggagaaacgagacagccaggtcatcatcgacactctgcgggatacgctggaagaacgcaatgctactgtggtatctctgcagcaggccttgggcaaggccgagatgctgtgctccacactgaaattgcagacagtctactctgaattggatcaggccaagttagaactgaagtcagcccagaaggacttacagagtgctgacaaggaaatcatgagcctgaaaaagaagctaacgatgctgcaggaaaccttgaacctgccaccagtggccagtgagactgtcgaccgcctggttttagagagcccagcccctgtggaggtgaatctgaagctccgccggccatccttccgtgatgatattgatctcaatgctacctttgatgtggatactcccccagcccggccctccagctcccagcatggttactacgaaaaactttgcctagagaagtcacactccccaattcaggatgtccccaagaagatatgcaaaggccccaggaaggagtcccagctctcactgggtggccagagctgtgcaggagagccagatgaggaactggttggtgccttccctatttttgtccggaatgccatcctaggccagaaacagcccaagaggcccaggtcagagtcctcttgcagcaaagatgtggtaaggacaggcttcgatgggctcggtggccggacaaaattcatccagcctactgacacagtcatgatccgcccattgcctgttaagcccaagaccaaggttaagcagagggtgagggtgaagacagtgccttctctcttccaggccaagctggacaccttcctgtggtcgtgagaacagtgagtctgaccaatggccagacacatgcctgcaacttgtaggtcaaggactgtccaggcaggggttttgtggacagagccccactttcgggaccagcctgaggtgtaagggcagacaaacaggtgagggtgagtgtgacacccagagactgctcttcctgccctcaccctgccccactcctacgactgggagctgacatgaccagcccactgatcctgtcagcaggtcctgctcctgttgccaggctcctgtttatagccatgatcagatgtggtcagactctttctgggcctggagaccacggtcacttgttgactgtctctgtggaccagagtgcttgaggcatctcaggcagcctcagcccaagcttctacctgcctttgacttgcttctaggcatagcctgggccaagcagggtggggaatggaggatagcatgggatgtatggagaggatggaagattttcatgtaaaataaaattaaaaaaa

SEQ ID NO: 154 - DNA, 3320 bp, Homo sapiens
cccgcccccggcccggggtgcgaatccggtgccggcaagcggctggcgatgctggaggttcgctagccgaagcggctgcatctggcgccgcgtctgccccgcgtgctcggagcggattctgcccgccgtccccggagccctcggcgccccgctgagcccgcgatcacttcctccctgtgaccaaccggcgctgcaggttagagcctggcaatgccgtttgggtgtgtgactctgggcgacaagaagaactataaccagccatcggaggtgactgacagatatgatttgggacaggtcatcaagactgaggagttttgtgaaatcttccgggccaaggacaagacgacaggcaagctgcacacctgcaagaagttccagaagcgggacggccgcaaggtgcggaaagctgccaagaacgagataggcatcctcaagatggtgaagcatcccaacatcctacagctggtggatgtgtttgtgacccgcaaggagtactttatcttcctggagctggccacggggagggaggtgtttgactggatcctggaccagggctactactcggagcgagacacaagcaacgtggtacggcaagtcctggaggccgtggcctatttgcactcactcaagatcgtgcacaggaatctcaagatgggcgctgtgtttgtagccccagaggtggtaggccggcagcggtatggacgccctgtggactgctgggccattggagtcatcatgtacatcctgctttcaggcaacccacctttctatgaggaggtggaagaagatgattatgagaaccatgataagaatctcttccgcaagatcctggctggtgactatgagtttgactctccatattgggatgatatttcgcaggcagccaaagacctggtcacaaggctgatggaggtggagcaagaccagcggatcactgcagaagaggccatctcccatgagtggatttctggcaatgctgcttctgataagaacatcaaggatggtgtctgtgcccagattgaaaagaactttgccagggccaagtggaagaaggctgtccgagtgaccaccctcatgaaacggctccgggcaccagagcagtccagcacggctgcagcccagtcggcctcagccacagacactgccacccccggggctgcaggtggggccacagctgcagctgcgagtggagctacctcagcccctgagggtgatgctgctcgtgctgcaaagagtgataatgtggcccccgcagaccgtagtgccaccccagccacagatggaagtgccaccccagccactgatggcagtgtcaccccagccaccgatggaagcatcactccagccactgatgggagtgtcaccccagccactgacaggagcgctactccagccactgatgggagagccacaccagccacagaagagagcactgtgcccaccacccaaagcagtgccatgctggccaccaaggcagctgccacccctgagccggctatggcccagccggacagcacagccccagagggcgccacaggccaggctccaccctctagtaaaggggaagaggctgctggttatgcccaggagtctcaaagggaggaggccagctgagtaggcagcctggtgagggggggcaggggatgggcaggagggtgggagagtggatgaggggcttctcactgtacatagagtcactggcatgatgccctcgctcccccatgcccccacatcccagtggggcataactaggggtcacgggagagcagtctcgtctcctgtgtgtatgtgtgtgagtggtgggcaggccagtggcagggccggccccagcccctgcatggattccttgtggcttttctgtcttttgctagcttcaccagtttctgttccttgtgggatgctgctctagggatactcagggggctcctgctctccttccccttcccttcttgcctcaccattcccctaggcaggccctgcaggtcccacactctcccaggccctaaacttgggcggccttgccctgagagctggtcctccagcgaggccctgtcagcggtcttaggctcctgcacatgaaggtgtgtgcctgtggtgtgtgggctgctctaggagcagatacaggctggtatagaggatgcagaaaggtagggcagtatgtttaagtccagacttggcacatggctagggatactgctcactagctgtggaggtcctcaggagtggagagaatgagtaggagggcagaagcttccatttttgtccttcctaagaccctgttatttgtgttatttcctgcctttccgagtcctgcagtgggctgccctgtaccctgaacctcatgagcctctaagggaaaggaggaacaattaggacgtggcaatgagacctggcagggcagagtacaagcccagcacccagtgtcccagccttactgggtccttaccctgggccaaacagggagggctgatacctccttgctcttcctagatgcccacctcctacaatctcagcccacaagtcctctccaccctagggggcttgctgcatggcaataactcataatctgatttggaggtttgccctttacaggggcagattttctgctcagttcaacaatgaaatgaagaggaactccctctttctacagctcacttctatcagaggcccaggtgcctcagagccacattgagttgctttttctgggatgaggaagtagggttaaactccccagtttcctgagggaggctcctgacaggtgccctttgtcagaccctaccacagcctggataggcagccacattggtcctcgcccttgctcggcactccgtggtggtcctgcccttctccctgcatgcctgtgggtctgctctggtgtgtgaaggtcggtgggttaactgtgtgcctactgaacctggcaaataaacatcaccctgcaaagcctctggccaccctctcgcctttgcttcctctgtcctactggggaggagcccctggaaggcagtggggaagggagaggctgggagcaggttcacaagtagtggctgggagtagtagtgaacagtgccctgtggatttcttgggctgagggtgaagatcatcctcaccacagtgtattcctcaatggtggtggtggtgggggtcctctgaactctagaaatccatgtgagtagtgggtcttgggctgcatttggaccaaggaatactccctgggctgagagctcaagtaagggctgctgtttttgactcctgttgaccgaggagccttactcttgatttaggcatagagctggaatctacctgggccagccagcgcaagg

SEQ ID NO: 155 - DNA, 3422 bp, Homo sapiens
cccgcccccggcccggggtgcgaatccggtgccggcaagcggctggcgatgctggaggttcgctagccgaagcggctgcatctggcgccgcgtctgccccgcgtgctcggagcggattctgcccgccgtccccggagccctcggcgccccgctgagcccgcgatcacttcctccctgtgaccaaccggcgctgcaggttagagcctggcaatgccgtttgggtgtgtgactctgggcgacaagaagaactataaccagccatcggaggtgactgacagatatgatttgggacaggtcatcaagactgaggagttttgtgaaatcttccgggccaaggacaagacgacaggcaagctgcacacctgcaagaagttccagaagcgggacggccgcaaggtgcggaaagctgccaagaacgagataggcatcctcaagatggtgaagcatcccaacatcctacagctggtggatgtgtttgtgacccgcaaggagtactttatcttcctggagctggccacggggagggaggtgtttgactggatcctggaccagggctactactcggagcgagacacaagcaacgtggtacggcaagtcctggaggccgtggcctatttgcactcactcaagatcgtgcacaggaatctcaagctggagaacctggtttactacaaccggctgaagaactcgaagattgtcatcagtgacttccatctggctaagctagaaaatggcctcatcaaggagccctgtgggacccccgagtatctggccccagaggtggtaggccggcagcggtatggacgccctgtggactgctgggccattggagtcatcatgtacatcctgctttcaggcaacccacctttctatgaggaggtggaagaagatgattatgagaaccatgataagaatctcttccgcaagatcctggctggtgactatgagtttgactctccatattgggatgatatttcgcaggcagccaaagacctggtcacaaggctgatggaggtggagcaagaccagcggatcactgcagaagaggccatctcccatgagtggatttctggcaatgctgcttctgataagaacatcaaggatggtgtctgtgcccagattgaaaagaactttgccagggccaagtggaagaaggctgtccgagtgaccaccctcatgaaacggctccgggcaccagagcagtccagcacggctgcagcccagtcggcctcagccacagacactgccacccccggggctgcaggtggggccacagctgcagctgcgagtggagctacctcagcccctgagggtgatgctgctcgtgctgcaaagagtgataatgtggcccccgcagaccgtagtgccaccccagccacagatggaagtgccaccccagccactgatggcagtgtcaccccagccaccgatggaagcatcactccagccactgatgggagtgtcaccccagccactgacaggagcgctactccagccactgatgggagagccacaccagccacagaagagagcactgtgcccaccacccaaagcagtgccatgctggccaccaaggcagctgccacccctgagccggctatggcccagccggacagcacagccccagagggcgccacaggccaggctccaccctctagtaaaggggaagaggctgctggttatgcccaggagtctcaaagggaggaggccagctgagtaggcagcctggtgagggggggcaggggatgggcaggagggtgggagagtggatgaggggcttctcactgtacatagagtcactggcatgatgccctcgctcccccatgcccccacatcccagtggggcataactaggggtcacgggagagcagtctcgtctcctgtgtgtatgtgtgtgagtggtgggcaggccagtggcagggccggccccagcccctgcatggattccttgtggcttttctgtcttttgctagcttcaccagtttctgttccttgtgggatgctgctctagggatactcagggggctcctgctctccttccccttcccttcttgcctcaccattcccctaggcaggccctgcaggtcccacactctcccaggccctaaacttgggcggccttgccctgagagctggtcctccagcgaggccctgtcagcggtcttaggctcctgcacatgaaggtgtgtgcctgtggtgtgtgggctgctctaggagcagatacaggctggtatagaggatgcagaaaggtagggcagtatgtttaagtccagacttggcacatggctagggatactgctcactagctgtggaggtcctcaggagtggagagaatgagtaggagggcagaagcttccatttttgtccttcctaagaccctgttatttgtgttatttcctgcctttccgagtcctgcagtgggctgccctgtaccctgaacctcatgagcctctaagggaaaggaggaacaattaggacgtggcaatgagacctggcagggcagagtacaagcccagcacccagtgtcccagccttactgggtccttaccctgggccaaacagggagggctgatacctccttgctcttcctagatgcccacctcctacaatctcagcccacaagtcctctccaccctagggggcttgctgcatggcaataactcataatctgatttggaggtttgccctttacaggggcagattttctgctcagttcaacaatgaaatgaagaggaactccctctttctacagctcacttctatcagaggcccaggtgcctcagagccacattgagttgctttttctgggatgaggaagtagggttaaactccccagtttcctgagggaggctcctgacaggtgccctttgtcagaccctaccacagcctggataggcagccacattggtcctcgcccttgctcggcactccgtggtggtcctgcccttctccctgcatgcctgtgggtctgctctggtgtgtgaaggtcggtgggttaactgtgtgcctactgaacctggcaaataaacatcaccctgcaaagcctctggccaccctctcgcctttgcttcctctgtcctactggggaggagcccctggaaggcagtggggaagggagaggctgggagcaggttcacaagtagtggctgggagtagtagtgaacagtgccctgtggatttcttgggctgagggtgaagatcatcctcaccacagtgtattcctcaatggtggtggtggtgggggtcctctgaactctagaaatccatgtgagtagtgggtcttgggctgcatttggaccaaggaatactccctgggctgagagctcaagtaagggctgctgtttttgactcctgttgaccgaggagccttactcttgatttaggcatagagctggaatctacctgggccagccagcgcaagg

SEQ ID NO: 156 - DNA, 3338 bp, Homo sapiens
cccgcccccggcccggggtgcgaatccggtgccggcaagcggctggcgatgctggaggttcgctagccgaagcggctgcatctggcgccgcgtctgccccgcgtgctcggagcggattctgcccgccgtccccggagccctcggcgccccgctgagcccgcgatcacttcctccctgtgaccaaccggcgctgcaggttagagcctggcaatgccgtttgggtgtgtgactctgggcgacaagaagaactataaccagccatcggaggtgactgacagatatgatttgggacaggtcatcaagactgaggagttttgtgaaatcttccgggccaaggacaagacgacaggcaagctgcacacctgcaagaagttccagaagcgggacggccgcaaggtgcggaaagctgccaagaacgagataggcatcctcaagatggtgaagcatcccaacatcctacagctggtggatgtgtttgtgacccgcaaggagtactttatcttcctggagctggccacggggagggaggtgtttgactggatcctggaccagggctactactcggagcgagacacaagcaacgtggtacggcaagtcctggaggccgtggcctatttgcactcactcaagatcgtgcacaggaatctcaagctggagaacctggtttactacaaccggctgaagaactcgaagattgtcatcagtgacttccatctggctaagctagaaaatggcctcatcaaggagccctgtgggacccccgagctttcaggcaacccacctttctatgaggaggtggaagaagatgattatgagaaccatgataagaatctcttccgcaagatcctggctggtgactatgagtttgactctccatattgggatgatatttcgcaggcagccaaagacctggtcacaaggctgatggaggtggagcaagaccagcggatcactgcagaagaggccatctcccatgagtggatttctggcaatgctgcttctgataagaacatcaaggatggtgtctgtgcccagattgaaaagaactttgccagggccaagtggaagaaggctgtccgagtgaccaccctcatgaaacggctccgggcaccagagcagtccagcacggctgcagcccagtcggcctcagccacagacactgccacccccggggctgcaggtggggccacagctgcagctgcgagtggagctacctcagcccctgagggtgatgctgctcgtgctgcaaagagtgataatgtggcccccgcagaccgtagtgccaccccagccacagatggaagtgccaccccagccactgatggcagtgtcaccccagccaccgatggaagcatcactccagccactgatgggagtgtcaccccagccactgacaggagcgctactccagccactgatgggagagccacaccagccacagaagagagcactgtgcccaccacccaaagcagtgccatgctggccaccaaggcagctgccacccctgagccggctatggcccagccggacagcacagccccagagggcgccacaggccaggctccaccctctagtaaaggggaagaggctgctggttatgcccaggagtctcaaagggaggaggccagctgagtaggcagcctggtgagggggggcaggggatgggcaggagggtgggagagtggatgaggggcttctcactgtacatagagtcactggcatgatgccctcgctcccccatgcccccacatcccagtggggcataactaggggtcacgggagagcagtctcgtctcctgtgtgtatgtgtgtgagtggtgggcaggccagtggcagggccggccccagcccctgcatggattccttgtggcttttctgtcttttgctagcttcaccagtttctgttccttgtgggatgctgctctagggatactcagggggctcctgctctccttccccttcccttcttgcctcaccattcccctaggcaggccctgcaggtcccacactctcccaggccctaaacttgggcggccttgccctgagagctggtcctccagcgaggccctgtcagcggtcttaggctcctgcacatgaaggtgtgtgcctgtggtgtgtgggctgctctaggagcagatacaggctggtatagaggatgcagaaaggtagggcagtatgtttaagtccagacttggcacatggctagggatactgctcactagctgtggaggtcctcaggagtggagagaatgagtaggagggcagaagcttccatttttgtccttcctaagaccctgttatttgtgttatttcctgcctttccgagtcctgcagtgggctgccctgtaccctgaacctcatgagcctctaagggaaaggaggaacaattaggacgtggcaatgagacctggcagggcagagtacaagcccagcacccagtgtcccagccttactgggtccttaccctgggccaaacagggagggctgatacctccttgctcttcctagatgcccacctcctacaatctcagcccacaagtcctctccaccctagggggcttgctgcatggcaataactcataatctgatttggaggtttgccctttacaggggcagattttctgctcagttcaacaatgaaatgaagaggaactccctctttctacagctcacttctatcagaggcccaggtgcctcagagccacattgagttgctttttctgggatgaggaagtagggttaaactccccagtttcctgagggaggctcctgacaggtgccctttgtcagaccctaccacagcctggataggcagccacattggtcctcgcccttgctcggcactccgtggtggtcctgcccttctccctgcatgcctgtgggtctgctctggtgtgtgaaggtcggtgggttaactgtgtgcctactgaacctggcaaataaacatcaccctgcaaagcctctggccaccctctcgcctttgcttcctctgtcctactggggaggagcccctggaaggcagtggggaagggagaggctgggagcaggttcacaagtagtggctgggagtagtagtgaacagtgccctgtggatttcttgggctgagggtgaagatcatcctcaccacagtgtattcctcaatggtggtggtggtgggggtcctctgaactctagaaatccatgtgagtagtgggtcttgggctgcatttggaccaaggaatactccctgggctgagagctcaagtaagggctgctgtttttgactcctgttgaccgaggagccttactcttgatttaggcatagagctggaatctacctgggccagccagcgcaagg

SEQ ID NO: 157 - DNA, 393 bp, Homo sapiens
atggaggtcactccactgtcactacaaattccgggaaggaaacttccccagattcctccacttggaggtggcgctcggcctcaggctaggagggaacaggtgagaaagcagcccaggtggggtgggtttgcagcgaggagacaccccagggcaaacagcctgaccccagccagggatgtccaagaaaggccgcgactcctgataatcccttatgccccggagcgcctcgcctgcagaggcagcgtccccgccacccagccccggctctgccgcggtgaggaccggcgggtcggggtggactggacactgtcccacccatcaaatggtgatttaggagccgtgacatccgaatgccatcctccactggcgagaccctcagagcagccacgcctc

SEQ ID NO: 158 - DNA, 357 bp, Homo sapiens
atgttggttatacaactacaagctaagtcaaagaggatcggagcccaaacagagaagacagctgtgggtgtcagaggagaaaagactgaaagggaagctggaaagaaaggaatggggagaaaaccaggaaaaaggatggagagagagagctcagagctgaggaaagctgcacaaaaatgcaagatctggaaacagatggaaagaattgtgaaaagcagaactgggcacacatcctttaaaattcagcctttaaagaggatctactccaaaccccgcctctatggggaggaaaatgaaggtccatgtggggaaacgcttgccaagataatatgcagggagttaatggcagacctagga

SEQ ID NO: 159 - DNA, 989 bp, Homo sapiens
gggattcccacccacccacagcccgccatggcgtctcagctccagaaccgactccgctccgcactggccttggtcacaggtgcggggagcggcatcggccgagcggtcagtgtacgcctggccggagagggggccaccgtagctgcctgcgacctggaccgggcagcggcacaggagacggtgcggctgctgggcgggccagggagcaaggaggggccgccccgagggaaccatgctgccttccaggctgacgtgtctgaggccagggccgccaggtgcctgctggaacaagtgcaggcctgcttttctcgcccaccatctgtcgttgtgtcctgtgcgggcatcacccaggatgagtttctgctgcacatgtctgaggatgactgggacaaagtcatagctgtcaacctcaagggcaccttcctagtcactcaggctgcagcacaagccctggtgtccaatggttgtcgtggttccatcatcaacatcagtagcatcgtaggaaaggtggggaacgtggggcagacaaactatgcagcatccaaggctggagtgattgggctgacccagaccgcagcccgggagcttggacgacatgggatccgctgtaactctgtcctcccagggttcattgcaacacccatgacacagaaagtgccacagaaagtggtggacaagattactgaaatgatcccgatgggacacttgggggaccctgaggatgtggcagatgtggtcgcattcttggcatctgaagatagtggatacatcacagggacctcagtggaagtcactggaggtcttttcatgtaactgcctcaaggaccctggactctgctcacccccccaccactctgcctggcctcctgctgatgaggactctaagttcccaggatacaaaaggggtggcagtgtatggttcaggaatgctgaatatgggaagcaggggtgcttgtgaccctaataaattccaagtcctcttccctgcc

SEQ ID NO: 160 - DNA, 6425 bp, Homo sapiens
cacacagaagcggcagccaccgaggagggagcagtgccgggagccccgacggcgccttgctgcatggagctgggccgctgacagctgtcgctgcccgcagcctctgacctccctgggaccccggcgtctgaggctcatagtctgctccctgtcttctgtcagcctcagggcatccagcgtctcaggccgacctgggtccctgggacccggcgtttcggcttctcagccatggagcggtgcagccgctgccatcgcctcctcctcctcctacctctggtgctggggctgagcgcggccccaggctgggcaggtgcaccccctgtggatgtgctccgggccctgaggttcccctccctccctgatggtgtccggagagcgaaaggcatctgtccagctgatgtggcctaccgagtggcacgacctgcccagctcagtgcacccactcgccagcttttcccaggaggatttcccaaagatttctctctgctgactgttgtccggacccgccctggtctccaagctcccctcctgactctctacagtgcccagggtgtccgacagctgggcctggagctgggccgacctgtccgcttcctgtatgaagaccagactgggcggcctcaacctccctctcagccagtcttccgaggcctcagcctagcagatggcaagtggcaccgtgtggctgtggctgtgaagggccagtctgtcaccctcattgttgactgcaagaagcgagtcacccggcctctcccccgaagtgctcgtccagtattggacacccatggagtgatcatctttggtgcccgtattctggatgaagaagtctttgagggtgatgtccaggagctggccattgtcccaggggtccaggcagcctatgaatcatgtgaacagaaggagctggaatgcgaggggggccagagggaaagaccccaaaaccaacagcctcacagagcccagagatctccacagcagcaaccatcaagacttcacaggccacaaaatcaggaaccccagagccagcccactgagtctctctactatgactacgagcccccctattatgatgtgatgactacggggacaacccctgattatcaggaccccaccccaggtgaagaggaagaaatcctggagtcgagcctcttgccaccccttgaggaggagcagacagatctccaggtcccccccacagccgacaggttccaggcagaggaatatggggagggtggcacagacccccctgaagggccctacgattacacctatggctatggggatgattatcgtgaggagacagagcttggccctgccctctctgcggagacagcccactcaggagccgctgcccatggaccccgagggctgaagggagagaaaggagagcctgcagtgttggaacctggtatgctcgtggaggggccccctggcccagaaggccctgcgggattgattggtccccctggcatccaggggaacccaggcccagttggagaccctggagagaggggcccccctggccgagcagggctccctggatcagatggggctcctggtcctcctggcacatctctcatgctcccattccggtttggcagtggtgggggtgacaagggccctgtggtggcggcccaggaggctcaggcccaggcgatcctgcagcaggcgaggctggcgctccgtggaccccctggccccatgggatacacagggcgccctggacccttgggccaacctgggagccctggcctgaaaggagagtctggagacttaggacctcagggccccagaggacctcagggcctcacaggccctcctggcaaggctgggcgaaggggccgggcaggtgctgatggagcccgagggatgcctggagatcctggagtgaagggtgaccgaggttttgatggactcccagggctccctggagagaagggccataggggtgatactggtgcccagggccttcctggtccccctggtgaggatggagagaggggagatgacggggagattgggcctcgagggctgcctggagagtcgggacctcgaggtctccttggccccaaaggcccacctggtattcctggaccccctggcgtccgaggcatggatggtccccagggccccaaagggagcttgggaccccagggagagccaggacctcctggacaacagggcacccctgggacccagggtcttcccgggccccagggtgccatcggccctcatggagagaagggtcctcaagggaagccagggctccccggcatgcctggctcagacggacccccgggtcacccagggaaggaaggtccccctggaaccaaaggaaaccagggtccctctggacctcagggacctctaggatacccaggacctcgaggggtcaagggtgtggacggaattcggggtctgaagggtcataagggtgagaagggtgaggatggctttcctgggttcaaaggtgacataggcgtgaaaggtgacaggggcgaagttggagtccctggttccaggggagaggatggtcctgaggggccaaagggacgcactggaccgactggagaccctgggcccccagggctcatgggcgagaagggcaagctgggtgttcctggtctgcctggctatcctggacgtcagggacccaaggggtccctaggatttcctggctttcctggtgccagtggagagaagggagcccggggcctgtcggggaagtcagggcctcggggagaacggggccccacgggtccacggggtcagcggggaccccgaggtgccactgggaagtctggagctaagggaacatctggtggtgatggcccccatgggccccctggagagaggggcctccctggacctcagggtcccaacgggtttcctggaccgaaaggacccccgggcccccctgggaaggatgggctgccgggacacccaggccaaagaggagaagtgggtttccaagggaagaccggcccccctggtcctccaggagtggtgggacctcagggagcagcaggagaaaccggccctatgggggagagaggtcacccaggccccccggggccccctggagagcagggactacctgggacagctggaaaagaaggaacaaagggtgaccctggtccccctggggccccagggaaggatggtcctgctggtctgaggggattcccaggagagagaggcctcccaggcactgctggtggacctggtttgaaggggaatgaaggtccgtctggcccccctggccctgcaggctcccctggggaacgaggtgcagcaggatcagggggacccattggtccgccagggcgcccaggcccgcagggtccccctggagcagcaggagagaaaggtgtcccaggtgagaagggccccattggcccgactggccgagatggagtgcagggtcctgtggggcttcctggtcctgctgggcctccaggtgtggctggagaggatggagacaagggtgaggtgggggaccccggacagaagggcaccaaagggaacaagggtgaacatggccctcctggaccccctggacccattggtcctgtggggcagcctggagcagcgggagcagatggggagcccggagctcggggaccccagggacactttggagccaaaggtgatgaaggaacaagaggattcaatgggcccccaggacccattggcctacagggtttgccaggcccctctggggagaagggagaaacaggagatgtgggtcctatgggaccacctggccccccaggacctcgaggtccagctggacccaatggcgctgatggcccacaaggtcccccaggaggtgttgggaacctgggtccccctggagagaagggggaaccaggagagtcaggatctccagggatccagggcgagccaggtgtcaagggtccacgcggggaacgtggagagaaaggagagtcggggcagccaggagagccagggccaccagggcctaaaggccccacaggcgatgatggccccaaagggaaccctggtcctgttggttttcctggtgaccctggcccccctggagaaggtggccctcggggccaggatggtgctaagggtgaccgaggcgaggatggtgagccaggacagcctggatcccctggtcccaccggggagaatggacccccagggccacttggaaagcgaggtcctgctggctcgcctggttccgaggggcgacaaggagggaagggagccaagggagatcctggcgctataggtgccccggggaagacaggcccggtgggtcctgcaggcccagcagggaaacctggccctgatggtctgagggggctcccaggctcagtgggtcagcaaggccgacctggagctacaggccaggctgggcccccaggtcctgtgggacccccagggctgcctggtctccggggcgatgctggagccaagggagagaagggccacccaggtctcattggactgattgggcccccgggtgagcagggagagaagggagatcggggacttcctgggcctcagggctcccctgggcagaagggtgagatgggtatcccaggagcatccggccccattggtcctggaggtccccccggcctccccggacctgctggccccaaaggagccaaaggagccacaggcccaggcggacccaagggagagaagggtgtgcagggccctccaggacacccgggtcccccaggcgaggtgatccagccactgcccattcagatgcccaagaagactcggcgctcggtggatggaagccgtctgatgcaggaagatgaggccataccgaccgggggagcccccggcagtcctggggggctggaggagatctttggctcactcgactccctgcgggaggagatcgagcagatgaggcggccaacagggacccaggacagccctgctcgcacctgccaggacctgaagctgtgccacccagagcttcccgatggagagtactgggtcgaccccaaccagggctgtgctcgggatgccttccgagttttctgcaacttcacagcagggggtgagacctgtgtgacgcctagggatgacgtcacgcagttctcttacgtggactcagagggctccccagtgggtgtggtccagctcaccttcctgcggctgctcagcgtctcagcccaccaggacgtctcctacccctgctctggagcagcccgtgacggtcccctgagactccgtggggccaatgaggatgagctgagcccggagactagcccctatgtcaaagaattcagagatggctgccagacacagcaaggccggacggtgctggaggtgcgaacgcctgtgctggagcagctgccagtgctggatgcctccttctcagacctgggagccccaccgaggcggggaggggtgctgctggggcctgtctgcttcatgggataggaccgtctctgtctgatcctgtccattcggaaccaggcccacctggaatcccacaacatcagctctgtgccacctcccaagagggctcctcactatctagggagccctgggccagggcgtggagagccctcagtcggggcaggccaggggaggggtgaagtggttgcctggacaccccacgggaggagtggcatctggggctcttggccctcccacctggagcctgttacccgttagagagctgagacccttatttaaaactcacctcccaatcaccccaaacaaatggaagagaagagaaaggacatggcgtattttgtatttaaaagtaattgtattaattatttaaagtgtggaaagcaaaataacaaaaaagagaaacgccaacaaaaatcagcagatgttgaagacaggggtctcgggggtgggctccggcacccacatcctggagtcaggactttcctcagtgactgtgtgtaggggggtttcagggctgaaccccacctccctcccaccttcctcccacctcacctgtcgcacccactgtgaaagttggaatatgtggtctccctggcctcagggctctgactctgccagggtggggctctctaacccacaggtgttggctgcctggcccatgtgcccactgtctcttccacttggtctgggtttggcaggcactgcctgctacttgagggccaggatgctcccccagggaagaaacggaatagtgtggggtgtgtgcagggctgcatcccgcagatggctggaatattaaaattcttctatattggctggtaaattgccatggccctgagccactgagtatgttcattgccacccctgtccctcccctgggcacccctcactttccctgatcctgcaattaaagggttaatgtgtggcatatggaagggactcccaggaccctgtgcccagcttccatgctgactgatggttaaataatgtgattgtctcctcccagg

SEQ ID NO: 161 - DNA, 939 bp, Homo sapiens
atgagtggggagaatgtcaccaaggtcagcaccttcatcctggtgggcctccccacggccccagggctgcagtacctgctcttcctcctcttcctgctcacctacctctttgtcctggtggagaacctggccatcatcctcatcgtctggagcagcacctccctccacaggcccatgtactactttctgagctccatgtctttcctggagatctggtacgtgtctgacatcacccccaagatgctggagggcttcctcctccagcagaaacgcatctctttcgtcgggtgcatgacgcagctctacttcttcagctccctggtgtgcaccgagtgtgtgcttctggcctccatggcctacgaccgctacgtggccatctgccacccgctgcgctaccacgtccttgtgaccccggggctgtgcctccagctggtgggcttctcctttgtgagtggcttcaccatctccatgatcaaggtctgttttatctccagcgtcacgttctgtggctccaacgtcttgaaccacttcttctgtgacatttcccccatcctcaagctggcctgcacggacttctccactgcagagctggtggatttcatcctggccttcatcatcctggtgtttccgctcctggccaccatactgtcatattggcacatcaccctggctgtcctgcgcatcccctcggccaccggctgctggagagccttctctacctgcgcctctcacctcaccgtggtcaccgtcttctatacagccttgcttttcatgtatgtccggccccaagccattgattcccagagctccaacaagctcatctctgccgtgtacactgttgtcacgccaataattaaccctttgatttactgcctgaggaacaaggaatttaaggacgccttgaaaaaggccttgggcttgggtcaaacttcacactaa

SEQ ID NO: 162 - DNA, 1858 bp, Homo sapiens
acaatgatgctctattttattttctaaattaagaaagatttgctcagaggtttagatattcaactttccccaacttttagtacaaatacatccatttagtttttgatgggccttggatacagcattataaagtgagcattttttcagattacactgagatggcctctctttgtataagtggctagaagtaagaactttttcccccagtagctcatattcccacctatcacaccatgccatgtacagtataccactttaactccatacactccgatggaagaaaccagactcttgattatgtagaagaatgcacaggtctcatgcatttggattttcccttaaagcagagaaaactggtaggtctgtagaggaaagcaggagatatcattatctcccaggagtcaagatgcagataatggtattgttccagtcttgaaccatttcatttcatcttcctgatgttcacgaggccatcaaacagacatcaatgatgaattccaagaaagttttatttttaaaaatcaagttttgatataataaatgttggattgaggatagaaatttaagctgagaaatgtttaatttggacctaaaaaagtttattattactattattattgtggaaggaaatacatacaggcacattttagtatctacaacagtatttgggaagctgttatgaaacacaaaacttcatttaaattttattataaagacctttattaggagaaaggacatattttctatttcttacttttattttgtgccttgaaggacttgtgaatgtatagaataattattttttcttactgcttcctctttgcaacccaacctccaccaagtcaatcgtgaaggtaggaagaaagctgtatttctgttacttttaaaaatgataacgagaagaaattaaaacaatggcttaagagaaagaggatgtaaggagtacaaagcaaaacttaacaaagagttagtaaaggaacttgcattgacaattcactcagccatgttaattttatcattaatactgtcttcatcatttttttttccaggtctctctgctcgtatttgcttggtgctccgaaatgcacgggaacagacagctatgggaaagctgcacagagcagttggcaatcaacatgtcctagaagggtgtgtggagtagcaaaacaagtggaacggatgaagaacttccaagctccttcgcagagttttgggccctagtgtgcagggctgctccctcatgagatggaggaaaatgtcgcccacacctacttggacctctcaccaaggacactgccctcagagataaatctgttggacggcagccaagagaccccaaattgtctcaacctccaggacacggcaagttgcaagtttccgagttggggaggcaaagcgggaaaacatgtttggcgatttcctcctgccactcaccgaccggagaaatggggaggcggactccaggtctttcgtggactgccaagagccctatagggcgtccagctataaaaagagaagaatcccatgaaggacaacaagcaaactcatatgttatccctttagccggattgtgtgctgatgattgtttccctatttacacttcgaatcacccctgtggtcttttgtgagtccccaaggcagcctcagccttcgcaaaccgtccagtggggcacgaatctcggaggggtgcgggctgcaggcggcagagggaagccaaagaggggcggcttttccaggccgtccacccccaggcgagctggtcctcacccttcgatcggctcgagtccctcggacagttgcccactcacagcgtgcaaaggggtcgcactccctgtgggttctccgccctcagaagcgg

SEQ ID NO: 163 - DNA, 1097 bp, Homo sapiens
aggattctcccgagcccctgaaaaaaaaaaaaggtggagagactttgaaaacttttctctcgaaaagtctgaggaggcagaggacggcccggagtctcgtagcgcaccgccctggtcccacaccccccgcagccctaggaggatcggtgtgctgagcttgtggccaggagctccccgagccactttcgcgcgagcagcagaaaacctgagccgcggcccggcgagtgtcggcggcgctctggggaggagaggctgggaaggggctgcgagagatgctacttaagaacgtgaggctgagaggcggacttggtcagatctgcctgcgtgacaagctcaggacaggacgcttctgcccttgcattactgttgtaaaagtttccacccagtccctggtcgcactgcgttcccatcccggcagatgtgaactcaaaaacttcctccgctgtgcagtttcaattggcagacacaccctgtacctgaatgactcagaaggaggcagaatgaacaaacaacagacccctgacttctgggattttgtgagtttgccaaaaaaaaaaaaaaaagaagtatattgtgtctacccagcacaacaaaacgggggacttggcattcccccccttctcccgcctccacccacactaatttatgcattctttaaagccaaaggaatcaaagtgaaatttcacacctagtctgtatcaagcatgtgctaggttaatttaaccttactgctctgtgaagtaagtaagcattgctggccattttattgttgagagaagtgtcattcagacaactaaggtgacttgtagatttcccagctagtgagtggcagagctgggttccaaaacctaaatattgcaaatgccttgccttgtggctcaaacgctatcagtcaataaatagttaaggaattgaaatatatgttcctagagggaaacagacttctagatttaaagttttacatttgctgcatttctgactgtacaagtctacaaaatgcatataaaagtatgctaatgaatgtccttttaaaaccactcattttctacgtaagcatacaaagtgtatacatatgcatattaatgaatgttttctga

SEQ ID NO: 164 - DNA, 1133 bp, Homo sapiens
atggaccgctggggacaaaatgggctgtttccaaggagaagacatttgtttgctccttttttgaatctcatatccagtgtttttcttcacaggttttgcacactagggaccaagaagccctcggggacactgctgagaaaagactgccgaagggaagaccagcggggatcatggaatctattccagaggaaactaaccaacagtgagcatcttcaactaaaactacccctggatgtaataagtgttgcatgcatcattcctttaattgagcagagttaactggatcaaattatttatgggagagagaggaaaagttataaagaattatagtaatttttaatttccaccaatatactctttgtaagtgaatcactctataattactttctgttgcactgaatgcagcaacaataacacaatagtattttaaggcactggtttttggcatactctaaccttgtaattatttaaataacagccaagtttactcatgtttttgattctgtcaagaaaaaaaaaaagttcctttactcgaaagtgatggccgaaacagaatcggaaatttgttttcttgaaattacataaatacacagaaaatggcacttattagcttttgttaaaacattaccttacctaatcactgcataaaagtccagatttgtagaaaattgtaattttctcagtatctaaaactattttgctttccattaagtttctatttgctattttctcagaattttacaattaaagataaatcacaaactgtttgtttttcttaaagttctttgagaaaatgtctaattatacaatccttggacaatactgtgtttttttggtgctgtgttttttaagaagtcctacttactggaattttgactatttggatatttttgtttttaaaaggggaggggaatttgcttaatacttctaaagatgtgaattgataattgatattaaaatagaattactctcaactcaccagaattaaattttatatctgcatatttaacactattagctcatataaattataagaaaaattttcaaaggatctggttttaattttttggatatgaaatgaatttgccttttctgccttttcttaagtactattttgtaactatattgcacta

SEQ ID NO: 165 - DNA, 392 bp, Homo sapiens
taatggtagagttaaaggccaaatctgccatatagttaaaggccaaatctgccgtgaagccaggagaaaggatccagcatacaaaccatgacagaatacacacacattttggagatgcatgctttctcaaagctctgaggaccatcatgaagacatattaactgaaagaatacaaagcgatgtgaatagttcctaactattggagactatacaagaagcatgacaccaaactgtggttgtcttctggtgaagatctcagaagtttccactcatggcaaaaggtagataaagaaggagctaatgaagaaaaagaaacaagctgtcaagaggtgggaagggaaccaggaaaacacagcatcatgtcagacaataaaatagtgtaatttcaagaa

SEQ ID NO: 166 - DNA, 2879 bp, Homo sapiens
tgtacaaagatggctgccacattggcgctgtcattttggtactgagcagagcgacgggcttaattcgacccaatccaggccagagtctttctctcaggggcttcctcgtgctcagctaatcctccgatcaatccttgggaatccctgggacctcttcggtatccctactctcagccagggatcatgtcttgggccgctcgcccgcccttcctccctcagcggcatgccgcagggcagtgtgggccggtgggggtgcgaaaagaaatgcattgtggggtcgcgtcccggtggcggcggcgacggccctggctggatcccgcagcggcggcggcggcggcggtggcaggcggagaacaacaaaccccggagccggagccaggggaggctggacgggacgggatgggcgacagcgggcgggactcccgaagcccagacagctcctccccaaatccccttccccagggagtccctcccccttctcctcctgggccacccctacccccttcaacagctccatcccttggaggctctggggccccacccccacccccgatgccaccacccccactgggctctccctttccagtcatcagttcttccatggggtcccctggtctgccccctccagctcccccaggattctccgggcctgtcagcagcccccagattaactcaacagtgtcactccctgggggtgggtctggcccccctgaagatgtgaagccaccagtcttaggggtccggggcctgcactgtccaccccctccaggtggccctggggctggcaaacggctatgtgcaatctgcggggacagaagctcaggcaaacactacggggtttacagctgtgagggttgcaagggcttcttcaaacgcaccatccgcaaagaccttacatactcttgccgggacaacaaagactgcacagtggacaagcgccagcggaaccgctgtcagtactgccgctatcagaagtgcctggccactggcatgaagagggaggcggtacaggaggagcgtcagcggggaaaggacaaggatggggatggggagggggctgggggagcccccgaggagatgcctgtggacaggatcctggaggcagagcttgctgtggaacagaagagtgaccagggcgttgagggtcctgggggaaccgggggtagcggcagcagcccaaatgaccctgtgactaacatctgtcaggcagctgacaaacagctattcacgcttgttgagtgggcgaagaggatcccacacttttcctccttgcctctggatgatcaggtcatattgctgcgggcaggctggaatgaactcctcattgcctccttctcacaccgatccattgatgttcgagatggcatcctccttgccacaggtcttcacgtgcaccgcaactcagcccattcagcaggagtaggagccatctttgatcgggtgctgacagagctagtgtccaaaatgcgtgacatgaggatggacaagacagagcttggctgcctgagggcaatcattctgtttaatccagatgccaagggcctctccaaccctagtgaggtggaggtcctgcgggagaaagtgtatgcatcactggagacctactgcaaacagaagtaccctgagcagcagggacggtttgccaagctgctgctacgtcttcctgccctccggtccattggccttaagtgtctagagcatctgtttttcttcaagctcattggtgacacccccatcgacaccttcctcatggagatgcttgaggctccccatcaactggcctgagctcagacccagacgtggtgcttctcacactggaggagcacacatccaagagggactccaagccctggggcagggtggggggccatgttcccagaaccttgatggggtgagaagtacagggcagaaccaagaacataaaccctccaagggatctgcttgatatcccaagttggaagggaccccagatacctgtgaggactggttgtctctcttcggtggccttgagtctctgaatttgtcgggttctcccatgatttggggtgatttctcaccctctgtccttcccccagcacaaagcactggccttgcctccaggaccttgcttccttctcatcttgcctcattttgcttcccatctgaagagtggaaatggggaactcccccagaggtggatactggggggcaggcctcccaagctgatggacatgagagtagggccctgacaggccttcctcctctcaaacctggcagatgggggcctctctggaagagggaggggccctgtcactgtccagagtctctttttacacttcacctccttctgcagtcagactgaaatataaaaaaggtggtggtggtggtgaaggggctggtggagatgtaggaaccgatctgctatttttaatttcctgtgaggatagagacttgcagttagactcaaagaagtactgtactttcccaggttgactaagaaatgccagtggtggaggtgggtgtttgggaaaggcagggccctgaaatggcctgtccctagggctctccaagcactagccttcccagcttcccgccgccccccctatctcttcctgtctaacttggggaaggggcctgggctgtgaggacagggcccccacaggggatggtttcacgagtgtagtcccggaggccttccctttacagctctcctccagccctgggcacatagcataggctggggacacaggatcctggcctgagaattgaggggaggtggccagcccgcagaggtggggtgctggggctgcatgatttttgccctgcgtcccttctctttggggctcctttcccctctcatacataaaatcgctttcaaattaaaatcgctgttttctgga

SEQ ID NO: 167 - DNA, 2150 bp, Homo sapiens
atattggtaaaggcattagggcgaaggtggaacggaacttcctgttctcgcgggatctaaaggcgggactgccacgtccaagcaaaccgggaaaggagaggatcccggagccgcgtgatggccagaggcctgggggccccccactgggtggccgtgggactgctgacctgggcgaccttggggcttctggtggctggactcgggggtcatgacgacctgcacgacgatctgcaagaggacttccatggccacagccacaggcactcacatgaagatttccaccatggccacagccatgcccatggccatggccacactcacgagagcatctggcatggacatacccacgatcacgaccatggacattcacatgaggatttacaccatggccatagccatggctactcccatgagagcctctaccacagaggacatggacatgaccatgagcatagccatggaggctatggggagtctggggctccaggcatcaagcaggacctggatgctgtcactctctgggcttatgcactgggggccacagtgctgatctcagcagctccattttttgtcctcttccttatccccgtggagtcgaactctccccggcatcgctctctacttcagatcttgctcagttttgcttccggtgggctcctgggagatgctttcctgcacctcattcctcatgctcttgaacctcattctcaccacactctggagcaacccggacatggacactcccacagtggccagggccccattctgtctgtgggactgtgggttctcagtggaattgttgcctttcttgtcgtggagaaatttgtgagacatgtgaaaggaggacatggtcacagtcatggacatggacacgctcacagtcatacacgtggaagtcatggacatggaagacaagagcgttctaccaaggagaagcagagctcagaggaagaagaaaaggaaacaagaggggttcagaagaggcgaggagggagcacagtacccaaagatgggccagtgagacctcagaacgctgaagaagaaaaaagaggcttagacctgcgtgtgtcggggtacctgaatctggctgctgacttggcacacaacttcactgatggtctggccattggggcttcctttcgagggggccggggactagggatcctgaccacaatgactgtcctgctacatgaagtgccccacgaggtcggagactttgccatcttggtccagtctggctgcagcaaaaagcaggcgatgcgtctgcaactactgacagcagtaggggcactggcaggcacagcctgtgcccttctcactgaaggaggagcagtgggcagtgaaattgcaggtggtgcaggtcctggctgggtcctgccatttactgcaggtggctttatctacgtagcaacagtgtctgtgttgcccgagctgctgagggaggcatcaccattgcaatcacttctggaggtgctggggctgctggggggagttatcatgatggtgctgattgcccaccttgagtgaggggtggataaactacccctgccccaaacctctacccctaactccaggtcaggggtgcgtagaggttgggggccctggccagggacatctgccaaaggaaggaactgtagcctgggagaatggttactttggcattagggccttcaagggctggcagtcttacagaggctggagcggtgagaatgagaggccagagggaccatagtgttgggcactgtctgaccatgttgcatttggaaggctaaatggggccatgaagaaggctggaagggacagggggtgatggcagcctacctggtgtcccctaccccacctgttctcggagaaccaagttgctacacaggaagttctccaaggtccagtttcctttctcccaccagttggtggaggcttcagggaagaccagagtcctggacagagagggtaacaggaggagtcggggataaacatcaaacatcaatcgtgtgtcctgatttgggagtgattggggggatggggtgggagagggttagttggtattctcatggcctgattttttttgtttctattccttttatatcactgtgtttgaatcgagggggaggggtggtaaccggaaataaagacctccgatcttccgcccc

SEQ ID NO: 168 - DNA, 2359 bp, Homo sapiens
ggagaggatcccggagccggtgagaattctctgttttttctctaccatcctttccaggccttttcctcacctaatgagtcgtagagacgagggcccagagagtctgtaaagtggctggtgaaagattagtgtcccagggccctacatccgggaggtggttcgggataaagagaactagtcttgggaacaatgtaggtgggaacttaagggaatgggagagcggcccatagaggtggacggagggcgcgattggagtaaagcggaccctgtgtaggtatagagttgagtcaagtggagtcactgcctctgtccctctggtcagcgtgatggccagaggcctgggggccccccactgggtggccgtgggactgctgacctgggcgaccttggggcttctggtggctggactcgggggtcatgacgacctgcacgacgatctgcaagaggacttccatggccacagccacaggcactcacatgaagatttccaccatggccacagccatgcccatggccatggccacactcacgagagcatctggcatggacatacccacgatcacgaccatggacattcacatgaggatttacaccatggccatagccatggctactcccatgagagcctctaccacagaggacatggacatgaccatgagcatagccatggaggctatggggagtctggggctccaggcatcaagcaggacctggatgctgtcactctctgggcttatgcactgggggccacagtgctgatctcagcagctccattttttgtcctcttccttatccccgtggagtcgaactctccccggcatcgctctctacttcagatcttgctcagttttgcttccggtgggctcctgggagatgctttcctgcacctcattcctcatgctcttgaacctcattctcaccacactctggagcaacccggacatggacactcccacagtggccagggccccattctgtctgtgggactgtgggttctcagtggaattgttgcctttcttgtcgtggagaaatttgtgagacatgtgaaaggaggacatggtcacagtcatggacatggacacgctcacagtcatacacgtggaagtcatggacatggaagacaagagcgttctaccaaggagaagcagagctcagaggaagaagaaaaggaaacaagaggggttcagaagaggcgaggagggagcacagtacccaaagatgggccagtgagacctcagaacgctgaagaagaaaaaagaggcttagacctgcgtgtgtcggggtacctgaatctggctgctgacttggcacacaacttcactgatggtctggccattggggcttcctttcgagggggccggggactagggatcctgaccacaatgactgtcctgctacatgaagtgccccacgaggtcggagactttgccatcttggtccagtctggctgcagcaaaaagcaggcgatgcgtctgcaactactgacagcagtaggggcactggcaggcacagcctgtgcccttctcactgaaggaggagcagtgggcagtgaaattgcaggtggtgcaggtcctggctgggtcctgccatttactgcaggtggctttatctacgtagcaacagtgtctgtgttgcccgagctgctgagggaggcatcaccattgcaatcacttctggaggtgctggggctgctggggggagttatcatgatggtgctgattgcccaccttgagtgaggggtggataaactacccctgccccaaacctctacccctaactccaggtcaggggtgcgtagaggttgggggccctggccagggacatctgccaaaggaaggaactgtagcctgggagaatggttactttggcattagggccttcaagggctggcagtcttacagaggctggagcggtgagaatgagaggccagagggaccatagtgttgggcactgtctgaccatgttgcatttggaaggctaaatggggccatgaagaaggctggaagggacagggggtgatggcagcctacctggtgtcccctaccccacctgttctcggagaaccaagttgctacacaggaagttctccaaggtccagtttcctttctcccaccagttggtggaggcttcagggaagaccagagtcctggacagagagggtaacaggaggagtcggggataaacatcaaacatcaatcgtgtgtcctgatttgggagtgattggggggatggggtgggagagggttagttggtattctcatggcctgattttttttgtttctattccttttatatcactgtgtttgaatcgagggggaggggtggtaaccggaaataaagacctccgatcttccgcccc

SEQ ID NO: 169 - DNA, 369 bp, Homo sapiens
gcagaggacggcccggagtctcgtagcgcaccgccctggtcccacaccccccgcagccctaggaggatcggtgtgctgagcttgtggccaggagctccccgagccactttcgcgcgagcagcagaaaacctgagccgcggcccggcgagtgtcggcggcgctctggggaggagaggctgggaaggggctgcgagagatgctacttaagaacgtgaggctgagaggcggacttggtcagatctgcctgcgtgacaagctcaggacaggacgcttctgcccttgcattactgttgtaaaagtttccacccagtccctggtcgcactgcgttcccatcccggcagatgtgaactcaaaaacttcctccgctg

SEQ ID NO: 170 - protein, 246 aa, Homo sapiens
MKPGGFWLHLTLLGASLPAALGWMDPGTSRGPDVGVGESQAEEPRSFEVTRREGLSSHNELLASCGKKFCSRGSRCVLSRKTGEPECQCLEACRPSYVPVCGSDGRFYENHCKLHRAACLLGKRITVIHSKDCFLKGDTCTMAGYARLKNVLLALQTRLQPLQEGDSRQDPASQKRLLVESLFRDLDADGNGHLSSSELAQHVLKKQDLDEDLLGCSPGDLLRFDDYNSDSSLTLREFYMAFRQKC

SEQ ID NO: 171 - protein, 842 aa, Homo sapiens [sequence omitted]

SEQ ID NO: 172 - protein, 267 aa, Homo sapiens
MTQCCFLRVHPLFFWFWSFHHRMALALCLQVLCSLCGWLSLYISFCHLNKHRSYEWSCRLVTFTHGVLSIGLSAYIGFIDGPWPFTHPGSPNTPLQVHVLCLTLGYFIFDLGWCVYFQSEGALMLAHHTLSILGIIMALVLGESGTEVNAVLFGSELTNPLLQMRWFLRETGHYHSFTGDVVDFLFVALFTGVRIGVGACLLFCEMVSPTPKWFVKAGGVAMYAVSWCFMFSIWRFAWRKSIKKYHAWRSRRSEERQLKHNGHLKIH

SEQ ID NO: 173 - protein, 382 aa, Homo sapiens
MGPTSVPLVKAHRSSVSDYVNYDIIVRHYNYTGKLNISADKENSIKLTSVVFILICCFIILENIFVLLTIWKTKKFHRPMYYFIGNLALSDLLAGVAYTANLLLSGATTYKLTPAQWFLREGSMFVALSASVFSLLAIAIERYITMLKMKLHNGSNNFRLFLLISACWVISLILGGLPIMGWNCISALSSCSTVLPLYHKHYILFCTTVFTLLLLSIVILYCRIYSLVRTRSRRLTFRKNISKASRSSEKSLALLKTVIIVLSVFIACWAPLFILLLLDVGCKVKTCDILFRAEYFLVLAVLNSGTNPIIYTLTNKEMRRAFIRIMSCCKCPSGDSAGKFKRPIIAGMEFSRSKSDNSSHPQKDEGDNPETIMSSGNVNSSS

SEQ ID NO: 174 - protein, 382 aa, Homo sapiens; identical to SEQ ID NO: 173

SEQ ID NO: 175 - protein, 211 aa, Homo sapiens [sequence omitted]

SEQ ID NO: 176 - protein, 211 aa, Homo sapiens [sequence omitted]

SEQ ID NO: 177 - protein, 319 aa, Homo sapiens
MLRCGQMIFAQALVCRHLGRDWRWTQRKRQPDSYFSVLNAFIDRKDSYYSIHQIAQMGVGEGKSIGQWYGPNTVAQVLKKLAVFDTWSSLAVHIAMDNTVVMEEIRRLCRTSVPCAGATAFPADSDRHCNGFPAGAEVTNRPSPWRPLVLLIPLRLGLTDINEAYVETLKHCFMMPQSLGVIGGKPNSAHYFIGYVGEELIYLDPHTTQPAVEPTDGCFIPDESFHCQHPPCRMSIAELDPSIAVGFFCKTEDDFNDWCQQVKKLSLLGGALPMFELVEQQPSHLACPDVLNLSLDSSDVERLERFFDSEDEDFEILSL

SEQ ID NO: 178 - protein, 415 aa, Homo sapiens
MDAATLTYDTLRFAEFEDFPETSEPVWILGRKYSIFTEKDEILSDVASRLWFTYRKNFPAIGGTGPTSDTGWGCMLRCGQMIFAQALVCRHLGRDWRWTQRKRQPDSYFSVLNAFIDRKDSYYSIHQIAQMGVGEGKSIGQWYGPNTVAQVLKKLAVFDTWSSLAVHIAMDNTVVMEEIRRLCRTSVPCAGATAFPADSDRHCNGFPAGAEVTNRPSPWRPLVLLIPLRLGLTDINEAYVETLKHCFMMPQSLGVIGGKPNSAHYFIGYVGEELIYLDPHTTQPAVEPTDGCFIPDESFHCQHPPCRMSIAELDPSIAVGFFCKTEDDFNDWCQQVKKLSLLGGALPMFELVEQQPSHLACPDVLNLSLGESCQVQVGSLGGTICALASPVLAPLVLTIKVCVSLSREHLAVVRL

SEQ ID NO: 179 - protein, 331 aa, Homo sapiens [sequence omitted]

SEQ ID NO: 180 - protein, 354 aa, Homo sapiens
MDAATLTYDTLRFAEFEDFPETSEPVWILGRKYSIFTEKDEILSDVASRLWFTYRKNFPAIGGTGPTSDTGWGCMLRCGQMIFAQALVCRHLGRDWRWTQRKRQPDSYFSVLNAFIDRKDSYYSIHQIAQMGVGEGKSIGQWYGPNTVAQVLKKLAVFDTWSSLAVHIAMDNTVVMEEIRRLCRTSVPCAGATAFPADSDRHCNGFPAGAEVTNRPSPWRPLVLLIPLRLGLTDINEAYVETLKHCFMMPQSLGVIGGKPNSAHYFIGYVGEELIYLDPHTTQPAVEPTDGCFIPDESFHCQHPPCRMSIAELDPSIAVVRGGHLSTQAFGAECCLGMTRKTFGFLRFFFQHVG

SEQ ID NO: 181 - protein, 393 aa, Homo sapiens
MDAATLTYDTLRFAEFEDFPETSEPVWILGRKYSIFTEKDEILSDVASRLWFTYRKNFPAIGGTGPTSDTGWGCMLRCGQMIFAQALVCRHLGRDWRWTQRKRQPDSYFSVLNAFIDRKDSYYSIHQIAQMGVGEGKSIGQWYGPNTVAQVLKKLAVFDTWSSLAVHIAMDNTVVMEEIRRLCRTSVPCAGATAFPADSDRHCNGFPAGAEVTNRPSPWRPLVLLIPLRLGLTDINEAYVETLKHCFMMPQSLGVIGGKPNSAHYFIGYVGEELIYLDPHTTQPAVEPTDGCFIPDESFHCQHPPCRMSIAELDPSIAVGFFCKTEDDFNDWCQQVKKLSLLGGALPMFELVEQQPSHLACPDVLNLSLDSSDVERLERFFDSEDEDFEILSL

SEQ ID NO: 182 - protein, 529 aa, Homo sapiens
MSRQLNIKSSGDKGNFSVHSAVVPRKAVGSLASYCAAGRGAGAGFGSRSLYSLGGNRRISFNVAGGGVRAGGYGFRPGSGYGGGRASGFAGSMFGSVALGPACLSVCPPGGIHQVTVNKSLLAPLNVELDPEIQKVRAQEREQIKVLNDKFASFIDKVRFLEQQNQVLETKWELLQQLDLNNCKKNLEPILEGYISNLRKQLETLSGDRVRLDSELRSMRDLVEDYKKRYEVEINRRTTAENEFVVLKKDADAAYAVKVELQAKVDSLDKDIKFLKCLYDAEIAQIQTHASETSVILSMDNNRDLDLDSIIAEVRMHYEEIALKSKAEAEALYQTKIQELQLAASRHGDDLKHTRSEMVELNRLIQRIRCEIGNVKKQRASLETAIADAEQRGDNALKDAQAKLDELEGALHQAKEELARMLREYQELMSLKLALDMEIATYRKLLEGEECRMSGENPSSVSISVISSSSYSYHHPSSAGVDLGASAVAGSSGSTQSGQTKTTEARGGDLKDTQGKSTPASIPARKATR

SEQ ID NO: 183 - protein, 590 aa, Homo sapiens
MTLHNNSTTSPLFPNISSSWIHSPSDAGLPPGTVTHFGSYNVSRAAGNFSSPDGTTDDPLGGHTVWQVVFIAFLTGILALVTIIGNILVIVSFKVNKQLKTVNNYFLLSLACADLIIGVISMNLFTTYIIMNRWALGNLACDLWLAIDYVASNASVMNLLVISFDRYFSITRPLTYRAKRTTKRAGVMIGLAWVISFVLWAPAILFWQYFVGKRTVPPGECFIQFLSEPTITFGTAIAAFYMPVTIMTILYWRIYKETEKRTKELAGLQASGTEAETENFVHPTGSSRSCSSYELQQQSMKRSNRRKYGRCHFWFTTKSWKPSSEQMDQDHSSSDSWNNNDAAASLENSASSDEEDIGSETRAIYSIVLKLPGHSTILNSTKLPSSDNLQVPEEELGMVDLERKADKLQAQKSVDDGGSFPKSFSKLPIQLESAVDTAKTSDVNSSVGKSTATLPLSFKEATLAKRFALKTRSQITKRKRMSLVKEKKAAQTLSAILLAFIITWTPYNIMVLVNTFCDSCIPKTFWNLGYWLCYINSTVNPVCYALCNKTFRTTFKMLLLCQCDKKKRRKQQYQQRQSVIFHKRAPEQAL

SEQ ID NO: 184 - protein, 651 aa, Homo sapiens
MGDLSSLTPGGSMGLQVNRGSQSSLEGAPATAPEPHSLGILHASYSVSHRVRPWWDITSCRQQWTRQILKDVSLYVESGQIMCILGSSGSGKTTLLDAMSGRLGRAGTFLGEVYVNGRALRREQFQDCFSYVLQSDTLLSSLTVRETLHYTALLAIRRGNPGSFQKKVEAVMAELSLSHVADRLIGNYSLGGISTGERRRVSIAAQLLQDPKVMLFDEPTTGLDCMTANQIVVLLVELARRNRIVVLTIHQPRSELFQLFDKIAILSFGELIFCGTPAEMLDFFNDCGYPCPEHSNPFDFYMDLTSVDTQSKEREIETSKRVQMIESAYKKSAICHKTLKNIERMKHLKTLPMVPFKTKDSPGVFSKLGVLLRRVTRNLVRNKLAVITRLLQNLIMGLFLLFFVLRVRSNVLKGAIQDRVGLLYQFVGATPYTGMLNAVNLFPVLRAVSDQESQDGLYQKWQMMLAYALHVLPFSVVATMIFSSVCYWTLGLHPEVARFGYFSAALLAPHLIGEFLTLVLLGIVQNPNIVNSVVALLSIAGVLVGSGFLRNIQEMPIPFKIISYFTFQKYCSEILVVNEFYGLNFTCGSSNVSVTTNPMCAFTQGIQFIEKTCPGATSRFTMNFLILYSFIPALVILGIVVFKIRDHLISR

SEQ ID NO: 185 - protein, 447 aa, Homo sapiens
MGDLSSLTPGGSMGLQVNRGSQSSLEGAPATAPEPHSLGILHASYSVSHRVRPWWDITSCRQQWTRQILKDVSLYVESGQIMCILGSSGSGKTTLLDAMSGRLGRAGTFLGEVYVNGRALRREQFQDCFSYVLQSDTLLSSLTVRETLHYTALLAIRRGNPGSFQKKVEAVMAELSLSHVADRLIGNYSLGGISTGERRRVSIAAQLLQDPKVMLFDEPTTGLDCMTANQIVVLLVELARRNRIVVLTIHQPRSELFQLFDKIAILSFGELIFCGTPAEMLDFFNDCGYPCPEHSNPFDFYMDLTSVDTQSKEREIETSKRVQMIESAYKKSAICHKTLKNIERMKHLKTLPMVPFKTKDSPGVFSKLGVLLRRVTRNLVRNKLAVITRLLQNLIMGLFLLFFVLRVRSNVLKGAIQDRVGLLYQFVGATPYTGMLNAVNLCKCPRA

SEQ ID NO: 186 - protein, 814 aa, Homo sapiens
MAPKKEKGGTVNTSSKIWEPSLIAAQFNQNDWQASIAFVVGNQIEDDLLIQALTVAVQVPQRKLFSMVSWQDILQQINEINTLVGSASSKKAKKPVGGNAPLYYEVLTAAKAIMDSGEKLTLPLIGKLLKFQLLQIKFKDQQRRENEKKVIEDKPKLEKDKGKAKSPKEKKAPSAKPAKGKGKDQPEANAPVKKTTQLKRRGEDDHTNRYIDDEPDDGAQHYIIVVGFNNPQLLAIMAELGIPITSVIKISSENYEPLQTHLAAVNQQQEVLLQSEDLEAEKLKKENAIKELKTFWKYLEPVLNNEKPETNLFDVARLEYMVKAADFPSDWSDGEMMLKLGTDIFENIACLMYDILDWKRQHQHYLESMQLINVPQVVNEKPVLEAMPTSEAPQPAVPAPGKKKAQYEEPQAPPPVTSVITTEVDMRYYNYLLNPIREEFISVPLILHCMLEQVVATEEDLVPPSLREPSPRADGLDHRIAAHIVSLLPSLCLSEREKKNLHDIFLSEEENESKAVPKGPLLLNYHDAHAHKKYALQDQKNFDPVQIEQEMQSKLPLWEFLQFPLPPPWNNTKRLATIHELMHFCTSDVLSWNEVERAFKVFTFESLKLSEVDEKGKLKPSGMMCGSDSEMFNIPWDNPARFAKQIRQQYVMKMNTQEAKQKADIKIKDRTLFVDQNLSMSVQDNESNREPSDPSQCDANNMKHSDLNNLKLSVPDNRQLLEQESIMKAQPQHESLEQTTNNEIKDDAVTKADSHEKKPKKMMVEADLEDIKKTQQRSLMDWSFTEHFKPKVLLQVFMDCDSLGDGQIGLESLL

SEQ ID NO: 187 - protein, 211 aa, Homo sapiens [sequence omitted]

SEQ ID NO: 188 - protein, 624 aa, Homo sapiens [sequence omitted]

SEQ ID NO: 189 - protein, 1068 aa, Homo sapiens [sequence omitted]

SEQ ID NO: 190 - protein, 64 aa, Homo sapiens
MGGRSCGLGGVGARVGFLERSGVALRSEQGRAVTCPAGGNEDLKQMLESNKDSAKLDAMKRIVG

SEQ ID NO: 191 - protein, 941 aa, Homo sapiens [sequence omitted]

SEQ ID NO: 192 - protein, 948 aa, Homo sapiens [sequence omitted]

SEQ ID NO: 193 - protein, 941 aa, Homo sapiens [sequence omitted]

SEQ ID NO: 194 - protein, 420 aa, Homo sapiens
MMYSPICLTQDEFHPFIEALLPHVRAIAYTWFNLQARKRKYFKKHEKRMSKDEERAVKDELLSEKPEIKQKWASRLLAKLRKDIRQEYREDFVLTVTGKKHPCCVLSNPDQKGKIRRIDCLRQADKVWRLDLVMVILFKGIPLESTDGERLMKSPHCTNPALCVQPHHITVSVKELDLFLAYYVQEQDSGQSGSPSHNDPAKNPPGYLEDSFVKSGVFNVSELVRVSRTPITQGTGVNFPIGEIPSQPYYHDMNSGVNLQRSLSSPPSSKRPKTISIDENMEPSPTGDFYPSPSSPAAGSRTWHERDQDMSSPTTMKKPEKPLFSSASPQDSSPRLSTFPQHHHPGIPGVAHSVISTRTPPPPSPLPFPTQAILPPAPSSYFSHPTIRYPPHLNPQDTLKNYVPSYDPSSPQTSQSWYLG

SEQ ID NO: 195 - protein, 561 aa, Homo sapiens
MMYSPICLTQDEFHPFIEALLPHVRAIAYTWFNLQARKRKYFKKHEKRMSKDEERAVKDELLSEKPEIKQKWASRLLAKLRKDIRQEYREDFVLTVTGKKHPCCVLSNPDQKGKIRRIDCLRQADKVWRLDLVMVILFKGIPLESTDGERLMKSPHCTNPALCVQPHHITVSVKELDLFLAYYVQEQDSGQSGSPSHNDPAKNPPGYLEDSFVKSGVFNVSELVRVSRTPITQGTGVNFPIGEIPSQPYYHDMNSGVNLQRSLSSPPSSKRPKTISIDENMEPSPTGDFYPSPSSPAAGSRTWHERDQDMSSPTTMKKPEKPLFSSASPQDSSPRLSTFPQHHHPGIPGVAHSVISTRTPPPPSPLPFPTQAILPPAPSSYFSHPTIRYPPHLNPQDTLKNYVPSYDPSSPQTSQPNGSGQVVGKVPGHFTPVLAPSPHPSAVRPVTLSMTDTKPITTSTEAYTASGTSQANRYVGLSPRDPSFLHQQQLRICDWTMNQNGRHLYPSTSEDTLGITWQSPGTWASLVPFQVSNRTPILPANVQNYGLNIIGEPFLQAETSN

SEQ ID NO: 196 - protein, 570 aa, Homo sapiens
MMYSPICLTQDEFHPFIEALLPHVRAIAYTWFNLQARKRKYFKKHEKRMSKDEERAVKDELLSEKPEIKQKWASRLLAKLRKDIRQEYREDFVLTVTGKKHPCCVLSNPDQKGKIRRIDCLRQADKVWRLDLVMVILFKGIPLESTDGERLMKSPHCTNPALCVQPHHITVSVKELDLFLAYYVQEQDSGQSGSPSHNDPAKNPPGYLEDSFVKSGVFNVSELVRVSRTPITQGTGVNFPIGEIPSQPYYHDMNSGVNLQRSLSSPPSSKRPKTISIDENMEPSPTGDFYPSPSSPAAGSRTWHERDQDMSSPTTMKKPEKPLFSSASPQDSSPRLSTFPQHHHPGIPGVAHSVISTRTPPPPSPLPFPTQAILPPAPSSYFSHPTIRYPPHLNPQDTLKNYVPSYDPSSPQTSQPNGSGQVVGKVPGHFTPVLAPSPHPSAVRPVTLSMTDTKPITTSTEGEAASPTATTYTASGTSQANRYVGLSPRDPSFLHQQQLRICDWTMNQNGRHLYPSTSEDTLGITWQSPGTWASLVPFQVSNRTPILPANVQNYGLNIIGEPFLQAETSN

SEQ ID NO: 197 - protein, 309 aa, Homo sapiens
MNSGVNLQRSLSSPPSSKRPKTISIDENMEPSPTGDFYPSPSSPAAGSRTWHERDQDMSSPTTMKKPEKPLFSSASPQDSSPRLSTFPQHHHPGIPGVAHSVISTRTPPPPSPLPFPTQAILPPAPSSYFSHPTIRYPPHLNPQDTLKNYVPSYDPSSPQTSQPNGSGQVVGKVPGHFTPVLAPSPHPSAVRPVTLSMTDTKPITTSTEAYTASGTSQANRYVGLSPRDPSFLHQQQLRICDWTMNQNGRHLYPSTSEDTLGITWQSPGTWASLVPFQVSNRTPILPANVQNYGLNIIGEPFLQAETSN

SEQ ID NO: 198 - protein, 487 aa, Homo sapiens
MMYSPICLTQDEFHPFIEALLPHVRAIAYTWFNLQARKRKYFKKHEKRMSKDEERAVKDELLSEKPEIKQKWASRLLAKLRKDIRQEYREDFVLTVTGKKHPCCVLSNPDQKGKIRRIDCLRQADKVWRLDLVMVILFKGIPLESTDGERLMKSPHCTNPALCVQPHHITVSVKELDLFLAYYVQEQDSGQSGSPSHNDPAKNPPGYLEDSFVKSGVFNVSELVRVSRTPITQGTGVNFPIGEIPSQPYYHDMNSGVNLQRSLSSPPSSKRPKTISIDENMEPSPTGDFYPSPSSPAAGSRTWHERDQDMSSPTTMKKPEKPLFSSASPQDSSPRLSTFPQHHHPGIPGVAHSVISTRTPPPPSPLPFPTQAILPPAPSSYFSHPTIRYPPHLNPQDTLKNYVPSYDPSSPQTSQLRICDWTMNQNGRHLYPSTSEDTLGITWQSPGTWASLVPFQVSNRTPILPANVQNYGLNIIGEPFLQAETSN

SEQ ID NO: 199 - protein, 323 aa, Homo sapiens
MAFSGSQAPYLSPAVPFSGTIQGGLQDGLQITVNGTVLSSSGTRFAVNFQTGFSGNDIAFHFNPRFEDGGYVVCNTRQNGSWGPEERKTHMPFQKGMPFDLCFLVQSSDFKVMVNGILFVQYFHRVPFHRVDTISVNGSVQLSYISFQPPGVWPANPAPITQTVIHTVQSAPGQMFSTPAIPPMMYPHPAYPMPFITTILGGLYPSKSILLSGTVLPSAQRFHINLCSGNHIAFHLNPRFDENAVVRNTQIDNSWGSEERSLPRKMPFVRGQSFSVWILCEAHCLKVAVDGQHLFEYYHRLRNLPTINRLEVGGDIQLTHVQT

SEQ ID NO: 200 - protein, 355 aa, Homo sapiens
MAFSGSQAPYLSPAVPFSGTIQGGLQDGLQITVNGTVLSSSGTRFAVNFQTGFSGNDIAFHFNPRFEDGGYVVCNTRQNGSWGPEERKTHMPFQKGMPFDLCFLVQSSDFKVMVNGILFVQYFHRVPFHRVDTISVNGSVQLSYISFQNPRTVPVQPAFSTVPFSQPVCFPPRPRGRRQKPPGVWPANPAPITQTVIHTVQSAPGQMFSTPAIPPMMYPHPAYPMPFITTILGGLYPSKSILLSGTVLPSAQRFHINLCSGNHIAFHLNPRFDENAVVRNTQIDNSWGSEERSLPRKMPFVRGQSFSVWILCEAHCLKVAVDGQHLFEYYHRLRNLPTINRLEVGGDIQLTHVQT

SEQ ID NO: 201 - protein, 311 aa, Homo sapiens
MAFSGSQAPYLSPAVPFSGTIQGGLQDGLQITVNGTVLSSSGTRFAVNFQTGFSGNDIAFHFNPRFEDGGYVVCNTRQNGSWGPEERKTHMPFQKGMPFDLCFLVQSSDFKVMVNGILFVQYFHRVPFHRVDTISVNGSVQLSYISFQTQTVIHTVQSAPGQMFSTPAIPPMMYPHPAYPMPFITTILGGLYPSKSILLSGTVLPSAQRFHINLCSGNHIAFHLNPRFDENAVVRNTQIDNSWGSEERSLPRKMPFVRGQSFSVWILCEAHCLKVAVDGQHLFEYYHRLRNLPTINRLEVGGDIQLTHVQT

SEQ ID NO: 202 - protein, 343 aa, Homo sapiens
MAFSGSQAPYLSPAVPFSGTIQGGLQDGLQITVNGTVLSSSGTRFAVNFQTGFSGNDIAFHFNPRFEDGGYVVCNTRQNGSWGPEERKTHMPFQKGMPFDLCFLVQSSDFKVMVNGILFVQYFHRVPFHRVDTISVNGSVQLSYISFQNPRTVPVQPAFSTVPFSQPVCFPPRPRGRRQKTQTVIHTVQSAPGQMFSTPAIPPMMYPHPAYPMPFITTILGGLYPSKSILLSGTVLPSAQRFHINLCSGNHIAFHLNPRFDENAVVRNTQIDNSWGSEERSLPRKMPFVRGQSFSVWILCEAHCLKVAVDGQHLFEYYHRLRNLPTINRLEVGGDIQLTHVQT

SEQ ID NO: 203 - protein, 233 aa, Homo sapiens
MPFQKGMPFDLCFLVQSSDFKVMVNGILFVQYFHRVPFHRVDTISVNGSVQLSYISFQPPGVWPANPAPITQTVIHTVQSAPGQMFSTPAIPPMMYPHPAYPMPFITTILGGLYPSKSILLSGTVLPSAQRFHINLCSGNHIAFHLNPRFDENAVVRNTQIDNSWGSEERSLPRKMPFVRGQSFSVWILCEAHCLKVAVDGQHLFEYYHRLRNLPTINRLEVGGDIQLTHVQT

SEQ ID NO: 204 - protein, 355 aa, Homo sapiens; identical to SEQ ID NO: 200

SEQ ID NO: 205 - protein, 323 aa, Homo sapiens; identical to SEQ ID NO: 199

SEQ ID NO: 206 - protein, 311 aa, Homo sapiens; identical to SEQ ID NO: 201

SEQ ID NO: 207 - protein, 170 aa, Homo sapiens
MPMEIHLTVTVLMYHTRAASTSPRIPPILASLSGLAQVSLPSTVSGSSGSMTPSGRVDVQDILQQQLASKVLRVLHEEPGHLYVCWDMRMAWDVAHTLKQLVAAKLKLNEEQVEDYFFQLKEGLKLPAQNLTTEPALHYPRSQGLGRWRKVISPSLTSYFFTSFPIKPFT

SEQ ID NO: 208 - protein, 222 aa, Homo sapiens [sequence omitted]

SEQ ID NO: 209 - protein, 377 aa, Homo sapiens
MDGTEIAVSPRSLHSELMCPICLDMLKNTMTTKECLHRFCSDCIVTALRSGNKECPTCRKKLVSKRSLRPDPNFDALISKIYPSREEYEAHQDRVLIRLSRLHNQQALSSSIEEGLRMQAMHRAQRVRRPIPGSDQTTTMSGGEGEPGEGEGDGEDVSSDSAPDSAPGPAPKRPRGGGAGGSSVGTGGGGTGGVGGGAGSEDSGDRGGTLGGGTLGPPSPPGAPSPPEPGGEIELVFRPHPLLVEKGEYCQTRYVKTTGNATVDHLSKYLALRIALERRQQQEAGEPGGPGGGASDTGGPDGCGGEGGGAGGGDGPEEPALPSLEGVSEKQYTIYIAPGGGAFTTLNGSLTLELVNEKFWKVSRPLELCYAPTKDPK

SEQ ID NO: 210 - protein, 377 aa, Homo sapiens; identical to SEQ ID NO: 209

SEQ ID NO: 211 - protein, 165 aa, Homo sapiens
MEPPKMNPVVEPLSWMLGTWLSDPPGAGTYPTLQPFQYLEEVHISHVGQPMLNFSFNSFHPDTRKPMHRECGFIRLKPDTNKVAFVSAQNTGVVEVEEGEVNGQELCIASHSIARISFAKEPHVEQITRKFRLNSEGKLEQTVSMATTTQPMTQHLHVTYKKVTP

SEQ ID NO: 212 - protein, 442 aa, Homo sapiens [sequence omitted]

SEQ ID NO: 213 - protein, 577 aa, Homo sapiens [sequence omitted]

SEQ ID NO: 214 - protein, 2665 aa, Homo sapiens
MAEEGAVAVCVRVRPLNSREESLGETAQVYWKTDNNVIYQVDGSKSFNFDRVFHGNETTKNVYEEIAAPIIDSAIQGYNGTIFAYGQTASGKTYTMMGSEDHLGVIPRAIHDIFQKIKKFPDREFLLRVSYMEIYNETITDLLCGTQKMKPLIIREDVNRNVYVADLTEEVVYTSEMALKWITKGEKSRHYGETKMNQRSSRSHTIFRMILESREKGEPSNCEGSVKVSHLNLVDLAGSERAAQTGAAGVRLKEGCNINRSLFILGQVIKKLSDGQVGGFINYRDSKLTRILQNSLGGNAKTRIICTITPVSFDETLTALQFASTAKYMKNTPYVNEVSTDEALLKRYRKEIMDLKKQLEEVSLETRAQAMEKDQLAQLLEEKDLLQKVQNEKIENLTRMLVTSSSLTLQQELKAKRKRRVTWCLGKINKMKNSNYADQFNIPTNITTKTHKLSINLLREIDESVCSESDVFSNTLDTLSEIEWNPATKLLNQENIESELNSLRADYDNLVLDYEQLRTEKEEMELKLKEKNDLDEFEALERKTKKDQEMQLIHEISNLKNLVKHAEVYNQDLENELSSKVELLREKEDQIKKLQEYIDSQKLENIKMDLSYSLESIEDPKQMKQTLFDAETVALDAKRESAFLRSENLELKEKMKELATTYKQMENDIQLYQSQLEAKKKMQVDLEKELQSAFNEITKLTSLIDGKVPKDLLCNLELEGKITDLQKELNKEVEENEALREEVILLSELKSLPSEVERLRKEIQDKSEELHIITSEKDKLFSEVVHKESRVQGLLEEIGKTKDDLATTQSNYKSTDQEFQNFKTLHMDFEQKYKMVLEENERMNQEIVNLSKEAQKFDSSLGALKTELSYKTQELQEKTREVQERLNEMEQLKEQLENRDSTLQTVEREKTLITEKLQQTLEEVKTLTQEKDDLKQLQESLQIERDQLKSDIHDTVNMNIDTQEQLRNALESLKQHQETINTLKSKISEEVSRNLHMEENTGETKDEFQQKMVGIDKKQDLEAKNTQTLTADVKDNEIIEQQRKIFSLIQEKNELQQMLESVIAEKEQLKTDLKENIEMTIENQEELRLLGDELKKQQEIVAQEKNHAIKKEGELSRTCDRLAEVEEKLKEKSQQLQEKQQQLLNVQEEMSEMQKKINEIENLKNELKNKELTLEHMETERLELAQKLNENYEEVKSITKERKVLKELQKSFETERDHLRGYIREIEATGLQTKEELKIAHIHLKEHQETIDELRRSVSEKTAQIINTQDLEKSHTKLQEEIPVLHEEQELLPNVKEVSETQETMNELELLTEQSTTKDSTTLARIEMERLRLNEKFQESQEEIKSLTKERDNLKTIKEALEVKHDQLKEHIRETLAKIQESQSKQEQSLNMKEKDNETTKIVSEMEQFKPKDSALLRIEIEMLGLSKRLQESHDEMKSVAKEKDDLQRLQEVLQSESDQLKENIKEIVAKHLETEEELKVAHCCLKEQEETINELRVNLSEKETEISTIQKQLEAINDKLQNKIQEIYEKEEQFNIKQISEVQEKVNELKQFKEHRKAKDSALQSIESKMLELTNRLQESQEEIQIMIKEKEEMKRVQEALQIERDQLKENTKEIVAKMKESQEKEYQFLKMTAVNETQEKMCEIEHLKEQFETQKLNLENIETENIRLTQILHENLEEMRSVTKERDDLRSVEETLKVERDQLKENLRETITRDLEKQEELKIVHMHLKEHQETIDKLRGIVSEKTNEISNMQKDLEHSNDALKAQDLKIQEELRIAHMHLKEQQETIDKLRGIVSEKTDKLSNMQKDLENSNAKLQEKIQELKANEHQLITLKKDVNETQKKVSEMEQLKKQIKDQSLTLSKLEIENLNLAQKLHENLEEMKSVMKERDNLRRVEETLKLERDQLKESLQETKARDLEIQQELKTARMLSKEHKETVDKLREKISEKTIQISDIQKDLDKSKDELQKKIQELQKKELQLLRVKEDVNMSHKKINEMEQLKKQFEAQNLSMQSVRMDNFQLTKKLHESLEEIRIVAKERDELRRIKESLKMERDQFIATLREMIARDRQNHQVKPEKRLLSDGQQHLTESLREKCSRIKELLKRYSEMDDHYECLNRLSLDLEKEIEFHRIMKKLKYVLSYVTKIKEEQHESINKFEMDFIDEVEKQKELLIKIQHLQQDCDVPSRELRDLKLNQNMDLHIEEILKDFSESEFPSIKTEFQQVLSNRKEMTQFLEEWLNTRFDIEKLKNGIQKENDRICQVNNFFNNRIIAIMNESTEFEERSATISKEWEQDLKSLKEKNEKLFKNYQTLKTSLASGAQVNPTTQDNKNPHVTSRATQLTTEKIRELENSLHEAKESAMHKESKIIKMQKELEVTNDIIAKLQAKVHESNKCLEKTKETIQVLQDKVALGAKPYKEEIEDLKMKLVKIDLEKMKNAKEFEKEISATKATVEYQKEVIRLLRENLRRSQQAQDTSVISEHTDPQPSNKPLTCGGGSGIVQNTKALILKSEHIRLEKEISKLKQQNEQLIKQKNELLSNNQHLSNEVKTWKERTLKREAHKQVTCENSPKSPKVTGTASKKKQITPSQCKERNLQDPVPKESPKSCFFDSRSKSLPSPHPVRYFDNSSLGLCPEVQNAGAESVDSQPGPWHASSGKDVPECKTQ

SEQ ID NO: 215 - protein, 2668 aa, Homo sapiens
MAEEGAVAVCVRVRPLNSREESLGETAQVYWKTDNNVIYQVDGSKSFNFDRVFHGNETTKNVYEEIAAPIIDSAIQGYNGTIFAYGQTASGKTYTMMGSEDHLGVIPRAIHDIFQKIKKFPDREFLLRVSYMEIYNETITDLLCGTQKMKPLIIREDVNRNVYVADLTEEVVYTSEMALKWITKGEKSRHYGETKMNQRSSRSHTIFRMILESREKGEPSNCEGSVKVSHLNLVDLAGSERAAQTGAAGVRLKEGCNINRSLFILGQVIKKLSDGQVGGFINYRDSKLTRILQNSLGGNAKTRIICTITPVSFDETLTALQFASTAKYMKNTPYVNEVSTDEALLKRYRKEIMDLKKQLEEVSLETRAQAMEKDQLAQLLEEKDLLQKVQNEKIENLTRMLVTSSSLTLQQELKAKRKRRVTWCLGKINKMKNSNYADQFNIPTNITTKTHKLSINLLREIDESVCSESDVFSNTLDTLSEIEWNPATKLLNQENIESELNSLRADYDNLVLDYEQLRTEKEEMELKLKEKNDLDEFEALERKTKKDQEMQLIHEISNLKNLVKHAEVYNQDLENELSSKVELLREKEDQIKKLQEYIDSQKLENIKMDLSYSLESIEDPKQMKQTLFDAETVALDAKRESAFLRSENLELKEKMKELATTYKQMENDIQLYQSQLEAKKKMQVDLEKELQSAFNEITKLTSLIDGKVPKDLLCNLELEGKITDLQKELNKEVEENEALREEVILLSELKSLPSEVERLRKEIQDKSEELHIITSEKDKLFSEVVHKESRVQGLLEEIGKTKDDLATTQSNYKSTDQEFQNFKTLHMDFEQKYKMVLEENERMNQEIVNLSKEAQKFDSSLGALKTELSYKTQELQEKTREVQERLNEMEQLKEQLENRDSTLQTVEREKTLITEKLQQTLEEVKTLTQEKDDLKQLQESLQIERDQLKSDIHDTVNMNIDTQEQLRNALESLKQHQETINTLKSKISEEVSRNLHMEENTGETKDEFQQKMVGIDKKQDLEAKNTQTLTADVKDNEIIEQQRKIFSLIQEKNELQQMLESVIAEKEQLKTDLKENIEMTIENQEELRLLGDELKKQQEIVAQEKNHAIKKEGELSRTCDRLAEVEEKLKEKSQQLQEKQQQLLNVQEEMSEMQKKINEIENLKNELKNKELTLEHMETERLELAQKLNENYEEVKSITKERKVLKELQKSFETERDHLRGYIREIEATGLQTKEELKIAHIHLKEHQETIDELRRSVSEKTAQIINTQDLEKSHTKLQEEIPVLHEEQELLPNVKEVSETQETMNELELLTEQSTTKDSTTLARIEMERLRLNEKFQESQEEIKSLTKERDNLKTIKEALEVKHDQLKEHIRETLAKIQESQSKQEQSLNMKEKDNETTKIVSEMEQFKPKDSALLRIEIEMLGLSKRLQESHDEMKSVAKEKDDLQRLQEVLQSESDQLKENIKEIVAKHLETEEELKVAHCCLKEQEETINELRVNLSEKETEISTIQKQLEAINDKLQNKIQEIYEKEEQFNIKQISEVQEKVNELKQFKEHRKAKDSALQSIESKMLELTNRLQESQEEIQIMIKEKEEMKRVQEALQIERDQLKENTKEIVAKMKESQEKEYQFLKMTAVNETQEKMCEIEHLKEQFETQKLNLENIETENIRLTQILHENLEEMRSVTKERDDLRSVEETLKVERDQLKENLRETITRLIKDLEKQEELKIVHMHLKEHQETIDKLRGIVSEKTNEISNMQKDLEHSNDALKAQDLKIQEELRIAHMHLKEQQETIDKLRGIVSEKTDKLSNMQKDLENSNAKLQEKVIQELKANEHQLITLKKDVNETQKKVSEMEQLKKQIKDQSLTLSKLEIENLNLAQKLHENLEEMKSVMKERDNLRRVEETLKLERDQLKESLQETKARDLEIQQELKTARMLSKEHKETVDKLREKISEKTIQISDIQKDLDKSKDELQKKIQELQKKELQLLRVKEDVNMSHKKINEMEQLKKQFEAQNLSMQSVRMDNFQLTKKLHESLEEIRIVAKERDELRRIKESLKMERDQFIATLREMIARDRQNHQVKPEKRLLSDGQQHLTESLREKCSRIKELLKRYSEMDDHYECLNRLSLDLEKEIEFQKELSMRYVLSYVTKIKEEQHESINKFEMDFIDEVEKQKELLIKIQHLQQDCDVPSRELRDLKLNQNMDLHIEEILKDFSESEFPSIKTEFQQVLSNRKEMTQFLEEWLNTRFDIEKLKNGIQKENDRICQVNNFFNNRIIAIMNESTEFEERSATISKEWEQDLKSLKEKNEKLFKNYQTLKTSLASGAQVNPTTQDNKNPHVTSRATQLTTEKIRELENSLHEAKESAMHKESKIIKMQKELEVTNDIIAKLQAKVHESNKCLEKTKETIQVLQDKVALGAKPYKEEIEDLKMKLVKIDLEKMKNAKEFEKEISATKATVEYQKEVIRLLRENLRRSQQAQDTSVISEHTDPQPSNKPLTCGGGSGIVQNTKALILKSEHIRLEKEISKLKQQNEQLIKQKNELLSNNQHLSNEVKTWKERTLKREAHKQVTCENSPKSPKVTGTASKKKQITPSQCKERNLQDPVPKESPKSCFFDSRSKSLPSPHPVRYFDNSSLGLCPEVQNAGAESVDSQPGPWHASSGKDVPECKTQ

SEQ ID NO: 216 - protein, 245 aa, Homo sapiens
MGRLDGKVIILTAAAQGIGQAAALAFAREGAKVIATDINESKLQELEKYPGIQTRVLDVTKKKQIDQFANEVERLDVLFNVAGFVHHGTVLDCEEKDWDFSMNLNVRSMYLMIKAFLPKMLAQKSGNIINMSSVASSVKGVVNRCVYSTTKAAVIGLTKSVAADFIQQGIRCNCVCPGTVDTPSLQERIQARGNPEEARNDFLKRQKTGRFATAEEIAMLCVYLASDESAYVTGNPVIIDGGWSL

SEQ ID NO: 217 - protein, 245 aa, Homo sapiens; identical to SEQ ID NO: 216

SEQ ID NO: 218 - protein, 173 aa, Homo sapiens
MGRLDGKVIILTAAAQGIGQAAALAFAREGAKVIATDINESKLQELEKYPGIQTRVLDVTKKKQIDQFANEVERLDVLFNVAGFVHHGTVLDCEEKDWDFSMNLNVRSMYLMIKAFLPKMLAQKSGNIINMSSVASSVKGGSVSFRGLRCSYTHIIKSSAFGNRHSRDYNFKY

SEQ ID NO: 219 - protein, 208 aa, Homo sapiens
MGRLDGKVIILTAAAQGIGQAAALAFAREGAKVIATDINESKLQELEKYPGIQTRVLDVTKKKQIDQFANEVERLDVLFNVAGFVHHGTVLDCEEKDWDFSMNLNVRSMYLMIKAFLPKMLAQKSGNIINMSSVASSVKGVVNRCVYSTTKAAVIGLTKSVAADFLKRQKTGRFATAEEIAMLCVYLASDESAYVTGNPVIIDGGWSL

SEQ ID NO: 220 - protein, 119 aa, Homo sapiens
MATDDEKLRLPMLRVVNRCVYSTTKAAVIGLTKSVAADFIQQGIRCNCVCPGTVDTPSLQERIQARGNPEEARNDFLKRQKTGRFATAEEIAMLCVYLASDESAYVTGNPVIIDGGWSL

SEQ ID NO: 221 - protein, 286 aa, Homo sapiens [sequence omitted]

SEQ ID NO: 222 - protein, 148 aa, Homo sapiens
MAEVEQKKKRTFRKFTYRGVDLDQLLDMSYEQLEQPMQLYSARQRRRLNRGLRRKQHSLLKRLRKAKKEAPPMEKQEVVKTHLRDMIILPEMVGSMVGVYNGKTFNQVEIKPEMIGHYLGEFSITYKPVKHGRPGIGATHSSRFIPLK

SEQ ID NO: 223 - protein, 490 aa, Homo sapiens
MGLLCHDPVGSRAVLVGLMPSHPSIYVPENMLSTQLSAKPILSPDSNHSSFWSITPMLSSPVPCSLSSGSYREVALIPKEARLNLESWDSPGTETPIRVGMLTGPVPLGMPLQFDERILTHVPNTSWSKPDGEKNEPSHTIWMLDPSMAPSRMPDASIVQTKKLQWMNSEPAAPADTQEVPRSLLQEDIGSHEEVIPAHPDNPQAKDAGQTLLTGQILLAGQPPLPEHPLTDQPPLTGQTPLARNPSLSKEPPITKEPTLSRWSPNPGEPGQVSTQEDEPLGLPTHVGVFQVPLTPEETCIYMSRDKVGISNTQHSITHQQQPGNSPRTQEEQLPLITFTTPGTGRKVLPMAMVATEPQSAPFKLTAEDLTHLSVVAHLGLPHGACYELVSTMDALPVRSPVLCCHSLGPFQDMAAVVIDTGTGFTKCGLAGEDHVLSVIPSRVQLLQHPAQGQPRYAVPENQVGSYSVLNRGVVYDWDALEVLWQHLFY

SEQ ID NO: 224 - protein, 190 aa, Homo sapiens
MDHSHHMGMSYMDSNSTMQPSHHHPTTSASHSHGGGDSSMMMMPMTFYFGFKNVELLFSGLVINTAGEMAGAFVAVFLLAMFYEGLKIARESLLRKSQVSIRYNSMPVPGPNGTILMETHKTVGQQMLSFPHLLQTVLHIIQVVISYFLMLIFMTYNGYLCIAVAAGAGTGYFLFSWKKAVVVDITEHCH

SEQ ID NO: 225 - protein, 190 aa, Homo sapiens; identical to SEQ ID NO: 224

SEQ ID NO: 226 - protein, 146 aa, Homo sapiens
MTFYFGFKNVELLFSGLVINTAGEMAGAFVAVFLLAMFYEGLKIARESLLRKSQVSIRYNSMPVPGPNGTILMETHKTVGQQMLSFPHLLQTVLHIIQVVISYFLMLIFMTYNGYLCIAVAAGAGTGYFLFSWKKAVVVDITEHCH

SEQ ID NO: 227 - protein, 190 aa, Homo sapiens; identical to SEQ ID NO: 224

SEQ ID NO: 228 - protein, 1169 aa, Homo sapiens
MNYCRNPDAVAAPYCYTRDPGVRWEYCNLTQCSDAEGTAVAPPTVTPVPSLEAPSEQAPTEQRPGVQECYHGNGQSYQGTYFITVTGRTCQAWSSMTPHSHSRTPAYYPNAGLIKNYCRNPDPVAAPWCYTTDPSVRWEYCNLTRCSDAEWTAFVPPNVILAPSLEAFFEQALTEETPGVQDCYYHYGQSYRGTYSTTVTGRTCQAWSSMTPHQHSRTPENYPNAGLTRNYCRNPDAEIRPWCYTMDPSVRWEYCNLTQCLVTESSVLATLTVVPDPSTEASSEEAPTEQSPGVQDCYHGDGQSYRGSFSTTVTGRTCQSWSSMTPHWHQRTTEYYPNGGLTRNYCRNPDAEISPWCYTMDPNVRWEYCNLTQCPVTESSVLATSTAVSEQAPTEQSPTVQDCYHGDGQSYRGSFSTTVTGRTCQSWSSMTPHWHQRTTEYYPNGGLTRNYCRNPDAEIRPWCYTMDPSVRWEYCNLTQCPVMESTLLTTPTVVPVPSTELPSEEAPTENSTGVQDCYRGDGQSYRGTLSTTITGRTCQSWSSMTPHWHRRIPLYYPNAGLTRNYCRNPDAEIRPWCYTMDPSVRWEYCNLTRCPVTESSVLTTPTVAPVPSTEAPSEQAPPEKSPVVQDCYHGDGRSYRGISSTTVTGRTCQSWSSMIPHWHQRTPENYPNAGLTENYCRNPDSGKQPWCYTTDPCVRWEYCNLTQCSETESGVLETPTVVPVPSMEAHSEAAPTEQTPVVRQCYHGNGQSYRGTFSTTVTGRTCQSWSSMTPHRHQRTPENYPNDGLTMNYCRNPDADTGPWCFTMDPSIRWEYCNLTRCSDTEGTVVAPPTVIQVPSLGPPSEQDCMFGNGKGYRGKKATTVTGTPCQEWAAQEPHRHSTFIPGTNKWAGLEKNYCRNPDGDINGPWCYTMNPRKLFDYCDIPLCASSSFDCGKPQVEPKKCPGSIVGGCVAHPHSWPWQVSLRTRFGKHFCGGTLISPEWVLTAAHCLKKSSRPSSYKVILGAHQEVNLESHVQEIEVSRLFLEPTQADIALLKLSRPAVITDKVMPACLPSPDYMVTARTECYITGWGETQGTFGTGLLKEAQLLVIENEVCNHYKYICAEHLARGTDSCQGDSGGPLVCFEKDKYILQGVTSWGLGCARPNKPGVYARVSRFVTWIEGMMRNN

SEQ ID NO: 229 - protein, 138 aa, Homo sapiens
MGGTTSTRRVTFEADENENITVVKGIRLSENVIDRMKESSPSGSKSQRYSGAYGASVSDEELKRRVAEELALEQAKKESEDQKRLKQAKELDRERAAANEQLTRAILRERICSEEERAKAKHLIKVELLWVKPGVLTA

SEQ ID NO: 230 - protein, 178 aa, Homo sapiens
PTGCFTLVSDEELKRRVAEELALEQAKKESEDQKRLKQAKELDRERAAANEQLTRAILRERICSEEERAKAKHLARQLEEKDRVLKKQDAFYKEQLARLEERSSEFYRVTTEQYQKAAEEVEAKFKRYESHPVCADLQAKILQCYRENTHQTLKCSALATQYMHCVNHAKQSMLEKGG

SEQ ID NO: 231 - protein, 227 aa, Homo sapiens
MGGTTSTRRVTFEADENENITVVKGIRLSENVIDRMKESSPSGSKSQRYSGAYGASVSDEELKRRVAEELALEQAKKESEDQKRLKQAKELDRERAAANEQLTRAILRERICSEEERAKAKHLARQLEEKDRVLKKQDAFYKEQLARLEERSSEFYRVTTEQYQKAAEEVEAKFKRYESHPVCADLQAKILQCYRENTHQTLKCSALATQYMHCVNHAKQSMLEKGG

SEQ ID NO: 232 - protein, 577 aa, Homo sapiens [sequence omitted]

SEQ ID NO: 233 - protein, 102 aa, Homo sapiens
MDRAALRAAAMGEKKEGGGGGDAAAAEGGAGAAASRALQQCGQLQKLIDISIGSLRGLRTKCAVSNDLTQQEIRTLEIGFRLRKDYAGKQAFGGKMKLFKGF

SEQ ID NO: 234 - protein, 847 aa, Homo sapiens
MEPWKQCAQWLIHCKVLPTNHRVTWDSAQVFDLAQTLRDGVLLCQLLNNLRAHSINLKEINLRPQMSQFLCLKNIRTFLTACCETFGMRKSELFEAFDLFDVRDFGKVIETLSRLSRTPIALATGIRPFPTEESINDEDIYKGLPDLIDETLVEDEEDLYDCVYGEDEGGEVYEDLMKAEEAHQPKCPENDIRSCCLAEIKQTEEKYTETLESIEKYFMAPLKRFLTAAEFDSVFINIPELVKLHRNLMQEIHDSIVNKNDQNLYQVFINYKERLVIYGQYCSGVESAISSLDYISKSKEDVKLKLEECSKRANNGKFTLRDLLVVPMQRVLKYHLLLQELVKHTTDPTEKANLKLALDAMKDLAQYVNEVKRDNETLREIKQFQLSIENLNQPVLLFGRPQGDGEIRITTLDKHTKQERHIFLFDLAVIVCKRKGDNYEMKEIIDLQQYKIANNPTTDKENKKWSYGFYLIHTQGQNGLEFYCKTKDLKKKWLEQFEMALSNIRPDYADSNFHDFKMHTFTRVTSCKVCQMLLRGTFYQGYLCFKCGARAHKECLGRVDNCGRVNSGEQGTLKLPEKRTNGLRRTPKQVDPGLPKMQVIRNYSGTPPPALHEGPPLQLQAGDTVELLKGDAHSLFWQGRNLASGEVGFFPSDAVKPCPCVPKPVDYSCQPWYAGAMERLQAETELINRVNSTYLVRHRTKESGEYAISIKYNNEAKHIKILTRDGFFHIAENRKFKSLMELVEYYKHHSLKEGFRTLDTTLQFPYKEPEHSAGQRGNRAGNSLLSPKVLGIAIARYDFCARDMRELSLLKGDVVKIYTKMSANGWWRGEVNGRVGWFPSTYVEEDE

SEQ ID NO: 235 - protein, 287 aa, Homo sapiens
MPIFTFLSEQGTLKLPEKRTNGLRRTPKQVDPGLPKMQVIRNYSGTPPPALHEGPPLQLQAGDTVELLKGDAHSLFWQGRNLASGEVGFFPSDAVKPCPCVPKPVDYSCQPWYAGAMERLQAETELINRVNSTYLVRHRTKESGEYAISIKYNNEAKHIKILTRDGFFHIAENRKFKSLMELVEYYKHHSLKEGFRTLDTTLQFPYKEPEHSAGQRGNRAGNSLLSPKVLGIAIARYDFCARDMRELSLLKGDVVKIYTKMSANGWWRGEVNGRVGWFPSTYVEEDE

SEQ ID NO: 236 - protein, 436 aa, Homo sapiens [sequence omitted]

SEQ ID NO: 237 - protein, 753 aa, Homo sapiens
MEGPHLPNKKKHKKQAVKTEPEKKSQSTKLSVVHEKKSQEGKPKEHTEPKSLPKQASDTGSNDAHNKKAVSRSAEQQPSEKSTEPKTKPQDMISAGGESVAGITAISGKPGDKKKEKKSLTPAVPVESKPDKPSGKSGMDAALDDLIDTLGGPEETEEENTTYTGPEVSDPMSSTYIEELGKREVTIPPKYRELLAKKEGITGPPADSSKPIGPDDAIDALSSDFTCGSPTAAGKKTEKEESTEVLKAQSAGTVRSAAPPQEKKRKVEKDTMSDQALEALSASLGTRQAEPELDLRSIKEVDEGSLPDFQQQSLSLGLPWPKMGQFLSSTFLEGSPATVWHDKLCDGERRGAREAVRIFQDQAKAKEEKLEKCGEDDETIPSEYRLKPATDKDGKPLLPEPEEKPKPRSESELIDELSEDFDRSECKEKPSKPTEKTEESKAAAPAPVSEAVCRTSMCSIQSAPPEPATLKGTVPDDAVEALADSLGKKEADPEDGKPVMDKVKEKAKEEDREKLGEKEETIPPDYRLEEVKDKDGKPLLPKESKEQLPPMSEDFLLDALSEDFSGPQNASSLKFEDAKLAAAISEVVSQTPASTTQAGAPPRDTSQSDKDLDDALDKLSDSLGQRQPDPDENKPMEDKVKEKAKAEHRDKLGERDDTIPPEYRHLLDDNGQDKPVKPPTKKSEDSKKPADDQDPIDALSGDLDSCPSTTETSQNTAKDKCKKAASSSKAPKNGGKAKDSAKTTEETSKPKDD

SEQ ID NO: 238 - protein, 777 aa, Homo sapiens
MSQPGQKPAASPRPRRAAAARRTHEHVSEKTSESPSKPGEKKGSDEKKAASLGSSQSSRTYAGGTASATKVSASSGATSKSSSMNPTETKAIPVSQQMEGPHLPNKKKHKKQAVKTEPEKKSQSTKLSVVHEKKSQEGKPKEHTEPKSLPKQASDTGSNDAHNKKAVSRSAEQQPSEKSTEPKTKPQDMISAGGESVAGITAISGKPGDKKKEKKSLTPAVPVESKPDKPSGKSGMDAALDDLIDTLGGPEETEEENTTYTGPEVSDPMSSTYIEELGKREVTIPPKYRELLAKPIGPDDAIDALSSDFTCGSPTAAGKKTEKEESTEVLKAQSAGTVRSAAPPQEKKRKVEKDTMSDQALEALSASLGTRQAEPELDLRSIKEVDEAKAKEEKLEKCGEDDETIPSEYRLKPATDKDGKPLLPEPEEKPKPRSESELIDELSEDFDRSECKEKPSKPTEKTEESKAAAPAPVSEAVCRTSMCSIQSAPPEPATLKGTVPDDAVEALADSLGKKEADPEDGKPVMDKVKEKAKEEDREKLGEKEETIPPDYRLEEVKDKDGKPLLPKESKEQLPPMSEDFLLDALSEDFSGPQNASSLKFEDAKLAAAISEVVSQTPASTTQAGAPPRDTSSDKDLDDALDKLSDSLGQRQPDPDENKPMEDKVKEKAKAEHRDKLGERDDTIPPEYRHLLDDNGQDKPVKPPTKKSEDSKKPADDQDPIDALSGDLDSCPSTTETSQNTAKDKCKKAASSSKAPKNGGKAKDSAKTTEETSKPKDD

SEQ ID NO: 239 - protein, 686 aa, Homo sapiens
MNPTETKAVKTEPEKKSQSTKLSVVHEKKSQEGKPKEHTEPKSLPKQASDTGSNDAHNKKAVSRSAEQQPSEKSTEPKTKPQDMISAGGESVAGITAISGKPGDKKKEKKSLTPAVPVESKPDKPSGKSGMDAALDDLIDTLGGPEETEEENTTYTGPEVSDPMSSTYIEELGKREVTIPPKYRELLAKKEGITGPPADSSKPIGPDDAIDALSSDFTCGSPTAAGKKTEKEESTEVLKAQSAGTVRSAAPPQEKKRKVEKDTMSDQALEALSASLGTRQAEPELDLRSIKEVDEAKAKEEKLEKCGEDDETIPSEYRLKPATDKDGKPLLPEPEEKPKPRSESELIDELSEDFDRSECKEKPSKPTEKTEESKAAAPAPVSEAVCRTSMCSIQSAPPEPATLKGTVPDDAVEALADSLGKKEADPEDGKPVMDKVKEKAKEEDREKLGEKEETIPPDYRLEEVKDKDGKPLLPKESKEQLPPMSEDFLLDALSEDFSGPQNASSLKFEDAKLAAAISEVVSQTPASTTQAGAPPRDTSQSDKDLDDALDKLSDSLGQRQPDPDENKPMEDKVKEKAKAEHRDKLGERDDTIPPEYRHLLDDNGQDKPVKPPTKKSEDSKKPADDQDPIDALSGDLDSCPSTTETSQNTAKDKCKKAASSSKAPKNGGKAKDSAKTTEETSKPKDD

SEQ ID NO: 240 - protein, 778 aa, Homo sapiens
MSQPGQKPAASPRPRRAAAARRTHEHVSEKTSESPSKPGEKKGSDEKKAASLGSSQSSRTYAGGTASATKVSASSGATSKSSSMNPTETKAIPVSQQMEGPHLPNKKKHKKQAVKTEPEKKSQSTKLSVVHEKKSQEGKPKEHTEPKSLPKQASDTGSNDAHNKKAVSRSAEQQPSEKSTEPKTKPQDMISAGGESVAGITAISGKPGDKKKEKKSLTPAVPVESKPDKPSGKSGMDAALDDLIDTLGGPEETEEENTTYTGPEVSDPMSSTYIEELGKREVTIPPKYRELLAKPIGPDDAIDALSSDFTCGSPTAAGKKTEKEESTEVLKAQSAGTVRSAAPPQEKKRKVEKDTMSDQALEALSASLGTRQAEPELDLRSIKEVDEAKAKEEKLEKCGEDDETIPSEYRLKPATDKDGKPLLPEPEEKPKPRSESELIDELSEDFDRSECKEKPSKPTEKTEESKAAAPAPVSEAVCRTSMCSIQSAPPEPATLKGTVPDDAVEALADSLGKKEADPEDGKPVMDKVKEKAKEEDREKLGEKEETIPPDYRLEEVKDKDGKPLLPKESKEQLPPMSEDFLLDALSEDFSGPQNASSLKFEDAKLAAAISEVVSQTPASTTQAGAPPRDTSQSDKDLDDALDKLSDSLGQRQPDPDENKPMEDKVKEKAKAEHRDKLGERDDTIPPEYRHLLDDNGQDKPVKPPTKKSEDSKKPADDQDPIDALSGDLDSCPSTTETSQNTAKDKCKKAASSSKAPKNGGKAKDSAKTTEETSKPKDD

SEQ ID NO: 241 - protein, 803 aa, Homo sapiens
MSQPGQKPAASPRPRRAAAARRTHEHVSEKTSESPSKPGEKKGSDEVSASSGATSKSSSMNPTETKAVKTEPEKKSQSTKLSVVHEKKSQEGKPKEHTEPKSLPKQASDTGSNDAHNKKAVSRSAEQQPSEKSTEPKTKPQDMISAGGESVAGITAISGKPGDKKKEKKSLTPAVPVESKPDKPSGKSGMDAALDDLIDTLGGPEETEEENTTYTGPEVSDPMSSTYIEELGKREVTIPPKYRELLAKKEGITGPPADSSKPIGPDDAIDALSSDFTCGSPTAAGKKTEKEESTEVLKAQSAGTVRSAAPPQEKKRKVEKDTMSDQALEALSASLGTRQAEPELDLRSIKEVDEGSLPDFQQQSLSLGLPWPKMGQFLSSTFLEGSPATVWHDKLCDGERRGAREAVRIFQDQAKAKEEKLEKCGEDDETIPSEYRLKPATDKDGKPLLPEPEEKPKPRSESELIDELSEDFDRSECKEKPSKPTEKTEESKAAAPAPVSEAVCRTSMCSIQSAPPEPATLKGTVPDDAVEALADSLGKKEADPEDGKPVMDKVKEKAKEEDREKLGEKEETIPPDYRLEEVKDKDGKPLLPKESKEQLPPMSEDFLLDALSEDFSGPQNASSLKFEDAKLAAAISEVVSQTPASTTQAGAPPRDTSSDKDLDDALDKLSDSLGQRQPDPDENKPMEDKVKEKAKAEHRDKLGERDDTIPPEYRHLLDDNGQDKPVKPPTKKSEDSKKPADDQDPIDALSGDLDSCPSTTETSQNTAKDKCKKAASSSKAPKNGGKAKDSAKTTEETSKPKDD

SEQ ID NO: 242 - protein, 803 aa, Homo sapiens; identical to SEQ ID NO: 241

SEQ ID NO: 243 - protein, 683 aa, Homo sapiens
MSQPGQKPAASPRPRRAAAARRTHEHVSEKTSESPSKPGEKKGSDEKKAASLGSSQSSRTYAGGTASATKVSASSGATSKSSSMNPTETKAIPVSQQMEGPHLPNKKKHKKQAVKTEPEKKSQSTKLSVVHEKKSQEGKPKEHTEPKSLPKQASDTGSNDAHNKKAVSRSAEQQPSEKSTEPKTKPQDMISAGGESVAGITAISGKPGDKKKEKKSLTPAVPVESKPDKPSGKSGMDAALDDLIDTLGGPEETEEENTTYTGPEVSDPMSSTYIEELGKREVTIPPKYRELLAKKEGITGPPADSSKPIGPDDAIDALSSDFTCGSPTAAGKKTEKEESTEVLKAQSAGTVRSAAPPQEKKRKVEKDTMSDQALEALSASLGTRQAEPELDLRSIKEVDEKGTVPDDAVEALADSLGKKEADPEDGKPVMDKVKEKAKEEDREKLGEKEETIPPDYRLEEVKDKDGKPLLPKESKEQLPPMSEDFLLDALSEDFSGPQNASSLKFEDAKLAAAISEVVSQTPASTTQAGAPPRDTSQSDKDLDDALDKLSDSLGQRQPDPDENKPMEDKVKEKAKAEHRDKLGERDDTIPPEYRHLLDDNGQDKPVKPPTKKSEDSKKPADDQDPIDALSGDLDSCPSTTETSQNTAKDKCKKAASSSKAPKNGGKAKDSAKTTEETSKPKDD

SEQ ID NO: 244 - protein, 750 aa, Homo sapiens
MSQPGQKPAASPRPRRAAAARRTHEHVSEKTSESPSKPGEKKGSDEKKAASLGSSQSSRTYAGGTASATKVSASSGATSKSSSMNPTETKAVKTEPEKKSQSTKPKSLPKQASDTGSNDAHNKKAVSRSAEQQPSEKSTEPKTKPQDMISAGGESVAGITAISGKPGDKKKEKKSLTPAVPVESKPDKPSGKSGMDAALDDLIDTLGGPEETEEENTTYTGPEVSDPMSSTYIEELGKREVTIPPKYRELLAKKEGITGPPADSSKPIGPDDAIDALSSDFTCGSPTAAGKKTEKEESTEVLKAQSAGTVRSAAPPQEKKRKVEKDTMSDQALEALSASLGTRQAEPELDLRSIKEVDEAKAKEEKLEKCGEDDETIPSEYRLKPATDKDGKPLLPEPEEKPKPRSESELIDELSEDFDRSECKEKPSKPTEKTEESKAAAPAPVSEAVCRTSMCSIQSAPPEPATLKGTVPDDAVEALADSLGKKEADPEDGKPVMDKVKEKAKEEDREKLGEKEETIPPDYRLEEVKDKDGKPLLPKESKEQLPPMSEDFLLDALSEDFSGPQNASSLKFEDAKLAAAISEVVSQTPASTTQAGAPPRDTSQSDKDLDDALDKLSDSLGQRQPDPDENKPMEDKVKEKAKAEHRDKLGERDDTIPPEYRHLLDDNGQDKPVKPPTKKSEDSKKPADDQDPIDALSGDLDSCPSTTETSQNTAKDKCKKAASSSKAPKNGGKAKDSAKTTEETSKPKDD

SEQ ID NO: 245 - protein, 791 aa, Homo sapiens
MSQPGQKPAASPRPRRAAAARRTHEHVSEKTSESPSKPGEKKGSDEKKAASLGSSQSSRTYAGGTASATKVSASSGATSKSSSMNPTETKAIPVSQQMEGPHLPNKKKHKKQAVKTEPEKKSQSTKLSVVHEKKSQEGKPKEHTEPKSLPKQASDTGSNDAHNKKAVSRSAEQQPSEKSTEPKTKPQDMISAGGESVAGITAISGKPGDKKKEKKSLTPAVPVESKPDKPSGKSGMDAALDDLIDTLGGPEETEEENTTYTGPEVSDPMSSTYIEELGKREVTIPPKYRELLAKKEGITGPPADSSKPIGPDDAIDALSSDFTCGSPTAAGKKTEKEESTEVLKAQSAGTVRSAAPPQEKKRKVEKDTMSDQALEALSASLGTRQAEPELDLRSIKEVDEAKAKEEKLEKCGEDDETIPSEYRLKPATDKDGKPLLPEPEEKPKPRSESELIDELSEDFDRSECKEKPSKPTEKTEESKAAAPAPVSEAVCRTSMCSIQSAPPEPATLKGTVPDDAVEALADSLGKKEADPEDGKPVMDKVKEKAKEEDREKLGEKEETIPPDYRLEEVKDKDGKPLLPKESKEQLPPMSEDFLLDALSEDFSGPQNASSLKFEDAKLAAAISEVVSQTPASTTQAGAPPRDTSQSDKDLDDALDKLSDSLGQRQPDPDENKPMEDKVKEKAKAEHRDKLGERDDTIPPEYRHLLDDNGQDKPVKPPTKKSEDSKKPADDQDPIDALSGDLDSCPSTTETSQNTAKDKCKKAASSSKAPKNGGKAKDSAKTTEETSKPKDD

SEQ ID NO: 246 - protein, 836 aa, Homo sapiens
MSQPGQKPAASPRPRRAAAARRTHEHVSEKTSESPSKPGEKKGSDEKKAASLGSSQSSRTYAGGTASATKVSASSGATSKSSSMNPTETKAIPVSQQMEGPHLPNKKKHKKQAVKTEPEKKSQSTKLSVVHEKKSQEGKPKEHTEPKSLPKQASDTGSNDAHNKKAVSRSAEQQPSEKSTEPKTKPQDMISAGGESVAGITAISGKPGDKKKEKKSLTPAVPVESKPDKPSGKSGMDAALDDLIDTLGGPEETEEENTTYTGPEVSDPMSSTYIEELGKREVTIPPKYRELLAKPIGPDDAIDALSSDFTCGSPTAAGKKTEKEESTEVLKAQSAGTVRSAAPPQEKKRKVEKDTMSDQALEALSASLGTRQAEPELDLRSIKEVDEGSLPDFQQQSLSLGLPWPKMGQFLSSTFLEGSPATVWHDKLCDGERRGAREAVRIFQDQAKAKEEKLEKCGEDDETIPSEYRLKPATDKDGKPLLPEPEEKPKPRSESELIDELSEDFDRSECKEKPSKPTEKTEESKAAAPAPVSEAVCRTSMCSIQSAPPEPATLKGTVPDDAVEALADSLGKKEADPEDGKPVMDKVKEKAKEEDREKLGEKEETIPPDYRLEEVKDKDGKPLLPKESKEQLPPMSEDFLLDALSEDFSGPQNASSLKFEDAKLAAAISEVVSQTPASTTQAGAPPRDTSSDKDLDDALDKLSDSLGQRQPDPDENKPMEDKVKEKAKAEHRDKLGERDDTIPPEYRHLLDDNGQDKPVKPPTKKSEDSKKPADDQDPIDALSGDLDSCPSTTETSQNTAKDKCKKAASSSKAPKNGGKAKDSAKTTEETSKPKDD

SEQ ID NO: 247 - protein, 726 aa, Homo sapiens
MSQPGQKPAASPRPRRAAAARRTHEHVSEKTSESPSKPGEKKGSDEVSASSGATSKSSSMNPTETKAVKTEPEKKSQSTKPKSLPKQASDTGSNDAHNKKAVSRSAEQQPSEKSTEPKTKPQDMISAGGESVAGITAISGKPGDKKKEKKSLTPAVPVESKPDKPSGKSGMDAALDDLIDTLGGPEETEEENTTYTGPEVSDPMSSTYIEELGKREVTIPPKYRELLAKKEGITGPPADSSKPIGPDDAIDALSSDFTCGSPTAAGKKTEKEESTEVLKAQSAGTVRSAAPPQEKKRKVEKDTMSDQALEALSASLGTRQAEPELDLRSIKEVDEAKAKEEKLEKCGEDDETIPSEYRLKPATDKDGKPLLPEPEEKPKPRSESELIDELSEDFDRSECKEKPSKPTEKTEESKAAAPAPVSEAVCRTSMCSIQSAPPEPATLKGTVPDDAVEALADSLGKKEADPEDGKPVMDKVKEKAKEEDREKLGEKEETIPPDYRLEEVKDKDGKPLLPKESKEQLPPMSEDFLLDALSEDFSGPQNASSLKFEDAKLAAAISEVVSQTPASTTQAGAPPRDTSQSDKDLDDALDKLSDSLGQRQPDPDENKPMEDKVKEKAKAEHRDKLGERDDTIPPEYRHLLDDNGQDKPVKPPTKKSEDSKKPADDQDPIDALSGDLDSCPSTTETSQNTAKDKCKKAASSSKAPKNGGKAKDSAKTTEETSKPKDD

SEQ ID NO: 248 - protein, 732 aa, Homo sapiens
MSQPGQKPAASPRPRRAAAARRTHEHVSEKTSESPSKPGEKKGSDEVSASSGATSKSSSMNPTETKAVKTEPEKKSQSTKLSVVHEKKSQEGKPKEHTEPKSLPKQASDTGSNDAHNKKAVSRSAEQQPSEKSTEPKTKPQDMISAGGESVAGITAISGKPGDKKKEKKSLTPAVPVESKPDKPSGKSGMDAALDDLIDTLGGPEETEEENTTYTGPEVSDPMSSTYIEELGKREVTIPPKYRELLAKPIGPDDAIDALSSDFTCGSPTAAGKKTEKEESTEVLKAQSAGTVRSAAPPQEKKRKVEKDTMSDQALEALSASLGTRQAEPELDLRSIKEVDEAKAKEEKLEKCGEDDETIPSEYRLKPATDKDGKPLLPEPEEKPKPRSESELIDELSEDFDRSECKEKPSKPTEKTEESKAAAPAPVSEAVCRTSMCSIQSAPPEPATLKGTVPDDAVEALADSLGKKEADPEDGKPVMDKVKEKAKEEDREKLGEKEETIPPDYRLEEVKDKDGKPLLPKESKEQLPPMSEDFLLDALSEDFSGPQNASSLKFEDAKLAAAISEVVSQTPASTTQAGAPPRDTSQSDKDLDDALDKLSDSLGQRQPDPDENKPMEDKVKEKAKAEHRDKLGERDDTIPPEYRHLLDDNGQDKPVKPPTKKSEDSKKPADDQDPIDALSGDLDSCPSTTETSQNTAKDKCKKAASSSKAPKNGGKAKDSAKTTEETSKPKDD

SEQ ID NO: 249 - protein, 750 aa, Homo sapiens; identical to SEQ ID NO: 244

SEQ ID NO: 250 - protein, 667 aa, Homo sapiens
MNPTETKAVKTEPEKKSQSTKPKSLPKQASDTGSNDAHNKKAVSRSAEQQPSEKSTEPKTKPQDMISAGGESVAGITAISGKPGDKKKEKKSLTPAVPVESKPDKPSGKSGMDAALDDLIDTLGGPEETEEENTTYTGPEVSDPMSSTYIEELGKREVTIPPKYRELLAKKEGITGPPADSSKPIGPDDAIDALSSDFTCGSPTAAGKKTEKEESTEVLKAQSAGTVRSAAPPQEKKRKVEKDTMSDQALEALSASLGTRQAEPELDLRSIKEVDEAKAKEEKLEKCGEDDETIPSEYRLKPATDKDGKPLLPEPEEKPKPRSESELIDELSEDFDRSECKEKPSKPTEKTEESKAAAPAPVSEAVCRTSMCSIQSAPPEPATLKGTVPDDAVEALADSLGKKEADPEDGKPVMDKVKEKAKEEDREKLGEKEETIPPDYRLEEVKDKDGKPLLPKESKEQLPPMSEDFLLDALSEDFSGPQNASSLKFEDAKLAAAISEVVSQTPASTTQAGAPPRDTSQSDKDLDDALDKLSDSLGQRQPDPDENKPMEDKVKEKAKAEHRDKLGERDDTIPPEYRHLLDDNGQDKPVKPPTKKSEDSKKPADDQDPIDALSGDLDSCPSTTETSQNTAKDKCKKAASSSKAPKNGGKAKDSAKTTEETSKPKDD

SEQ ID NO: 251 - protein, 93 aa, Homo sapiens
MYLCSTVLRPDPEFTLLFLHESDLHQLPPLFWDSSCGAQGQVHSGLAVSNFFSPTISPLEARLFPTAVTHASFYVCYLSLGSGNYFLPLPLLA

SEQ ID NO: 252 - protein, 538 aa, Homo sapiens
MSFSATILFSPPSGSEARCCCCACKSETNGGNTGSQGGNPPPSTPITVTGHGLAVQSSEQLLHVIYQRVDKAVGLAEAALGLARANNELLKRLQEEVGDLRQGKVSIPDEDGESRAHSSPPEEPGPLKESPGEAFKALSAVEEECDSVGSGVQVVIEELRQLGAASVGPGPLGFPATQRDMRLPGCTLAASEAAPLLNPLVDDYVASEGAVQRVLVPAYAKQLSPATQLAIQRATPETGPENGTKLPPPRPEDMLNAAAALDSALEESGPGSTGELRHSLGLTVSPCRTRGSGQKNSRRKRDLVLSKLVHNVHNHITNDKRFNGSESIKSSWNISVVKFLLEKLKQELVTSPHNYTDKELKGACVAYFLTKRREYRNSLNPFKGLKEKEEKKLRSRRYRLFANRSSIMRHFGPEDQRLWNDVTEELMSDEEDSLNEPGVWVARPPRFRAQRLTELCYHLDANSKHGTKANRVYGPPSDRLPSAEAQLLPPELYNPNFQEEEDEGGDENAPGSPSFDQPHKTCCPDLNSFIEIKVEKDE

SEQ ID NO: 253 - protein, 228 aa, Homo sapiens
MGVFFFFFFFFETEFRSCCPGCSGNGAILAHCNLRLLGSSDSPVSASRVAGITGMCHHAGLIFVFLVETGFHHVGQAGLQLLTLGDPPASASQSAGITGVSHRARPVTGIFNGVLPFLALFHITTGHHIYFLPYFLASQKIGRALPEQCRARIPDFLGYLISTSRNVGSYPLFLLFLPKKGENSSHIYIVGLAFQSKAKLNSVDFAWESSGPLVLETSLNCEELLICR

SEQ ID NO: 254 - protein, 498 aa, Homo sapiens
MSFSATILFSPPSGSEARCCCCACKSETNGGNTGSQGGNPPPSTPITVTGHGLAVQSSEQLLHVIYQRVDKAVGLAEAALGLARANNELLKRLQEEVGDLRQGKVSIPDEDGESRAHSSPPEEPGPLKESPGEAFKALSAVEEECDSVGSGVQVVIEELRQLGAASVGPGPLGFPATQRDMRLPGCTLAASEAAPLLNPLVDDYVASEGAVQRVLVPAYAKQLSPATQLAIQRATPETGPENGTKLPPPRPEDMLNAAAALDSALEESGPGSTGELRHSLGLTVSPCRTRGSGQKNSRRKRDLVLSKLVHNVHNHITNDKRFNGSESIKSSWNISVVKFLLEKLKQELVTSPHNYTDKELKGACVAYFLTKRREYRNSLNPFKGLKEKEEKKLRSRRYRLFANRSSIMRHFGPEDQRLWNDVTEELMSDEEDSLNEPDRLPSAEAQLLPPELYNPNFQEEEDEGGDENAPGSPSFDQPHKTCCPDLNSFIEIKVEKDE

SEQ ID NO: 255 - protein, 538 aa, Homo sapiens; identical to SEQ ID NO: 252

SEQ ID NO: 256 - protein, 538 aa, Homo sapiens; identical to SEQ ID NO: 252

SEQ ID NO: 257 - protein, 673 aa, Homo sapiens [sequence omitted]

SEQ ID NO: 258 - protein, 404 aa, Homo sapiens
  VARIANT 404: Xaa = Any Amino Acid
MAGKAAEERGLPKGATPQDTSGLQDRLFSSESDNSLYFTYSGQPNTLEVRDLNYQVDLASQVPWFEQLAQFKMPWTSPSCQNSCELGIQNLSFKVRSGQMLAIIGSSGCGRASLLDVITGRGHGGKIKSGQIWINGQPSSPQLVRKCVAHVRQHNQLLPNLTVRETLAFIAQMRLPRTFSQAQRDKRVEDVIAELRLRQCADTRVGNMYVRGLSGGERRRVSIGVQLLWNPGILILDEPTSGLDSFTAHNLVKTLSRLAKGNRLVLISLHQPRSDIFRLFDLVLLMTSGTPIYLGAAQHMVQYFTAIGYPCPRYSNPADFYVDLTSIDRRSREQELATREKAQSLAALFLEKVRDLDDFLWKAETKDLDEDTCVESSVTPLDTNCLPSPTKMPGAVQQFTTLIX

SEQ ID NO: 259 - protein, 671 aa, Homo sapiens [sequence omitted]

SEQ ID NO: 260 - protein, 619 aa, Homo sapiens [sequence omitted]

SEQ ID NO: 261 - protein, 476 aa, Homo sapiens [sequence omitted]

SEQ ID NO: 262 - protein, 655 aa, Homo sapiens [sequence omitted]

SEQ ID NO: 263 - protein, 1207 aa, Homo sapiens
MLLTLIILLPVVSKFSFVSLSAPQHWSCPEGTLAGNGNSTCVGPAPFLIFSHGNSIFRIDTEGTNYEQLVVDAGVSVIMDFHYNEKRIYWVDLERQLLQRVFLNGSRQERVCNIEKNVSGMAINWINEEVIWSNQQEGIITVTDMKGNNSHILLSALKYPANVAVDPVERFIFWSSEVAGSLYRADLDGVGVKALLETSEKITAVSLDVLDKRLFWIQYNREGSNSLICSCDYDGGSVHISKHPTQHNLFAMSLFGDRIFYSTWKMKTIWIANKHTGKDMVRINLHSSFVPLGELKVVHPLAQPKAEDDTWEPEQKLCKLRKGNCSSTVCGQDLQSHLCMCAEGYALSRDRKYCEDVNECAFWNHGCTLGCKNTPGSYYCTCPVGFVLLPDGKRCHQLVSCPRNVSECSHDCVLTSEGPLCFCPEGSVLERDGKTCSGCSSPDNGGCSQLCVPLSPVSWECDCFPGYDLQLDEKSCAASGPQPFLLFANSQDIRHMHFDGTDYGTLLSQQMGMVYALDHDPVENKIYFAHTALKWIERANMDGSQRERLIEEGVDVPEGLAVDWIGRRFYWTDRGKSLIGRSDLNGKRSKIITKENISQPRGIAVHPMAKRLFWTDTGINPRIESSSLQGLGRLVIASSDLIWPSGITIDFLTDKLYWCDAKQSVIEMANLDGSKRRRLTQNDVGHPFAVAVFEDYVWFSDWAMPSVMRVNKRTGKDRVRLQGSMLKPSSLVVVHPLAKPGADPCLYQNGGCEHICKKRLGTAWCSCREGFMKASDGKTCLALDGHQLLAGGEVDLKNQVTPLDILSKTRVSEDNITESQHMLVAEIMVSDQDDCAPVGCSMYARCISEGEDATCQCLKGFAGDGKLCSDIDECEMGVPVCPPASSKCINTEGGYVCRCSEGYQGDGIHCLDIDECQLGEHSCGENASCTNTEGGYTCMCAGRLSEPGLICPDSTPPPHLREDDHHYSVRNSDSECPLSHDGYCLHDGVCMYIEALDKYACNCVVGYIGERCQYRDLKWWELRHAGHGQQQKVIVVAVCVVVLVMLLLLSLWGAHYYRTQKLLSKNPKNPYEESSRDVRSRRPADTEDGMSSCPQPWFVVIKEHQDLKNGGQPVAGEDGQAADGSMQPTSWRQEPQLCGMGTEQGCWIPVSSDKGSCPQVMERSFHMPSYGTQTLEGGVEKPHSLLSANPLWQQRALDPPHQMELTQ

SEQ ID NO: 264 - protein, 355 aa, Homo sapiens
MALRLLKLAATSASARVVAAGAQRVRGIHSSVQCKLRYGMWHFLLGDKASKRLTERSRVITVDGNICTGKGKLAKEIAEKLGFKHFPEAGIHYPDSTTGDGKPLATDYNGNCSLEKFYDDPRSNDGNSYRLQSWLYSSRLLQYSDALEHLLTTGQGVVLERSIFSDFVFLEAMYNQGFIRKQCVDHYNEVKSVTICDYLPPHLVIYIDVPVPEVQRRIQKKGDPHEMKITSAYLQDIENAYKKTFLPEMSEKCEVLQYSAREAQDSKKVVEDIEYLKFDKGPWLKQDNRTLYHLRLLVQDKFEVLNYTSIPIFLPEVTIGAHQTDRVLHQFRELPGRKYSPGYNTEVGDKWIWLK

SEQ ID NO: 265 - protein, 201 aa, Homo sapiens
MALRLLKLAATSASARVVAAGAQRVRGIHSSVQCKLRYGMWHFLLGDKASKRLTERSRVITVDGNICTGKGKLAKEIAEKLGFKHFPEAGIHYPDSTTGDGKPLATDYNGNCSLEKFYDDPRSNDGNSYRLQSWLYSSRLLQYSDALEHLLTTGQGVVLERSIFSDFVFLEAMYNQGFIRKQCESALQTHFWVCGATLQGL

SEQ ID NO: 266 - protein, 429 aa, Homo sapiens [sequence omitted]

SEQ ID NO: 267 - protein, 355 aa, Homo sapiens; identical to SEQ ID NO: 264

SEQ ID NO: 268 - protein, 149 aa, Homo sapiens [sequence omitted]

SEQ ID NO: 269 - protein, 149 aa, Homo sapiens [sequence omitted]

SEQ ID NO: 270 - protein, 747 aa, Homo sapiens
MRRCNSGSGPPPSLLLLLLWLLAVPGANAAPRSALYSPSDPLTLLQADTVRGAVLGSRSAWAVEFFASWCGHCIAFAPTWKALAEDVKAWRPALYLAALDCAEETNSAVCRDFNIPGFPTVRFFKAFTKNGSGAVFPVAGADVQTLRERLIDALESHHDTWPPACPPLEPAKLEEIDGFFARNNEEYLALIFEKGGSYLGREVALDLSQHKGVAVRRVLNTEANVVRKFGVTDFPSCYLLFRNGSVSRVPVLMESRSFYTAYLQRLSGLTREAAQTTVAPTTANKIAPTVWKLADRSKIYMADLESALHYILRIEVGRFPVLEGQRLVALKKFVAVLAKYFPGRPLVQNFLHSVNEWLKRQKRNKIPYSFFKTALDDRKEGAVLAKKVNWIGCQGSEPHFRGFPCSLWVLFHFLTVQAARQNVDHSQEAAKAKEVLPAIRGYVHYFFGCRDCASHFEQMAAASMHRVGSPNAAVLWLWSSHNRVNARLAGAPSEDPQFPKVQWPPRELCSACHNERLDVPVWDVEATLNFLKAHFSPSNIILDFPAAGSAARRDVQNVAAAPELAMGALELESRNSTLDPGKPEMMKSPTNTTPHVPAEGPEASRPPKLHPGLRAAPGQEPPEHMAELQRNEQEQPLGQWHLSKRDTGAALLAESRAEKNRLWGPLEVRRVGRSSKQLVDIPEGQLEARAGRGRGQWLQVLGGGFSYLDISLCVGLYSLSFMGLLAMYTYFQAKIRALKGHAGHPAA

SEQ ID NO: 271 - protein, 604 aa, Homo sapiens
MRRCNSGSGPPPSLLLLLLWLLAVPGANAAPRSALYSPSDPLTLLQADTVRGAVLGSRSAWAVEFFASWCGHCIAFAPTWKALAEDVKAWRPALYLAALDCAEETNSAVCRDFNIPGFPTVRFFKAFTKNGSGAVFPVAGADVQTLRERLIDALESHHDTWPPACPPLEPAKLEEIDGFFARNNEEYLALIFEKGGSYLGREVALDLSQHKGVAVRRVLNTEANVVRKFGVTDFPSCYLLFRNGSVSRVPVLMESRSFYTAYLQRLSGLTREAAQTTVAPTTANKIAPTVWKLADRSKIYMADLESALHYILRIEVGRFPVLEGQRLVALKKFVAVLAKYFPGRPLVQNFLHSVNEWLKRQKRNKIPYSFFKTALDDRKEGAVLAKKVNWIGCQGSEPHFRGFPCSLWVLFHFLTVQAARQNVDHSQEAAKAKEVLPAIRGYVHYFFGCRDCASHFEQMAAASMHRVGSPNAAVLWLWSSHNRVNARLAGAPSEDPQFPKVQWPPRELCSACHNERLDVPVWDVEATLNFLKAHFSPSNIILDFPAAGSAARRDVQNVAAAPELAMGALELESRNSTLDPGKPEMMKSPTNTTPHVPAEGPELI

SEQ ID NO: 272 - protein, 317 aa, Homo sapiens [sequence omitted]

SEQ ID NO: 273 - protein, 359 aa, Homo sapiens [sequence omitted]

SEQ ID NO: 274 - protein, 317 aa, Homo sapiens [sequence omitted]

SEQ ID NO: 275 - protein, 247 aa, Homo sapiens [sequence omitted]

SEQ ID NO: 276 - protein, 2036 aa, Homo sapiens [sequence omitted]

SEQ ID NO: 277 - protein, 2144 aa, Homo sapiens [sequence omitted]

SEQ ID NO: 278 - protein, 2044 aa, Homo sapiens [sequence omitted]

SEQ ID NO: 279 - protein, 408 aa, Homo sapiens
MPSLLTTMKNTSELVSSEVYLLSALAALQKVVETLPHFISPYLEGILSQVIHLEKITSEMGSASQANIRLTSLKKTLATTLAPRVLLPAIKKTYKQIEKNWKNHMGPFMSILQEHIGVMKKEELTSHQSQLTAFFLEALDFRAQHSENDLEEVGKTENCIIDCLVAMVVKLSEVTFRPLFFKLFDWAKTEDAPKDRLLTFYNLADCIAEKLKGLFTLFAGHLVKPFADTLNQVNISKTDEAFFDSENDPEKCCLLLQFILNCLYKIFLFDTQHFISKERAEALMMPLVDQLENRLGGEEKFQERVTKHLIPCIAQFSVAMADDSLWKPLNYQILLKTRDSSPKVRFAALITVLALAEKLKENYIVLLPESIPFLAELMEDECEEVEHQCQKTIQQLETVLGEPLQSYF

SEQ ID NO: 280 - protein, 2036 aa, Homo sapiens [sequence omitted]

SEQ ID NO: 281 - protein, 2036 aa, Homo sapiens [sequence omitted]

SEQ ID NO: 282 - protein, 366 aa, Homo sapiens
MLLLRCQLKQAPPQKVSFRFCVVMGKQQSKLKHSTYKYGPDEIIEERIQTKAFQEYSPAHMDTVSVVAALNSDLCVSGGKDKTVVAYNWKTGNVVKRFKGHEHEITKVACIPKSSQFFSASRDRMVMMWDLHGSSQPRQQLCGHAMVVTGLAVSPDSSQLCTGSRDNTLLLWDVVTGQSVERASVSRNVVTHLCWVPREPYILQTSEDKTLRLWDSRGLQVAHMFPAKQHIQTYCEVSVDGHKCISCSNGFGGEGCEATLWDLRQTRNRICEYKGHFQTVASCVFLPRALALMPLIATSSHDCKVKIWNQDTGACLFTLSLDGSGPLTSLAVGDAISLLCASFNRGIHLLRMDHSQGLELQEVAAF

SEQ ID NO: 283 - protein, 367 aa, Homo sapiens
MLLLRCQLKQAPPQKVSFRFCVVMGKQQSKLKHSTYKYGRPDEIIEERIQTKAFQEYSPAHMDTVSVVAALNSDLCVSGGKDKTVVAYNWKTGNVVKRFKGHEHEITKVACIPKSSQFFSASRDRMVMMWDLHGSSQPRQQLCGHAMVVTGLAVSPDSSQLCTGSRDNTLLLWDVVTGQSVERASVSRNVVTHLCWVPREPYILQTSEDKTLRLWDSRGLQVAHMFPAKQHIQTYCEVSVDGHKCISCSNGFGGEGCEATLWDLRQTRNRICEYKGHFQTVASCVFLPRALALMPLIATSSHDCKVKIWNQDTGACLFTLSLDGSGPLTSLAVGDAISLLCASFNRGIHLLRMDHSQGLELQEVAAF

SEQ ID NO: 284 - protein, 367 aa, Homo sapiens; identical to SEQ ID NO: 283

SEQ ID NO: 285 - protein, 345 aa, Homo sapiens
MNAPLDGLSVSSSSTGSLGSAAGAGGGGGAGLRLLSANVRQLHQALTALLSEAEREQFTHCLNAYHARRNVFDLVRTLRVLLDSPVKRRLLPMLRLVIPRSDQLLFDQYTAEGLYLPATTPYRQPAWGGPDSAGPGEVRLVSLRRAKAHEGLGFSIRGGSEHGVGIYVSLVEPGSLAEKEGLRVGDQILRVNDKSLARVTHAEAVKALKGSKKLVLSVYSAGRIPGGYVTNHIYTWVDPQGRSISPPSGLPQPHGGALRQQEGDRRSTLHLLQGGDEKKVSGVGKGGQPLRHRILPPNPEQQSCLEAARRGWFCPGSVFPQVCTEGWCFFFAFLFDLCSVCYNTG

SEQ ID NO: 286 - protein, 524 aa, Homo sapiens
MANSAGFLGDLTTEGINKPGFYKGPAGSQVTLSSLGNQTRVLLEEQARHLLNEQEHATMAYYLDEYRGGSVSVEALVMALFKLLNTHAKFSLLSEVRGTISPQDLERFDHLVLRREIESMKARQPPGPGAGDTYSMVSYSDTGSSTGSHGTSTTVSSARNTLDLEETGEAVQGNINALPDVSVDDVRSTSQGLSSFKPLPRPPPLAQGNDLPLGQPRKLGREDLQPPSSMPSCSGTVFSAPQNRSPPAGTAPTPGTSSAQDLPSSPIYASVSPANPSSKRPLDAHLALVNQHPIGPFPRVQSPPHLKSPSAEATVAGGCLLPPSPSGHPDQTGTNQHFVMVEVHRPDSEPDVNEVRALPQTRTASTLSQLSDSGQTLSEDSGVDAGEAEASAPGRGRQSVSTKSRSSKELPRNERPTDGANKPPGLLEPTSTLVRVKKSAATLGIAIEGGANTRQPLPRIVTIQRGGSAHNCGQLKVGHVILEVNGLTLRGKEHREAARIIAEAFKTKDRDYIDFLVTEFNVML

SEQ ID NO: 287 - protein, 556 aa, Homo sapiens
MHGSLEALLFLPQVTLSLAHAHLICSNAQLEMCVFPHRFLGDLTTEGINKPGFYKGPAGSQVTLSSLGNQTRVLLEEQARHLLNEQEHATMAYYLDEYRGGSVSVEALVMALFKLLNTHAKFSLLSEVRGTISPQDLERFDHLVLRREIESMKARQPPGPGAGDTYSMVSYSDTGSSTGSHGTSTTVSSARNTLDLEETGEAVQGNINALPDVSVDDVRSTSQGLSSFKPLPRPPPLAQGNDLPLGQPRKLGREDLQPPSSMPSCSGTVFSAPQNRSPPAGTAPTPGTSSAQDLPSSPIYASVSPANPSSKRPLDAHLALVNQHPIGPFPRVQSPPHLKSPSAEATVAGGCLLPPSPSGHPDQTGTNQHFVMVEVHRPDSEPDVNEVRALPQTRTASTLSQLSDSGQTLSEDSGVDAGEAEASAPGRGRQSVSTKSRSSKELPRNERPTDGANKPPGLLEPTSTLVRVKKSAATLGIAIEGGANTRQPLPRIVTIQRGGSAHNCGQLKVGHVILEVNGLTLRGKEHREAARIIAEAFKTKDRDYIDFLVTEFNVML

SEQ ID NO: 288 - protein, 907 aa, Homo sapiens
MNAPLDGLSVSSSSTGSLGSAAGAGGGGGAGLRLLSANVRQLHQALTALLSEAEREQFTHCLNAYHARRNVFDLVRTLRVLLDSPVKRRLLPMLRLVIPRSDQLLFDQYTAEGLYLPATTPYRQPAWGGPDSAGPGEVRLVSLRRAKAHEGLGFSIRGGSEHGVGIYVSLVEPGSLAEKEGLRVGDQILRVNDKSLARVTHAEAVKALKGSKKLVLSVYSAGRIPGGYVTNHIYTWVDPQGRSISPPSGLPQPHGGALRQQEGDRRSTLHLLQGGDEKKVNLVLGDGRSLGLTIRGGAEYGLGIYITGVDPGSEAEGSGLKVGDQILEVNGRSFLNILHDEAVRLLKSSRHLILTVKDVGRLPHARTTVDETKWIASSRIRETMANSAGFLGDLTTEGINKPGFYKGPAGSQVTLSSLGNQTRVLLEEQARHLLNEQEHATMAYYLDEYRGGSVSVEALVMALFKLLNTHAKFSLLSEVRGTISPQDLERFDHLVLRREIESMKARQPPGPGAGDTYSMVSYSDTGSSTGSHGTSTTVSSARNTLDLEETGEAVQGNINALPDVSVDDVRSTSQGLSSFKPLPRPPPLAQGNDLPLGQPRKLGREDLQPPSSMPSCSGTVFSAPQNRSPPAGTAPTPGTSSAQDLPSSPIYASVSPANPSSKRPLDAHLALVNQHPIGPFPRVQSPPHLKSPSAEATVAGGCLLPPSPSGHPDQTGTNQHFVMVEVHRPDSEPDVNEVRALPQTRTASTLSQLSDSGQTLSEDSGVDAGEAEASAPGRGRQSVSTKSRSSKELPRNERPTDGANKPPGLLEPTSTLVRVKKSAATLGIAIEGGANTRQPLPRIVTIQRGGSAHNCGQLKVGHVILEVNGLTLRGKEHREAARIIAEAFKTKDRDYIDFLVTEFNVML

SEQ ID NO: 289 - protein, 665 aa, Homo sapiens
MRMEEEEEGEEEEEEEGGGDSLEVDGVAATPGKAEATRVLPRQCPVQAEKSHGAPLEEATEKMVSMKPPGFQASLARDGHMSGLGKAEAAPPGPGVPPHPPGTKSAASHQSSMTSLEGSGISERLPQKPLHRGGGPHLEETWMASPETDSGFVGSETSRVSPLTQTPEHRLSHISTAGTLAQPFAASVPRDGASYPKARGSLIPRRATEPSTPRSQAQRYLSSPSGPLRQRAPNFSLERTLAAEMAVPGSEFEGHKRISEQPLPNKTISPPPAPAPAAAPLPCGPTETIPSFLLTRAGRDQAICELQEEVSRLRLRLEDSLHQPLQGSPTRPASAFDRPARTRGRPADSPATWGSHYGSKSTERLPGEPRGEEQIVPPGRQRARSSSVPREVLRLSLSSESELPSLPLFSEKSKTTKDSPQAARDGKRGVGSAGWPDRVTFRGQYTGHEYHVLSPKAVPKGNGTVSCPHCRPIRTQDAGGAVTGDPLGPPPADTLQCPLCGQVGSPPEADGPGSATSGAEKATTRRKAPSTPSPKQRSKQAGSSPRPPPGLWYLATAPPAPAPPAFAYISSVPIMPYPPAAVYYAPAGPTSAQPAAKWPPTASPPPARRHRHSIQLDLGDLEELNKALSRAVQAAESVRSTTRQMRSSLSADLRQAHSLRGSCLF

SEQ ID NO: 290 - protein, 899 aa, Homo sapiens
MPTLGWLPENRDISEDQSSAEQTQALASQASQFLAKVESFERLIQAGRLMPQDQVKGFQRLKAAHAALEEEYLKACREQHPAQPLAGSKGTPGRFDPRRELEAEIYRLGSCLEELKEHIDQTQQEPEPPGSDSALDSTPALPCLHQPTHLPAPSGQAPMPAIKTSCPEPATTTAAASTGPCPLHVNVEVSSGNSEVEDRPQDPLARLRHKELQMEQVYHGLMERYLSVKSLPEAMRMEEEEEGEEEEEEEGGGDSLEVDGVAATPGKAEATRVLPRQCPVQAEKSHGAPLEEATEKMVSMKPPGFQASLARDGHMSGLGKAEAAPPGPGVPPHPPGTKSAASHQSSMTSLEGSGISERLPQKPLHRGGGPHLEETWMASPETDSGFVGSETSRVSPLTQTPEHRLSHISTAGTLAQPFAASVPRDGASYPKARGSLIPRRATEPSTPRSQAQRYLSSPSGPLRQRAPNFSLERTLAAEMAVPGSEFEGHKRISEQPLPNKTISPPPAPAPAAAPLPCGPTETIPSFLLTRAGRDQAICELQEEVSRLRLRLEDSLHQPLQGSPTRPASAFDRPARTRGRPADSPATWGSHYGSKSTERLPGEPRGEEQIVPPGRQRARSSSVPREVLRLSLSSESELPSLPLFSEKSKTTKDSPQAARDGKRGVGSAGWPDRVTFRGQYTGHEYHVLSPKAVPKGNGTVSCPHCRPIRTQDAGGAVTGDPLGPPPADTLQCPLCGQVGSPPEADGPGSATSGAEKATTRRKAPSTPSPKQRSKQAGSSPRPPPGLWYLATAPPAPAPPAFAYISSVPIMPYPPAAVYYAPAGPTSAQPAAKWPPTASPPPARRHRHSIQLDLGDLEELNKALSRAVQAAESVRSTTRQMRSSLSADLRQAHSLRGSCLF

SEQ ID NO: 291 - protein, 1439 aa, Homo sapiens
MASSETEIRWAEPGLGKGPQRRRWAWAEDKRDVDRSSSQSWEEERLFPNATSPELLEDFRLAQQHLPPLEWDPHPQPDGHQDSESGETSGEEAEAEDVDSPASSHEPLAWLPQQGRQLDMTEEEPDGTLGSLEVEEAGESSSRLGYEAGLSLEGHGNTSPMALGHGQARGWVASGEQASGDKLSEHSEVNPSVELSPARSWSSGTVSLDHPSDSLDSTWEGETDGPQPTALAETLPEGPSHHLLSPDGRTGGSVARATPMEFQDSSAPPAQSPQHATDRWRRETTRFFCPQPKEHIWKQTKTSPKPLPSRFIGSISPLNPQPRPTRQGRPLPRQGATLAGRSSSNAPKYGRGQLNYPLPDFSKVGPRVRFPKDESYRPPKSRSHNRKPQAPARPLIFKSPAEIVQEVLLSSGEAALAKDTPPAHPITRVPQEFQTPEQATELVHQLQEDYHRLLTKYAEAENTIDQLRLGAKVNLFSDPPQPNHSIHTGMVPQGTKVLSFTIPQPRSAEWWPGPAEDPQASAASGWPSARGDLSPSSLTSMPTLGWLPENRDISEDQSSAEQTQALASQASQFLAKVESFERLIQAGRLMPQDQVKGFQRLKAAHAALEEEYLKACREQHPAQPLAGSKGTPGRFDPRRELEAEIYRLGSCLEELKEHIDQTQQEPEPPGSDSALDSTPALPCLHQPTHLPAPSGQAPMPAIKTSCPEPATTTAAASTGPCPLHVNVEVSSGNSEVEDRPQDPLARLRHKELQMEQVYHGLMERYLSVKSLPEAMRMEEEEEGEEEEEEEGGGDSLEVDGVAATPGKAEATRVLPRQCPVQAEKSHGAPLEEATEKMVSMKPPGFQASLARDGHMSGLGKAEAAPPGPGVPPHPPGTKSAASHQSSMTSLEGSGISERLPQKPLHRGGGPHLEETWMASPETDSGFVGSETSRVSPLTQTPEHRLSHISTAGTLAQPFAASVPRDGASYPKARGSLIPRRATEPSTPRSQAQRYLSSPSGPLRQRAPNFSLERTLAAEMAVPGSEFEGHKRISEQPLPNKTISPPPAPAPAAAPLPCGPTETIPSFLLTRAGRDQAICELQEEVSRLRLRLEDSLHQPLQGSPTRPASAFDRPARTRGRPADSPATWGSHYGSKSTERLPGEPRGEEQIVPPGRQRARSSSVPREVLRLSLSSESELPSLPLFSEKSKTTKDSPQAARDGKRGVGSAGWPDRVTFRGQYTGHEYHVLSPKAVPKGNGTVSCPHCRPIRTQDAGGAVTGDPLGPPPADTLQCPLCGQVGSPPEADGPGSATSGAEKATTRRKAPSTPSPKQRSKQAGSSPRPPPGLWYLATAPPAPAPPAFAYISSVPIMPYPPAAVYYAPAGPTSAQPAAKWPPTASPPPARRHRHSIQLDLGDLEELNKALSRAVQAAESVRSTTRQMRSSLSADLRQAHSLRGSCLF

SEQ ID NO: 292 - protein, 801 aa, Homo sapiens
MWTSGRMSNAKNWLGLGMSLYFWGLMDLTTTVLSDTPTPQGELEALLSDKPQSHQRTKRSWVWNQFFVLEEYTGTDPLYVGKLHSDMDRGDGSIKYILSGEGAGIVFTIDDTTGDIHAIQRLDREERAQYTLRAQALDRRTGRPMEPESEFIIKIQDINDNEPKFLDGPYVATVPEMSPVGTSVIQVTATDADDPTYGNSARVVYSILQGQPYFSVDSKTGVIRTALMNMDREAKEYYEVIIQAKDMGGQLGGLAGTTTVNITLSDVNDNPPRFPQKHYQMSVLESAPISSTVGRVFAKDLDEGINAEMKYTIVDGDGADAFDISTDPNFQVGIITVKKPLSFESKKSYTLKVEGANPHLEMRFLNLGPFQDTTTVHISVEDVDEPPVFEPGFYFVEVPEDVAIGTTIQIISAKDPDVTNNSIRYSIDRSSDPGRFFYVDITTGALMTARPLDREEFSWHNITVLAMEMNNPSQVGSVPVTIKVLDVNDNAPEFPRFYEAFVCENAKAGQLIQTVSAVDQDDPRNGQHFYYSLAPEAANNPNFTIRDNQDNTARILTRRSGFRQQEQSVFHLPILIADSGQPVLSSTGTLTIQVCSCDDDGHVMSCSPEAYMLPVSLSRGALIAILACIFVLLVLVLLILSMRRHRKQPYIIDDEENIHENIVRYDDEGGGEEDTEAFDIAAMWNPREAQAGAAPKTRQDMLPEIESLSRYVPQTCAVNSTVHSYVLAKLYEADMDLWAPPFDSLQTYMFEGDGSVAGSLSSLQSATSDSEQSFDFLTDWGPRFRKLAELYGASEGPAPLW

SEQ ID NO: 293 - protein, 943 aa, Homo sapiens
MGLTKQYLRYVASAVFGVIGSQKGNIVFVTLRGEKGRYVAVPACEHVFIWDLRKGEKILILQGLKQEVTCLCPSPDGLHLAVGYEDGSIRIFSLLSGEGNVTFNGHKAAITTLKYDQLGGRLASGSKDTDIIVWDVINESGLYRLKGHKDAITQALFLREKNLLVTSGKDTMVKWWDLDTQHCFKTMVGHRTEVWGLVLLSEEKRLITGASDSELRVWDIAYLQEIEDPEEPDPKKIKGSSPGIQDTLEAEDGAFETDEAPEDRILSCRKAGSIMREGRDRVVNLAVDKTGRILACHGTDSVLELFCILSKKEIQKKMDKKMKKARKKAKLHSSKGEEEDPEVNVEMSLQDEIQRVTNIKTSAKIKSFDLIHSPHGELKAVFLLQNNLVELYSLNPSLPTPQPVRTSRITIGGHRSDVRTLSFSSDNIAVLSAAADSIKIWNRSTLQCIRTMTCEYALCSFFVPGDRQVVIGTKTGKLQLYDLASGNLLETIDAHDGALWSMSLSPDQRGFVTGGADKSVKFWDFELVKDENSTQKRLSVKQTRTLQLDEDVLCVSYSPNQKLLAVSLLDCTVKIFYVDTLKFFLSLYGHKLPVICMDISHDGALIATGSADRNVKIWGLDFGDCHKSLFAHDDSVMYLQFVPKSHLFFTAGKDHKIKQWDADKFEHIQTLEGHHQEIWCLAVSPSGDYVVSSSHDKSLRLWERTREPLILEEEREMEREAEYEESVAKEDQPAVPGETQGDSYFTGKKTIETVKAAERIMEAIELYREETAKMKEHKAICKAAGKEVPLPSNPILMAYGSISPSAYVLEIFKGIKSSELEESLLVLPFSYVPDILKLFNEFIQLGSDVELICRCLFFLLRIHFGQITSNQMLVPVIEKLRETTISKVSQVRDVIGFNMAGLDYLKRECEAKSEVMFFADATSHLEEKKRKRKKREKLILTLT

SEQ ID NO: 294 - protein, 935 aa, Homo sapiens
MGLTKQYLRYVASAVFGVIGSQKGNIVFVTLRGEKGRYVAVPACEHVFIWDLRKGEKGLKQEVTCLCPSPDGLHLAVGYEDGSIRIFSLLSGEGNVTFNGHKAAITTLKYDQLGGRLASGSKDTDIIVWDVINESGLYRLKGHKDAITQALFLREKNLLVTSGKDTMVKWWDLDTQHCFKTMVGHRTEVWGLVLLSEEKRLITGASDSELRVWDIAYLQEIEDPEEPDPKKIKGSSPGIQDTLEAEDGAFETDEAPEDVIHFHFLSLIVLNNGKRILSCRKAGSIMREGRDRVVNLAVDKTGRILACHGTDSVLELFCILSKKEIQKKMDKKMKKARKKAKLHSSKGEEEDPEVNVEMSLQDEIQRVTNIKTSAKIKSFDLIHSPHGELKAVFLLQNNLVELYSLNPSLPTPQPVRTSRITIGGHRSDVRTLSFSSDNIAVLSAAADSIKIWNRSTLQCIRTMTCEYALCSFFVPGDRQVVIGTKTGKLQLYDLASGNLLETIDAHDGALWSMSLSPDQRGFVTGGADKSVKFWDFELVKDENSTQKRLSVKQTRTLQLDEDVLCVSYSPNQKLLAVSLLDCTVKIFYVDTLKDGALIATGSADRNVKIWGLDFGDCHKSLFAHDDSVMYLQFVPKSHLFFTAGKDHKIKQWDADKFEHIQTLEGHHQEIWCLAVSPSGDYVVSSSHDKSLRLWERTREPLILEEEREMEREAEYEESVAKEDQPAVPGETQGDSYFTGKKTIETVKAAERIMEAIELYREETAKMKEHKAICKAAGKEVPLPSNPILMAYGSISPSAYVLEIFKGIKSSELEESLLVLPFSYVPDILKLFNEFIQLGSDVELICRCLFFLLRIHFGQITSNQMLVPVIEKLRETTISKVSQVRDVIGFNMAGLDYLKRECEAKSEVMFFADATSHLEEKKRKRKKREKLILTLT

SEQ ID NO: 295 - protein, 943 aa, Homo sapiens; identical to SEQ ID NO: 293

SEQ ID NO: 296 - protein, 655 aa, Homo sapiens
MSSSNVEVFIPVSQGNTNGFPATASNDLKAFTEGAVLSFHNICYRVKLKSGFLPCRKPVEKEILSNINGIMKPGLNAILGPTGGGKSSLLDVLAARKDPSGLSGDVLINGAPRPANFKCNSGYVVQDDVVMGTLTVRENLQFSAALRLATTMTNHEKNERINRVIQELGLDKVADSKVGTQFIRGVSGGERKRTSIGMELITDPSILFLDEPTTGLDSSTANAVLLLLKRMSKQGRTIIFSIHQPRYSIFKLFDSLTLLASGRLMFHGPAQEALGYFESAGYHCEAYNNPADFFLDIINGDSTAVALNREEDFKATEIIEPSKQDKPLIEKLAEIYVNSSFYKETKAELHQLSGGEKKKKITVFKEISYTTSFCHQLRWVSKRSFKNLLGNPQASIAQIIVTVVLGLVIGAIYFGLKNDSTGIQNRAGVLFFLTTNQCFSSVSAVELFVVEKKLFIHEYISGYYRVSSYFLGKLLSDLLPMRMLPSIIFTCIVYFMLGLKPKADAFFVMMFTLMMVAYSASSMALAIAAGQSVVSVATLLMTICFVFMMIFSGLLVNLTTIASWLSWLQYFSIPRYGFTALQHNEFLGQNFCPGLNATGNNPCNYATCTGEEYLVKQGIDLSPWGLWKNHVALACMIVIFLTIAYLKLLFLKKYS

SEQ ID NO: 297 - protein, 655 aa, Homo sapiens; identical to SEQ ID NO: 296

SEQ ID NO: 298 - protein, 859 aa, Homo sapiens
MGNREMEELIPLVNRLQDAFSALGQSCLLELPQIAVVGGQSAGKSSVLENFVGRDFLPRGSGIVTRRPLVLQLVTSKAEYAEFLHCKGKKFTDFDEVRLEIEAETDRVTGMNKGISSIPINLRVYSPHVLNLTLIDLPGITKVPVGDQPPDIEYQIREMIMQFITRENCLILAVTPANTDLANSDALKLAKEVDPQGLRTIGVITKLDLMDEGTDARDVLENKLLPLRRGYVGVVNRSQKDIDGKKDIKAAMLAERKFFLSHPAYRHIADRMGTPHLQKVLNQQLTNHIRDTLPNFRNKLQGQLLSIEHEVEAYKNFKPEDPTRKTKALLQMVQQFAVDFEKRIEGSGDQVDTLELSGGAKINRIFHERFPFEIVKMEFNEKELRREISYAIKNIHGIRTGLFTPDMAFEAIVKKQIVKLKGPSLKSVDLVIQELINTVKKCTKKLANFPRLCEETERIVANHIREREGKTKDQVLLLIDIQVSYINTNHEDFIGFANAQQRSSQVHKKTTVGNQVIRKGWLTISNIGIMKGGSKGYWFVLTAESLSWYKDDEEKEKKYMLPLDNLKVRDVEKSFMSSKHIFALFNTEQRNVYKDYRFLELACDSQEDVDSWKASLLRAGVYPDKSVAENDENGQAENFSMDPQLERQVETIRNLVDSYMSIINKCIRDLIPKTIMHLMINNVKDFINSELLAQLYSSEDQNTLMEESAEQAQRRDEMLRMYQALKEALGIIGDISTATVSTPAPPPVDDSWIQHSRRSPPPSPTTQRRPTLSAPLARPTSGRGPAPAIPSPGPHSGAPPVPFRPGPLPPFPSSSDSFGAPPQVPSRPTRAPPSVPSRRPPPSPTRPTIIRPLESSLLD

SEQ ID NO: 299 - protein, 749 aa, Homo sapiens
MNKGISSIPINLRVYSPHVLNLTLIDLPGITKVPVGDQPPDIEYQIREMIMQFITRENCLILAVTPANTDLANSDALKLAKEVDPQGLRTIGVITKLDLMDEGTDARDVLENKLLPLRRGYVGVVNRSQKDIDGKKDIKAAMLAERKFFLSHPAYRHIADRMGTPHLQKVLNQQLTNHIRDTLPNFRNKLQGQLLSIEHEVEAYKNFKPEDPTRKTKALLQMVQQFAVDFEKRIEGSGDQVDTLELSGGAKINRIFHERFPFEIVKMEFNEKELRREISYAIKNIHGIRTGLFTPDMAFEAIVKKQIVKLKGPSLKSVDLVIQELINTVKKCTKKLANFPRLCEETERIVANHIREREGKTKDQVLLLIDIQVSYINTNHEDFIGFANAQQRSSQVHKKTTVGNQVIRKGWLTISNIGIMKGGSKGYWFVLTAESLSWYKDDEEKEKKYMLPLDNLKVRDVEKSFMSSKHIFALFNTEQRNVYKDYRFLELACDSQEDVDSWKASLLRAGVYPDKSVAENDENGQAENFSMDPQLERQVETIRNLVDSYMSIINKCIRDLIPKTIMHLMINNVKDFINSELLAQLYSSEDQNTLMEESAEQAQRRDEMLRMYQALKEALGIIGDISTATVSTPAPPPVDDSWIQHSRRSPPPSPTTQRRPTLSAPLARPTSGRGPAPAIPSPGPHSGAPPVPFRPGPLPPFPSSSDSFGAPPQVPSRPTRAPPSVPSRRPPPSPTRPTIIRPLESSLLD

SEQ ID NO: 300 - protein, 555 aa, Homo sapiens
MGNREMEELIPLVNRLQDAFSALGQSCLLELPQIAVVGGQSAGKSSVLENFVGRDFLPRGSGIVTRRPLVLQLVTSKAEYAEFLHCKGKKFTDFDEVRLEIEAETDRVTGMNKGISSIPINLRVYSPHVLNLTLIDLPGITKVPVGDQPPDIEYQIREMIMQFITRENCLILAVTPANTDLANSDALKLAKEVDPQGLRTIGVITKLDLMDEGTDARDVLENKLLPLRRGYVGVVNRSQKDIDGKKDIKAAMLAERKFFLSHPAYRHIADRMGTPHLQKVLNQQLTNHIRDTLPNFRNKLQGQLLSIEHEVEAYKNFKPEDPTRKTKALLQMVQQFAVDFEKRIEGSGDQVDTLELSGGAKINRIFHERFPFEIVKMEFNEKELRREISYAIKNIHGIRTGLFTPDMAFEAIVKKQIVKLKGPSLKSVDLVIQELINTVKKCTKKLANFPRLCEETERIVANHIREREGKTKDQVLLLIDIQVSYINTNHEDFIGFANAQQRSSQVHKKTTVGNQVIRKGWLTISNIGIMKGGSKGYWFVLTAESLSWYKDDENI

SEQ ID NO: 301 - protein, 330 aa, Homo sapiens
MKGGSKGYWFVLTAESLSWYKDDEEKEKKYMLPLDNLKVRDVEKSFMSSKHIFALFNTEQRNVYKDYRFLELACDSQEDVDSWKASLLRAGVYPDKSVAENDENGQAENFSMDPQLERQVETIRNLVDSYMSIINKCIRDLIPKTIMHLMINNVKDFINSELLAQLYSSEDQNTLMEESAEQAQRRDEMLRMYQALKEALGIIGDISTATVSTPAPPPVDDSWIQHSRRSPPPSPTTQRRPTLSAPLARPTSGRGPAPAIPSPGPHSGAPPVPFRPGPLPPFPSSSDSFGAPPQVPSRPTRAPPSVPSRRPPPSPTRPTIIRPLESSLLD

SEQ ID NO: 302 - protein, 877 aa, Homo sapiens [sequence omitted]

SEQ ID NO: 303 - protein, 556 aa, Homo sapiens
MAHKGEIHDPPPEAVQTVTPVEVHIGTWFTTTPEGNRIGTKGLERIADLTPLLSFQATDPVNGTVMTTREDKVVIVERKDGTRIVDHADGTRITTFYQVYEDQIILPDDQETTEGPRTVTRQVKCMRVESSRYATVIANCEDSSCCATFGDGTTIIAKPQGTYQVLPPNTGSLYIDKDCSAVYCHESSSNIYYPFQKREQLRAGRYIMRHTSEVICEVLDPEGNTFQVMADGSISTILPEKKLEDDLNEKTEGYDSLSSMHLEKNHQQIYGEHVPRFFVMYADGSGMELLRDSDIEEYLSLAYKESNTVVLQEPVQEQPGTLTITVLRPFHEASPWQVKKEDTIVPPNLRSRSWETFPSVEKKTPGPPFGTQIWKGLCIESKQLVSAPGAILKSPSVLQMRQFIQHEVIKNEVKLRLQVSLKDYINYILKKEDELQEMMVKDSRTEEERGNAADLLKLVMYNHLDSLSKKLPSFTKKNEDANETAVQDTSDLNLESLPLNGFLIFSLSKESGRKGTSFIVKHLLQCLFMQTLVVIISFYKISLYKVHFGFSRFQAT

SEQ ID NO: 304 - protein, 3256 aa, Homo sapiens [sequence omitted]

SEQ ID NO: 305 - protein, 2801 aa, Homo sapiens [sequence omitted]

SEQ ID NO: 306 - protein, 2896 aa, Homo sapiens [sequence omitted]

SEQ ID NO: 307 - protein, 905 aa, Homo sapiens [sequence omitted]

SEQ ID NO: 308 - protein, 487 aa, Homo sapiens
MYMSMTEPSQDYVPASQSYPGPSLESEDFNIPPITPPSLPDHSLVHLNEVESGYHSLCHPMNHNGLLPFHPQNMDLPEITVSNMLGQDGTLLSNSISVMPDIRNPEGTQYSSHPQMAAMRPRGQPADIRQQPGMMPHGQLTTINQSQLSAQLGLNMGGSNVPHNSPSPPGSKSATPSPSSSVHEDEGDDTSKINGGEKRPASDMGKKPKTPKKKKKKDPNEPQKPVSAYALFFRDTQAAIKGQNPNATFGEVSKIVASMWDGLGEEQKQVYKKKTEAAKKEYLKQLAAYRASLVSKSYSEPVDVKTSQPPQLINSKPSVFHGPSQAHSALYLSSHYHQQPGMNPHLTAMHPSLPRNIAPKPNNQMPVTVSIANMAVSPPPPLQISPPLHQHLNMQQHQPLTMQQPLGNQLPMQVQSALHSPTMQQGFTLQPDYQTIINPTSTAAQVVTQAMEYVRSGCRNPPPQPVDWNNDYCSSGGMQRDKALYLT

SEQ ID NO: 309 - protein, 487 aa, Homo sapiens; identical to SEQ ID NO: 308

SEQ ID NO: 310 - protein, 526 aa, Homo sapiens
MDVRFYPPPAQPAAAPDAPCLGPSPCLDPYYCNKFDGENMYMSMTEPSQDYVPASQSYPGPSLESEDFNIPPITPPSLPDHSLVHLNEVESGYHSLCHPMNHNGLLPFHPQNMDLPEITVSNMLGQDGTLLSNSISVMPDIRNPEGTQYSSHPQMAAMRPRGQPADIRQQPGMMPHGQLTTINQSQLSAQLGLNMGGSNVPHNSPSPPGSKSATPSPSSSVHEDEGDDTSKINGGEKRPASDMGKKPKTPKKKKKKDPNEPQKPVSAYALFFRDTQAAIKGQNPNATFGEVSKIVASMWDGLGEEQKQVYKKKTEAAKKEYLKQLAAYRASLVSKSYSEPVDVKTSQPPQLINSKPSVFHGPSQAHSALYLSSHYHQQPGMNPHLTAMHPSLPRNIAPKPNNQMPVTVSIANMAVSPPPPLQISPPLHQHLNMQQHQPLTMQQPLGNQLPMQVQSALHSPTMQQGFTLQPDYQTIINPTSTAAQVVTQAMEYVRSGCRNPPPQPVDWNNDYCSSGGMQRDKALYLT

SEQ ID NO: 311 - protein, 538 aa, Homo sapiens
MERLGEKASRLLEKFGRRKGESSRSGSDGTPGPGKGRLSGLGGPRKSGPRGATGGPGDEPLEPAREQGSLDAERNQRGSFEAPRYEGSFPAGPPPTRALPLPQSLPPDFRLEPTAPALSPRSSFASSSASDASKPSSPRGSLLLDGAGAGGAGGSRPCSNRTSGISMGYDQRHGSPLPAGPCLFGPPLAGAPAGYSPGGVPSAYPELHAALDRLYAQRPAGFGCQESRHSYPPALGSPGALAGAGVGAAGPLERRGAQPGRHSVTGYGDCAVGARYQDELTALLRLTVGTGGREAGARGEPSGIEPSGLEEPPGPFVPEAARARMREPEAREDYFGTCIKCNKGIYGQSNACQALDSLYHTQCFVCCSCGRTLRCKAFYSVNGSVYCEEDYLFSGFQEAAEKCCVCGHLILEKILQAMGKSYHPGCFRCIVCNKCLDGIPFTVDFSNQVYCVTDYHKNYAPKCAACGQPILPSEGCEDIVRVISMDRDYHFECYHCEDCRMQLSDEEGCCCFPLDGHLLCHGCHMQRLNARQPPANYI

SEQ ID NO: 312 - protein, 538 aa, Homo sapiens; identical to SEQ ID NO: 311

SEQ ID NO: 313 - protein, 538 aa, Homo sapiens; identical to SEQ ID NO: 311

SEQ ID NO: 314 - protein, 531 aa, Homo sapiens [sequence omitted]

SEQ ID NO: 315 - protein, 536 aa, Homo sapiens [sequence omitted]

SEQ ID NO: 316 - protein, 458 aa, Homo sapiens [sequence omitted]

SEQ ID NO: 317 - protein, 114 aa, Homo sapiens
PLRAARGQREPTLGGQRPGAPPTLRSPRPRPDPASPAVQPAPRHLPSRSEGPCSPEDGGPHGTRGPSFRPGSPGHGSSGGAAQGAGAGVGPTARRPRPGPGQSLRIWPRPGNTS

SEQ ID NO: 318 - protein, 254 aa, Homo sapiens [sequence omitted]

SEQ ID NO: 319 - protein, 114 aa, Homo sapiens; identical to SEQ ID NO: 317

SEQ ID NO: 320 - protein, 212 aa, Homo sapiens
MAARRGALIVLEGVDRAGKSTQSRKLVEALCAAGHRAELLRFPERSTEIGKLLSSYLQKKSDVEDHSVHLLFSANRWEQVPLIKEKLSQGVTLVVDRYAFSGVAFTGAKENFSLDWCKQPDVGLPKPDLVLFLQLQLADAAKRGAFGHERYENGAFQERALRCFHQLMKDTTLNWKMVDASKSIEAVHEDIRVLSEDAIRTATEKPLGELWK

SEQ ID NO: 321 - protein, 469 aa, Homo sapiens
MPIRALCTICSDFFDHSRDVAAIHCGHTFHLQCLIQWFETAPSRTCPQCRIQVGKRTIINKLFFDLAQEEENVLDAEFLKNELDNVRAQLSQKDKEKRDSQVIIDTLRDTLEERNATVVSLQQALGKAEMLCSTLKKQMKYLEQQQDETKQAQEEARRLRSKMKTMEQIELLLQSQRPEVEEMIRDMGVGQSAVEQLAVYCVSLKKEYENLKEARKASGEVADKLRKDLFSSRSKLQTVYSELDQAKLELKSAQKDLQSADKEIMSLKKKLTMLQETLNLPPVASETVDRLVLESPAPVEVNLKLRRPSFRDDIDLNATFDVDTPPARPSSSQHGYYEKLCLEKSHSPIQDVPKKICKGPRKESQLSLGGQSCAGEPDEELVGAFPIFVRNAILGQKQPKRPRSESSCSKDVVRTGFDGLGGRTKFIQPTDTVMIRPLPVKPKTKVKQRVRVKTVPSLFQAKLDTFLWS

SEQ ID NO: 322 - protein, 103 aa, Homo sapiens
MNQEDPGWRGGVVAQGPWPFLLCVPALWETTWRSAMMLSCCLLWVLPFRMNWTMSEPSFPRKTRRNETARSSSTLCGIRWKNAMLLWYLCSRPWARPRCCAPH

SEQ ID NO: 323 - protein, 467 aa, Homo sapiens
MPFGCVTLGDKKNYNQPSEVTDRYDLGQVIKTEEFCEIFRAKDKTTGKLHTCKKFQKRDGRKVRKAAKNEIGILKMVKHPNILQLVDVFVTRKEYFIFLELATGREVFDWILDQGYYSERDTSNVVRQVLEAVAYLHSLKIVHRNLKMGAVFVAPEVVGRQRYGRPVDCWAIGVIMYILLSGNPPFYEEVEEDDYENHDKNLFRKILAGDYEFDSPYWDDISQAAKDLVTRLMEVEQDQRITAEEAISHEWISGNAASDKNIKDGVCAQIEKNFARAKWKKAVRVTTLMKRLRAPEQSSTAAAQSASATDTATPGAAGGATAAAASGATSAPEGDAARAAKSDNVAPADRSATPATDGSATPATDGSVTPATDGSITPATDGSVTPATDRSATPATDGRATPATEESTVPTTQSSAMLATKAAATPEPAMAQPDSTAPEGATGQAPPSSKGEEAAGYAQESQREEAS

SEQ ID NO: 324 - protein, 501 aa, Homo sapiens
MPFGCVTLGDKKNYNQPSEVTDRYDLGQVIKTEEFCEIFRAKDKTTGKLHTCKKFQKRDGRKVRKAAKNEIGILKMVKHPNILQLVDVFVTRKEYFIFLELATGREVFDWILDQGYYSERDTSNVVRQVLEAVAYLHSLKIVHRNLKLENLVYYNRLKNSKIVISDFHLAKLENGLIKEPCGTPEYLAPEVVGRQRYGRPVDCWAIGVIMYILLSGNPPFYEEVEEDDYENHDKNLFRKILAGDYEFDSPYWDDISQAAKDLVTRLMEVEQDQRITAEEAISHEWISGNAASDKNIKDGVCAQIEKNFARAKWKKAVRVTTLMKRLRAPEQSSTAAAQSASATDTATPGAAGGATAAAASGATSAPEGDAARAAKSDNVAPADRSATPATDGSATPATDGSVTPATDGSITPATDGSVTPATDRSATPATDGRATPATEESTVPTTQSSAMLATKAAATPEPAMAQPDSTAPEGATGQAPPSSKGEEAAGYAQESQREEAS

SEQ ID NO: 325 - protein, 473 aa, Homo sapiens [sequence omitted]

SEQ ID NO: 326 - protein, 131 aa, Homo sapiens
MEVTPLSLQIPGRKLPQIPPLGGGARPQARREQVRKQPRWGGFAARRHPRANSLTPARDVQERPRLLIIPYAPERLACRGSVPATQPRLCRGEDRRVGVDWTLSHPSNGDLGAVTSECHPPLARPSEQPRL

SEQ ID NO: 327 - protein, 119 aa, Homo sapiens
MLVIQLQAKSKRIGAQTEKTAVGVRGEKTEREAGKKGMGRKPGKRMERESSELRKAAQKCKIWKQMERIVKSRTGHTSFKIQPLKRIYSKPRLYGEENEGPCGETLAKIICRELMADLG

SEQ ID NO: 328 - protein, 261 aa, Homo sapiens
MASQLQNRLRSALALVTGAGSGIGRAVSVRLAGEGATVAACDLDRAAAQETVRLLGGPGSKEGPPRGNHAAFQADVSEARAARCLLEQVQACFSRPPSVVVSCAGITQDEFLLHMSEDDWDKVIAVNLKGTFLVTQAAAQALVSNGCRGSIINISSIVGKVGNVGQTNYAASKAGVIGLTQTAARELGRHGIRCNSVLPGFIATPMTQKVPQKVVDKITEMIPMGHLGDPEDVADVVAFLASEDSGYITGTSVEVTGGLFM

SEQ ID NO: 329 - protein, 1736 aa, Homo sapiens
MERCSRCHRLLLLLPLVLGLSAAPGWAGAPPVDVLRALRFPSLPDGVRRAKGICPADVAYRVARPAQLSAPTRQLFPGGFPKDFSLLTVVRTRPGLQAPLLTLYSAQGVRQLGLELGRPVRFLYEDQTGRPQPPSQPVFRGLSLADGKWHRVAVAVKGQSVTLIVDCKKRVTRPLPRSARPVLDTHGVIIFGARILDEEVFEGDVQELAIVPGVQAAYESCEQKELECEGGQRERPQNQQPHRAQRSPQQQPSRLHRPQNQEPQSQPTESLYYDYEPPYYDVMTTGTTPDYQDPTPGEEEEILESSLLPPLEEEQTDLQVPPTADRFQAEEYGEGGTDPPEGPYDYTYGYGDDYREETELGPALSAETAHSGAAAHGPRGLKGEKGEPAVLEPGMLVEGPPGPEGPAGLIGPPGIQGNPGPVGDPGERGPPGRAGLPGSDGAPGPPGTSLMLPFRFGSGGGDKGPVVAAQEAQAQAILQQARLALRGPPGPMGYTGRPGPLGQPGSPGLKGESGDLGPQGPRGPQGLTGPPGKAGRRGRAGADGARGMPGDPGVKGDRGFDGLPGLPGEKGHRGDTGAQGLPGPPGEDGERGDDGEIGPRGLPGESGPRGLLGPKGPPGIPGPPGVRGMDGPQGPKGSLGPQGEPGPPGQQGTPGTQGLPGPQGAIGPHGEKGPQGKPGLPGMPGSDGPPGHPGKEGPPGTKGNQGPSGPQGPLGYPGPRGVKGVDGIRGLKGHKGEKGEDGFPGFKGDIGVKGDRGEVGVPGSRGEDGPEGPKGRTGPTGDPGPPGLMGEKGKLGVPGLPGYPGRQGPKGSLGFPGFPGASGEKGARGLSGKSGPRGERGPTGPRGQRGPRGATGKSGAKGTSGGDGPHGPPGERGLPGPQGPNGFPGPKGPPGPPGKDGLPGHPGQRGEVGFQGKTGPPGPPGVVGPQGAAGETGPMGERGHPGPPGPPGEQGLPGTAGKEGTKGDPGPPGAPGKDGPAGLRGFPGERGLPGTAGGPGLKGNEGPSGPPGPAGSPGERGAAGSGGPIGPPGRPGPQGPPGAAGEKGVPGEKGPIGPTGRDGVQGPVGLPGPAGPPGVAGEDGDKGEVGDPGQKGTKGNKGEHGPPGPPGPIGPVGQPGAAGADGEPGARGPQGHFGAKGDEGTRGFNGPPGPIGLQGLPGPSGEKGETGDVGPMGPPGPPGPRGPAGPNGADGPQGPPGGVGNLGPPGEKGEPGESGSPGIQGEPGVKGPRGERGEKGESGQPGEPGPPGPKGPTGDDGPKGNPGPVGFPGDPGPPGEGGPRGQDGAKGDRGEDGEPGQPGSPGPTGENGPPGPLGKRGPAGSPGSEGRQGGKGAKGDPGAIGAPGKTGPVGPAGPAGKPGPDGLRGLPGSVGQQGRPGATGQAGPPGPVGPPGLPGLRGDAGAKGEKGHPGLIGLIGPPGEQGEKGDRGLPGPQGSPGQKGEMGIPGASGPIGPGGPPGLPGPAGPKGAKGATGPGGPKGEKGVQGPPGHPGPPGEVIQPLPIQMPKKTRRSVDGSRLMQEDEAIPTGGAPGSPGGLEEIFGSLDSLREEIEQMRRPTGTQDSPARTCQDLKLCHPELPDGEYWVDPNQGCARDAFRVFCNFTAGGETCVTPRDDVTQFSYVDSEGSPVGVVQLTFLRLLSVSAHQDVSYPCSGAARDGPLRLRGANEDELSPETSPYVKEFRDGCQTQQGRTVLEVRTPVLEQLPVLDASFSDLGAPPRRGGVLLGPVCFMG

SEQ ID NO: 330 - protein, 312 aa, Homo sapiens
MSGENVTKVSTFILVGLPTAPGLQYLLFLLFLLTYLFVLVENLAIILIVWSSTSLHRPMYYFLSSMSFLEIWYVSDITPKMLEGFLLQQKRISFVGCMTQLYFFSSLVCTECVLLASMAYDRYVAICHPLRYHVLVTPGLCLQLVGFSFVSGFTISMIKVCFISSVTFCGSNVLNHFFCDISPILKLACTDFSTAELVDFILAFIILVFPLLATILSYWHITLAVLRIPSATGCWRAFSTCASHLTVVTVFYTALLFMYVRPQAIDSQSSNKLISAVYTVVTPIINPLIYCLRNKEFKDALKKALGLGQTSH

SEQ ID NO: 331 - protein, 127 aa, Homo sapiens [sequence omitted]

SEQ ID NO: 332 - protein, 160 aa, Homo sapiens
AAARRVSAALWGGEAGKGLREMLLKNVRLRGGLGQICLRDKLRTGRFCPCITVVKVSTQSLVALRSHPGRCELKNFLRCAVSIGRHTLYLNDSEGGRMNKQQTPDFWDFVSLPKKKKKEVYCVYPAQQNGGLGIPPLLPPPPTLIYAFFKAKGIKVKFHT

SEQ ID NO: 333 - protein, 92 aa, Homo sapiens
MDRWGQNGLFPRRRHLFAPFLNLISSVFLHRFCTLGTKKPSGTLLRKDCRREDQRGSWNLFQRKLTNSEHLQLKLPLDVISVACIIPLIEQS

SEQ ID NO: 334 - protein, 65 aa, Homo sapiens [sequence omitted]

SEQ ID NO: 335 - protein, 533 aa, Homo sapiens
MSWAARPPFLPQRHAAGQCGPVGVRKEMHCGVASRWRRRRPWLDPAAAAAAAVAGGEQQTPEPEPGEAGRDGMGDSGRDSRSPDSSSPNPLPQGVPPPSPPGPPLPPSTAPSLGGSGAPPPPPMPPPPLGSPFPVISSSMGSPGLPPPAPPGFSGPVSSPQINSTVSLPGGGSGPPEDVKPPVLGVRGLHCPPPPGGPGAGKRLCAICGDRSSGKHYGVYSCEGCKGFFKRTIRKDLTYSCRDNKDCTVDKRQRNRCQYCRYQKCLATGMKREAVQEERQRGKDKDGDGEGAGGAPEEMPVDRILEAELAVEQKSDQGVEGPGGTGGSGSSPNDPVTNICQAADKQLFTLVEWAKRIPHFSSLPLDDQVILLRAGWNELLIASFSHRSIDVRDGILLATGLHVHRNSAHSAGVGAIFDRVLTELVSKMRDMRMDKTELGCLRAIILFNPDAKGLSNPSEVEVLREKVYASLETYCKQKYPEQQGRFAKLLLRLPALRSIGLKCLEHLFFFKLIGDTPIDTFLMEMLEAPHQLA

SEQ ID NO: 336 - protein, 469 aa, Homo sapiens
MARGLGAPHWVAVGLLTWATLGLLVAGLGGHDDLHDDLQEDFHGHSHRHSHEDFHHGHSHAHGHGHTHESIWHGHTHDHDHGHSHEDLHHGHSHGYSHESLYHRGHGHDHEHSHGGYGESGAPGIKQDLDAVTLWAYALGATVLISAAPFFVLFLIPVESNSPRHRSLLQILLSFASGGLLGDAFLHLIPHALEPHSHHTLEQPGHGHSHSGQGPILSVGLWVLSGIVAFLVVEKFVRHVKGGHGHSHGHGHAHSHTRGSHGHGRQERSTKEKQSSEEEEKETRGVQKRRGGSTVPKDGPVRPQNAEEEKRGLDLRVSGYLNLAADLAHNFTDGLAIGASFRGGRGLGILTTMTVLLHEVPHEVGDFAILVQSGCSKKQAMRLQLLTAVGALAGTACALLTEGGAVGSEIAGGAGPGWVLPFTAGGFIYVATVSVLPELLREASPLQSLLEVLGLLGGVIMMVLIAHLE

SEQ ID NO: 337 - protein, 469 aa, Homo sapiens; identical to SEQ ID NO: 336

SEQ ID NO: 338 - protein, 79 aa, Homo sapiens
  VARIANT 79: Xaa = Any Amino Acid
AAARRVSAALWGGEAGKGLREMLLKNVRLRGGLGQICLRDKLRTGRFCPCITVVKVSTQSLVALRSHPGRCELKNFLRX

SEQ ID NO: 339 - DNA, 201 bp, Homo sapiens
atcaccgtcatccacagcaaggactgtttcctcaaaggtgacacgtgcaccatggccggctacgcccgcttgaagaatgtccttctggcactccagacccrtctgcagccactccaagaaggagacagcagacaagaccctgcctcccagaagcgcctcctggtggaatctctgttcagggacttagatgcagatggcaat

SEQ ID NO: 340 - DNA, 201 bp, Homo sapiens
cgtctgcagccactccaagaaggagacagcagacaagaccctgcctcccagaagcgcctcctggtggaatctctgttcagggacttagatgcagatggcartggccacctcagcagctccgaactggctcagcatgtgctgaagaagcaggacctggatgaagacttacttggttgctcaccaggtgacctcctccgattt

SEQ ID NO: 341 - DNA, 201 bp, Homo sapiens
aggagcccagaagctttgaagtcacaagaagagaagggctttccagccacaacgagctgctggcctcctgcgggaagaagttctgcagccgagggagccgrtgcgtgctcagcaggaagacaggggagcccgaatgccagtgcctggaggcatgcaggcccagctacgtgcctgtgtgcggctctgatgggaggttttatg

SEQ ID NO: 342 - DNA, 201 bp, Homo sapiens
gccccgcctctgctgcccgacagctgctcgttgacagtgtcacagactctgtgcttggccccaatggtgatgtaacaggcaccccacacacatcccccgaygggcgcttcatagtcagtgctgcagctgacagcccctggctgcacgtgcaggagatcacagtgcggggcgagatccagaccctgtatgacctgcaaataa

SEQ ID NO: 343 - DNA, 201 bp, Homo sapiens
accctgtatgacctgcaaataaactcgggcatctcagacttggccttccagcgctccttcactgaaagcaatcaatacaacatctacgcggctctgcacayggagccggacctgctgttcctggagctgtccacggggaaggtgggcatgctgaagaacttaaaggagccacccgcagggccagctcagccctgggggggt

SEQ ID NO: 344 - DNA, 201 bp, Homo sapiens; identical to SEQ ID NO: 339

SEQ ID NO: 345 - DNA, 201 bp, Homo sapiens; identical to SEQ ID NO: 340

SEQ ID NO: 346 - DNA, 201 bp, Homo sapiens
acttggaagacatcaatgactttggagaggatgattccctgtacatcaccaaggtgaccaccatccacatgggcaattacacctgccatgcttccggccaygagcagctgttccagacccacgtcctgcaggtgaatgtgccgccagtcatccgtgtctatccagagagccaggcacaggagcctggagtggcagccagcc

SEQ ID NO: 347 - DNA, 201 bp, Homo sapiens
aagtctccaggtgatcacagaagccagcaccggccagagccagcacctcatccgcacaccctttgcaggagtggatgatttcttcattcccccaacaaacytcatcatcaaccacatcaggtttggcttcatcttcaacaagtctgatcctgcagtccacaaggtggacctggaaacaatgatgcccctcaagaccatcgg

SEQ ID NO: 348 - DNA, 201 bp, Homo sapiens
cctgccatgcttccggccacgagcagctgttccagacccacgtcctgcaggtgaatgtgccgccagtcatccgtgtctatccagagagccaggcacaggakcctggagtggcagccagcctaagatgccatgctgagggcattcccatgcccagaatcacttggctgaaaaacggcgtggatgtctcaactcagatgtcca

SEQ ID NO: 349 - DNA, 201 bp, Homo sapiens; identical to SEQ ID NO: 341

SEQ ID NO: 350 - DNA, 201 bp, Homo sapiens
gtacatttttacagacaaaagcaaaaacctgtactcgctttgtggttcaacactggtctccttgcaagtttcctagtataaggtatgcgctgctaccaagrttggggttttttcgttaggaagtatgatttatgccttgagctacgatgagaacatatgctgctgtgtaaagggatcatttctgtgccaagctgcacaccg

SEQ ID NO: 351 - DNA, 201 bp, Homo sapiens
ccaagcagacacctctgtcagttgccttcacatagtcattgtcccttactgccagacccagccagactttgccctgacggagtggcccggaagcagaggcygaccaggagcaggggcctccctcccgaactgaaagcccatccgtcctcgcgtgggaccgcatcttctccctcgcagctgcttcttgcttttctttccatt

SEQ ID NO: 352 - DNA, 201 bp, Homo sapiens
aatagaagattcttggccgtgtagataaggaaaataagataaggcaatatttttgaactattctataatagaaatgaggatatatacacaaaatgacccartgctgttttcttagggtgcatcctttgtttttctggttttggtcttttcatcacaggatggcattagctctgtgtctgcaggtgctgtgcagcctgtgtg

SEQ ID NO: 353 - DNA, 201 bp, Homo sapiens
gcggcgagcgggactggccattggagtgctccgctgcggagggaggggaccccgactcgagtaagtttgcgagagcactacgcagtcagtcgggggcagcrgcaagatgcgaagcgagccgtacagatcccgggctctccgaacgcaacttcgccctgcttgagcgaggctgcggtttccgaggccctctccagccaagga

SEQ ID NO: 354 - DNA, 201 bp, Homo sapiens
cgcggcgctgggtgacttcgcgtagcaggcagggaactggccgcggcgagcgggactggccattggagtgctccgctgcggagggaggggaccccgactcsagtaagtttgcgagagcactacgcagtcagtcgggggcagcagcaagatgcgaagcgagccgtacagatcccgggctctccgaacgcaacttcgccctgc

SEQ ID NO: 355 - DNA, 201 bp, Homo sapiens
ttagctgtgctcaactccggcaccaaccccatcatttacactctgaccaacaaggagatgcgtcgggccttcatccggatcatgtcctgctgcaagtgccsgagcggagactctgctggcaaattcaagcgacccatcatcgccggcatggaattcagccgcagcaaatcggacaattcctcccacccccagaaagacgaa

SEQ ID NO: 356 - DNA, 201 bp, Homo sapiens
atcactcatcgaaccacccctgaagccagtgaaggctctctcgcctcgccctctagcgttcgtccggagtagcgccaccccggcttcctggggacacaggkttggcaccatggggcccaccagcgtcccgctggtcaaggcccaccgcagctcggtctctgactacgtcaactatgatatcatcgtccggcattacaacta

SEQ ID NO: 357 - DNA, 201 bp, Homo sapiens
tcgcctcgccctctagcgttcgtccggagtagcgccaccccggcttcctggggacacagggttggcaccatggggcccaccagcgtcccgctggtcaaggmccaccgcagctcggtctctgactacgtcaactatgatatcatcgtccggcattacaactacacgggaaagctgaatatcagcgcggacaaggagaacagc

SEQ ID NO: 358 - DNA, 201 bp, Homo sapiens
tcgccctctagcgttcgtccggagtagcgccaccccggcttcctggggacacagggttggcaccatggggcccaccagcgtcccgctggtcaaggcccacsgcagctcggtctctgactacgtcaactatgatatcatcgtccggcattacaactacacgggaaagctgaatatcagcgcggacaaggagaacagcattaa

SEQ ID NO: 359 - DNA, 201 bp, Homo sapiens
ctctccagccaaggaaaagctacacaaaaagcctggatcactcatcgaaccacccctgaagccagtgaaggctctctcgcctcgccctctagcgttcgtcyggagtagcgccaccccggcttcctggggacacagggttggcaccatggggcccaccagcgtcccgctggtcaaggcccaccgcagctcggtctctgacta

SEQ ID NO: 360 - DNA, 201 bp, Homo sapiens
ctattttattggcaatctggccctctcagacctgttggcaggagtagcctacacagctaacctgctcttgtctggggccaccacctacaagctcactcccrcccagtggtttctgcgggaagggagtatgtttgtggccctgtcagcctccgtgttcagtctcctcgccatcgccattgagcgctatatcacaatgctgaa

SEQ ID NO: 361 - DNA, 201 bp, Homo sapiens
gcgctctttacttggtcgctggccaccccagtgtttggaaaaaaatctctgggcttcgactgctgccagggaggagctgctgcaagccagagggaggaagrgggagaatacgaacagcctggtggtgtcgggtgttggtgggtagagttagttcctgtgaacaatgcactgggaagggtggagatcaggtcccggcctgga

SEQ ID NO: 362 - DNA, 201 bp, Homo sapiens
aacagacaagcaaaacaaagtgaaaaccgaatggattaacttttgcaaaccaagggagatttcttagcaaatgagtctaacaaatatgacatctgtctttsgcacttttgttgatgtttatttcagaatgttgtgtgattcatttcaagcaacaacatggttgtattttgttgtgttaaaagtacttttcttgatttttga

SEQ ID NO: 363 - DNA, 201 bp, Homo sapiens
aatggattaacttttgcaaaccaagggagatttcttagcaaatgagtctaacaaatatgacatctgtctttggcacttttgttgatgtttatttcagaatsttgtgtgattcatttcaagcaacaacatggttgtattttgttgtgttaaaagtacttttcttgatttttgaatgtatttgtttcagcagaagtcatttta

SEQ ID NO: 364 - DNA, 201 bp, Homo sapiens; identical to SEQ ID NO: 353

SEQ ID NO: 365 - DNA, 201 bp, Homo sapiens; identical to SEQ ID NO: 354

SEQ ID NO: 366 - DNA, 201 bp, Homo sapiens; identical to SEQ ID NO: 355

SEQ ID NO: 367 - DNA, 201 bp, Homo sapiens; identical to SEQ ID NO: 357

SEQ ID NO: 368 - DNA, 201 bp, Homo sapiens; identical to SEQ ID NO: 358

SEQ ID NO: 369 - DNA, 201 bp, Homo sapiens; identical to SEQ ID NO: 359

SEQ ID NO: 370 - DNA, 201 bp, Homo sapiens; identical to SEQ ID NO: 356

SEQ ID NO: 371 - DNA, 201 bp, Homo sapiens; identical to SEQ ID NO: 360

SEQ ID NO: 372 - DNA, 201 bp, Homo sapiens; identical to SEQ ID NO: 361

SEQ ID NO: 373 - DNA, 201 bp, Homo sapiens; identical to SEQ ID NO: 362

SEQ ID NO: 374 - DNA, 201 bp, Homo sapiens; identical to SEQ ID NO: 363

SEQ ID NO: 375 - DNA, 201 bp, Homo sapiens
tggccgcaagatggagatagtggatgatgacgtgcccagcctgtgggctcatggcttccaggaccgtgtggcgagtgtccgtgccatcaacgggacgtggrttggctatgagttccccggctaccgtgggcgccagtacgtgtttgagcggggcgagtaccgccactggaatgagtgggacgccagccagccgcagctgca

SEQ ID NO: 376 - DNA, 201 bp, Homo sapiens
tgttctggagaagggggattatcctcgctgggatgcctggtccaacagccgtgatagtgacagccttctgtccctccggcctctgaatattgatagtccasatcacaagctgcatctgtttgagaacccagctttcagtggccgcaagatggagatagtggatgatgacgtgcccagcctgtgggctcatggcttccagga

SEQ ID NO: 377 - DNA, 201 bp, Homo sapiens
agggccttccgcggggagcagtttgttctggagaagggggattatcctcgctgggatgcctggtccaacagccgtgatagtgacagccttctgtccctccrgcctctgaatattgatagtccagatcacaagctgcatctgtttgagaacccagctttcagtggccgcaagatggagatagtggatgatgacgtgcccagc

SEQ ID NO: 378 - DNA, 201 bp, Homo sapiens; identical to SEQ ID NO: 375

SEQ ID NO: 379 - DNA, 201 bp, Homo sapiens; identical to SEQ ID NO: 376

SEQ ID NO: 380 - DNA, 201 bp, Homo sapiens; identical to SEQ ID NO: 377

SEQ ID NO: 381 - DNA, 201 bp, Homo sapiens
tttttctgtaagactgaagatgacttcaatgattggtgccagcaagtcaaaaagctgtctctgcttggaggtgccctgcccatgtttgagctggtggagcwgcagccttcacatctggcctgccccgacgtcctgaacctgtccctagattcttctgatgtagagcgactggaaagattcttcgactcagaagatgaagac

SEQ ID NO: 382 - DNA, 201 bp, Homo sapiens
gagagcttccactgccagcacccgccgtgccgcatgagcatcgcggagcttgacccgtccatcgctgtggggtttttctgtaagactgaagatgacttcartgattggtgccagcaagtcaaaaagctgtctctgcttggaggtgccctgcccatgtttgagctggtggagcagcagccttcacatctggcctgccccgac

SEQ ID NO: 383 - DNA, 201 bp, Homo sapiens
caggctggggctgcatgctgcggtgtggacagatgatctttgcccaagccctggtgtgccggcacctaggccgagattggaggtggacacaaaggaagagrcagccagacagctacttcagcgtcctcaacgcattcatcgacaggaaggacagttactactccattcaccagatagcgcaaatgggagttggcgaaggca

SEQ ID NO: 384 - DNA, 201 bp, Homo sapiens
gccgcatgagcatcgcggagcttgacccgtccatcgctgtggggtttttctgtaagactgaagatgacttcaatgattggtgccagcaagtcaaaaagctrtctctgcttggaggtgccctgcccatgtttgagctggtggagcagcagccttcacatctggcctgccccgacgtcctgaacctgtccctagattcttctg

SEQ ID NO: 385 - DNA, 201 bp, Homo sapiens
gcatcgcggagcttgacccgtccatcgctgtggggtttttctgtaagactgaagatgacttcaatgattggtgccagcaagtcaaaaagctgtctctgctyggaggtgccctgcccatgtttgagctggtggagcagcagccttcacatctggcctgccccgacgtcctgaacctgtccctagattcttctgatgtagagc

SEQ ID NO: 386 - DNA, 201 bp, Homo sapiens
gaagcttgctgtcttcgatacgtggagctccttggcggtccacattgcaatggacaacactgttgtgatggaggaaatcagaaggttgtgcaggaccagcrttccctgtgcaggcgccactgcgtttcctgcagattccgaccggcactgcaacggattccctgccggagctgaggtcaccaacaggccgtcgccatggag

SEQ ID NO: 387 - DNA, 201 bp, Homo sapiens
acaacactgttgtgatggaggaaatcagaaggttgtgcaggaccagcgttccctgtgcaggcgccactgcgtttcctgcagattccgaccggcactgcaayggattccctgccggagctgaggtcaccaacaggccgtcgccatggagacccctggtacttctcattcccctgcgcctggggctcacggacatcaacgagg

SEQ ID NO: 388 - DNA, 201 bp, Homo sapiens
gaaggttgtgcaggaccagcgttccctgtgcaggcgccactgcgtttcctgcagattccgaccggcactgcaacggattccctgccggagctgaggtcacyaacaggccgtcgccatggagacccctggtacttctcattcccctgcgcctggggctcacggacatcaacgaggcctacgtggagacgctgaagcactgct

SEQ ID NO: 389 - DNA, 201 bp, Homo sapiens
cccgggaggccttactgcttggtgtcagactgcccagctcagagtgcccgtcagggcctgtgcatccgcacgcggagccgtctgttaggagcttccagagygttctctcgacactgccagccccgtgttagcacctgggcctcagtcccacttgctcccaggcgccggttctgtggttggtttggaattaaagtcctgttt

SEQ ID NO: 390 - DNA, 201 bp, Homo sapiens
gcacctgggcctcagtcccacttgctcccaggcgccggttctgtggttggtttggaattaaagtcctgtttgaagttgtcagacacagacatgaatttctggggcgctccctgagtcagagtctcagaagacctgtgcaggctggcgtgagaggagcggcagccacactgcggccccacgcccaaggactgggctgctctc

SEQ ID NO: 391 - DNA, 201 bp, Homo sapiens
tttgaagttgtcagacacagacatgaatttctggggcgctccctgagtcagagtctcagaagacctgtgcaggctggcgtgagaggagcggcagccacacygcggccccacgcccaaggactgggctgctctcgaggggggcgcgcccaccgctgtgtcctctctgcccagcctggcttaccaagggctacctcagtggga

SEQ ID NO: 392 - DNA, 201 bp, Homo sapiens
acatgaatttctggggcgctccctgagtcagagtctcagaagacctgtgcaggctggcgtgagaggagcggcagccacactgcggccccacgcccaaggaytgggctgctctcgaggggggcgcgcccaccgctgtgtcctctctgcccagcctggcttaccaagggctacctcagtgggagatgaggttggaggaacgaa

SEQ ID NO: 393 - DNA, 201 bp, Homo sapiens
gaggaacgaaggcgaggttcctccttgctttggggagaaaagtattcaggaagtgggtgtgtgggaaacctgaagatggcgtgcacaggacacagcgtggkcggcctgggcagaagggcggctggctgtcctggagctgctgctggagcctgccctcagagtgtccctttccagtgctgtggcattctgtggcagcttccc

SEQ ID NO: 394 - DNA, 201 bp, Homo sapiens
agggcggctggctgtcctggagctgctgctggagcctgccctcagagtgtccctttccagtgctgtggcattctgtggcagcttccccaggtgtggtgacggggggggcggggcctccacctgtgacagtcaggcttgagggtggacggcgtgcctctcccaggagccttccccatgtccttgccttgctgagaattgccc

SEQ ID NO: 395 - DNA, 201 bp, Homo sapiens
tggagcctgccctcagagtgtccctttccagtgctgtggcattctgtggcagcttccccaggtgtggtgacggggggggcggggcctccacctgtgacagycaggcttgagggtggacggcgtgcctctcccaggagccttccccatgtccttgccttgctgagaattgccctcccatgccgctgaggtgttaggtggttt

SEQ ID NO: 396 - DNA, 201 bp, Homo sapiens
acctggtggcatttccagaacctcagccccgattccagcacccaccaccgcctgaccctgtgtaacctgctgtcccgggtcccagagtgcactctgccccrctgctctgctgcctgtcctgggaaagtagctttgccccactaggaaatgtaaacaggagggcttggggagcgtgggcacttttctcatgagcagctactg

SEQ ID NO: 397 - DNA, 201 bp, Homo sapiens
cgattccagcacccaccaccgcctgaccctgtgtaacctgctgtcccgggtcccagagtgcactctgccccactgctctgctgcctgtcctgggaaagtakctttgccccactaggaaatgtaaacaggagggcttggggagcgtgggcacttttctcatgagcagctactgcggcgttggcaggactcgctgctgctgct

SEQ ID NO: 398 - DNA, 201 bp, Homo sapiens
tctgctgcctgtcctgggaaagtagctttgccccactaggaaatgtaaacaggagggcttggggagcgtgggcacttttctcatgagcagctactgcggcrttggcaggactcgctgctgctgctgctgcttgtgtaggtcggggagccggagatccccgaggacgcgcgccggacagtcggcactgaccggcccacctgg

SEQ ID NO: 399 - DNA, 201 bp, Homo sapiens
acaggagggcttggggagcgtgggcacttttctcatgagcagctactgcggcgttggcaggactcgctgctgctgctgctgcttgtgtaggtcggggagcyggagatccccgaggacgcgcgccggacagtcggcactgaccggcccacctggtagcagaggacacccccagccccccaagcattgaagacatagtgtatt

SEQ ID NO: 400 - DNA, 201 bp, Homo sapiens
caggagggcttggggagcgtgggcacttttctcatgagcagctactgcggcgttggcaggactcgctgctgctgctgctgcttgtgtaggtcggggagccrgagatccccgaggacgcgcgccggacagtcggcactgaccggcccacctggtagcagaggacacccccagccccccaagcattgaagacatagtgtattt

SEQ ID NO: 401 - DNA, 201 bp, Homo sapiens
cattgaagacatagtgtatttcctcgtatcctttctcccttgggtgtagttggggtggggaagcagggaaggctggtgcgatctccattccttgggctccrcgtccgagttcatggtgcgccgctgtgctgggagctgcagtgggaatgtgtgggacaccttgaccaaaggggagctttgtctcgtgtgttttgaaaaagg

SEQ ID NO: 402 - DNA, 201 bp, Homo sapiens
tgtagttggggtggggaagcagggaaggctggtgcgatctccattccttgggctccgcgtccgagttcatggtgcgccgctgtgctgggagctgcagtggkaatgtgtgggacaccttgaccaaaggggagctttgtctcgtgtgttttgaaaaaggcttaatgaagagaatgttgttcattcttagtagtatagtttgca

SEQ ID NO: 403 - DNA, 201 bp, Homo sapiens
gggaagcagggaaggctggtgcgatctccattccttgggctccgcgtccgagttcatggtgcgccgctgtgctgggagctgcagtgggaatgtgtgggacmccttgaccaaaggggagctttgtctcgtgtgttttgaaaaaggcttaatgaagagaatgttgttcattcttagtagtatagtttgcaattcttaatggca

SEQ ID NO: 404 - DNA, 201 bp, Homo sapiens
tttttctgtaagactgaagatgacttcaatgattggtgccagcaagtcaaaaagctgtctctgcttggaggtgccctgcccatgtttgagctggtggagcwgcagccttcacatctggcctgccccgacgtcctgaacctgtccctaggtgagagctgccaagtccaggtggggtccctcggaggtacgatctgtgccctt

SEQ ID NO: 405 - DNA, 201 bp, Homo sapiens; identical to SEQ ID NO: 382

SEQ ID NO: 406 - DNA, 201 bp, Homo sapiens; identical to SEQ ID NO: 383

SEQ ID NO: 407 - DNA, 201 bp, Homo sapiens
gccgcatgagcatcgcggagcttgacccgtccatcgctgtggggtttttctgtaagactgaagatgacttcaatgattggtgccagcaagtcaaaaagctrtctctgcttggaggtgccctgcccatgtttgagctggtggagcagcagccttcacatctggcctgccccgacgtcctgaacctgtccctaggtgagagct

SEQ ID NO: 408 - DNA, 201 bp, Homo sapiens
gcatcgcggagcttgacccgtccatcgctgtggggtttttctgtaagactgaagatgacttcaatgattggtgccagcaagtcaaaaagctgtctctgctyggaggtgccctgcccatgtttgagctggtggagcagcagccttcacatctggcctgccccgacgtcctgaacctgtccctaggtgagagctgccaagtcc

SEQ ID NO: 409 - DNA, 201 bp, Homo sapiens
cttcacatctggcctgccccgacgtcctgaacctgtccctaggtgagagctgccaagtccaggtggggtccctcggaggtacgatctgtgcccttgcttcyccagtcctggcccccttggttttgaccattaaggtgtgtgtgagcctgagccgtgagcacttggcagtggttcgcctgtgagaccaggtatggagtggag

SEQ ID NO: 410 - DNA, 201 bp, Homo sapiens; identical to SEQ ID NO: 386

SEQ ID NO: 411 - DNA, 201 bp, Homo sapiens; identical to SEQ ID NO: 387

SEQ ID NO: 412 - DNA, 201 bp, Homo sapiens; identical to SEQ ID NO: 388

SEQ ID NO: 413 - DNA, 201 bp, Homo sapiens
ttcgcctgtgagaccaggtatggagtggagcgtcccctcctccaagcttgcgcccagcagcccaggacccacctcgtcttccccaccagcgctgcctgccsgggcgctgtggagctgggcgtgctaccatggagtcctcaggggtctggagcagacagaacatgcaggctctgtggtgacgcagtcctgggtgggggactg

SEQ ID NO: 414 - DNA, 201 bp, Homo sapiens
catgggtggcgtagacccctcggaccatggccagcgtgccgcaggagccggcctgggctcgtgcagtgaagtgagtggccgtgagcgcgtcctcctcatcyctgtctccctgtgggaaactctacaaacaaggcaatggcaatggaaccactcctgatgaccacgagggtcagacgcgggacagaggcccctcaggcctga

SEQ ID NO: 415 - DNA, 201 bp, Homo sapiens
cccctcggaccatggccagcgtgccgcaggagccggcctgggctcgtgcagtgaagtgagtggccgtgagcgcgtcctcctcatctctgtctccctgtggraaactctacaaacaaggcaatggcaatggaaccactcctgatgaccacgagggtcagacgcgggacagaggcccctcaggcctgagattgtgccggccgc

SEQ ID NO: 416 - DNA, 201 bp, Homo sapiens
ggtctgcacaacccccggacctgttcacacccgcatggggacagctgtctgtgggctgcagagcaggcactgctcagtctgccccacgccaagggcccttractcacacccaggtggcccacccaagatgcctgatgcgctatgtcctgttccttctagattcttctgatgtagagcgactggaaagattcttcgactcag

SEQ ID NO: 417 - DNA, 186 bp, Homo sapiens
cccgggaggccttactgcttggtgtcagactgcccagctcagagtgcccgtcagggcctgtgcatccgcacgcggagccgtctgttaggagcttccagagygttctctcgacactgccagccccgtgttagcacctgggcctcagtcccacttgctcccaggcgccggttctgtggttggtttgga

SEQ ID NO: 418 - DNA, 201 bp, Homo sapiens
tttttctgtaagactgaagatgacttcaatgattggtgccagcaagtcaaaaagctgtctctgcttggaggtgccctgcccatgtttgagctggtggagcwgcagccttcacatctggcctgccccgacgtcctgaacctgtccctaggtgagagctgccaagtccaggtggggtccctcggagattcttctgatgtagag

SEQ ID NO: 419 - DNA, 201 bp, Homo sapiens
ctgggtagaaaatacagcattttcacagaaaaggacgagatcttgtctgatgtggcatctagactttggtttacatacaggaaaaactttccagccattgraggttgtcgggacatttcactctccagtaaatgtggcccttggcgttactgagtcctaagaggggggacaggccccacctcggacacaggctggggctgc

SEQ ID NO: 420 - DNA, 201 bp, Homo sapiens; identical to SEQ ID NO: 382

SEQ ID NO: 421 - DNA, 201 bp, Homo sapiens; identical to SEQ ID NO: 383

SEQ ID NO: 422 - DNA, 201 bp, Homo sapiens; identical to SEQ ID NO: 407

SEQ ID NO: 423 - DNA, 201 bp, Homo sapiens; identical to SEQ ID NO: 408

SEQ ID NO: 424 - DNA, 201 bp, Homo sapiens; identical to SEQ ID NO: 386

SEQ ID NO: 425 - DNA, 201 bp, Homo sapiens; identical to SEQ ID NO: 387

SEQ ID NO: 426 - DNA, 201 bp, Homo sapiens; identical to SEQ ID NO: 388

SEQ ID NO: 427 - DNA, 201 bp, Homo sapiens; identical to SEQ ID NO: 389

SEQ ID NO: 428 - DNA, 201 bp, Homo sapiens; identical to SEQ ID NO: 390

SEQ ID NO: 429 - DNA, 201 bp, Homo sapiens; identical to SEQ ID NO: 391

SEQ ID NO: 430 - DNA, 201 bp, Homo sapiens; identical to SEQ ID NO: 392

SEQ ID NO: 431 - DNA, 201 bp, Homo sapiens; identical to SEQ ID NO: 393

SEQ ID NO: 432 - DNA, 201 bp, Homo sapiens; identical to SEQ ID NO: 394

SEQ ID NO: 433 - DNA, 201 bp, Homo sapiens; identical to SEQ ID NO: 395

SEQ ID NO: 434 - DNA, 201 bp, Homo sapiens; identical to SEQ ID NO: 396

SEQ ID NO: 435 - DNA, 201 bp, Homo sapiens; identical to SEQ ID NO: 397

SEQ ID NO: 436 - DNA, 201 bp, Homo sapiens; identical to SEQ ID NO: 398

SEQ ID NO: 437 - DNA, 201 bp, Homo sapiens; identical to SEQ ID NO: 399

SEQ ID NO: 438 - DNA, 201 bp, Homo sapiens; identical to SEQ ID NO: 400

SEQ ID NO: 439 - DNA, 201 bp, Homo sapiens; identical to SEQ ID NO: 401

SEQ ID NO: 440 - DNA, 201 bp, Homo sapiens; identical to SEQ ID NO: 402

SEQ ID NO: 441 - DNA, 201 bp, Homo sapiens; identical to SEQ ID NO: 403

SEQ ID NO: 442 - DNA, 201 bp, Homo sapiens; identical to SEQ ID NO: 383

SEQ ID NO: 443 - DNA, 201 bp, Homo sapiens; identical to SEQ ID NO: 386

SEQ ID NO: 444 - DNA, 201 bp, Homo sapiens; identical to SEQ ID NO: 387

SEQ ID NO: 445 - DNA, 102 bp, Homo sapiens
cgtggcggccacctgagcacacaggcatttggtgctgaatgctgtttgggaatgacgaggaaaactttcggatttttgcgttttttttttcagcatgttgsg

SEQ ID NO: 446 - DNA, 201 bp, Homo sapiens; identical to SEQ ID NO: 388

SEQ ID NO: 447 - DNA, 201 bp, Homo sapiens; identical to SEQ ID NO: 381

SEQ ID NO: 448 - DNA, 201 bp, Homo sapiens; identical to SEQ ID NO: 382

SEQ ID NO: 449 - DNA, 201 bp, Homo sapiens; identical to SEQ ID NO: 383

SEQ ID NO: 450 - DNA, 201 bp, Homo sapiens; identical to SEQ ID NO: 384

SEQ ID NO: 451 - DNA, 201 bp, Homo sapiens; identical to SEQ ID NO: 385

SEQ ID NO: 452 - DNA, 201 bp, Homo sapiens; identical to SEQ ID NO: 386

SEQ ID NO: 453 - DNA, 201 bp, Homo sapiens; identical to SEQ ID NO: 387

SEQ ID NO: 454 - DNA, 201 bp, Homo sapiens; identical to SEQ ID NO: 388

SEQ ID NO: 455 - DNA, 201 bp, Homo sapiens; identical to SEQ ID NO: 389

SEQ ID NO: 456 - DNA, 201 bp, Homo sapiens; identical to SEQ ID NO: 390

SEQ ID NO: 457 - DNA, 201 bp, Homo sapiens; identical to SEQ ID NO: 391

SEQ ID NO: 458 - DNA, 201 bp, Homo sapiens; identical to SEQ ID NO: 392

SEQ ID NO: 459 - DNA, 201 bp, Homo sapiens; identical to SEQ ID NO: 393

SEQ ID NO: 460 - DNA, 201 bp, Homo sapiens; identical to SEQ ID NO: 394

SEQ ID NO: 461 - DNA, 201 bp, Homo sapiens; identical to SEQ ID NO: 395

SEQ ID NO: 462 - DNA, 201 bp, Homo sapiens; identical to SEQ ID NO: 396

SEQ ID NO: 463 - DNA, 201 bp, Homo sapiens; identical to SEQ ID NO: 397

SEQ ID NO: 464 - DNA, 201 bp, Homo sapiens; identical to SEQ ID NO: 398

SEQ ID NO: 465 - DNA, 201 bp, Homo sapiens; identical to SEQ ID NO: 399

SEQ ID NO: 466 - DNA, 201 bp, Homo sapiens; identical to SEQ ID NO: 400

SEQ ID NO: 467 - DNA, 201 bp, Homo sapiens; identical to SEQ ID NO: 401

SEQ ID NO: 468 - DNA, 201 bp, Homo sapiens; identical to SEQ ID NO: 402

SEQ ID NO: 469 - DNA, 201 bp, Homo sapiens; identical to SEQ ID NO: 403

SEQ ID NO: 470 - DNA, 201 bp, Homo sapiens
ccagtggtgacaagggcaacttcagtgtgcattcggcagtggtgccaaggaaggctgtgggtagcctggcttcttactgtgcagctggcagaggggctggygctggctttggcagtcggagcctctatagccttggagggaatcggcgtatttctttcaatgtggctggtggcggcgttcgggctggaggttacggcttca

SEQ ID NO: 471 - DNA, 201 bp, Homo sapiens
agatccagaaggtgcgcgcccaggagcgggaacagatcaaggtgctgaacgacaagttcgcctccttcattgacaaggtacgcttcctagagcagcagaascaggttctagaaaccaagtgggagctgctgcagcagctggacctgaacaactgcaagaagaacctggagcccatccttgagggctacatcagcaacctgc

SEQ ID NO: 472 - DNA, 201 bp, Homo sapiens
aaggtgctgaacgacaagttcgcctccttcattgacaaggtacgcttcctagagcagcagaaccaggttctagaaaccaagtgggagctgctgcagcagcwggacctgaacaactgcaagaagaacctggagcccatccttgagggctacatcagcaacctgcggaagcagctggagacactgtctggggacagggtgagg

SEQ ID NO: 473 - DNA, 201 bp, Homo sapiens
tgcggaagcagctggagacactgtctggggacagggtgaggctggactcggagctgagaagcatgagggatctggtggaggactataagaagagatatgargtggagattaaccggcgcacaacagcagagaatgagtttgtggtgcttaagaaggatgcagatgcagcctacgcagtcaaggtggagcttcaggccaaag

SEQ ID NO: 474 - DNA, 201 bp, Homo sapiens
tgtctggggacagggtgaggctggactcggagctgagaagcatgagggatctggtggaggactataagaagagatatgaggtggagattaaccggcgcacracagcagagaatgagtttgtggtgcttaagaaggatgcagatgcagcctacgcagtcaaggtggagcttcaggccaaagtggactcactggacaaagaca

SEQ ID NO: 475 - DNA, 201 bp, Homo sapiens
caacagcagagaatgagtttgtggtgcttaagaaggatgcagatgcagcctacgcagtcaaggtggagcttcaggccaaagtggactcactggacaaagamatcaagttcctcaagtgtctgtatgatgcagagatcgctcagatccagactcacgccagtgagacctctgtcatcctgtccatggacaacaaccgggacc

SEQ ID NO: 476 - DNA, 201 bp, Homo sapiens
ggattctctgccagcctgtgtcacccacccacctccttcattatcagcaatagctaccatcatttgtcaagcacctactagatgccagacaccctacacayattgcctcctgttctcatccattcctgcaaagaagatgcaatgagcatccttggaacagactgggagcctgatcccaagaggctgctgaactggccccag

SEQ ID NO: 477 - DNA, 201 bp, Homo sapiens
cagcctgtgtcacccacccacctccttcattatcagcaatagctaccatcatttgtcaagcacctactagatgccagacaccctacacatattgcctcctrttctcatccattcctgcaaagaagatgcaatgagcatccttggaacagactgggagcctgatcccaagaggctgctgaactggccccagtcacccaccta

SEQ ID NO: 478 - DNA, 201 bp, Homo sapiens
cagtctctctggggctgtgtcctacatagcttctgactctcaatttttggtgccatgagctgagctcagtgagtggagctggcttttctgtcgctgagtgstactgcctagtccagatgtcgtggctcagggtgtaaatattcctaagaatggcagcatctatttcctcttttgtttgaattaaagactctgaatttctgc

SEQ ID NO: 479 - DNA, 201 bp, Homo sapiens
agccatctactccatcgtgctcaagcttccgggtcacagcaccatcctcaactccaccaagttaccctcatcggacaacctgcaggtgcctgaggaggagmtggggatggtggacttggagaggaaagccgacaagctgcaggcccagaagagcgtggacgatggaggcagttttccaaaaagcttctccaagcttcccat

SEQ ID NO: 480 - DNA, 201 bp, Homo sapiens
atggtggacttggagaggaaagccgacaagctgcaggcccagaagagcgtggacgatggaggcagttttccaaaaagcttctccaagcttcccatccagcyagagtcagccgtggacacagctaagacttctgacgtcaactcctcagtgggtaagagcacggccactctacctctgtccttcaaggaagccactctggcc

SEQ ID NO: 481 - DNA, 201 bp, Homo sapiens
gggaaccgtcactcatttcggcagctacaatgtttctcgagcagctggcaatttctcctctccagacggtaccaccgatgaccctctgggaggtcataccrtctggcaagtggtcttcatcgctttcttaacgggcatcctggccttggtgaccatcatcggcaacatcctggtaattgtgtcatttaaggtcaacaagca

SEQ ID NO: 482 - DNA, 104 bp, Homo sapiens
aaatggttttatcacccagatgtgaaagaagctgcctgtttactgatccattgaataaacccattttaatagaaaaagtcaataccaattcagcaaaaagaaaa

SEQ ID NO: 483 - DNA, 201 bp, Homo sapiens
gctgcgagctgtcagcgaccaggagagtcaggacggcctctaccagaagtggcagatgatgctggcctatgcactgcacgtcctccccttcagcgttgttrccaccatgattttcagcagtgtgtgctactggacgctgggcttacatcctgaggttgcccgatttggatatttttctgctgctctcttggccccccactt

SEQ ID NO: 484 - DNA, 201 bp, Homo sapiens
ttctgcgggtccgaagcaatgtgctaaagggtgctatccaggaccgcgtaggtctcctttaccagtttgtgggcgccaccccgtacacaggcatgctgaasgctgtgaatctgtttcccgtgctgcgagctgtcagcgaccaggagagtcaggacggcctctaccagaagtggcagatgatgctggcctatgcactgcacg

SEQ ID NO: 485 - DNA, 201 bp, Homo sapiens
ttcaaaaccaaagattctcctggagttttctctaaactgggtgttctcctgaggagagtgacaagaaacttggtgagaaataagctggcagtgattacgcrtctccttcagaatctgatcatgggtttgttcctccttttcttcgttctgcgggtccgaagcaatgtgctaaagggtgctatccaggaccgcgtaggtctc

SEQ ID NO: 486 - DNA, 201 bp, Homo sapiens
gtgattacgcgtctccttcagaatctgatcatgggtttgttcctccttttcttcgttctgcgggtccgaagcaatgtgctaaagggtgctatccaggaccrcgtaggtctcctttaccagtttgtgggcgccaccccgtacacaggcatgctgaacgctgtgaatctgtttcccgtgctgcgagctgtcagcgaccaggag

SEQ ID NO: 487 - DNA, 201 bp, Homo sapiens
ggtgtatgtgaacggccgggcgctgcgccgggagcagttccaggactgcttctcctacgtcctgcagagcgacaccctgctgagcagcctcaccgtgcgcsagacgctgcactacaccgcgctgctggccatccgccgcggcaatcccggctccttccagaagaaggtggaggccgtcatggcagagctgagtctgagcca

SEQ ID NO: 488 - DNA, 201 bp, Homo sapiens
ggatcctaaggtcatgctgtttgatgagccaaccacaggcctggactgcatgactgctaatcagattgtcgtcctcctggtggaactggctcgcaggaacygaattgtggttctcaccattcaccagccccgttctgagctttttcagctctttgacaaaattgccatcctgagcttcggagagctgattttctgtggcac

SEQ ID NO: 489 - DNA, 201 bp, Homo sapiens
agtgacaagaaacttggtgagaaataagctggcagtgattacgcgtctccttcagaatctgatcatgggtttgttcctccttttcttcgttctgcgggtcygaagcaatgtgctaaagggtgctatccaggaccgcgtaggtctcctttaccagtttgtgggcgccaccccgtacacaggcatgctgaacgctgtgaatct

SEQ ID NO: 490 - DNA, 201 bp, Homo sapiens
agtaaacagaggctcccagagctccctggagggggctcctgccaccgccccggagcctcacagcctgggcatcctccatgcctcctacagcgtcagccacygcgtgaggccctggtgggacatcacatcttgccggcagcagtggaccaggcagatcctcaaagatgtctccttgtacgtggagagcgggcagatcatgtg

SEQ ID NO: 491 - DNA, 201 bp, Homo sapiens
ttgcagtgagattcttgtagtcaatgagttctacggactgaatttcacttgtggcagctcaaatgtttctgtgacaactaatccaatgtgtgccttcactsaaggaattcaattcattgagaaaacctgcccaggtgcaacatctagattcacaatgaactttctgattttgtattcatttattccagctcttgtcatcct

SEQ ID NO: 492 - DNA, 201 bp, Homo sapiens
agtgtgtgctactggacgctgggcttacatcctgaggttgcccgatttggatatttttctgctgctctcttggccccccacttaattggtgaatttctaastcttgtgctacttggtatcgtccaaaatccaaatatagtcaacagtgtagtggctctgctgtccattgcgggggtgcttgttggatctggattcctcaga

SEQ ID NO: 493 - DNA, 201 bp, Homo sapiens
gactcgtgtgactattttttttccttgttctaggcacagaaaaaaataggtcagcttaaaaatatgtttacattggataaaggattaggcaaaaataaaakgtttcaaggattcctgaccataagtgacagagaaagagagttgtgggtttagatgaagcaaggttatcatgcagaattgggtaagaatgcttctgttcct

SEQ ID NO: 494 - DNA, 201 bp, Homo sapiens
cagaaaaaaataggtcagcttaaaaatatgtttacattggataaaggattaggcaaaaataaaatgtttcaaggattcctgaccataagtgacagagaaaragagttgtgggtttagatgaagcaaggttatcatgcagaattgggtaagaatgcttctgttcctggaagacccagagttaaatgcagatgtccacacgag

SEQ ID NO: 495 - DNA, 201 bp, Homo sapiens
ggagttacctgatcacatcgagagagtgctgggcagatggatggtgagcaccactgctacagagcacccagtgattttactgaggattaaaataaaaaacygtaggaatgggctcaacagtgaacaaagcacaccagacaaacctctggttatgtttttaaagattcgtttgctatttttcactttcagctgagtttactt

SEQ ID NO: 496 - DNA, 131 bp, Homo sapiens
ttctgcgggtccgaagcaatgtgctaaagggtgctatccaggaccgcgtaggtctcctttaccagtttgtgggcgccaccccgtacacaggcatgctgaasgctgtgaatctgtgtaagtgcccacgtgct

SEQ ID NO: 497 - DNA, 201 bp, Homo sapiens; identical to SEQ ID NO: 485

SEQ ID NO: 498 - DNA, 186 bp, Homo sapiens
gtgattacgcgtctccttcagaatctgatcatgggtttgttcctccttttcttcgttctgcgggtccgaagcaatgtgctaaagggtgctatccaggaccrcgtaggtctcctttaccagtttgtgggcgccaccccgtacacaggcatgctgaacgctgtgaatctgtgtaagtgcccacgtgct

SEQ ID NO: 499 - DNA, 201 bp, Homo sapiens; identical to SEQ ID NO: 487

SEQ ID NO: 500 - DNA, 201 bp, Homo sapiens; identical to SEQ ID NO: 488

SEQ ID NO: 501 - DNA, 201 bp, Homo sapiens; identical to SEQ ID NO: 489

SEQ ID NO: 502 - DNA, 201 bp, Homo sapiens; identical to SEQ ID NO: 490

SEQ ID NO: 503 - DNA, 201 bp, Homo sapiens
tggctgtccaggtccctcagcgtaaactcttcagtatggtgtcgtggcaagacattctccagcagattaatgaaataaatacacttgttggatctgcttcrtctaaaaaggcaaaaaaacctgtaggtggtaatgctcctttatattatgaggtgttaacggcagcaaaagcaattatggatagtggagagaaattaacct

SEQ ID NO: 504 - DNA, 201 bp, Homo sapiens
agttagaaaaggataaagggaaagcaaaatctcccaaggagaaaaaggctccaagtgccaagcctgccaaaggaaagggaaaggatcagcctgaggcaaaygcaccagtgaaaaagaccacccagttaaagcggagaggagaagacgaccacaccaatcgttacattgacgatgagccagatgatggtgcccaacattaca

SEQ ID NO: 505 - DNA, 201 bp, Homo sapiens
gcaaaagcaattatggatagtggagagaaattaaccttaccactgatagggaaactcttgaaatttcaacttctccagattaaatttaaggaccaacagcracgggaaaatgaaaagaaggtaatagaagacaaacctaagttagaaaaggataaagggaaagcaaaatctcccaaggagaaaaaggctccaagtgccaag

SEQ ID NO: 506 - DNA, 201 bp, Homo sapiens
ttcatctaaaaaggcaaaaaaacctgtaggtggtaatgctcctttatattatgaggtgttaacggcagcaaaagcaattatggatagtggagagaaattamccttaccactgatagggaaactcttgaaatttcaacttctccagattaaatttaaggaccaacagcgacgggaaaatgaaaagaaggtaatagaagacaa

SEQ ID NO: 507 - DNA, 201 bp, Homo sapiens
atttgctgaatccaattcgagaggaattcatttctgtgcccctgatactgcattgtatgctggaacaggttgttgcaactgaagaagatctcgtcccaccyagtctgcgggagccatcccccagagcagacgggctagaccacagaatcgcagctcacattgtgtcccttctgccctcactctgtctctcagagagggaga

SEQ ID NO: 508 - DNA, 201 bp, Homo sapiens
ttacttttgagagcctgaagctctctgaggttgatgaaaaagggaaactgaaaccttctgggatgatgtgtgggtcagattctgaaatgttcaacataccrtgggacaaccctgccagatttgctaaacagataaggcagcaatatgtcatgaaaatgaatactcaagaggccaagcagaaagcagatattaaaatcaaag

SEQ ID NO: 509 - DNA, 201 bp, Homo sapiens
atagggaaactcttgaaatttcaacttctccagattaaatttaaggaccaacagcgacgggaaaatgaaaagaaggtaatagaagacaaacctaagttagwaaaggataaagggaaagcaaaatctcccaaggagaaaaaggctccaagtgccaagcctgccaaaggaaagggaaaggatcagcctgaggcaaatgcacca

SEQ ID NO: 510 - DNA, 201 bp, Homo sapiens
ctccgcgacccccactcctcctcggctgttccccaaccctgtcactgtgctcccctccctactcccggcccgtagtggaggtgactttcctgcgcagcgcsgcttctgagggcggagaacccacagggagtgcgacccctttgcacgctgtgagtgggcaactgtccgagggactcgagccgatcgaaggctggacgccct

SEQ ID NO: 511 - DNA, 201 bp, Homo sapiens
gcccccggccctccccggccccaccccactcccaccgccctctccgcggccgtccccacccctatctccgcgacccccactcctcctcggctgttccccarccctgtcactgtgctcccctccctactcccggcccgtagtggaggtgactttcctgcgcagcgccgcttctgagggcggagaacccacagggagtgcgac

SEQ ID NO: 512 - DNA, 201 bp, Homo sapiens
gtggcaggaggaaatcgccaaacatgttttcccgctttgcctccccaactcggaaacttgcaacttgccgtgtcctggaggttgagacaatttggggtctyttggctgccgtccaacagatttatctctgagggcagtgtccttggtgagaggtccaagtaggtgtgggcgacattttcctccatctcatgagggagcagc

SEQ ID NO: 513 - DNA, 201 bp, Homo sapiens
ccccaactcggaaacttgcaacttgccgtgtcctggaggttgagacaatttggggtctcttggctgccgtccaacagatttatctctgagggcagtgtccytggtgagaggtccaagtaggtgtgggcgacattttcctccatctcatgagggagcagccctgcacactagggcccaaaactctgcgaaggagcttggaag

SEQ ID NO: 514 - DNA, 201 bp, Homo sapiens
ggaggttgagacaatttggggtctcttggctgccgtccaacagatttatctctgagggcagtgtccttggtgagaggtccaagtaggtgtgggcgacattktcctccatctcatgagggagcagccctgcacactagggcccaaaactctgcgaaggagcttggaagttcttcatccgttccacttgttttgctactccac

SEQ ID NO: 515 - DNA, 201 bp, Homo sapiens
cctccagtgagcaggacagtgagagtggacgggagtcaggcctagaaaacaaaagaacagccaagaggaactcaaaagccaaaggaaaaagtgattctgawgatggggagaaggaaaatgaaaaatctaaaacttcagattcttcaaatgacgaatctagttcaatagaagacagttcttccgattctgaatcagagtcag

SEQ ID NO: 516 - DNA, 201 bp, Homo sapiens
ggaccccagcaggaaaagcaaagcaagagaattctgctaagaagttttattctgaatctgaggaagaggaggactcttctgatagtagcagtgacagtgakagtgaatctggaagtgaaagtggagaacaaggcgaaagtggggaggaaggagacagcaatgaggacagcagtgaggactcctccagtgagcaggacagtg

SEQ ID NO: 517 - DNA, 201 bp, Homo sapiens
acatggtgaaattattaaacatatggccaaactcctggacagtatcactgttcctgttgctagagcaagtattctttggctaattggagaaaactgtgaaygagttcctaaaattgcccctgatgttttgaggaagatggctaaaagcttcactagtgaagatgatctggtaaaactgcagatattaaatctgggagcaaa

SEQ ID NO: 518 - DNA, 201 bp, Homo sapiens
aactccaaacagacaaaattgcttacccagtacatattaaatctcggcaagtatgatcaaaactacgacatcagagaccgtacaagatttattaggcagcktattgttccgaatgaaaagagtggagctttaagtaaatatgccaaaaaaatattcctagcacaaaagcctgcaccactgcttgagtctccttttaaagat

SEQ ID NO: 519 - DNA, 201 bp, Homo sapiens
ctgctaagaagttttattctgaatctgaggaagaggaggactcttctgatagtagcagtgacagtgagagtgaatctggaagtgaaagtggagaacaaggygaaagtggggaggaaggagacagcaatgaggacagcagtgaggactcctccagtgagcaggacagtgagagtggacgggagtcaggcctagaaaacaaaa

SEQ ID NO: 520 - DNA, 201 bp, Homo sapiens
tttcctgctgttgtgaagaatgtggccagtaaaaatattgagatcaagaagttggtatatgtttacctggttcgatatgctgaagaacagcaggatcttgyactcctgtccataagcacttttcagcgagctctgaaggacccaaaccaactaattcgtgcaagcgctttgagagttctgtcaagtattagagtgccaatt

SEQ ID NO: 521 - DNA, 201 bp, Homo sapiens
ttcctgctgttgtgaagaatgtggccagtaaaaatattgagatcaagaagttggtatatgtttacctggttcgatatgctgaagaacagcaggatcttgcmctcctgtccataagcacttttcagcgagctctgaaggacccaaaccaactaattcgtgcaagcgctttgagagttctgtcaagtattagagtgccaatta

SEQ ID NO: 522 - DNA, 201 bp, Homo sapiens
tgaaagataaaagcacattggtagctggcagtgttgtgatggcttttgaagaagtatgcccggacagaatagatctgattcataaaaattaccgcaagctrtgtaacttactagtggatgttgaagagtgggggcaggttgtcataatccacatgctaactcgatatgctcggacacagtttgtcagcccttggaaagagg

SEQ ID NO: 523 - DNA, 201 bp, Homo sapiens
gtgaggactcctccagtgagcaggacagtgagagtggacgggagtcaggcctagaaaacaaaagaacagccaagaggaactcaaaagccaaaggaaaaagygattctgaagatggggagaaggaaaatgaaaaatctaaaacttcagattcttcaaatgacgaatctagttcaatagaagacagttcttccgattctgaat

SEQ ID NO: 524 - DNA, 201 bp, Homo sapiens
gcatgaaaatgcatgtttttaatccaatagactctcttgagcctgagggatccattacagtttcaatgggtattgacttttgtgattctactcagactgcyagtttccagttgtgtaccaaggatgattgcttcaatgttaatattcagccacctgttggagaactgcttttacctgtggccatgtcagagaaagatttta

SEQ ID NO: 525 - DNA, 201 bp, Homo sapiens
cttctggccaggataatatacacaggtttgcagctaaaactgtgcacagtgggtcattgatgctagtcacagtggaactgaaggaaggctctacagcccarcttatcataaacactgagaaaactgtgattggctctgttctgctgcgggaactgaagcctgtcctgtctcaggggtaacctgcttacatctggactttag

SEQ ID NO: 526 - DNA, 201 bp, Homo sapiens
aggaactcaaaagccaaaggaaaaagtgattctgaagatggggagaaggaaaatgaaaaatctaaaacttcagattcttcaaatgacgaatctagttcaawagaagacagttcttccgattctgaatcagagtcagaacctgaaagtgaatctgaatccagaagagtcactaaggagaaagaaaagaaaacaaagcaagat

SEQ ID NO: 527 - DNA, 201 bp, Homo sapiens
ctgcggtggttatggcagttgctcagctgtattggcacatatcaccaaaatctgaagctggcataatttctaaatcactagtgcgtttacttcgtagcaayagggaggtgcagtatattgtcctacaaaatatagcaactatgtcaattcaaagagcttgaaattttgacaaacttggcaaatgaagccaacatatcaact

SEQ ID NO: 528 - DNA, 201 bp, Homo sapiens
aaattgcttacccagtacatattaaatctcggcaagtatgatcaaaactacgacatcagagaccgtacaagatttattaggcagcttattgttccgaatgwaaagagtggagctttaagtaaatatgccaaaaaaatattcctagcacaaaagcctgcaccactgcttgagtctccttttaaagatagagatcatttccag

SEQ ID NO: 529 - DNA, 201 bp, Homo sapiens
aagatgatctggtaaaactgcagatattaaatctgggagcaaaattgtatttaaccaactccaaacagacaaaattgcttacccagtacatattaaatctyggcaagtatgatcaaaactacgacatcagagaccgtacaagatttattaggcagcttattgttccgaatgaaaagagtggagctttaagtaaatatgcca

SEQ ID NO: 530 - DNA, 201 bp, Homo sapiens
ctagagcaagtattctttggctaattggagaaaactgtgaacgagttcctaaaattgcccctgatgttttgaggaagatggctaaaagcttcactagtgargatgatctggtaaaactgcagatattaaatctgggagcaaaattgtatttaaccaactccaaacagacaaaattgcttacccagtacatattaaatctcg

SEQ ID NO: 531 - DNA, 201 bp, Homo sapiens
ggccagaggtggcgcccgacccatcagttcgaaatgtagaagtaatagagttggcaaaagaatggaccccagcaggaaaagcaaagcaagagaattctgcyaagaagttttattctgaatctgaggaagaggaggactcttctgatagtagcagtgacagtgagagtgaatctggaagtgaaagtggagaacaaggcgaaa

SEQ ID NO: 532 - DNA, 201 bp, Homo sapiens
tgagtggaaaaggactagctgcccattatttctttccaagacagccttgcatttttggtgataagatggtctctatacaaataacactgaataacactacygatcgaaagatagaaaatatccacataggggaaaaaaaacttcctataggcatgaaaatgcatgtttttaatccaatagactctcttgagcctgagggat

SEQ ID NO: 533 - DNA, 201 bp, Homo sapiens
ttcgagaatttcagacctatgtgaaaagccaggataaacaatttgcagcagccactattcagactataggcagatgtgcaaccaacatcttggaagtcackgacacgtgcctcaatggcttggtctgtctgctgtccaacagggatgaaatagttgttgctgaaagtgtggttgttataaagaaattactgcaaatgcaac

SEQ ID NO: 534 - DNA, 201 bp, Homo sapiens
aaccatttccccctcgggggccttcggcctctttagcagcgatttgaagaagaatgaagatctaaagcaaatgttagagagcaacaaagattctgctaaaytggatgctatgaagcggattgttgggatgattgcaaaagggaaaaatgcatctgaactgtttcctgctgttgtgaagaatgtggccagtaaaaatattga

SEQ ID NO: 535 - DNA, 201 bp, Homo sapiens
taccaaggatgattgcttcaatgttaatattcagccacctgttggagaactgcttttacctgtggccatgtcagagaaagattttaagaaagagcaaggartgctaacaggaatgaatgaaacttctgctgtaatcattgctgcaccacagaatttcactccctctgtgatctttcagaaggttgtaaatgtagccaatgt

SEQ ID NO: 536 - DNA, 201 bp, Homo sapiens
tggaccccagcaggaaaagcaaagcaagagaattctgctaagaagttttattctgaatctgaggaagaggaggactcttctgatagtagcagtgacagtgsgagtgaatctggaagtgaaagtggagaacaaggcgaaagtggggaggaaggagacagcaatgaggacagcagtgaggactcctccagtgagcaggacagt

SEQ ID NO: 537 - DNA, 201 bp, Homo sapiens
aaaactgtgattggctctgttctgctgcgggaactgaagcctgtcctgtctcaggggtaacctgcttacatctggactttagaatctggcacacaacaaargtgcctggcatccactactgctgcctttcatttataataatagcccttccatctggcagtgggggtagaatacactcttgacattcttgtctcctgcttt

SEQ ID NO: 538 - DNA, 201 bp, Homo sapiens
catctggcagtgggggtagaatacactcttgacattcttgtctcctgctttagaatgctagtgtgtatctatcatgtatgcaatactttccccctttttgytttgctaaccaaagagcatatattttactgtcagttgtctcaactcttgaatccatgtggcgttttctctgtcctgctgcttcttttggcctcctcgttt

SEQ ID NO: 539 - DNA, 201 bp, Homo sapiens
ggtagacatgaatgagatatttaaagttcattggaaatcttcttccctacagcagtaagcaaaaattagcaaagagatagtctaaatggcctctcagcttkgtatgtgaaaatgagatcacatactttttaaatccaaatacaaaagcatagtctctgcaagattttgttctttgaatttcttgatattgtaattgattat

SEQ ID NO: 540 - DNA, 201 bp, Homo sapiens; identical to SEQ ID NO: 515

SEQ ID NO: 541 - DNA, 201 bp, Homo sapiens; identical to SEQ ID NO: 516

SEQ ID NO: 542 - DNA, 201 bp, Homo sapiens; identical to SEQ ID NO: 517

SEQ ID NO: 543 - DNA, 201 bp, Homo sapiens; identical to SEQ ID NO: 518

SEQ ID NO: 544 - DNA, 201 bp, Homo sapiens; identical to SEQ ID NO: 520

SEQ ID NO: 545 - DNA, 201 bp, Homo sapiens; identical to SEQ ID NO: 521

SEQ ID NO: 546 - DNA, 201 bp, Homo sapiens; identical to SEQ ID NO: 522

SEQ ID NO: 547 - DNA, 201 bp, Homo sapiens; identical to SEQ ID NO: 524

SEQ ID NO: 548 - DNA, 201 bp, Homo sapiens; identical to SEQ ID NO: 525

SEQ ID NO: 549 - DNA, 201 bp, Homo sapiens; identical to SEQ ID NO: 519

SEQ ID NO: 550 - DNA, 201 bp, Homo sapiens; identical to SEQ ID NO: 526

SEQ ID NO: 551 - DNA, 201 bp, Homo sapiens; identical to SEQ ID NO: 523

SEQ ID NO: 552 - DNA, 201 bp, Homo sapiens
ctgcggtggttatggcagttgctcagctgtattggcacatatcaccaaaatctgaagctggcataatttctaaatcactagtgcgtttacttcgtagcaayagggaggtgcagtatattgtcctacaaaatatagcaactatgtcaattcaacttgaaattttgacaaacttggcaaatgaagccaacatatcaactcttc

SEQ ID NO: 553 - DNA, 201 bp, Homo sapiens; identical to SEQ ID NO: 528

SEQ ID NO: 554 - DNA, 201 bp, Homo sapiens; identical to SEQ ID NO: 529

SEQ ID NO: 555 - DNA, 201 bp, Homo sapiens; identical to SEQ ID NO: 530

SEQ ID NO: 556 - DNA, 201 bp, Homo sapiens; identical to SEQ ID NO: 531

SEQ ID NO: 557 - DNA, 201 bp, Homo sapiens; identical to SEQ ID NO: 532

SEQ ID NO: 558 - DNA, 201 bp, Homo sapiens; identical to SEQ ID NO: 533

SEQ ID NO: 559 - DNA, 201 bp, Homo sapiens; identical to SEQ ID NO: 534

SEQ ID NO: 560 - DNA, 201 bp, Homo sapiens; identical to SEQ ID NO: 535

SEQ ID NO: 561 - DNA, 201 bp, Homo sapiens; identical to SEQ ID NO: 536

SEQ ID NO: 562 - DNA, 201 bp, Homo sapiens; identical to SEQ ID NO: 537

SEQ ID NO: 563 - DNA, 201 bp, Homo sapiens; identical to SEQ ID NO: 538

SEQ ID NO: 564 - DNA, 201 bp, Homo sapiens; identical to SEQ ID NO: 539

SEQ ID NO: 565 - DNA, 127 bp, Homo sapiens
ggtcgccctgaggtctgagcagggcagggcggtaacgtgtcccgcgggtgggaatgaagatctaaagcaaatgttagagagcaacaaagattctgctaaaytggatgctatgaagcggattgttggg

SEQ ID NO: 566 - DNA, 201 bp, Homo sapiens
gtctggtgctatggaaaactggggactgacaacatatagagaatctgctctgttgtttgatgcagaaaagtcttctgcatcaagtaagcttggcatcacartgactgtggcccatgaactggcccaccagtggtttgggaacctggtcactatggaatggtggaatgatctttggctaaatgaaggatttgccaaatttat

SEQ ID NO: 567 - DNA, 201 bp, Homo sapiens
gcacctatctggtggccttcatcatttcagattttgagtctgtcagcaagataaccaagagtggagtcaaggtttctgtttatgctgtgccagacaagatraatcaagcagattatgcactggatgctgcggtgactcttctagaattttatgaggattatttcagcataccgtatcccctacccaaacaagatcttgctg

SEQ ID NO: 568 - DNA, 201 bp, Homo sapiens
gatggcttttgctctagaagtcaacattcatcttcatcctcacattggcatcaggaaggggtggatgtgaaaaccatgatgaacacttggacactgcagargggttttcccctaataaccatcacagtgagggggaggaatgtacacatgaagcaagagcactacatgaagggctctgacggcgccccggacactgggtac

SEQ ID NO: 569 - DNA, 201 bp, Homo sapiens
aactcaattcaaggccttcctcatcaggctgctaagggacctcattgataagcagacatggacagacgagggctcagtctcagagcgaatgctgcggagtsaactactactcctcgcctgtgtgcacaactatcagccgtgcgtacagagggcagaaggctatttcagaaagtggaaggaatccaatggaaacttgagcct

SEQ ID NO: 570 - DNA, 201 bp, Homo sapiens
atgaatgaagtggaaactcaattcaaggccttcctcatcaggctgctaagggacctcattgataagcagacatggacagacgagggctcagtctcagagcraatgctgcggagtgaactactactcctcgcctgtgtgcacaactatcagccgtgcgtacagagggcagaaggctatttcagaaagtggaaggaatccaat

SEQ ID NO: 571 - DNA, 201 bp, Homo sapiens
tgtacacatgaagcaagagcactacatgaagggctctgacggcgccccggacactgggtacctgtggcatgttccattgacattcatcaccagcaaatccracatggtccatcgatttttgctaaaaacaaaaacagatgtgctcatcctcccagaagaggtggaatggatcaaatttaatgtgggcatgaatggctatta

SEQ ID NO: 572 - DNA, 201 bp, Homo sapiens
ttgtgtctgtcagtgtgacccatcctgaactgaaagttggagattatttctttggcaaatgttttgacgcaatggaggtagatgctttaaattcctcacaycctgtgtctacacctgtggaaaatcctgctcagatccgggagatgtttgatgatgtttcttatgataagggagcttgtattctgaatatgctaagggagt

SEQ ID NO: 573 - DNA, 201 bp, Homo sapiens
tctcttaactgtgtccactccttcatggtgtcagagcactgaagcatctccaaaacgtagtgatgggacaccatttccttggaataaaatacgacttcctragtacgtcatcccagttcattatgatctcttgatccatgcaaaccttaccacgctgaccttctggggaaccacgaaagtagaaatcacagccagtcagcc

SEQ ID NO: 574 - DNA, 201 bp, Homo sapiens
catcctcacattggcatcaggaaggggtggatgtgaaaaccatgatgaacacttggacactgcagaggggttttcccctaataaccatcacagtgaggggsaggaatgtacacatgaagcaagagcactacatgaagggctctgacggcgccccggacactgggtacctgtggcatgttccattgacattcatcaccagca

SEQ ID NO: 575 - DNA, 201 bp, Homo sapiens
gtacacatgaagcaagagcactacatgaagggctctgacggcgccccggacactgggtacctgtggcatgttccattgacattcatcaccagcaaatccgrcatggtccatcgatttttgctaaaaacaaaaacagatgtgctcatcctcccagaagaggtggaatggatcaaatttaatgtgggcatgaatggctattac

SEQ ID NO: 576 - DNA, 201 bp, Homo sapiens
aactactactcctcgcctgtgtgcacaactatcagccgtgcgtacagagggcagaaggctatttcagaaagtggaaggaatccaatggaaacttgagcctrcctgtcgacgtgaccttggcagtgtttgctgtgggggcccagagcacagaaggctgggattttctttatagtaaatatcagttttctttgtccagtactg

SEQ ID NO: 577 - DNA, 201 bp, Homo sapiens
cacttggacactgcagaggggttttcccctaataaccatcacagtgagggggaggaatgtacacatgaagcaagagcactacatgaagggctctgacggcrccccggacactgggtacctgtggcatgttccattgacattcatcaccagcaaatccgacatggtccatcgatttttgctaaaaacaaaaacagatgtgct

SEQ ID NO: 578 - DNA, 201 bp, Homo sapiens
cttccatagcccacatggtaatgggtacaacaaatcaattctccacaagaacacggcttgaagaggtaaaaggattcttcagctctttgaaagaaaatggwtctcagctccgttgtgtccaacagacaattgaaaccattgaagaaaacatcggttggatggataagaattttgataaaatcagagtgtggctgcaaagtg

SEQ ID NO: 579 - DNA, 201 bp, Homo sapiens
ctacacctgtggaaaatcctgctcagatccgggagatgtttgatgatgtttcttatgataagggagcttgtattctgaatatgctaagggagtatcttagygctgacgcatttaaaagtggtattgtacagtatctccagaagcatagctataaaaatacaaaaaacgaggacctgtgggatagtatggcaagtatttgcc

SEQ ID NO: 580 - DNA, 201 bp, Homo sapiens
gactgacaacatatagagaatctgctctgttgtttgatgcagaaaagtcttctgcatcaagtaagcttggcatcacaatgactgtggcccatgaactggcycaccagtggtttgggaacctggtcactatggaatggtggaatgatctttggctaaatgaaggatttgccaaatttatggagtttgtgtctgtcagtgtga

SEQ ID NO: 581 - DNA, 201 bp, Homo sapiens
gactttcagtctggtgctatggaaaactggggactgacaacatatagagaatctgctctgttgtttgatgcagaaaagtcttctgcatcaagtaagcttgrcatcacaatgactgtggcccatgaactggcccaccagtggtttgggaacctggtcactatggaatggtggaatgatctttggctaaatgaaggatttgcc

SEQ ID NO: 582 - DNA, 201 bp, Homo sapiens
atcctgcatagtcaccacctgcagatatctagggccaccctcaggaagggagctggagagaggctatcggaagaacccctgcaggtcctggaacacccccstcaggagcaaattgcactgctggctcccgagcccctccttgtcgggctcccgtacacagttgtcattcactatgctggcaatctttcggagactttccac

SEQ ID NO: 583 - DNA, 201 bp, Homo sapiens
tgaatggctattacattgtgcattacgaggatgatggatgggactctttgactggccttttaaaaggaacacacacagcagtcagcagtaatgatcgggcragtctcattaacaatgcatttcagctcgtcagcattgggaagctgtccattgaaaaggccttggatttatccctgtacttgaaacatgaaactgaaatta

SEQ ID NO: 584 - DNA, 201 bp, Homo sapiens
tcaatggctactagatgaaagctttaagggagataaaataaaaactcaggagtttccacaaattcttacactcattggcaggaacccagtaggatacccaytggcctggcaatttctgaggaaaaactggaacaaacttgtacaaaagtttgaacttggctcatcttccatagcccacatggtaatgggtacaacaaatca

SEQ ID NO: 585 - DNA, 201 bp, Homo sapiens
attgaagaaaacatcggttggatggataagaattttgataaaatcagagtgtggctgcaaagtgaaaagcttgaacgtatgtaaaaattcctcccttgccmggttcctgttatctctaatcaccaacattttgttgagtgtattttcaaactagagatggctgttttggctccaactggagatacttttttcccttcaact

SEQ ID NO: 586 - DNA, 201 bp, Homo sapiens
atgtaaaaattcctcccttgccaggttcctgttatctctaatcaccaacattttgttgagtgtattttcaaactagagatggctgttttggctccaactgragatacttttttcccttcaactcattttttgactatccctgtgaaaagaatagctgttagtttttcatgaatgggctatcgctaccatgtgttttgttca

SEQ ID NO: 587 - DNA, 201 bp, Homo sapiens
tttgttgagtgtattttcaaactagagatggctgttttggctccaactggagatacttttttcccttcaactcattttttgactatccctgtgaaaagaayagctgttagtttttcatgaatgggctatcgctaccatgtgttttgttcatcacaggtgttgccctgcaacgtaaacccaagtgttgggttccctgccaca

SEQ ID NO: 588 - DNA, 201 bp, Homo sapiens
ttttatagtttatgcttaagcacccgtgtccaaaaccctgtaccccatgtttatcattcataaactgtttcatcagtctcctcgaaagactctgaatagtygactactgaacaatgaacacctggatctgagactaagccggacgatgactgggttaaagctctcccggctcacccctccagacccgctgcccatccctct

SEQ ID NO: 589 - DNA, 201 bp, Homo sapiens
ctcgggctggcctcccctgagggtcttagctccgagaggggaccctcttttccacacagccttctccacctctggattttggtaactgctccctcctcatyccttcaggattagtggcctcagtgggagtctggcttttactagtcctggcggacttgtggtttctacataatgtgctcgcacttttgcaaaaaatctttt

SEQ ID NO: 590 - DNA, 201 bp, Homo sapiens
tctggcttttactagtcctggcggacttgtggtttctacataatgtgctcgcacttttgcaaaaaatctttttatagaaccctcctcagataattctgagwgtcatctatttccctgactggtacagtatctcttctgaaaaagcagagtgcattcaagtctgtaggaaaacccttttcttagggaggtgattttttttct

SEQ ID NO: 591 - DNA, 201 bp, Homo sapiens
ctggcttttactagtcctggcggacttgtggtttctacataatgtgctcgcacttttgcaaaaaatctttttatagaaccctcctcagataattctgagtstcatctatttccctgactggtacagtatctcttctgaaaaagcagagtgcattcaagtctgtaggaaaacccttttcttagggaggtgattttttttctc

SEQ ID NO: 592 - DNA, 201 bp, Homo sapiens
actagtcctggcggacttgtggtttctacataatgtgctcgcacttttgcaaaaaatctttttatagaaccctcctcagataattctgagtgtcatctatytccctgactggtacagtatctcttctgaaaaagcagagtgcattcaagtctgtaggaaaacccttttcttagggaggtgattttttttctctctctgctt

SEQ ID NO: 593 - DNA, 201 bp, Homo sapiens
agtcagttaataccctaagaattagattttatttcttattctgaaaacttgctacacagggacttatctaacccatagtgtgctctgttgctgacttgatdcaagttgcagcgtgttttgcgctgactctaaggtgcggaaatcctcacacctggcaaaggagaattcaaactgaactttttgaatataaggcaaaaactt

SEQ ID NO: 594 - DNA, 201 bp, Homo sapiens
gctgacttgattcaagttgcagcgtgttttgcgctgactctaaggtgcggaaatcctcacacctggcaaaggagaattcaaactgaactttttgaatatarggcaaaaacttcaagataagggaatatgattgatgattggtacgaaaaatgtcaaaatgtgttcccctaatacacgacaaaatagagtgacttctggaca

SEQ ID NO: 595 - DNA, 201 bp, Homo sapiens
gactctaaggtgcggaaatcctcacacctggcaaaggagaattcaaactgaactttttgaatataaggcaaaaacttcaagataagggaatatgattgatgattggtacgaaaaatgtcaaaatgtgttcccctaatacacgacaaaatagagtgacttctggacataaatctgccatttattaaaccattcactacaaca

SEQ ID NO: 596 - DNA, 201 bp, Homo sapiens
actctaaggtgcggaaatcctcacacctggcaaaggagaattcaaactgaactttttgaatataaggcaaaaacttcaagataagggaatatgattgatgattggtacgaaaaatgtcaaaatgtgttcccctaatacacgacaaaatagagtgacttctggacataaatctgccatttattaaaccattcactacaacaa

SEQ ID NO: 597 - DNA, 201 bp, Homo sapiens
tctaaggtgcggaaatcctcacacctggcaaaggagaattcaaactgaactttttgaatataaggcaaaaacttcaagataagggaatatgattgatgattggtacgaaaaatgtcaaaatgtgttcccctaatacacgacaaaatagagtgacttctggacataaatctgccatttattaaaccattcactacaacaaat

SEQ ID NO: 598 - DNA, 201 bp, Homo sapiens
taaggtgcggaaatcctcacacctggcaaaggagaattcaaactgaactttttgaatataaggcaaaaacttcaagataagggaatatgattgatgattgrtacgaaaaatgtcaaaatgtgttcccctaatacacgacaaaatagagtgacttctggacataaatctgccatttattaaaccattcactacaacaaataa

SEQ ID NO: 599 - DNA, 201 bp, Homo sapiens
tcctcacacctggcaaaggagaattcaaactgaactttttgaatataaggcaaaaacttcaagataagggaatatgattgatgattggtacgaaaaatgtmaaaatgtgttcccctaatacacgacaaaatagagtgacttctggacataaatctgccatttattaaaccattcactacaacaaataaataggtataaaag

SEQ ID NO: 600 - DNA, 201 bp, Homo sapiens
caaaggagaattcaaactgaactttttgaatataaggcaaaaacttcaagataagggaatatgattgatgattggtacgaaaaatgtcaaaatgtgttccyctaatacacgacaaaatagagtgacttctggacataaatctgccatttattaaaccattcactacaacaaataaataggtataaaagtggaattggaatt

SEQ ID NO: 601 - DNA, 201 bp, Homo sapiens
aactgaactttttgaatataaggcaaaaacttcaagataagggaatatgattgatgattggtacgaaaaatgtcaaaatgtgttcccctaatacacgacamaatagagtgacttctggacataaatctgccatttattaaaccattcactacaacaaataaataggtataaaagtggaattggaatttttatacttatttg

SEQ ID NO: 602 - DNA, 201 bp, Homo sapiens
aagggaatatgattgatgattggtacgaaaaatgtcaaaatgtgttcccctaatacacgacaaaatagagtgacttctggacataaatctgccatttattraaccattcactacaacaaataaataggtataaaagtggaattggaatttttatacttatttgttgtagtgaatggtttaataaaaatagaaatcactggt

SEQ ID NO: 603 - DNA, 201 bp, Homo sapiens
ttggtcacctgaggaacctatctttgtttgcttttggaaaagcccattttctaaacagatacaatattgccacaacaatgtgcagaaacctttttgataawaaaaaattgttctttgcctctaagtggatatttgcaattattttctctctcctaactagactgtaaaaagggctgctttagatcctgtagcttactccag

SEQ ID NO: 604 - DNA, 201 bp, Homo sapiens
cccattttctaaacagatacaatattgccacaacaatgtgcagaaacctttttgataataaaaaattgttctttgcctctaagtggatatttgcaattatyttctctctcctaactagactgtaaaaagggctgctttagatcctgtagcttactccagttattagttattaacaaacacccaagtctcgaagatatttct

SEQ ID NO: 605 - DNA, 201 bp, Homo sapiens
cagaaacctttttgataataaaaaattgttctttgcctctaagtggatatttgcaattattttctctctcctaactagactgtaaaaagggctgctttagmtcctgtagcttactccagttattagttattaacaaacacccaagtctcgaagatatttctaattaaaaaagaaggcatattcagagttctttttaaataa

SEQ ID NO: 606 - DNA, 201 bp, Homo sapiens
taaataaatgttgtttacttttataggcatctttaaacttctggattttggtatgccatttaaaaatacttccagatacacatggaaattagtaatactgmagccgtatccttgcaaacacatctgtcagtgtcaaaggtttcaaggtttttcttaaaaaaagaaaacaaaaaagcaaacacctatactgcccaaatggga

SEQ ID NO: 607 - DNA, 201 bp, Homo sapiens
taaaatcccataggtatgtgcatgactttcagagagtatttgggggggaggttaacaagatgtggtgccatttataagcagtgttattgtttttgcttgcyccgctgccacaagtcagctaagtcataacaaaagcttcaaactgatgctaaggaaggccatgccctttggaaacaataaattcccaatctgttttatgtt

SEQ ID NO: 608 - DNA, 152 bp, Homo sapiens
cattaagatattagaaaaccattcaaagtggtaggacatcagagcctacttcttacattgctgtgggagaaatgcaggtttcaaatttaatatatatatawaatttttttaaaagcagaagtttctttttatatttggtaaacttaagttcc

SEQ ID NO: 609 - DNA, 201 bp, Homo sapiens; identical to SEQ ID NO: 566

SEQ ID NO: 610 - DNA, 201 bp, Homo sapiens; identical to SEQ ID NO: 567

SEQ ID NO: 611 - DNA, 201 bp, Homo sapiens; identical to SEQ ID NO: 568

SEQ ID NO: 612 - DNA, 201 bp, Homo sapiens; identical to SEQ ID NO: 569

SEQ ID NO: 613 - DNA, 201 bp, Homo sapiens; identical to SEQ ID NO: 570

SEQ ID NO: 614 - DNA, 201 bp, Homo sapiens; identical to SEQ ID NO: 571

SEQ ID NO: 615 - DNA, 201 bp, Homo sapiens; identical to SEQ ID NO: 572

SEQ ID NO: 616 - DNA, 201 bp, Homo sapiens; identical to SEQ ID NO: 573

SEQ ID NO: 617 - DNA, 201 bp, Homo sapiens; identical to SEQ ID NO: 574

SEQ ID NO: 618 - DNA, 201 bp, Homo sapiens; identical to SEQ ID NO: 575

SEQ ID NO: 619 - DNA, 201 bp, Homo sapiens; identical to SEQ ID NO: 576

SEQ ID NO: 620 - DNA, 201 bp, Homo sapiens; identical to SEQ ID NO: 577

SEQ ID NO: 621 - DNA, 201 bp, Homo sapiens; identical to SEQ ID NO: 578

SEQ ID NO: 622 - DNA, 201 bp, Homo sapiens; identical to SEQ ID NO: 579

SEQ ID NO: 623 - DNA, 201 bp, Homo sapiens; identical to SEQ ID NO: 580

SEQ ID NO: 624 - DNA, 201 bp, Homo sapiens; identical to SEQ ID NO: 581

SEQ ID NO: 625 - DNA, 201 bp, Homo sapiens; identical to SEQ ID NO: 582

SEQ ID NO: 626 - DNA, 201 bp, Homo sapiens; identical to SEQ ID NO: 583

SEQ ID NO: 627 - DNA, 201 bp, Homo sapiens; identical to SEQ ID NO: 584

SEQ ID NO: 628 - DNA, 201 bp, Homo sapiens
ctacatcaaacggaatggaagcatagctgacttcgctaaagttacttcatctccatctagcaaatgaggcactgttctcaaccaaaggagatggggatctrgtttagggcaatccctttataatttgatgtgctgtggtctccttggtaatgtataatttggtattgcacaggtgattagtcaaggaagtctggaaaagct

SEQ ID NO: 629 - DNA, 201 bp, Homo sapiens
aatattaaggtccttgactatgtgtacaatgttttcacatatatagtttcatttaatcatttcaaagttaatctctgccatctcgctaaatcatcagtctyggctcttctgaaatagaaggtgcctgatcttcctaataattctgcctattttcatttgctttaaacaggcgccctattttctttctagttgtggctgcgc

SEQ ID NO: 630 - DNA, 201 bp, Homo sapiens
atctctgccatctcgctaaatcatcagtcttggctcttctgaaatagaaggtgcctgatcttcctaataattctgcctattttcatttgctttaaacaggygccctattttctttctagttgtggctgcgcaaaaacatttatctcccaaataagatgtgctgcttaccgaggtatcacggggtggggctccagcttgggt

SEQ ID NO: 631 - DNA, 201 bp, Homo sapiens
tctctgccatctcgctaaatcatcagtcttggctcttctgaaatagaaggtgcctgatcttcctaataattctgcctattttcatttgctttaaacaggcrccctattttctttctagttgtggctgcgcaaaaacatttatctcccaaataagatgtgctgcttaccgaggtatcacggggtggggctccagcttgggtc

SEQ ID NO: 632 - DNA, 201 bp, Homo sapiens
atctcccaaataagatgtgctgcttaccgaggtatcacggggtggggctccagcttgggtcgttgaagctggggtttgggaaaccacttcagagatggcarcagcaagtttagcatcttcaaatttcttttattgaaaaaaattttattagtaacatgttgtatataaaattatgagcacaatgccatcacttaactataa

SEQ ID NO: 633 - DNA, 201 bp, Homo sapiens
taccgaggtatcacggggtggggctccagcttgggtcgttgaagctggggtttgggaaaccacttcagagatggcagcagcaagtttagcatcttcaaatytcttttattgaaaaaaattttattagtaacatgttgtatataaaattatgagcacaatgccatcacttaactataactcttaacgatagcttaatgactg

SEQ ID NO: 634 - DNA, 201 bp, Homo sapiens
tttagcatcttcaaatttcttttattgaaaaaaattttattagtaacatgttgtatataaaattatgagcacaatgccatcacttaactataactcttaamgatagcttaatgactgtttattctcttgaccaaatagactcataataacatataattttaaaagaaatttaaattctttcttctctattgtattatttta

SEQ ID NO: 635 - DNA, 201 bp, Homo sapiens
aggtataactgttgatgaaaaaccagaaaaaagtccagaactctttggtgactccaactatggatagcttattttgaaaaaggagaattgcaaattttacyaaaagatggagaaaagcacattaaaaagataccaacattcagaaattcatttcagcatgttattattggaaattatttaaactaatttagataactataa

SEQ ID NO: 636 - DNA, 201 bp, Homo sapiens
acttattatttaagccttttaatactaagtatgaaacaacctatggtctggaaatttgtatcgcaaagctatatgtgcatatgttatttaattcatctaaygctacacaaaagcataaaataatgatttttcactctctttaaaaatactaaatcatttatgtccatttctcaattttttcattgatctatgctttgagtt

SEQ ID NO: 637 - DNA, 201 bp, Homo sapiens
catttctcaattttttcattgatctatgctttgagtttgctttctcaacattattgtattttccacttattattactgtataacatatgctagtgtttagytggattaatcttacctaaaagtactgaaaaatgctttttagtactttttcatattttatacatttattttccgaatgtatcattgaataattttattgag

SEQ ID NO: 638 - DNA, 201 bp, Homo sapiens
gttataaaagtatcttattgctatttaataaaaaattaacacataaaatgacttgaattgtcatcattctttttaagatatttagttaaactgacttaatrtatggccttcaatttttttgtgtccttatttttctgatcatttctccttttatagtttacattaagtctgatctcatattaattacattttctcatctgt

SEQ ID NO: 639 - DNA, 201 bp, Homo sapiens
ctacaagtagtgctatccacaaatatattcaaatgttcccttttaatgtttgtcatttttttcatgtgttgttaatgattcttccatgtgataataagcasaaatgacaataaacttttcatagtttctgcttttaaggaaaatgcctccagcatgatattgaatatttgattctgaaaactaaagactctttaacagatt

SEQ ID NO: 640 - DNA, 201 bp, Homo sapiens
aaatgttcccttttaatgtttgtcatttttttcatgtgttgttaatgattcttccatgtgataataagcagaaatgacaataaacttttcatagtttctgmttttaaggaaaatgcctccagcatgatattgaatatttgattctgaaaactaaagactctttaacagattaggggattgcctactttttaaaaagttttt

SEQ ID NO: 641 - DNA, 201 bp, Homo sapiens
gataataagcagaaatgacaataaacttttcatagtttctgcttttaaggaaaatgcctccagcatgatattgaatatttgattctgaaaactaaagactytttaacagattaggggattgcctactttttaaaaagtttttatttataatatgagtatatgtaaaattttaaatagatcttttacatggacatgattatt

SEQ ID NO: 642 - DNA, 201 bp, Homo sapiens; identical to SEQ ID NO: 566

SEQ ID NO: 643 - DNA, 201 bp, Homo sapiens; identical to SEQ ID NO: 567

SEQ ID NO: 644 - DNA, 201 bp, Homo sapiens; identical to SEQ ID NO: 568

SEQ ID NO: 645 - DNA, 201 bp, Homo sapiens; identical to SEQ ID NO: 569

SEQ ID NO: 646 - DNA, 201 bp, Homo sapiens; identical to SEQ ID NO: 570

SEQ ID NO: 647 - DNA, 201 bp, Homo sapiens; identical to SEQ ID NO: 571

SEQ ID NO: 648 - DNA, 201 bp, Homo sapiens; identical to SEQ ID NO: 572

SEQ ID NO: 649 - DNA, 201 bp, Homo sapiens; identical to SEQ ID NO: 573

SEQ ID NO: 650 - DNA, 201 bp, Homo sapiens; identical to SEQ ID NO: 574

SEQ ID NO: 651 - DNA, 201 bp, Homo sapiens; identical to SEQ ID NO: 575

SEQ ID NO: 652 - DNA, 201 bp, Homo sapiens; identical to SEQ ID NO: 576

SEQ ID NO: 653 - DNA, 201 bp, Homo sapiens; identical to SEQ ID NO: 577

SEQ ID NO: 654 - DNA, 201 bp, Homo sapiens; identical to SEQ ID NO: 578

SEQ ID NO: 655 - DNA, 201 bp, Homo sapiens; identical to SEQ ID NO: 579

SEQ ID NO: 656 - DNA, 201 bp, Homo sapiens; identical to SEQ ID NO: 580

SEQ ID NO: 657 - DNA, 201 bp, Homo sapiens; identical to SEQ ID NO: 581

SEQ ID NO: 658 - DNA, 201 bp, Homo sapiens; identical to SEQ ID NO: 582

SEQ ID NO: 659 - DNA, 201 bp, Homo sapiens; identical to SEQ ID NO: 583

SEQ ID NO: 660 - DNA, 201 bp, Homo sapiens; identical to SEQ ID NO: 584

SEQ ID NO: 661 - DNA, 201 bp, Homo sapiens; identical to SEQ ID NO: 585

SEQ ID NO: 662 - DNA, 201 bp, Homo sapiens; identical to SEQ ID NO: 586

SEQ ID NO: 663 - DNA, 201 bp, Homo sapiens; identical to SEQ ID NO: 587

SEQ ID NO: 664 - DNA, 201 bp, Homo sapiens; identical to SEQ ID NO: 588

SEQ ID NO: 665 - DNA, 201 bp, Homo sapiens; identical to SEQ ID NO: 589

SEQ ID NO: 666 - DNA, 201 bp, Homo sapiens; identical to SEQ ID NO: 590

SEQ ID NO: 667 - DNA, 201 bp, Homo sapiens; identical to SEQ ID NO: 591

SEQ ID NO: 668 - DNA, 201 bp, Homo sapiens; identical to SEQ ID NO: 592

SEQ ID NO: 669 - DNA, 201 bp, Homo sapiens
agtcagttaataccctaagaattagattttatttcttattctgaaaacttgctacacagggacttatctaacccatagtgtgctctgttgctgacttgatdcaagttgcagcgtgttttgcgctgactctaaggtgcggaaatcctcacacctggcaaaggagaattcaaactgaacttttgaatggtttaataaaaatag

SEQ ID NO: 670 - DNA, 124 bp, Homo sapiens
ttggtcacctgaggaacctatctttgtttgcttttggaaaagcccattttctaaacagatacaatattgccacaacaatgtgcagaaacctttttgataawaaaaaattgttctttgcctctaa

SEQ ID NO: 671 - DNA, 201 bp, Homo sapiens
aagattctggacaatcaggaagtccaagccacaatgatcctgccaagaatcctccaggttaccttgaggatagttttgtaaaatctggagtcttcaatgtrtcagaacttgtaagagtatccagaacgcccataacccagggaactggagtcaacttcccaattggagaaatcccaagccaaccatactatcatgacatga

SEQ ID NO: 672 - DNA, 201 bp, Homo sapiens
aagcagccaacaccggcggcggcggcggcctcggcaagcacggccagcgcgctcggactgcaagagggttaaaagtgtagattggatttcacccctggaamtctagcacgccgagtgaacttgaatctttggctatttaaggaggactgggtttgttgtgaagttgcggtgatccagcgcagagccccgtcctgattgatc

SEQ ID NO: 673 - DNA, 201 bp, Homo sapiens
tccaatcccgaccagaagggtaagattaggagaatcgactgcctgcgacaggcagacaaagtctggcgtctggatctagtcatggtgatcctgttcaaagscatccccttggaaagtaccgatggagagcggctcatgaaatccccacattgcacaaacccagcactttgtgtccagccacatcatatcacagtatcagtt

SEQ ID NO: 674 - DNA, 201 bp, Homo sapiens
ggtttgaacataattggagaacctttccttcaagcagaaacaagcaactgagggaaaaagaaacacaacaatagtttaagaaattttttttttaaataaawaaaaaggaaaagaggaagactggacaaaacaacacaaaggcagaaaggaaagaaactgaagaaagaagataatagaccagcaattgcagcacttacaatc

SEQ ID NO: 675 - DNA, 201 bp, Homo sapiens
tctatgacaatatattttaactgactttctagatgccttaatatttgcatgataagctagttttattggtttagtattcttgttgtttacgcatggaatcrctattcctggttatctcaccaacgaaggctaggaggcggcgtcagaggtgctgggtgacagagccatgagccagccattttataagcactctgatttcta

SEQ ID NO: 676 - DNA, 201 bp, Homo sapiens
atgataagctagttttattggtttagtattcttgttgtttacgcatggaatcactattcctggttatctcaccaacgaaggctaggaggcggcgtcagagrtgctgggtgacagagccatgagccagccattttataagcactctgatttctaaaagttaaaaaaaatatatgaaatctctgtagcctttagttatcagta

SEQ ID NO: 677 - DNA, 201 bp, Homo sapiens
ataagctagttttattggtttagtattcttgttgtttacgcatggaatcactattcctggttatctcaccaacgaaggctaggaggcggcgtcagaggtgmtgggtgacagagccatgagccagccattttataagcactctgatttctaaaagttaaaaaaaatatatgaaatctctgtagcctttagttatcagtacag

SEQ ID NO: 678 - DNA, 201 bp, Homo sapiens; identical to SEQ ID NO: 671

SEQ ID NO: 679 - DNA, 201 bp, Homo sapiens; identical to SEQ ID NO: 672

SEQ ID NO: 680 - DNA, 201 bp, Homo sapiens; identical to SEQ ID NO: 673

SEQ ID NO: 681 - DNA, 201 bp, Homo sapiens; identical to SEQ ID NO: 674

SEQ ID NO: 682 - DNA, 201 bp, Homo sapiens; identical to SEQ ID NO: 675

SEQ ID NO: 683 - DNA, 201 bp, Homo sapiens; identical to SEQ ID NO: 676

SEQ ID NO: 684 - DNA, 201 bp, Homo sapiens; identical to SEQ ID NO: 677

SEQ ID NO: 685 - DNA, 201 bp, Homo sapiens; identical to SEQ ID NO: 671

SEQ ID NO: 686 - DNA, 201 bp, Homo sapiens; identical to SEQ ID NO: 672

SEQ ID NO: 687 - DNA, 201 bp, Homo sapiens; identical to SEQ ID NO: 673

SEQ ID NO: 688 - DNA, 201 bp, Homo sapiens; identical to SEQ ID NO: 674

SEQ ID NO: 689 - DNA, 201 bp, Homo sapiens; identical to SEQ ID NO: 675

SEQ ID NO: 690 - DNA, 201 bp, Homo sapiens; identical to SEQ ID NO: 676

SEQ ID NO: 691 - DNA, 201 bp, Homo sapiens; identical to SEQ ID NO: 677

SEQ ID NO: 692 - DNA, 201 bp, Homo sapiens
tcggatgttcccgcggcttaaaagagtccgcagcgagcaccgaaatacctcttccaggttaccttgaggatagttttgtaaaatctggagtcttcaatgtrtcagaacttgtaagagtatccagaacgcccataacccagggaactggagtcaacttcccaattggagaaatcccaagccaaccatactatcatgacatga

SEQ ID NO: 693 - DNA, 201 bp, Homo sapiens; identical to SEQ ID NO: 674

SEQ ID NO: 694 - DNA, 201 bp, Homo sapiens; identical to SEQ ID NO: 675

SEQ ID NO: 695 - DNA, 201 bp, Homo sapiens; identical to SEQ ID NO: 676

SEQ ID NO: 696 - DNA, 201 bp, Homo sapiens; identical to SEQ ID NO: 677

SEQ ID NO: 697 - DNA, 201 bp, Homo sapiens; identical to SEQ ID NO: 671

SEQ ID NO: 698 - DNA, 201 bp, Homo sapiens; identical to SEQ ID NO: 672

SEQ ID NO: 699 - DNA, 201 bp, Homo sapiens; identical to SEQ ID NO: 673

SEQ ID NO: 700 - DNA, 201 bp, Homo sapiens
gtttctatttctttgttaagtcgttccctctacaaaggacttcctagtgggtgtgaaaggcagcggtggccacagaggcggcggagagatggccttcagcrgttcccaggctccctacctgagtccagctgtccccttttctgggactattcaaggaggtctccaggacggacttcagatcactgtcaatgggaccgttct

SEQ ID NO: 701 - DNA, 201 bp, Homo sapiens
ccattgaataacagccaagttgctttggtttctatttctttgttaagtcgttccctctacaaaggacttcctagtgggtgtgaaaggcagcggtggccacrgaggcggcggagagatggccttcagcggttcccaggctccctacctgagtccagctgtccccttttctgggactattcaaggaggtctccaggacggact

SEQ ID NO: 702 - DNA, 201 bp, Homo sapiens
gactggcttcagtggaaatgacattgccttccacttcaaccctcggtttgaagatggagggtacgtggtgtgcaacacgaggcagaacggaagctgggggsccgaggagaggaagacacacatgcctttccagaaggggatgccctttgacctctgcttcctggtgcagagctcagatttcaaggtgatggtgaacgggat

SEQ ID NO: 703 - DNA, 201 bp, Homo sapiens
caggctccctacctgagtccagctgtccccttttctgggactattcaaggaggtctccaggacggacttcagatcactgtcaatgggaccgttctcagctscagtggaaccaggtttgctgtgaactttcagactggcttcagtggaaatgacattgccttccacttcaaccctcggtttgaagatggagggtacgtggtg

SEQ ID NO: 704 - DNA, 201 bp, Homo sapiens
ttacccagacagtcatccacacagtgcagagcgcccctggacagatgttctctactcccgccatcccacctatgatgtacccccaccccgcctatccgatkcctttcatcaccaccattctgggagggctgtacccatccaagtccatcctcctgtcaggcactgtcctgcccagtgctcagaggttccacatcaacctgt

SEQ ID NO: 705 - DNA, 201 bp, Homo sapiens
tgtcaatgggaccgttctcagctccagtggaaccaggtttgctgtgaactttcagactggcttcagtggaaatgacattgccttccacttcaaccctcggyttgaagatggagggtacgtggtgtgcaacacgaggcagaacggaagctgggggcccgaggagaggaagacacacatgcctttccagaaggggatgccctt

SEQ ID NO: 706 - DNA, 201 bp, Homo sapiens
ggaaatgacattgccttccacttcaaccctcggtttgaagatggagggtacgtggtgtgcaacacgaggcagaacggaagctgggggcccgaggagaggargacacacatgcctttccagaaggggatgccctttgacctctgcttcctggtgcagagctcagatttcaaggtgatggtgaacgggatcctcttcgtgcag

SEQ ID NO: 707 - DNA, 201 bp, Homo sapiens
aacctgtgctctgggaaccacatcgccttccacctgaacccccgttttgatgagaatgctgtggtccgcaacacccagatcgacaactcctgggggtctgrggagcgaagtctgccccgaaaaatgcccttcgtccgtggccagagcttctcagtgtggatcttgtgtgaagctcactgcctcaaggtggccgtggatggt

SEQ ID NO: 708 - DNA, 201 bp, Homo sapiens
tgggaaccacatcgccttccacctgaacccccgttttgatgagaatgctgtggtccgcaacacccagatcgacaactcctgggggtctgaggagcgaagtytgccccgaaaaatgcccttcgtccgtggccagagcttctcagtgtggatcttgtgtgaagctcactgcctcaaggtggccgtggatggtcagcacctgtt

SEQ ID NO: 709 - DNA, 201 bp, Homo sapiens
ctgggaaccacatcgccttccacctgaacccccgttttgatgagaatgctgtggtccgcaacacccagatcgacaactcctgggggtctgaggagcgaagyctgccccgaaaaatgcccttcgtccgtggccagagcttctcagtgtggatcttgtgtgaagctcactgcctcaaggtggccgtggatggtcagcacctgt

SEQ ID NO: 710 - DNA, 201 bp, Homo sapiens
tgaggaacctgcccaccatcaacagactggaagtggggggcgacatccagctgacccatgtgcagacataggcggcttcctggccctggggccgggggctrgggtgtggggcagtctgggtcctctcatcatccccacttcccaggcccagcctttccaaccctgcctgggatctgggctttaatgcagaggccatgtcct

SEQ ID NO: 711 - DNA, 201 bp, Homo sapiens
gtggggggcgacatccagctgacccatgtgcagacataggcggcttcctggccctggggccgggggctggggtgtggggcagtctgggtcctctcatcatycccacttcccaggcccagcctttccaaccctgcctgggatctgggctttaatgcagaggccatgtccttgtctggtcctgcttctggctacagccaccct

SEQ ID NO: 712 - DNA, 201 bp, Homo sapiens
ccatgctcagtcccctcccatcccccacgcagctccaccccagtcccaagccaccagctgtctgctcctggtgggaggtggcctcctcagcccctcctctytgacctttaacctcactctcaccttgcaccgtgcaccaacccttcacccctcctggaaagcaggcctgatggcttcccactggcctccaccacctgacca

SEQ ID NO: 713 - DNA, 201 bp, Homo sapiens
tcctggtgggaggtggcctcctcagcccctcctctctgacctttaacctcactctcaccttgcaccgtgcaccaacccttcacccctcctggaaagcaggyctgatggcttcccactggcctccaccacctgaccagagtgttctcttcagaggactggctcctttcccagtgtccttaaaataaagaaatgaaaatgctt

SEQ ID NO: 714 - DNA, 201 bp, Homo sapiens
tcctacatcagcttccagaacccccgcacagtccctgttcagcctgccttctccacggtgccgttctcccagcctgtctgtttcccacccaggcccagggrgcgcagacaaaaacctcccggcgtgtggcctgccaacccggctcccattacccagacagtcatccacacagtgcagagcgcccctggacagatgttctct

SEQ ID NO: 715 - DNA, 201 bp, Homo sapiens; identical to SEQ ID NO: 700

SEQ ID NO: 716 - DNA, 201 bp, Homo sapiens; identical to SEQ ID NO: 701

SEQ ID NO: 717 - DNA, 201 bp, Homo sapiens; identical to SEQ ID NO: 702

SEQ ID NO: 718 - DNA, 201 bp, Homo sapiens; identical to SEQ ID NO: 703

SEQ ID NO: 719 - DNA, 201 bp, Homo sapiens
cttcgtgcagtacttccaccgcgtgcccttccaccgtgtggacaccatctccgtcaatggctctgtgcagctgtcctacatcagcttccagaacccccgcrcagtccctgttcagcctgccttctccacggtgccgttctcccagcctgtctgtttcccacccaggcccagggggcgcagacaaaaacctcccggcgtgtg

SEQ ID NO: 720 - DNA, 201 bp, Homo sapiens; identical to SEQ ID NO: 704

SEQ ID NO: 721 - DNA, 201 bp, Homo sapiens; identical to SEQ ID NO: 705

SEQ ID NO: 722 - DNA, 201 bp, Homo sapiens
agcttccagaacccccgcacagtccctgttcagcctgccttctccacggtgccgttctcccagcctgtctgtttcccacccaggcccagggggcgcagacwaaaacctcccggcgtgtggcctgccaacccggctcccattacccagacagtcatccacacagtgcagagcgcccctggacagatgttctctactcccgcc

SEQ ID NO: 723 - DNA, 201 bp, Homo sapiens; identical to SEQ ID NO: 706

SEQ ID NO: 724 - DNA, 201 bp, Homo sapiens; identical to SEQ ID NO: 707

SEQ ID NO: 725 - DNA, 201 bp, Homo sapiens; identical to SEQ ID NO: 708

SEQ ID NO: 726 - DNA, 201 bp, Homo sapiens; identical to SEQ ID NO: 709

SEQ ID NO: 727 - DNA, 201 bp, Homo sapiens; identical to SEQ ID NO: 710

SEQ ID NO: 728 - DNA, 201 bp, Homo sapiens; identical to SEQ ID NO: 711

SEQ ID NO: 729 - DNA, 201 bp, Homo sapiens; identical to SEQ ID NO: 712

SEQ ID NO: 730 - DNA, 201 bp, Homo sapiens; identical to SEQ ID NO: 713

SEQ ID NO: 731 - DNA, 201 bp, Homo sapiens; identical to SEQ ID NO: 700

SEQ ID NO: 732 - DNA, 201 bp, Homo sapiens; identical to SEQ ID NO: 701

SEQ ID NO: 733 - DNA, 201 bp, Homo sapiens; identical to SEQ ID NO: 702

SEQ ID NO: 734 - DNA, 201 bp, Homo sapiens; identical to SEQ ID NO: 703

SEQ ID NO: 735 - DNA, 201 bp, Homo sapiens
agacccagacagtcatccacacagtgcagagcgcccctggacagatgttctctactcccgccatcccacctatgatgtacccccaccccgcctatccgatkcctttcatcaccaccattctgggagggctgtacccatccaagtccatcctcctgtcaggcactgtcctgcccagtgctcagaggttccacatcaacctgt

SEQ ID NO: 736 - DNA, 201 bp, Homo sapiens; identical to SEQ ID NO: 705

SEQ ID NO: 737 - DNA, 201 bp, Homo sapiens; identical to SEQ ID NO: 706

SEQ ID NO: 738 - DNA, 201 bp, Homo sapiens; identical to SEQ ID NO: 707

SEQ ID NO: 739 - DNA, 201 bp, Homo sapiens; identical to SEQ ID NO: 708

SEQ ID NO: 740 - DNA, 201 bp, Homo sapiens; identical to SEQ ID NO: 709

SEQ ID NO: 741 - DNA, 201 bp, Homo sapiens; identical to SEQ ID NO: 710

SEQ ID NO: 742 - DNA, 201 bp, Homo sapiens; identical to SEQ ID NO: 711

SEQ ID NO: 743 - DNA, 201 bp, Homo sapiens; identical to SEQ ID NO: 712

SEQ ID NO: 744 - DNA, 201 bp, Homo sapiens; identical to SEQ ID NO: 713

SEQ ID NO: 745 - DNA, 201 bp, Homo sapiens
tcctacatcagcttccagaacccccgcacagtccctgttcagcctgccttctccacggtgccgttctcccagcctgtctgtttcccacccaggcccagggrgcgcagacaaaaaacccagacagtcatccacacagtgcagagcgcccctggacagatgttctctactcccgccatcccacctatgatgtacccccacccc

SEQ ID NO: 746 - DNA, 201 bp, Homo sapiens; identical to SEQ ID NO: 700

SEQ ID NO: 747 - DNA, 201 bp, Homo sapiens; identical to SEQ ID NO: 701

SEQ ID NO: 748 - DNA, 201 bp, Homo sapiens; identical to SEQ ID NO: 702

SEQ ID NO: 749 - DNA, 201 bp, Homo sapiens; identical to SEQ ID NO: 703

SEQ ID NO: 750 - DNA, 201 bp, Homo sapiens
cttcgtgcagtacttccaccgcgtgcccttccaccgtgtggacaccatctccgtcaatggctctgtgcagctgtcctacatcagcttccagaacccccgcrcagtccctgttcagcctgccttctccacggtgccgttctcccagcctgtctgtttcccacccaggcccagggggcgcagacaaaaaacccagacagtcat

SEQ ID NO: 751 - DNA, 201 bp, Homo sapiens
aaacccagacagtcatccacacagtgcagagcgcccctggacagatgttctctactcccgccatcccacctatgatgtacccccaccccgcctatccgatkcctttcatcaccaccattctgggagggctgtacccatccaagtccatcctcctgtcaggcactgtcctgcccagtgctcagaggttccacatcaacctgt

SEQ ID NO: 752 - DNA, 201 bp, Homo sapiens; identical to SEQ ID NO: 705

SEQ ID NO: 753 - DNA, 201 bp, Homo sapiens
agcttccagaacccccgcacagtccctgttcagcctgccttctccacggtgccgttctcccagcctgtctgtttcccacccaggcccagggggcgcagacwaaaaacccagacagtcatccacacagtgcagagcgcccctggacagatgttctctactcccgccatcccacctatgatgtacccccaccccgcctatccg

SEQ ID NO: 754 - DNA, 201 bp, Homo sapiens; identical to SEQ ID NO: 706

SEQ ID NO: 755 - DNA, 201 bp, Homo sapiens; identical to SEQ ID NO: 707

SEQ ID NO: 756 - DNA, 201 bp, Homo sapiens; identical to SEQ ID NO: 708

SEQ ID NO: 757 - DNA, 201 bp, Homo sapiens; identical to SEQ ID NO: 709

SEQ ID NO: 758 - DNA, 201 bp, Homo sapiens; identical to SEQ ID NO: 710

SEQ ID NO: 759 - DNA, 201 bp, Homo sapiens; identical to SEQ ID NO: 711

SEQ ID NO: 760 - DNA, 201 bp, Homo sapiens; identical to SEQ ID NO: 712

SEQ ID NO: 761 - DNA, 201 bp, Homo sapiens; identical to SEQ ID NO: 713

SEQ ID NO: 762 - DNA, 201 bp, Homo sapiens; identical to SEQ ID NO: 702

SEQ ID NO: 763 - DNA, 201 bp, Homo sapiens
caccctgtggaggcccctgaggctgtccccttttctgggactattcaaggaggtctccaggacggacttcagatcactgtcaatgggaccgttctcagctscagtggaaccaggtttgctgtgaactttcagactggcttcagtggaaatgacattgccttccacttcaaccctcggtttgaagatggagggtacgtggtg

SEQ ID NO: 764 - DNA, 201 bp, Homo sapiens; identical to SEQ ID NO: 704

SEQ ID NO: 765 - DNA, 201 bp, Homo sapiens; identical to SEQ ID NO: 705

SEQ ID NO: 766 - DNA, 201 bp, Homo sapiens; identical to SEQ ID NO: 706

SEQ ID NO: 767 - DNA, 201 bp, Homo sapiens; identical to SEQ ID NO: 707

SEQ ID NO: 768 - DNA, 201 bp, Homo sapiens; identical to SEQ ID NO: 708

SEQ ID NO: 769 - DNA, 201 bp, Homo sapiens; identical to SEQ ID NO: 709

SEQ ID NO: 770 - DNA, 201 bp, Homo sapiens; identical to SEQ ID NO: 710

SEQ ID NO: 771 - DNA, 201 bp, Homo sapiens; identical to SEQ ID NO: 711

SEQ ID NO: 772 - DNA, 201 bp, Homo sapiens; identical to SEQ ID NO: 712

SEQ ID NO: 773 - DNA, 201 bp, Homo sapiens; identical to SEQ ID NO: 713

SEQ ID NO: 774 - DNA, 201 bp, Homo sapiens; identical to SEQ ID NO: 714

SEQ ID NO: 775 - DNA, 201 bp, Homo sapiens; identical to SEQ ID NO: 700

SEQ ID NO: 776 - DNA, 201 bp, Homo sapiens; identical to SEQ ID NO: 701

SEQ ID NO: 777 - DNA, 201 bp, Homo sapiens; identical to SEQ ID NO: 702

SEQ ID NO: 778 - DNA, 201 bp, Homo sapiens; identical to SEQ ID NO: 703

SEQ ID NO: 779 - DNA, 201 bp, Homo sapiens; identical to SEQ ID NO: 719

SEQ ID NO: 780 - DNA, 201 bp, Homo sapiens; identical to SEQ ID NO: 704

SEQ ID NO: 781 - DNA, 201 bp, Homo sapiens; identical to SEQ ID NO: 705

SEQ ID NO: 782 - DNA, 201 bp, Homo sapiens; identical to SEQ ID NO: 722

SEQ ID NO: 783 - DNA, 201 bp, Homo sapiens; identical to SEQ ID NO: 706

SEQ ID NO: 784 - DNA, 201 bp, Homo sapiens; identical to SEQ ID NO: 707

SEQ ID NO: 785 - DNA, 201 bp, Homo sapiens; identical to SEQ ID NO: 708

SEQ ID NO: 786 - DNA, 201 bp, Homo sapiens; identical to SEQ ID NO: 709

SEQ ID NO: 787 - DNA, 201 bp, Homo sapiens
tgaggaacctgcccaccatcaacagactggaagtggggggcgacatccagctgacccatgtgcagacataggcggcttcctggccctggggccgggggctrgggtgtggggcagtctgggtcctctcatcatccccacttcccaggcccagcctttccaaccctgacagccaccctggaacggagaaggcagctgacgggg

SEQ ID NO: 788 - DNA, 201 bp, Homo sapiens
gtggggggcgacatccagctgacccatgtgcagacataggcggcttcctggccctggggccgggggctggggtgtggggcagtctgggtcctctcatcatycccacttcccaggcccagcctttccaaccctgacagccaccctggaacggagaaggcagctgacggggattgccttcctcagccgcagcagcacctgggg

SEQ ID NO: 789 - DNA, 201 bp, Homo sapiens; identical to SEQ ID NO: 712

SEQ ID NO: 790 - DNA, 201 bp, Homo sapiens; identical to SEQ ID NO: 713

SEQ ID NO: 791 - DNA, 201 bp, Homo sapiens; identical to SEQ ID NO: 700

SEQ ID NO: 792 - DNA, 201 bp, Homo sapiens; identical to SEQ ID NO: 701

SEQ ID NO: 793 - DNA, 201 bp, Homo sapiens; identical to SEQ ID NO: 702

SEQ ID NO: 794 - DNA, 201 bp, Homo sapiens; identical to SEQ ID NO: 703

SEQ ID NO: 795 - DNA, 201 bp, Homo sapiens; identical to SEQ ID NO: 704

SEQ ID NO: 796 - DNA, 201 bp, Homo sapiens; identical to SEQ ID NO: 705

SEQ ID NO: 797 - DNA, 201 bp, Homo sapiens; identical to SEQ ID NO: 706

SEQ ID NO: 798 - DNA, 201 bp, Homo sapiens; identical to SEQ ID NO: 707

SEQ ID NO: 799 - DNA, 201 bp, Homo sapiens; identical to SEQ ID NO: 708

SEQ ID NO: 800 - DNA, 201 bp, Homo sapiens; identical to SEQ ID NO: 709

SEQ ID NO: 801 - DNA, 201 bp, Homo sapiens; identical to SEQ ID NO: 787

SEQ ID NO: 802 - DNA, 201 bp, Homo sapiens; identical to SEQ ID NO: 788

SEQ ID NO: 803 - DNA, 201 bp, Homo sapiens; identical to SEQ ID NO: 712

SEQ ID NO: 804 - DNA, 201 bp, Homo sapiens; identical to SEQ ID NO: 713

SEQ ID NO: 805 - DNA, 201 bp, Homo sapiens; identical to SEQ ID NO: 700

SEQ ID NO: 806 - DNA, 201 bp, Homo sapiens; identical to SEQ ID NO: 701

SEQ ID NO: 807 - DNA, 201 bp, Homo sapiens; identical to SEQ ID NO: 702

SEQ ID NO: 808 - DNA, 201 bp, Homo sapiens; identical to SEQ ID NO: 703

SEQ ID NO: 809 - DNA, 201 bp, Homo sapiens; identical to SEQ ID NO: 735

SEQ ID NO: 810 - DNA, 201 bp, Homo sapiens; identical to SEQ ID NO: 705

SEQ ID NO: 811 - DNA, 201 bp, Homo sapiens; identical to SEQ ID NO: 706

SEQ ID NO: 812 - DNA, 201 bp, Homo sapiens; identical to SEQ ID NO: 707

SEQ ID NO: 813 - DNA, 201 bp, Homo sapiens; identical to SEQ ID NO: 708

SEQ ID NO: 814 - DNA, 201 bp, Homo sapiens; identical to SEQ ID NO: 709

SEQ ID NO: 815 - DNA, 201 bp, Homo sapiens; identical to SEQ ID NO: 787

SEQ ID NO: 816 - DNA, 201 bp, Homo sapiens; identical to SEQ ID NO: 788

SEQ ID NO: 817 - DNA, 201 bp, Homo sapiens; identical to SEQ ID NO: 712

SEQ ID NO: 818 - DNA, 201 bp, Homo sapiens; identical to SEQ ID NO: 713

SEQ ID NO: 819 - DNA, 201 bp, Homo sapiens
aggaaccacctgttcttcagggaccgatatggagtcaacactgatgaagcaaatccaatacttagggaatggtggccacgtgctggaccagccccgggctmtgaggatctgacagttctctgcatggacaagtacagggaggcacagctgttgctggtggagaccaccacatttgggaatggagacttccccagcaatgga

SEQ ID NO: 820 - DNA, 154 bp, Homo sapiens
gccctttcaccctttaccttggacccctcaccaaggctcccactgggttgcagrgacaccaagctgggctgccagcagacatggggcctgtgcctgttggaatctacagcagtgctgattgctttgggattctgcatgagacggagctgccccc

SEQ ID NO: 821 - DNA, 201 bp, Homo sapiens
gacggagctgccccctgtcactacctggaaggtgaaggtcatgaaggagaagggcaagaggtcctctggacacatccaccagatcgacctggacatgagcyggacattaaggaaccacctgttcttcagggaccgatatggagtcaacactgatgaagcaaatccaatacttagggaatggtggccacgtgctggaccagc

SEQ ID NO: 822 - DNA, 201 bp, Homo sapiens; identical to SEQ ID NO: 819

SEQ ID NO: 823 - DNA, 201 bp, Homo sapiens
gctgaaagagctcaccaacaaattcaggtatgccatgtttggcctcagctccagcaagtaccctcagttctgtgcctttgctcatgacctcacccagcccytagaagagctccaccttgtgcacacaactctgggggagaaggcagcctgtgaaacgtttgatgtccgaagccaacagcacattcagatccccaagctcta

SEQ ID NO: 824 - DNA, 201 bp, Homo sapiens; identical to SEQ ID NO: 821

SEQ ID NO: 825 - DNA, 105 bp, Homo sapiens
ggctrctgtttctaaaacccctttccctctaacccacaccacctttctactcactgatgccttcaggaagccataatggatggcacagagattgctgtttcccct

SEQ ID NO: 826 - DNA, 201 bp, Homo sapiens
atgccacagtggaccacctctccaagtacttggccctgcgcattgccctcgagcggaggcaacagcaggaagcaggggagccaggagggcctggagggggygcctctgacaccggaggacctgatgggtgtggcggggagggtgggggtgccggaggaggtgacggtcctgaggagcctgctttgcccagcctggagggcg

SEQ ID NO: 827 - DNA, 201 bp, Homo sapiens
tacggagcgggaacaaggagtgtcctacctgccgaaagaagctggtgtccaagcgatccctacggccagaccccaactttgatgccctgatctctaagatytatcctagccgggaggaatacgaggcccatcaagaccgagtgcttatccgcctgagccgcctgcacaaccagcaggcattgagctccagcattgaggagg

SEQ ID NO: 828 - DNA, 201 bp, Homo sapiens
agcaggaagcaggggagccaggagggcctggagggggcgcctctgacaccggaggacctgatgggtgtggcggggagggtgggggtgccggaggaggtgayggtcctgaggagcctgctttgcccagcctggagggcgtcagtgaaaagcagtacaccatctacatcgcacctggaggcggggcgttcacgacgttgaatg

SEQ ID NO: 829 - DNA, 201 bp, Homo sapiens
atgagaaattctggaaggtgtcccggccactggagctgtgctatgctcccaccaaggatccaaagtgaccccaccaggggacagccagaggaaggggaccmtggggtatccctgtgtcctggtctatcaccccagcttctttgtcccccagtacccccagcccagccagccaataagaggacacaaatgaggacacgtggc

SEQ ID NO: 830 - DNA, 201 bp, Homo sapiens
accccagcttctttgtcccccagtacccccagcccagccagccaataagaggacacaaatgaggacacgtggcttttatacaaagtatctatatgagattyttctatattgtacagagtggggcaaaacacgcccccatctgctgccttttctattgccctgcaacgtcccatctatacgaggtgttggagaaggtgaaga

SEQ ID NO: 831 - DNA, 201 bp, Homo sapiens
ccagcttctttgtcccccagtacccccagcccagccagccaataagaggacacaaatgaggacacgtggcttttatacaaagtatctatatgagattcttytatattgtacagagtggggcaaaacacgcccccatctgctgccttttctattgccctgcaacgtcccatctatacgaggtgttggagaaggtgaagaacc

SEQ ID NO: 832 - DNA, 178 bp, Homo sapiens
acaaagtatctatatgagattcttctatattgtacagagtggggcaaaacacgcccccatctgctgccttttctattgccctgcaacgtcccatctatacsaggtgttggagaaggtgaagaaccctcccattcacgcccgcctaccaacaacaaacgtgcttttttcctctttgaaa

SEQ ID NO: 833 - DNA, 201 bp, Homo sapiens; identical to SEQ ID NO: 826

SEQ ID NO: 834 - DNA, 201 bp, Homo sapiens; identical to SEQ ID NO: 827

SEQ ID NO: 835 - DNA, 201 bp, Homo sapiens; identical to SEQ ID NO: 828

SEQ ID NO: 836 - DNA, 201 bp, Homo sapiens; identical to SEQ ID NO: 829

SEQ ID NO: 837 - DNA, 201 bp, Homo sapiens; identical to SEQ ID NO: 830

SEQ ID NO: 838 - DNA, 201 bp, Homo sapiens; identical to SEQ ID NO: 831

SEQ ID NO: 839 - DNA, 178 bp, Homo sapiens; identical to SEQ ID NO: 832

SEQ ID NO: 840 - DNA, 201 bp, Homo sapiens
caagatgaacccagtggtggagccactgtcctggatgctgggcacctggctgtcggacccacctggagccgggacctaccccacactgcagcccttccagwacctggaggaggttcacatctcccacgtgggccagcccatgctgaacttctcgttcaactccttccacccggacacgcgcaagccgatgcacagagagtg

SEQ ID NO: 841 - DNA, 201 bp, Homo sapiens
gcaagaggctgaagaaagatgtggaaccaagctgcagtgggagcagcctgggacccgacaagggcctggcccagagccctcccagctcatcacttaccgcracaccgcagaagccttcccagagcccctctgcccctcctgccgacgtcaccccaaagccagccacggaagccgtgcagagcgagcacagcgacgccagcc

SEQ ID NO: 842 - DNA, 201 bp, Homo sapiens; identical to SEQ ID NO: 840

SEQ ID NO: 843 - DNA, 120 bp, Homo sapiens
gttccccctaaaggactcamaacgtctaatccaatggttaaaagctgttcagagggataactggactcccactaagtattcatttctctgtagtgagcatttcaccaaagacagcttctc

SEQ ID NO: 844 - DNA, 201 bp, Homo sapiens
gcaaggccacagggggtgtgaggggacactcgagtgccgccaccggcagaggagctgcaggttggtcaccgtcctcgagtggaaacccgatggccaagccrgagtcccgcaggttgaagcaagctgctctgcaaggtgaagccacacccagggcggcccaggaggccgccagccaggagcaggcccagcaagctctggaac

SEQ ID NO: 845 - DNA, 201 bp, Homo sapiens
ataactggactcccactaagtattcatttctctgtagtgagcatttcaccaaagacagcttctccaagaggctggaggaccagcatcgcctgctgaagccyacggccgtgccatccatcttccacctgaccgagaagaagaggggggctggaggccatggccgcacccggagaaaagatgccagcaaggccacagggggtg

SEQ ID NO: 846 - DNA, 109 bp, Homo sapiens
gttcccccyaaaggactcaaaacgtctaatccaatggttaaaagctgttcagagggataactggactcccactaagtattcatttctctgtagtgagcatttcaccaaa

SEQ ID NO: 847 - DNA, 201 bp, Homo sapiens
gaccgagaagaagaggggggctggaggccatggccgcacccggagaaaagatgccagcaaggccacagggggtgtgaggggacactcgagtgccgccaccrgcagaggagctgcaggttggtcaccgtcctcgagtggaaacccgatggccaagccagagtcccgcaggttgaagcaagctgctctgcaaggtgaagccac

SEQ ID NO: 848 - DNA, 201 bp, Homo sapiens
gcgtgacagataagagtggcatttctatggatgactttacgcccccaggatctggggcgtgcaaatttatcggctcacttcattcgtacagtttctcctcyaagcacacccgagaaaggccatctgtcccccgagagcccattgaccgcaagaggctgaagaaagatgtggaaccaagctgcagtgggagcagcctgggac

SEQ ID NO: 849 - DNA, 201 bp, Homo sapiens; identical to SEQ ID NO: 841

SEQ ID NO: 850 - DNA, 201 bp, Homo sapiens; identical to SEQ ID NO: 840

SEQ ID NO: 851 - DNA, 197 bp, Homo sapiens
atggtgatctgctgtgcggtcgtgaactgctccaaccggcagggaaagggcgagaagcgcgccgtctccttccacaggttccccctaaaggactcamaacgtctaatccaatggttaaaagctgttcagagggataactggactcccactaagtattcatttctctgtagtgagcatttcaccaaagacagcttctc

SEQ ID NO: 852 - DNA, 201 bp, Homo sapiens; identical to SEQ ID NO: 844

SEQ ID NO: 853 - DNA, 201 bp, Homo sapiens; identical to SEQ ID NO: 845

SEQ ID NO: 854 - DNA, 186 bp, Homo sapiens
atggtgatctgctgtgcggtcgtgaactgctccaaccggcagggaaagggcgagaagcgcgccgtctccttccacaggttcccccyaaaggactcaaaacgtctaatccaatggttaaaagctgttcagagggataactggactcccactaagtattcatttctctgtagtgagcatttcaccaaa

SEQ ID NO: 855 - DNA, 201 bp, Homo sapiens; identical to SEQ ID NO: 847

SEQ ID NO: 856 - DNA, 201 bp, Homo sapiens; identical to SEQ ID NO: 848

SEQ ID NO: 857 - DNA, 201 bp, Homo sapiens
tgaatagattgtctcttgacttggagaaggaaattgaattccacagaatcatgaagaaactgaagtatgtgttaagctatgttacaaaaataaaagaagarcaacatgaatccatcaataaatttgaaatggattttattgatgaagtggaaaagcaaaaggaattgctaattaaaatacagcaccttcaacaagattgtg

SEQ ID NO: 858 - DNA, 201 bp, Homo sapiens
aagagagaatcagcctttcttagaagtgaaaatctggagctgaaggagaaaatgaaagaacttgcaactacatacaagcaaatggaaaatgatattcagtwatatcaaagccagttggaggcaaaaaagaaaatgcaagttgatctggagaaagaattacaatctgcttttaatgagataacaaaactcacctcccttata

SEQ ID NO: 859 - DNA, 201 bp, Homo sapiens
atcgaagcttatttattttgggacaagtgatcaagaaacttagtgatggacaagttggtggtttcataaattatcgagatagcaagttaacacgaattctycagaattccttgggaggaaatgcaaagacacgtattatctgcacaattactccagtatcttttgatgaaacacttactgctctccagtttgccagtactg

SEQ ID NO: 860 - DNA, 201 bp, Homo sapiens
tctgcacaattactccagtatcttttgatgaaacacttactgctctccagtttgccagtactgctaaatatatgaagaatactccttatgttaatgaggtrtcaactgatgaagctctcctgaaaaggtatagaaaagaaataatggatcttaaaaaacaattagaggaggtttctttagagacgcgggctcaggcaatgg

SEQ ID NO: 861 - DNA, 201 bp, Homo sapiens
tcttaatgtacaagaagagatgagtgagatgcagaaaaagattaatgaaatagagaatttaaagaatgaattaaagaacaaagaattgacattggaacatwtggaaacagagaggcttgagttggctcagaaacttaatgaaaattatgaggaagtgaaatctataaccaaagaaagaaaagttctaaaggaattacagaa

SEQ ID NO: 862 - DNA, 201 bp, Homo sapiens
aggttgaatgaaaaatttcaagaaagtcaggaagagataaaatctctaaccaaggaaagagacaaccttaaaacgataaaagaagcccttgaagttaaacwtgaccagctgaaagaacatattagagaaactttggctaaaatccaggagtctcaaagcaaacaagaacagtccttaaatatgaaagaaaaagacaatgaa

SEQ ID NO: 863 - DNA, 201 bp, Homo sapiens
gaaagaacatattagagaaactttggctaaaatccaggagtctcaaagcaaacaagaacagtccttaaatatgaaagaaaaagacaatgaaactaccaaartcgtgagtgagatggagcaattcaaacccaaagattcagcactactaaggatagaaatagaaatgctcggattgtccaaaagacttcaagaaagtcatga

SEQ ID NO: 864 - DNA, 201 bp, Homo sapiens
atatgaaagaaaaagacaatgaaactaccaaaatcgtgagtgagatggagcaattcaaacccaaagattcagcactactaaggatagaaatagaaatgctyggattgtccaaaagacttcaagaaagtcatgatgaaatgaaatctgtagctaaggagaaagatgacctacagaggctgcaagaagttcttcaatctgaaa

SEQ ID NO: 865 - DNA, 201 bp, Homo sapiens
aaattagtgaggttcaggaaaaagtgaatgaactgaaacaattcaaggagcatcgcaaagccaaggattcagcactacaaagtatagaaagtaagatgctygagttgaccaacagacttcaagaaagtcaagaagaaatacaaattatgattaaggaaaaagaggaaatgaaaagagtacaggaggcccttcagatagaga

SEQ ID NO: 866 - DNA, 201 bp, Homo sapiens
gaatgaactgaaacaattcaaggagcatcgcaaagccaaggattcagcactacaaagtatagaaagtaagatgctcgagttgaccaacagacttcaagaamgtcaagaagaaatacaaattatgattaaggaaaaagaggaaatgaaaagagtacaggaggcccttcagatagagagagaccaactgaaagaaaacactaa

SEQ ID NO: 867 - DNA, 201 bp, Homo sapiens
aactaaaaactgctcgtatgctatcaaaagaacacaaagaaactgttgataaacttagagaaaaaatttcagaaaagacaattcaaatttcagacattcaraaggatttagataaatcaaaagatgaattacagaaaaagatccaagaacttcagaaaaaagaacttcaactgcttagagtgaaagaagatgtcaatatga

SEQ ID NO: 868 - DNA, 201 bp, Homo sapiens
gataggatggcggaggaaggagccgtggccgtctgcgtgcgagtgcggccgctgaacagcagagaagaatcacttggagaaactgcccaagtttactggamaactgacaataatgtcatttatcaagttgatggaagtaaatccttcaattttgatcgtgtctttcatggtaatgaaactaccaaaaatgtgtatgaagaa

SEQ ID NO: 869 - DNA, 201 bp, Homo sapiens
agagaaggaaactgaaatatcaaccattcaaaagcagttagaagcaatcaatgataaattacagaacaagatccaagagatttatgagaaagaggaacaayttaatataaaacaaattagtgaggttcaggaaaaagtgaatgaactgaaacaattcaaggagcatcgcaaagccaaggattcagcactacaaagtataga

SEQ ID NO: 870 - DNA, 201 bp, Homo sapiens
attttgatcgtgtctttcatggtaatgaaactaccaaaaatgtgtatgaagaaatagcagcaccaatcatcgattctgccatacaaggctacaatggtacyatatttgcctatggacagactgcttcaggaaaaacatataccatgatgggttcagaagatcatttgggagttatacccagggcaattcatgacattttcc

SEQ ID NO: 871 - DNA, 201 bp, Homo sapiens
aagttgatctggagaaagaattacaatctgcttttaatgagataacaaaactcacctcccttatagatggcaaagttccaaaagatttgctctgtaatttrgaattggaaggaaagattactgatcttcagaaagaactaaataaagaagttgaagaaaatgaagctttgcgggaagaagtcattttgctttcagaattga

SEQ ID NO: 872 - DNA, 201 bp, Homo sapiens
caattcatagcaaccttaagggaaatgatagctagagaccgacagaaccaccaagtaaaacctgaaaaaaggttactaagtgatggacaacagcaccttayggaaagcctgagagaaaagtgctctagaataaaagagcttttgaagagatactcagagatggatgatcattatgagtgcttgaatagattgtctcttgac

SEQ ID NO: 873 - DNA, 201 bp, Homo sapiens
ataatctaagaagagtagaggagacactcaaactggagagagaccaactcaaggaaagcctgcaagaaaccaaagctagagatctggaaatacaacaggamctaaaaactgctcgtatgctatcaaaagaacacaaagaaactgttgataaacttagagaaaaaatttcagaaaagacaattcaaatttcagacattcaaa

SEQ ID NO: 874 - DNA, 201 bp, Homo sapiens
cagataaactatcaaatatgcaaaaagatttagaaaattcaaatgctaaattacaagaaaagattcaagaacttaaggcaaatgaacatcaacttattacrttaaaaaaagatgtcaatgagacacagaaaaaagtgtctgaaatggagcaactaaagaaacaaataaaagaccaaagcttaactctgagtaaattagaaa

SEQ ID NO: 875 - DNA, 201 bp, Homo sapiens
catgaaaaccttgaagaaatgaaatctgtaatgaaagaaagagataatctaagaagagtagaggagacactcaaactggagagagaccaactcaaggaaascctgcaagaaaccaaagctagagatctggaaatacaacaggaactaaaaactgctcgtatgctatcaaaagaacacaaagaaactgttgataaacttaga

SEQ ID NO: 876 - DNA, 201 bp, Homo sapiens
tctcttgacttggagaaggaaattgaattccacagaatcatgaagaaactgaagtatgtgttaagctatgttacaaaaataaaagaagaacaacatgaatscatcaataaatttgaaatggattttattgatgaagtggaaaagcaaaaggaattgctaattaaaatacagcaccttcaacaagattgtgatgtaccatcc

SEQ ID NO: 877 - DNA, 201 bp, Homo sapiens
gcttgaatagattgtctcttgacttggagaaggaaattgaattccaaaaagagctttcaatgagatatgtgttaagctatgttacaaaaataaaagaagarcaacatgaatccatcaataaatttgaaatggattttattgatgaagtggaaaagcaaaaggaattgctaattaaaatacagcaccttcaacaagattgtg

SEQ ID NO: 878 - DNA, 201 bp, Homo sapiens; identical to SEQ ID NO: 858

SEQ ID NO: 879 - DNA, 201 bp, Homo sapiens; identical to SEQ ID NO: 859

SEQ ID NO: 880 - DNA, 201 bp, Homo sapiens; identical to SEQ ID NO: 860

SEQ ID NO: 881 - DNA, 201 bp, Homo sapiens; identical to SEQ ID NO: 861

SEQ ID NO: 882 - DNA, 201 bp, Homo sapiens; identical to SEQ ID NO: 862

SEQ ID NO: 883 - DNA, 201 bp, Homo sapiens; identical to SEQ ID NO: 863

SEQ ID NO: 884 - DNA, 201 bp, Homo sapiens; identical to SEQ ID NO: 864

SEQ ID NO: 885 - DNA, 201 bp, Homo sapiens; identical to SEQ ID NO: 865

SEQ ID NO: 886 - DNA, 201 bp, Homo sapiens; identical to SEQ ID NO: 866

SEQ ID NO: 887 - DNA, 201 bp, Homo sapiens; identical to SEQ ID NO: 867

SEQ ID NO: 888 - DNA, 201 bp, Homo sapiens; identical to SEQ ID NO: 868

SEQ ID NO: 889 - DNA, 201 bp, Homo sapiens; identical to SEQ ID NO: 869

SEQ ID NO: 890 - DNA, 201 bp, Homo sapiens; identical to SEQ ID NO: 870

SEQ ID NO: 891 - DNA, 201 bp, Homo sapiens; identical to SEQ ID NO: 871

SEQ ID NO: 892 - DNA, 201 bp, Homo sapiens; identical to SEQ ID NO: 872

SEQ ID NO: 893 - DNA, 201 bp, Homo sapiens; identical to SEQ ID NO: 873

SEQ ID NO: 894 - DNA, 201 bp, Homo sapiens
ataaactatcaaatatgcaaaaagatttagaaaattcaaatgctaaattacaagaaaaggtaattcaagaacttaaggcaaatgaacatcaacttattacrttaaaaaaagatgtcaatgagacacagaaaaaagtgtctgaaatggagcaactaaagaaacaaataaaagaccaaagcttaactctgagtaaattagaaa

SEQ ID NO: 895 - DNA, 201 bp, Homo sapiens; identical to SEQ ID NO: 875

SEQ ID NO: 896 - DNA, 201 bp, Homo sapiens
ttgtctcttgacttggagaaggaaattgaattccaaaaagagctttcaatgagatatgtgttaagctatgttacaaaaataaaagaagaacaacatgaatscatcaataaatttgaaatggattttattgatgaagtggaaaagcaaaaggaattgctaattaaaatacagcaccttcaacaagattgtgatgtaccatcc

SEQ ID NO: 897 - DNA, 201 bp, Homo sapiens
gacattaatgagtccaaacttcaggaactggaaaagtacccgggtattcaaactcgtgtccttgatgtcacaaagaagaaacaaattgatcagtttgccartgaagttgagagacttgatgttctctttaatgttgctggttttgtccatcatggaactgtcctggattgtgaggagaaagactgggacttctcgatgaat

SEQ ID NO: 898 - DNA, 201 bp, Homo sapiens
aagaaatagccatgctctgcgtgtatttggcttctgatgaatctgcttatgtaactggtaaccctgtcatcattgatggaggctggagcttgtgattttargatctccatggtgggaaggaaggcaggcccttcctatccacagtgaacctggttacgaagaaaactcaccaatcatctccttcctgttaatcacatgtta

SEQ ID NO: 899 - DNA, 201 bp, Homo sapiens; identical to SEQ ID NO: 897

SEQ ID NO: 900 - DNA, 201 bp, Homo sapiens; identical to SEQ ID NO: 898

SEQ ID NO: 901 - DNA, 201 bp, Homo sapiens; identical to SEQ ID NO: 897

SEQ ID NO: 902 - DNA, 201 bp, Homo sapiens
atacagggaaataactgcctgtgagtttgtggaatgcttcacaaagacagttgatctgagccatcagcaagaagtcaagttgaaggacaaggacagcagtrcaaaatgtggattatgtcacaatctggcatagttggatctgtgagtttaaaatgaaatagttactgctgagataccatttcttctctttgcaaggataca

SEQ ID NO: 903 - DNA, 201 bp, Homo sapiens
gtttgtggaatgcttcacaaagacagttgatctgagccatcagcaagaagtcaagttgaaggacaaggacagcagtacaaaatgtggattatgtcacaatmtggcatagttggatctgtgagtttaaaatgaaatagttactgctgagataccatttcttctctttgcaaggatacacatattcaacatacacaagagagg

SEQ ID NO: 904 - DNA, 201 bp, Homo sapiens
gagtttaaaatgaaatagttactgctgagataccatttcttctctttgcaaggatacacatattcaacatacacaagagaggaatgtaaagaagtgcctakgcctcctgttttattgttttgttttgttattaatcttcattttcttttggaatctgcctaagagttatggcaactgatgatgagaaactaagactaccaa

SEQ ID NO: 905 - DNA, 201 bp, Homo sapiens; identical to SEQ ID NO: 898

SEQ ID NO: 906 - DNA, 201 bp, Homo sapiens; identical to SEQ ID NO: 897

SEQ ID NO: 907 - DNA, 201 bp, Homo sapiens; identical to SEQ ID NO: 898

SEQ ID NO: 908 - DNA, 201 bp, Homo sapiens; identical to SEQ ID NO: 898

SEQ ID NO: 909 - DNA, 201 bp, Homo sapiens
accattcttcatccaaatggaggcactgaacagggagcaagaggttccatgccagcctactctggcaacaacatggacaaatcagattcagagttaaacartgaagtagcagcaaggaaaagaaacttagctctggatgaggctgggcagagatctaccatgtaaaatgttgtagagatagagccatataacgtcacgttt

SEQ ID NO: 910 - DNA, 201 bp, Homo sapiens
accgagaggggcttggctgggatgggagcgcactagagtttaactggcacccagtgctcatggtcaccggcttcgtcttcatccagggcatcgccatcatsgtctacagactgccgtggacctggaaatgcagcaagctcctgatgaaatccatccatgcagggttaaatgcagttgctgccattcttgcaattatctctg

SEQ ID NO: 911 - DNA, 201 bp, Homo sapiens
gttggactgatagctgtcatatgctatttgttacagcttctttcaggtttttcagtctttctgcttccatgggctccgctttctctccgagcatttctcaygcccatacatgtttattctggaattgtcatctttggaacagtgattgcaacagcacttatgggattgacagagaaactgattttttccctgagagatcct

SEQ ID NO: 912 - DNA, 201 bp, Homo sapiens
cttctcctattagccatatgataattgggctatgtagtatcaatatttactttaatcacaaaggatggtttcttgaaataatttgtattgattgaggcctrtgaactgacctgaattggaaaggatgtgattaatataaataatagcagatataaattgtggttatgttacctttatcttgttgaggaccacaacattagc

SEQ ID NO: 913 - DNA, 201 bp, Homo sapiens
aaaggatggtttcttgaaataatttgtattgattgaggcctatgaactgacctgaattggaaaggatgtgattaatataaataatagcagatataaattgkggttatgttacctttatcttgttgaggaccacaacattagcacggtgccttgtgcagaatagatactcaatatgtgaatatgtgtctactagtagttaat

SEQ ID NO: 914 - DNA, 201 bp, Homo sapiens
gatataaattgtggttatgttacctttatcttgttgaggaccacaacattagcacggtgccttgtgcagaatagatactcaatatgtgaatatgtgtctaytagtagttaattggataaactggcagcatccctggcctgttgtcatgcagtcatttcctgttaattctgggagacaatgatttcacaactagagggaagc

SEQ ID NO: 915 - DNA, 201 bp, Homo sapiens
gtgtctactagtagttaattggataaactggcagcatccctggcctgttgtcatgcagtcatttcctgttaattctgggagacaatgatttcacaactagmgggaagcagtcctaaaagtttaaaatccgataaggaatatctgggacagggtttagatcatgactctacacagataccatgatgagagtatattaaagaa

SEQ ID NO: 916 - DNA, 201 bp, Homo sapiens
aaattgtccctggagactagggtttatgttagggtattgatagattagagcaggtggttgaagagatcttctctggtcagacttggaagaatttccaaaastgaagttagccccaagacttccctagggttgatgtactttatgatccagatgctaaacttcttagaatgaaaatatgcttcaacacttaagtagcataca

SEQ ID NO: 917 - DNA, 201 bp, Homo sapiens
agctatttttgtcttgtactactttgacccacccctgaataaacctcaattgctggagtggggtgtagttattaaagggatgctttttaccttttgctgtytgctgtggcagattccccagataaccaaggaaaaggggccacccatacctggaaataggccatagggcccctactactgccaacaagccatggcctacct

SEQ ID NO: 918 - DNA, 201 bp, Homo sapiens
tggcagattccccagataaccaaggaaaaggggccacccatacctggaaataggccatagggcccctactactgccaacaagccatggcctaccttgacamttgtttgatcttaaaattgtgtcttggtaacaaaagatttggacaggcatatctgtagctttcaagttaattaattgcaatatttttttcttcaggattt

SEQ ID NO: 919 - DNA, 201 bp, Homo sapiens
tttttatggaattttaggggatattttgaacttgggttctcagtagtgaattgagacttggaggtgacttttcatgtttggagtatcatctctgtctgggmtctgggctgacaaattaaaacctagagtagtgcttatgctgaaatgatacttttcattttttggttgatttttttgccttcccttcaattttaaactgaa

SEQ ID NO: 920 - DNA, 201 bp, Homo sapiens
attttgaacttgggttctcagtagtgaattgagacttggaggtgacttttcatgtttggagtatcatctctgtctgggatctgggctgacaaattaaaacytagagtagtgcttatgctgaaatgatacttttcattttttggttgatttttttgccttcccttcaattttaaactgaagcattttaatgtgggtagaaac

SEQ ID NO: 921 - DNA, 201 bp, Homo sapiens
caaattaaaacctagagtagtgcttatgctgaaatgatacttttcattttttggttgatttttttgccttcccttcaattttaaactgaagcattttaatrtgggtagaaactctacaccaaatacactaaacattttggtgcttagtggatttctttttaggtaactggtacttacttccaaagactgaatacaagccac

SEQ ID NO: 922 - DNA, 201 bp, Homo sapiens
gtaactggtacttacttccaaagactgaatacaagccacactccatcatatcccttaaacttcatgaaaaaccattcaagatccccttgctgcaacactgktctcttcttctctactaaattctatttccaaaattggtaatagagccagaaggatccccagtacccagccctctgcctggcacaaactggtagcacaatt

SEQ ID NO: 923 - DNA, 201 bp, Homo sapiens
tgctgcaacactgttctcttcttctctactaaattctatttccaaaattggtaatagagccagaaggatccccagtacccagccctctgcctggcacaaastggtagcacaattaaattcagtatgggtggagcatggtacagtcttggtgccatagaaggagtagttgcatagtcacacatcatttgataagttggatgt

SEQ ID NO: 924 - DNA, 201 bp, Homo sapiens
ccattacatagaggaacacaaaattccagggtttttggaggaagggattagatagtgactaagccgccagaattgaggtggccattcctttttgtataggstaagaaacaggttatcagtgaaaagttaattatggctttggcactagaatagcactgttgcaaagtatttaagcaccccccatctcagccctttatttta

SEQ ID NO: 925 - DNA, 201 bp, Homo sapiens
gaaaagttaattatggctttggcactagaatagcactgttgcaaagtatttaagcaccccccatctcagccctttattttatctttcatgtgggctaatgrgaggataatcttacagatattataggaatttcttttctatctttatgaaaacaacgtatataaaatatatctagaaaacctttgtttgagactcttattt

SEQ ID NO: 926 - DNA, 201 bp, Homo sapiens
ctgccctctaaagcactttctttcctttacttgcgtggtttcatgtaagctgtgctgtttagaaacaacatctcagactttacaaagaaatgacaaagaargcaattgcactttttaagggatatcgacaagcagtttctgttttctaaaggacaaaatacagagtgtgtgtcatttttaattagattctttcccctgctg

SEQ ID NO: 927 - DNA, 201 bp, Homo sapiens
gtgcagcactgattgaccacagttgccaatctaaaagcacaaagacagaagtaaagctttatgctaattttatttcaatatgatagaaaatttatcttggyatgtccttttttagataactccagcaggaaactgtaactgctatgtctttaggaaaatgtagaagaaagaacattattattctttaattcctacaaggta

SEQ ID NO: 928 - DNA, 201 bp, Homo sapiens
atgatagaaaatttatcttggtatgtccttttttagataactccagcaggaaactgtaactgctatgtctttaggaaaatgtagaagaaagaacattattrttctttaattcctacaaggtactcgaaaaccttaagtgaaaaagatttctatctttttatcttagcgcatttatggaaaaaatattaactatcctgaata

SEQ ID NO: 929 - DNA, 201 bp, Homo sapiens
gtccttttttagataactccagcaggaaactgtaactgctatgtctttaggaaaatgtagaagaaagaacattattattctttaattcctacaaggtactygaaaaccttaagtgaaaaagatttctatctttttatcttagcgcatttatggaaaaaatattaactatcctgaatattttataattttgtaggaaaaata

SEQ ID NO: 930 - DNA, 201 bp, Homo sapiens
gtctttaggaaaatgtagaagaaagaacattattattctttaattcctacaaggtactcgaaaaccttaagtgaaaaagatttctatctttttatcttagygcatttatggaaaaaatattaactatcctgaatattttataattttgtaggaaaaatatgcatctattttttcttgacttcttttatatagtaataaaag

SEQ ID NO: 931 - DNA, 191 bp, Homo sapiens
aacattattattctttaattcctacaaggtactcgaaaaccttaagtgaaaaagatttctatctttttatcttagcgcatttatggaaaaaatattaactrtcctgaatattttataattttgtaggaaaaatatgcatctattttttcttgacttcttttatatagtaataaaagttattttggaagctc

SEQ ID NO: 932 - DNA, 201 bp, Homo sapiens
ggagaagcaggaagtggtgaagacgcacctgcgggacatgatcatcctacccgagatggtgggcagcatggtgggcgtctacaacggcaagaccttcaacyaggtggagatcaagcccgagatgatcggccactacctgggcgagttctccatcacctacaagcccgtaaagcacggccggcccggcatcggggccaccca

SEQ ID NO: 933 - DNA, 201 bp, Homo sapiens
cgccagcggcggcggctgaaccggggcctgcggcggaagcagcactccctgctgaagcgcctgcgcaaggccaagaaggaggcgccgcccatggagaagcmggaagtggtgaagacgcacctgcgggacatgatcatcctacccgagatggtgggcagcatggtgggcgtctacaacggcaagaccttcaaccaggtggag

SEQ ID NO: 934 - DNA, 201 bp, Homo sapiens
taccgcggcgtggacctggaccagctgctggacatgtcctacgagcagctggagcagccgatgcagctgtacagtgcgcgccagcggcggcggctgaaccsgggcctgcggcggaagcagcactccctgctgaagcgcctgcgcaaggccaagaaggaggcgccgcccatggagaagcaggaagtggtgaagacgcacctg

SEQ ID NO: 935 - DNA, 201 bp, Homo sapiens
gaagtagagcagaagaagaagcggaccttccgcaagttcacctaccgcggcgtggacctggaccagctgctggacatgtcctacgagcagctggagcagcygatgcagctgtacagtgcgcgccagcggcggcggctgaaccggggcctgcggcggaagcagcactccctgctgaagcgcctgcgcaaggccaagaaggag

SEQ ID NO: 936 - DNA, 201 bp, Homo sapiens
tgagcacccccttactgatcaaccccctctcactgggcagacaccccttgctaggaatccctctttatctaaagaaccccccatcaccaaagagcccactytttcaagatggtcccccaaccctggagaacctggccaggtctccacccaggaagatgagcccttaggcctgcctactcatgtaggggtatttcaggtgcc

SEQ ID NO: 937 - DNA, 201 bp, Homo sapiens
cttgggttagctcccagtgctgctgtgagcaggcctcccaggatgccccgagactctcctccactagtgtatcttcaagtcccattgtgggagcccaacarcatctcatcatggaggatgtcaccctgaccttaccagagtgcatgcacagtgacagcaccagtgacatagcccagtgtggaccctgccaccttcggtttc

SEQ ID NO: 938 - DNA, 201 bp, Homo sapiens
cgcccatctcaccactcaccaaccgagaaaaggtggctgaaatactctttgagcatttccatgtcccagccatgcagacagtgcatcaggccctgctggcsctctatgcttatggacgtaccactgggctggtgctgggcagtggccatggcacttcctatgtggcacccatcctcactggggatctggccccacttgaca

SEQ ID NO: 939 - DNA, 201 bp, Homo sapiens
cctaagcatcagccggttggaggccaagcagcaggagcagctactggccaatgtggtactggacggtggcagcaccctcatgagtggcttccctgagcgcytgagacaggagctgggccctggtgccactgtgctggggtctccccaccgtgcagttgctgcctggcttgggggctccatcatggcatcccggagctcttt

SEQ ID NO: 940 - DNA, 201 bp, Homo sapiens
gcccgagagagcctgctgcgtaagtcacaagtcagcattcgctacaattccatgcctgtcccaggaccaaatggaaccatccttatggagacacacaaaastgttgggcaacagatgctgagctttcctcacctcctgcaaacagtgctgcacatcatccaggtggtcataagctacttcctcatgctcatcttcatgacc

SEQ ID NO: 941 - DNA, 201 bp, Homo sapiens
tgctgactctcaacttttcctggaaaaaatggatcattcccaccatatggggatgagctatatggactccaacagtaccatgcaaccttctcaccatcacscaaccacttcagcctcacactcccatggtggaggagacagcagcatgatgatgatgcctatgaccttctactttggctttaagaatgtggaactactgtt

SEQ ID NO: 942 - DNA, 201 bp, Homo sapiens
ctctatggcgtggccttatcgattgcagtgggaagttgttgaagacttgaagacgtgattcctgctccaatcatcccttcttgctcctctttgtgcacgtacacacacacacacacacacacacacacacacccctgctcaacagaggtttagtttacagtctctgaactaaagtagtaacctcccaaattgttttttcta

SEQ ID NO: 943 - DNA, 201 bp, Homo sapiens
tgatggcagctgagggaaattcttgcccaactaaacccagaactcaaacttaacattagaaaataaggtccagggccggacacagtggcccatgcctgtartcccagcactttggggggccaaggcaggctggatcacctgaggacaggagttcgagaccagtctggccaacatggggaaaccccgtctctactaaaaata

SEQ ID NO: 944 - DNA, 201 bp, Homo sapiens
gggttatgagcctactggattgaggttaaaatccaagaaccaacatttagagctttgtgcttttctctcattccatcactttgtaatgatgatacttaacrtgagcagggtgaatgacaggtactgacgaagtccaacacaaaggtataatacagcctgttgtctaaagccaaggagtcataaaaccatgagaaataaata

SEQ ID NO: 945 - DNA, 201 bp, Homo sapiens
tctcattccatcactttgtaatgatgatacttaacatgagcagggtgaatgacaggtactgacgaagtccaacacaaaggtataatacagcctgttgtctmaagccaaggagtcataaaaccatgagaaataaataggaatcaatagttagtagtgacattggtgctctctagaaatctcagcatgagctgctatagaata

SEQ ID NO: 946 - DNA, 201 bp, Homo sapiens
atttgggaggctgaggcaggaggattgctttagccctggaggtcgaggctgcagtaagccatgattgcgccactgcactcagcccgggtgacaaagcaagmccctgtctcagaaaaaaagaaaattcaaggccagttaagacaaaatgctatgactttgaaattcacagaaagaaataacagtttagattaggtcttcagg

SEQ ID NO: 947 - DNA, 201 bp, Homo sapiens
atttataaacctgttaagagactttaagcatgcttcaagaggcagttgacccactggaatttctataaggctggtacccttcccagagttacagaatcttrggtgccgtctctagtctgtgagggaggaactcccagcatccccattgcccacaaatggaatcctcactgtatccactaggagattagaaattaaggtttc

SEQ ID NO: 948 - DNA, 201 bp, Homo sapiens
aaacctgttaagagactttaagcatgcttcaagaggcagttgacccactggaatttctataaggctggtacccttcccagagttacagaatcttaggtgcygtctctagtctgtgagggaggaactcccagcatccccattgcccacaaatggaatcctcactgtatccactaggagattagaaattaaggtttcttcact

SEQ ID NO: 949 - DNA, 201 bp, Homo sapiens
aacctgttaagagactttaagcatgcttcaagaggcagttgacccactggaatttctataaggctggtacccttcccagagttacagaatcttaggtgccrtctctagtctgtgagggaggaactcccagcatccccattgcccacaaatggaatcctcactgtatccactaggagattagaaattaaggtttcttcacta

SEQ ID NO: 950 - DNA, 201 bp, Homo sapiens
gttgtctgaaattccctttcaggctgtgggtactggtcttgggttctagtcataaggggttccttataaggagcaggcggaggggagtacactttcatgtsatttaattttgatcctgccctctccagctgctccttcaaaagatacatcaaaagatagaaactctgggctgggcacagtggctcacacactttgggaggc

SEQ ID NO: 951 - DNA, 201 bp, Homo sapiens; identical to SEQ ID NO: 940

SEQ ID NO: 952 - DNA, 201 bp, Homo sapiens; identical to SEQ ID NO: 941

SEQ ID NO: 953 - DNA, 201 bp, Homo sapiens; identical to SEQ ID NO: 942

SEQ ID NO: 954 - DNA, 201 bp, Homo sapiens
cccaactaaacccagaactcaaacttaacattagaagcgggtggatcacttgaggtcaggagttcaagaccagcctggccaacatggtgaaaccccgtctstactaaaaatacaaaaattagccggcgcatggtggtgggtgcctgtaatcccagctactctgcaggctgaggcaggagaatcacttgaacctaggaggcg

SEQ ID NO: 955 - DNA, 201 bp, Homo sapiens
ccagaactcaaacttaacattagaagcgggtggatcacttgaggtcaggagttcaagaccagcctggccaacatggtgaaaccccgtctctactaaaaatmcaaaaattagccggcgcatggtggtgggtgcctgtaatcccagctactctgcaggctgaggcaggagaatcacttgaacctaggaggcggaggttgcagt

SEQ ID NO: 956 - DNA, 201 bp, Homo sapiens; identical to SEQ ID NO: 940

SEQ ID NO: 957 - DNA, 201 bp, Homo sapiens
tgctgactctcaacttttcctggaaaaaatggatcattcccaccatatggggatgagctatatggactccaacagtaccatgcaaccttctcaccatcacscaaccacttcagcctcacactcccatggtggaggagacagcagcatgatgatgatggtgacctatgaccttctactttggctttaagaatgtggaactac

SEQ ID NO: 958 - DNA, 201 bp, Homo sapiens; identical to SEQ ID NO: 942

SEQ ID NO: 959 - DNA, 201 bp, Homo sapiens; identical to SEQ ID NO: 954

SEQ ID NO: 960 - DNA, 201 bp, Homo sapiens; identical to SEQ ID NO: 955

SEQ ID NO: 961 - DNA, 201 bp, Homo sapiens; identical to SEQ ID NO: 940

SEQ ID NO: 962 - DNA, 201 bp, Homo sapiens; identical to SEQ ID NO: 941

SEQ ID NO: 963 - DNA, 201 bp, Homo sapiens; identical to SEQ ID NO: 942

SEQ ID NO: 964 - DNA, 201 bp, Homo sapiens; identical to SEQ ID NO: 943

SEQ ID NO: 965 - DNA, 201 bp, Homo sapiens; identical to SEQ ID NO: 944

SEQ ID NO: 966 - DNA, 201 bp, Homo sapiens; identical to SEQ ID NO: 945

SEQ ID NO: 967 - DNA, 201 bp, Homo sapiens; identical to SEQ ID NO: 946

SEQ ID NO: 968 - DNA, 201 bp, Homo sapiens; identical to SEQ ID NO: 947

SEQ ID NO: 969 - DNA, 201 bp, Homo sapiens; identical to SEQ ID NO: 948

SEQ ID NO: 970 - DNA, 201 bp, Homo sapiens; identical to SEQ ID NO: 949

SEQ ID NO: 971 - DNA, 201 bp, Homo sapiens; identical to SEQ ID NO: 950

SEQ ID NO: 972 - DNA, 201 bp, Homo sapiens
cactgacagttgccagggtgacagtggagggcctctggtttgcttcgagaaggacaaatacattttacaaggagtcacttcttggggtcttggctgtgcaygccccaataagcctggtgtctatgctcgtgtttcaaggtttgttacttggattgagggaatgatgagaaataattaattggacgggagacagagtgaagc

SEQ ID NO: 973 - DNA, 201 bp, Homo sapiens
ctgctgctcactgcttgaagaagtcctcaaggccttcatcctacaaggtcatcctgggtgcacaccaagaagtgaacctcgaatctcatgttcaggaaatrgaagtgtctaggctgttcttggagcccacacaagcagatattgccttgctaaagctaagcaggcctgccgtcatcactgacaaagtaatgccagcttgtc

SEQ ID NO: 974 - DNA, 201 bp, Homo sapiens
accgatccgtgtgtgaggtgggagtactgcaatctgacacaatgctcagaaacagaatcaggtgtcctagagactcccactgttgttccagttccaagcayggaggctcattctgaagcagcaccaactgagcaaacccctgtggtccggcagtgctaccatggtaatggccagagttatcgaggcacattctccaccact

SEQ ID NO: 975 - DNA, 201 bp, Homo sapiens
tgtttgggaatgggaaaggataccggggcaagaaggcaaccactgttactgggacgccatgccaggaatgggctgcccaggagccccatagacacagcacrttcattccagggacaaataaatgggcaggtctggaaaaaaattactgccgtaaccctgatggtgacatcaatggtccctggtgctacacaatgaatccaa

SEQ ID NO: 976 - DNA, 201 bp, Homo sapiens
agggcctccttctgaacaagactgtatgtttgggaatgggaaaggataccggggcaagaaggcaaccactgttactgggacgccatgccaggaatgggctkcccaggagccccatagacacagcacgttcattccagggacaaataaatgggcaggtctggaaaaaaattactgccgtaaccctgatggtgacatcaatgg

SEQ ID NO: 977 - DNA, 201 bp, Homo sapiens
ctgtggtcgctcctccgactgtcatccaggttccaagcctagggcctccttctgaacaagactgtatgtttgggaatgggaaaggataccggggcaagaargcaaccactgttactgggacgccatgccaggaatgggctgcccaggagccccatagacacagcacgttcattccagggacaaataaatgggcaggtctgg

SEQ ID NO: 978 - DNA, 201 bp, Homo sapiens
agtactgcaacctgacgcgatgctcagacacagaagggactgtggtcgctcctccgactgtcatccaggttccaagcctagggcctccttctgaacaagaytgtatgtttgggaatgggaaaggataccggggcaagaaggcaaccactgttactgggacgccatgccaggaatgggctgcccaggagccccatagacaca

SEQ ID NO: 979 - DNA, 201 bp, Homo sapiens
gttacaccatggatcccagtgtcaggtgggagtactgcaacctgacacaatgcctggtgacagaatcaagtgtccttgcaactctcacggtggtcccagayccaagcacagaggcttcttctgaagaagcaccaacggagcaaagccccggggtccaggattgctaccatggtgatggacagagttatcgaggctcattct

SEQ ID NO: 980 - DNA, 201 bp, Homo sapiens
ctttttgactactgtgatatccctctctgtgcatcctcttcatttgattgtgggaagcctcaagtggagccgaagaaatgtcctggaagcattgtaggggkgtgtgtggcccacccacattcctggccctggcaagtcagtctcagaacaaggtttggaaagcacttctgtggaggcaccttaatatccccagagtgggtg

SEQ ID NO: 981 - DNA, 201 bp, Homo sapiens
aaactttttgactactgtgatatccctctctgtgcatcctcttcatttgattgtgggaagcctcaagtggagccgaagaaatgtcctggaagcattgtagsggggtgtgtggcccacccacattcctggccctggcaagtcagtctcagaacaaggtttggaaagcacttctgtggaggcaccttaatatccccagagtgg

SEQ ID NO: 982 - DNA, 201 bp, Homo sapiens
tactccaccactgtcacaggaagaacttgccaagcttggtcatctatgacaccacaccagcatagtcggaccccagaaaactacccaaatgctggcctgascaggaactactgcaggaatccagatgctgagattcgcccttggtgttacaccatggatcccagtgtcaggtgggagtactgcaacctgacacaatgcctg

SEQ ID NO: 983 - DNA, 201 bp, Homo sapiens
tcccagtgtcagatgggagtactgcaacctgacgcaatgtccagtgatggaatcaactctcctcacaactcccacggtggtcccagttccaagcacagagsttccttctgaagaagcaccaactgaaaacagcactggggtccaggactgctaccgaggtgatggacagagttatcgaggcacactctccaccactatcac

SEQ ID NO: 984 - DNA, 201 bp, Homo sapiens
gaatccagatgctgagattcgcccttggtgttataccatggatcccagtgtcagatgggagtactgcaacctgacgcaatgtccagtgatggaatcaactstcctcacaactcccacggtggtcccagttccaagcacagagcttccttctgaagaagcaccaactgaaaacagcactggggtccaggactgctaccgagg

SEQ ID NO: 985 - DNA, 201 bp, Homo sapiens
gtggcctgaccaggaactactgcaggaatccagatgctgagattcgcccttggtgttataccatggatcccagtgtcagatgggagtactgcaacctgacrcaatgtccagtgatggaatcaactctcctcacaactcccacggtggtcccagttccaagcacagagcttccttctgaagaagcaccaactgaaaacagca

SEQ ID NO: 986 - DNA, 1 bp, Homo sapiens
r

SEQ ID NO: 987 - DNA, 201 bp, Homo sapiens
cccagttccaagcacagagcttccttctgaagaagcaccaactgaaaacagcactggggtccaggactgctaccgaggtgatggacagagttatcgaggcmcactctccaccactatcacaggaagaacatgtcagtcttggtcgtctatgacaccacattggcatcggaggatcccattatactatccaaatgctggcct

SEQ ID NO: 988 - DNA, 201 bp, Homo sapiens; identical to SEQ ID NO: 987

SEQ ID NO: 989 - DNA, 201 bp, Homo sapiens; identical to SEQ ID NO: 987

SEQ ID NO: 990 - DNA, 201 bp, Homo sapiens
ggattgctaccatggtgatggacggagttatcgaggcatatcctccaccactgtcacaggaaggacctgtcaatcttggtcatctatgataccacactggyatcagaggaccccagaaaactacccaaatgctggcctgaccgagaactactgcaggaatccagattctgggaaacaaccctggtgttacacaaccgatcc

SEQ ID NO: 991 - DNA, 201 bp, Homo sapiens
gagcaaagccccggggtccaggattgctaccatggtgatggacagagttatcgaggctcattctctaccactgtcacaggaaggacatgtcagtcttggtyctctatgacaccacactggcatcagaggacaacagaatattatccaaatggtggcctgaccaggaactactgcaggaatccagatgctgagattagtcct

SEQ ID NO: 992 - DNA, 201 bp, Homo sapiens
cacaactcccacggtggtcccagttccaagcacagagcttccttctgaagaagcaccaactgaaaacagcactggggtccaggactgctaccgaggtgatrgacagagttatcgaggcacactctccaccactatcacaggaagaacatgtcagtcttggtcgtctatgacaccacattggcatcggaggatcccattata

SEQ ID NO: 993 - DNA, 201 bp, Homo sapiens
aactcccacagtggccccggttccaagcacagaggctccttctgaacaagcaccacctgagaaaagccctgtggtccaggattgctaccatggtgatggayggagttatcgaggcatatcctccaccactgtcacaggaaggacctgtcaatcttggtcatctatgataccacactggcatcagaggaccccagaaaacta

SEQ ID NO: 994 - DNA, 201 bp, Homo sapiens
ccacagtccaggactgctaccatggtgatggacagagttatcgaggctcattctccaccactgttacaggaaggacatgtcagtcttggtcctctatgacmccacactggcatcagagaaccacagaatactacccaaatggtggcctgaccaggaactactgcaggaatccagatgctgagattcgcccttggtgttata

SEQ ID NO: 995 - DNA, 201 bp, Homo sapiens
caccggcatcagaggaccccagaaaactacccaaatgatggcctgacaatgaactactgcaggaatccagatgccgatacaggcccttggtgttttaccayggaccccagcatcaggtgggagtactgcaacctgacgcgatgctcagacacagaagggactgtggtcgctcctccgactgtcatccaggttccaagccta

SEQ ID NO: 996 - DNA, 201 bp, Homo sapiens
tgctaccgaggtgatggacagagttatcgaggcacactctccaccactatcacaggaagaacatgtcagtcttggtcgtctatgacaccacattggcatcrgaggatcccattatactatccaaatgctggcctgaccaggaactactgcaggaatccagatgctgagattcgcccttggtgttacaccatggatcccagt

SEQ ID NO: 997 - DNA, 201 bp, Homo sapiens
cgctgtgcgggaaaagaatccaggcccttccacgcgcgtgtgggtgcgggggccccgaagtgctcgtggttccccgctaggtctccgctggggcaggaacmggaatcatgggtgggaccaccagcacccgccgggtcaccttcgaggcggacgagaatgagaacatcaccgtggtgaagggcatccggctttcggaaaatg

SEQ ID NO: 998 - DNA, 201 bp, Homo sapiens
caaagttcaagcgatatgagtctcatccagtctgtgctgatctgcaggccaaaattcttcagtgttaccgtgagaacacccaccagaccctcaaatgctcygctctggccacccagtatatgcactgtgtcaatcatgccaaacagagcatgcttgagaagggaggataaaaactttcagaatgagcaaaacaccatcaac

SEQ ID NO: 999 - DNA, 201 bp, Homo sapiens
gaagaggtggaagcaaagttcaagcgatatgagtctcatccagtctgtgctgatctgcaggccaaaattcttcagtgttaccgtgagaacacccaccagamcctcaaatgctccgctctggccacccagtatatgcactgtgtcaatcatgccaaacagagcatgcttgagaagggaggataaaaactttcagaatgagca

SEQ ID NO: 1000 - DNA, 201 bp, Homo sapiens
ccgggtcgggtgaaccaatccgggcgccctcgccgaacagaggcgggcagttcgcatcgccgaccaacctgaggcgtttttgttgtggcgcgtgaccggargaggcgggagctcaggaccggcgccttctccttgcttctgggggtcgtggccttgctcccgctgtgcgggaaaagaatccaggcccttccacgcgcgtgt

SEQ ID NO: 1001 - DNA, 201 bp, Homo sapiens; identical to SEQ ID NO: 998

SEQ ID NO: 1002 - DNA, 201 bp, Homo sapiens; identical to SEQ ID NO: 999

SEQ ID NO: 1003 - DNA, 201 bp, Homo sapiens; identical to SEQ ID NO: 997

SEQ ID NO: 1004 - DNA, 201 bp, Homo sapiens
aggtggacgacttgccgagctctcgccggccctggcggggccccatctctcgcaaggccagccagaccagcgtgtacctgcaggagtgggacatccccttygagcaggtagagctgggcgagcccatcgggcagggccgctggggccgggtgcaccgcggccgctggcatggcgaggtggccattcgcctgctggagatgg

SEQ ID NO: 1005 - DNA, 201 bp, Homo sapiens
tcgggctgtcggtgacgcacaggttctccaccaagtcctggctgtcgcaggtctgccacgtgtgccagaagagcatgatatttggagtgaagtgcaagcaytgcaggttgaagtgtcacaacaaatgtaccaaagaagcccctgcctgtagaatatccttcctgccactaactcggcttcggaggacagaatctgtcccct

SEQ ID NO: 1006 - DNA, 201 bp, Homo sapiens
cggcgggaaagtggctcagggccttccacggacaccctctcagcagccagcctgccctggcccccagggagctcccagctgggcagagcaggcaacagcgyccagggcccacgctccatctccgtgtcagctctgcccgcctcagactcccccacccccagcttcagtgagggcctctcagacacctgtattcccctgcac

SEQ ID NO: 1007 - DNA, 201 bp, Homo sapiens
ccctctcagcagccagcctgccctggcccccagggagctcccagctgggcagagcaggcaacagcgcccagggcccacgctccatctccgtgtcagctctkcccgcctcagactcccccacccccagcttcagtgagggcctctcagacacctgtattcccctgcacgccagcggccggctgaccccccgtgccctgcaca

SEQ ID NO: 1008 - DNA, 201 bp, Homo sapiens
ccagggcccacgctccatctccgtgtcagctctgcccgcctcagactcccccacccccagcttcagtgagggcctctcagacacctgtattcccctgcacrccagcggccggctgaccccccgtgccctgcacagcttcatcaccccgcccaccacaccccagctgcgacggcacaccaagctgaagccaccacggacgcc

SEQ ID NO: 1009 - DNA, 201 bp, Homo sapiens
gcaccattaggccttctacttgtgtccatttgaagcaggaggggctggatttggaaaagtctttgaagtgagagcaccacgcttgtcttcgttagaaactsttaactgcagaaaaaagttccagatggcaagggagcccttaagtggagattaggttgcattagactccaaaaccagaaaggaaaaagggtgatgggagtg

SEQ ID NO: 1010 - DNA, 201 bp, Homo sapiens
tccagttaagacctgcctagcagagccccagtctccagccccttccctagcaccagagtctggtcaaaatgccacagaaaatgagctgctctgccagcaarctgtggagctgcctcctctccaggcctggcatcccttggtcagcccctcctgggagggcacagccgtattacagtgccagtgtgcctggccatcagcatc

SEQ ID NO: 1011 - DNA, 201 bp, Homo sapiens
cacctttctattgcaatggtggcctttgtccaggcaagagcaggcctgatggatgtactggtgagccccacagttggatgtcagctcagccgtccaactgrgaggaacagtaggctcagttcctccctgacccctgacaccaggccgcagtgggcatgcacaggcccacagaaagtcagtctgggttttgcttttctcgtg

SEQ ID NO: 1012 - DNA, 201 bp, Homo sapiens
cagtctgggttttgcttttctcgtgagcatcacagttaaagaagcgctcattgagcaactacagtgcacttggtcttctgcaagtgctgggcacctagagrtaggaacagtcatggtccctgctcttaaggaactgatgacctggtggggccctgttgtcttcaaggaacccagaagccactgggccccaaaggtggaact

SEQ ID NO: 1013 - DNA, 112 bp, Homo sapiens
atggatagagcrgcgctgcgcgcggcggcgatgggagagaagaaggagggcggtggcgggggggatgcggcggccgcggagggaggcgcaggggccgcggccagccgggcgc

SEQ ID NO: 1014 - DNA, 201 bp, Homo sapiens
atcagcccaaatgtccagaaaatgatatacgaagttgttgtctagcagaaattaagcagacagaagaaaaatatacagaaactttggagtcaatagaaaartatttcatggcaccactaaaaagatttctgacagcagcagaatttgattcagtattcatcaacattcctgaacttgtaaaacttcatcggaacctaatgc

SEQ ID NO: 1015 - DNA, 201 bp, Homo sapiens
gtaccaagtttttattaactacaaggaaagattggttatttacgggcagtactgcagtggagtggagtcagccatctctagtttagactacatttctaagwcaaaagaagatgtcaaactgaaattagaggaatgttccaaaagagcaaataatgggaaatttactcttcgagacttgcttgtggttcctatgcaacgtgt

SEQ ID NO: 1016 - DNA, 201 bp, Homo sapiens
gaactcctaaacaggtggatccaggtttaccaaagatgcaggtcattaggaactattctggaacaccacccccagctctgcatgaaggaccccctttacasctccaggccggggataccgttgaacttctgaaaggagatgcacacagtctgttttggcagggcagaaatttagcatctggagaggttggattttttccaa

SEQ ID NO: 1017 - DNA, 201 bp, Homo sapiens
actgcgaagaactcctaaacaggtggatccaggtttaccaaagatgcaggtcattaggaactattctggaacaccacccccagctctgcatgaaggacccyctttacagctccaggccggggataccgttgaacttctgaaaggagatgcacacagtctgttttggcagggcagaaatttagcatctggagaggttggatt

SEQ ID NO: 1018 - DNA, 201 bp, Homo sapiens
actgatccgactgagaaggcaaatctgaaactggctcttgatgccatgaaggacttggcacaatatgtgaatgaagtgaaaagagataatgagacccttcrtgaaattaaacagtttcagctatctatagagaatttgaaccaaccagttttgctttttggacgacctcagggagatggtgaaattcgaataaccactcta

SEQ ID NO: 1019 - DNA, 201 bp, Homo sapiens
ttagcattaagtacaataatgaagcaaagcacatcaagattttaacaagagatggcttttttcacattgcagaaaatagaaaatttaaaagtttaatggarcttgtggagtactacaagcatcattctctcaaggaagggttcagaaccttagatacaactctgcagtttccatacaaggagccagaacattcagctggac

SEQ ID NO: 1020 - DNA, 201 bp, Homo sapiens
tggaaaggttatagaaacattatcacgactttctcgaacacctatagcattggccacaggaatcaggcccttcccaacagaagaaagcattaatgatgaaracatctacaaaggccttcctgatttaatagatgaaacccttgtggaagatgaagaagatctctatgactgtgtttatggggaagatgaaggtggagaagt

SEQ ID NO: 1021 - DNA, 201 bp, Homo sapiens
tccatacccaaggacaaaatgggttagaattttattgcaaaacaaaagatttaaagaagaaatggctagaacagtttgaaatggctttgtctaacataagrccagactatgcagactccaatttccacgacttcaagatgcataccttcactcgagtcacatcctgcaaagtctgccagatgctcctgaggggaacatttt

SEQ ID NO: 1022 - DNA, 201 bp, Homo sapiens
gatgtcccagtttctctgtttgaagaacataaggacatttctcacggcctgttgtgagacgtttggaatgaggaaaagtgaacttttcgaggcatttgacytgtttgatgttcgtgactttggaaaggttatagaaacattatcacgactttctcgaacacctatagcattggccacaggaatcaggcccttcccaacaga

SEQ ID NO: 1023 - DNA, 201 bp, Homo sapiens
ttcttatttgatttggcagtgatcgtatgtaagagaaaaggtgataactatgaaatgaaggaaataatagatcttcagcagtacaagatagccaataatcytacaaccgataaagaaaacaaaaagtggtcttatggcttctacctcatccatacccaaggacaaaatgggttagaattttattgcaaaacaaaagattta

SEQ ID NO: 1024 - DNA, 201 bp, Homo sapiens
gtgactttggaaaggttatagaaacattatcacgactttctcgaacacctatagcattggccacaggaatcaggcccttcccaacagaagaaagcattaaygatgaagacatctacaaaggccttcctgatttaatagatgaaacccttgtggaagatgaagaagatctctatgactgtgtttatggggaagatgaaggtg

SEQ ID NO: 1025 - DNA, 201 bp, Homo sapiens
atgggaaatttactcttcgagacttgcttgtggttcctatgcaacgtgttttaaagtaccaccttctcctccaggaactggtcaaacataccactgatccractgagaaggcaaatctgaaactggctcttgatgccatgaaggacttggcacaatatgtgaatgaagtgaaaagagataatgagacccttcgtgaaatta

SEQ ID NO: 1026 - DNA, 201 bp, Homo sapiens
tgtggaagaggatgaataaattcaaatcccgtgttgcaccctgcaccaaaaatttcagagaagggataaatagaagcctgcacagcatcgtgaattaactraagtgtttaaaaagctgcatttctggctgttcaacatcctccctccttagcccctcctaagtcttaatgctgagatttctaaagatgctggtactgacag

SEQ ID NO: 1027 - DNA, 201 bp, Homo sapiens
tcccagcatgacgaaaaattggagttctgccatttgagcagcttactggaaagatccagccttacttgtcttaaattgtccaacaaggtgactcattgccyggcaaacacttttaccctcagatgttactcatgatattataaaatatgaggccagtgctcaggtttgcatcataagtgagctatccctgaagggttttaa

SEQ ID NO: 1028 - DNA, 201 bp, Homo sapiens
ggtgtcttcatattaaaccttcacaaccttcatgatttcataggattattttggaaatatagcacttgactttatgaaaggatctgggctaggtatattargggtagttgccaataacctgaagaagctggcattgtttacagaaacagatcaagggctataatttatgtcattttatagcagcagtatctattaatacat

SEQ ID NO: 1029 - DNA, 201 bp, Homo sapiens
atttcataggattattttggaaatatagcacttgactttatgaaaggatctgggctaggtatattaggggtagttgccaataacctgaagaagctggcatwgtttacagaaacagatcaagggctataatttatgtcattttatagcagcagtatctattaatacatgccttttcctcccatccacctcccccgcacacac

SEQ ID NO: 1030 - DNA, 201 bp, Homo sapiens
ccagagtccccattcaaggcagtcaagttaagacactaacttggccctttcctgatggaaatatttcctccatagcagaagttgtgttctgacaagactgmgagagttacatgttgggaaaaaaaagaagcattaacttagtagaactgaaccaggagcattaagttctgaaattttgaatcatctctgaaatgaagcagg

SEQ ID NO: 1031 - DNA, 201 bp, Homo sapiens
agagtccccattcaaggcagtcaagttaagacactaacttggccctttcctgatggaaatatttcctccatagcagaagttgtgttctgacaagactgagwgagttacatgttgggaaaaaaaagaagcattaacttagtagaactgaaccaggagcattaagttctgaaattttgaatcatctctgaaatgaagcaggtg

SEQ ID NO: 1032 - DNA, 183 bp, Homo sapiens
gttttggaaaatttaaatgctgcagatttgtgtagagttctaataccaaagacagaagtaaatgttttccatatactttgtcttgcctgtatgcagccctygtgtaatacggtgaattagagtggtatttcactttgtattattttgtaaatatgtcaatataataaatagtgactaaattga

SEQ ID NO: 1033 - DNA, 123 bp, Homo sapiens
aatgttttccatatactttgtcttgcctgtatgcagccctcgtgtaatacggtgaattagagtggtatttcactttgtattattttgtaaatatgtcaatrtaataaatagtgactaaattga

SEQ ID NO: 1034 - DNA, 201 bp, Homo sapiens; identical to SEQ ID NO: 1016

SEQ ID NO: 1035 - DNA, 201 bp, Homo sapiens; identical to SEQ ID NO: 1017

SEQ ID NO: 1036 - DNA, 201 bp, Homo sapiens; identical to SEQ ID NO: 1019

SEQ ID NO: 1037 - DNA, 201 bp, Homo sapiens; identical to SEQ ID NO: 1026

SEQ ID NO: 1038 - DNA, 201 bp, Homo sapiens; identical to SEQ ID NO: 1027

SEQ ID NO: 1039 - DNA, 201 bp, Homo sapiens; identical to SEQ ID NO: 1028

SEQ ID NO: 1040 - DNA, 201 bp, Homo sapiens; identical to SEQ ID NO: 1029

SEQ ID NO: 1041 - DNA, 201 bp, Homo sapiens; identical to SEQ ID NO: 1030

SEQ ID NO: 1042 - DNA, 201 bp, Homo sapiens; identical to SEQ ID NO: 1031

SEQ ID NO: 1043 - DNA, 183 bp, Homo sapiens; identical to SEQ ID NO: 1032

SEQ ID NO: 1044 - DNA, 123 bp, Homo sapiens; identical to SEQ ID NO: 1033

SEQ ID NO: 1045 - DNA, 201 bp, Homo sapiens
cagcaaggtctgcagccaaatctcctcccctttccacagcaacaaagcggtctcctcctcccacagactgggccgggactggcatcccaggcatttgggcrccctgggctgccaggatcctctttagaaccccacctggaagcatcccagcatctcccagtgcccaagcatctacccagctctggaggggccgatgagccc

SEQ ID NO: 1046 - DNA, 201 bp, Homo sapiens
agaaacggaccagcatcgagaccaacatccgcctgactctggagaagaggtttcaagataacccaaaacccagctcggaggagatctccatgattgcagarcagttgtccatggagaaggaggtggtgagggtctggttctgcaaccgacgccaaaaggagaagcgaatcaactgccctgtggccacacccatcaaaccac

SEQ ID NO: 1047 - DNA, 201 bp, Homo sapiens
gtatctccctcagggtctctgggccccctctctgtccctcctgtccacagtaccatgcctggaacagtaacgtcatcctgttcccctgggaacaacagcargccttcatctcctggctcaggactccacgccagcagccccactgcatctcaaaataactccaaagcagcagtgaactccgcctccagttttaactcttca

SEQ ID NO: 1048 - DNA, 201 bp, Homo sapiens
tacacagcccctcctaggagcttaccattttcaccttccttgcctatgcccttgccttctagttccaaatattttagccagcttcactgtggcaatagtctttcagagaaaagacttcttgctgttattctccaactcatccgtgggcttctggggacagccatttggctggggtgccaaacaccagaaggggagataata

SEQ ID NO: 1049 - DNA, 201 bp, Homo sapiens
acacagcccctcctaggagcttaccattttcaccttccttgcctatgcccttgccttctagttccaaatattttagccagcttcactgtggcaatagtctttcagagaaaagacttcttgctgttattctccaactcatccgtgggcttctggggacagccatttggctggggtgccaaacaccagaaggggagataatag

SEQ ID NO: 1050 - DNA, 201 bp, Homo sapiens
ttttttttttgagacagtcttgctccagcccaggctggagtgcagtggcatgatcttggctcactgcatgctctgccacttgggttcaagcgattctcctrcctcagcctctcaagtagcgggattacaggcgcccaccaccaaaaattagcccagctaatttttgtatttttagtagagatggggtttcaccatgttggt

SEQ ID NO: 1051 - DNA, 201 bp, Homo sapiens
acttccagcaacaatccttgagtctgggactgccctggcctaagatgggccagtttctatcttcgactttcttggagggctcaccggccacagtgtggcaygataagctttgtgacggtgaacgcagaggagcaagagaagcagttcgtatcttccaggaccaagcaaaagctaaagaagaaaaactagagaagtgtggtg

SEQ ID NO: 1052 - DNA, 201 bp, Homo sapiens
atgtaagtttgcatttgactacattggtaaggtgttttcccccattgaaactaatattttctattttcaagaaaaaagcagcaagcctcggcagcagtcartcctccagaacctatgctggtggaacagcctcggccaccaaggtgtcagcttcctctggtgcaaccagcaagtcttccagtatgaatcccacagaaacca

SEQ ID NO: 1053 - DNA, 201 bp, Homo sapiens
acatagaggaattgggtaaaagagaagtcacaattcctccaaaatatagggaactattggctaaaaaggaagggatcacagggcctcctgcagactcttcraaacccatagggccagatgatgctatagacgccttgtcatctgacttcacctgtgggtcgcctacagctgctggaaagaaaactgaaaaagaggaatcta

SEQ ID NO: 1054 - DNA, 201 bp, Homo sapiens
ccaaaagagtctaaggaacagcttccacccatgagtgaagacttccttctggatgctttgtctgaggacttctctggtccacaaaatgcttcatctcttaratttgaagatgctaaacttgctgctgccatctctgaagtggtttcccaaaccccagcttcaacgacccaagctggagccccaccccgtgatacctcgcag

SEQ ID NO: 1055 - DNA, 201 bp, Homo sapiens
cagatgagaacaaaccaatggaagataaagtaaaggaaaaagctaaagctgaacatagagacaagcttggagaaagagatgacactatcccacctgaatayagacatctcctggatgataatggacaggacaaaccagtgaagccacctacaaagaaatcagaggattcaaagaaacctgcagatgaccaagaccccattg

SEQ ID NO: 1056 - DNA, 201 bp, Homo sapiens
ccacccatgagtgaagacttccttctggatgctttgtctgaggacttctctggtccacaaaatgcttcatctcttaaatttgaagatgctaaacttgctgytgccatctctgaagtggtttcccaaaccccagcttcaacgacccaagctggagccccaccccgtgatacctcgcagagtgacaaagacctcgatgatgcc

SEQ ID NO: 1057 - DNA, 201 bp, Homo sapiens
gattttgaccggtctgaatgtaaagagaaaccatctaagccaactgaaaagacagaagaatctaaggccgctgctccagctcctgtgtcggaggctgtgtstcggacctccatgtgtagtatacagtcagcaccccctgagccggctaccttgaagggcacagtgccagatgatgctgtagaagccttggctgatagcctg

SEQ ID NO: 1058 - DNA, 201 bp, Homo sapiens
ccttgagtctgggactgccctggcctaagatgggccagtttctatcttcgactttcttggagggctcaccggccacagtgtggcacgataagctttgtgayggtgaacgcagaggagcaagagaagcagttcgtatcttccaggaccaagcaaaagctaaagaagaaaaactagagaagtgtggtgaggatgatgaaacaa

SEQ ID NO: 1059 - DNA, 201 bp, Homo sapiens
taaagatggaaaaccactattgccagagcctgaagaaaaacccaagcctcggagtgaatcagaactcattgatgaactttcagaagattttgaccggtctraatgtaaagagaaaccatctaagccaactgaaaagacagaagaatctaaggccgctgctccagctcctgtgtcggaggctgtgtgtcggacctccatgtg

SEQ ID NO: 1060 - DNA, 201 bp, Homo sapiens
ataaagatggaaaaccactattgccagagcctgaagaaaaacccaagcctcggagtgaatcagaactcattgatgaactttcagaagattttgaccggtcwgaatgtaaagagaaaccatctaagccaactgaaaagacagaagaatctaaggccgctgctccagctcctgtgtcggaggctgtgtgtcggacctccatgt

SEQ ID NO: 1061 - DNA, 201 bp, Homo sapiens; identical to SEQ ID NO: 1056

SEQ ID NO: 1062 - DNA, 201 bp, Homo sapiens
atgatatctaaaaagcagaatgtgcagagtcttttctttgccaagcaaaacagtttccaccacatgtgtgctgacttgcagtatgttcccagcaggatagrcaattcctggccaagaaaacaaaaatagatgccagaatgatctaatctaatctaatttcccttggccacatgaacatgaatgaatgacggactcaccatt

SEQ ID NO: 1063 - DNA, 201 bp, Homo sapiens
cccatgagcatgtcagtgaaaaaaccagtgaatcgccttccaaaccaggagaaaagaaaggatcagatgagaaaaaagcagcaagcctcggcagcagtcartcctccagaacctatgctggtggaacagcctcggccaccaaggtgtcagcttcctctggtgcaaccagcaagtcttccagtatgaatcccacagaaacca

SEQ ID NO: 1064 - DNA, 201 bp, Homo sapiens
ccaaaagagtctaaggaacagcttccacccatgagtgaagacttccttctggatgctttgtctgaggacttctctggtccacaaaatgcttcatctcttaratttgaagatgctaaacttgctgctgccatctctgaagtggtttcccaaaccccagcttcaacgacccaagctggagccccaccccgtgatacctcgagt

SEQ ID NO: 1065 - DNA, 201 bp, Homo sapiens; identical to SEQ ID NO: 1055

SEQ ID NO: 1066 - DNA, 201 bp, Homo sapiens
ccacccatgagtgaagacttccttctggatgctttgtctgaggacttctctggtccacaaaatgcttcatctcttaaatttgaagatgctaaacttgctgytgccatctctgaagtggtttcccaaaccccagcttcaacgacccaagctggagccccaccccgtgatacctcgagtgacaaagacctcgatgatgccttg

SEQ ID NO: 1067 - DNA, 201 bp, Homo sapiens; identical to SEQ ID NO: 1057

SEQ ID NO: 1068 - DNA, 201 bp, Homo sapiens; identical to SEQ ID NO: 1059

SEQ ID NO: 1069 - DNA, 201 bp, Homo sapiens; identical to SEQ ID NO: 1060

SEQ ID NO: 1070 - DNA, 201 bp, Homo sapiens; identical to SEQ ID NO: 1066

SEQ ID NO: 1071 - DNA, 201 bp, Homo sapiens; identical to SEQ ID NO: 1053

SEQ ID NO: 1072 - DNA, 201 bp, Homo sapiens; identical to SEQ ID NO: 1054

SEQ ID NO: 1073 - DNA, 201 bp, Homo sapiens; identical to SEQ ID NO: 1055

SEQ ID NO: 1074 - DNA, 201 bp, Homo sapiens; identical to SEQ ID NO: 1056

SEQ ID NO: 1075 - DNA, 201 bp, Homo sapiens; identical to SEQ ID NO: 1057

SEQ ID NO: 1076 - DNA, 201 bp, Homo sapiens; identical to SEQ ID NO: 1059

SEQ ID NO: 1077 - DNA, 201 bp, Homo sapiens; identical to SEQ ID NO: 1060

SEQ ID NO: 1078 - DNA, 201 bp, Homo sapiens; identical to SEQ ID NO: 1056

SEQ ID NO: 1079 - DNA, 201 bp, Homo sapiens
tatatttgataaagtttcttaaagcaacaccaaaaaaacaaaagaaaagctaagtgaatttttgcacattctacacacagtgcctgtaaatctcatttgtyttttcagtttgcccttaattttttttgttagtgtttagaaaacaatgttttaaacattcttcagtgttctgatttcttattaccccctttcctcttgggc

SEQ ID NO: 1080 - DNA, 201 bp, Homo sapiens
gaaaacaatgttttaaacattcttcagtgttctgatttcttattaccccctttcctcttgggcttttgaactgtatttgatgttgctttgggataatgttwataagtcaaacataagatattgtacattgggcacatatctcctcttgggctgctaataataaattaataacaggtaacctggacaaaccaggaagcacca

SEQ ID NO: 1081 - DNA, 201 bp, Homo sapiens
actgtgttagtaaactgtgctttctattatctatacataaaacctgagcagcaactgtgtctttagagctattgccacattagcctttgcactgtatagcrtctggctttatggaacttaagtttaccaaatataaaaagaaacttctgcttttaaaaaaattatatatatatattaaatttgaaacctgcatttctccca

SEQ ID NO: 1082 - DNA, 201 bp, Homo sapiens
tagagctattgccacattagcctttgcactgtatagcgtctggctttatggaacttaagtttaccaaatataaaaagaaacttctgcttttaaaaaaattwtatatatatattaaatttgaaacctgcatttctcccacagcaatgtaagaagtaggctctgatgtcctaccactttgaatggttttctaatatcttaatg

SEQ ID NO: 1083 - DNA, 201 bp, Homo sapiens
aacataaaacagattgggaatttattgtttccaaagggcatggccttccttagcatcagtttgaagcttttgttatgacttagctgacttgtggcagcggrgcaagcaaaaacaataacactgcttataaatggcaccacatcttgttaacctcccccccaaatactctctgaaagtcatgcacatacctatgggatttta

SEQ ID NO: 1084 - DNA, 201 bp, Homo sapiens
tcccatttgggcagtataggtgtttgcttttttgttttctttttttaagaaaaaccttgaaacctttgacactgacagatgtgtttgcaaggatacggctkcagtattactaatttccatgtgtatctggaagtatttttaaatggcataccaaaatccagaagtttaaagatgcctataaaagtaaacaacatttattta

SEQ ID NO: 1085 - DNA, 201 bp, Homo sapiens; identical to SEQ ID NO: 1056

SEQ ID NO: 1086 - DNA, 201 bp, Homo sapiens; identical to SEQ ID NO: 1063

SEQ ID NO: 1087 - DNA, 201 bp, Homo sapiens; identical to SEQ ID NO: 1054

SEQ ID NO: 1088 - DNA, 201 bp, Homo sapiens; identical to SEQ ID NO: 1055

SEQ ID NO: 1089 - DNA, 201 bp, Homo sapiens; identical to SEQ ID NO: 1057

SEQ ID NO: 1090 - DNA, 201 bp, Homo sapiens; identical to SEQ ID NO: 1059

SEQ ID NO: 1091 - DNA, 201 bp, Homo sapiens; identical to SEQ ID NO: 1060

SEQ ID NO: 1092 - DNA, 201 bp, Homo sapiens; identical to SEQ ID NO: 1056

SEQ ID NO: 1093 - DNA, 201 bp, Homo sapiens; identical to SEQ ID NO: 1062

SEQ ID NO: 1094 - DNA, 201 bp, Homo sapiens; identical to SEQ ID NO: 1066

SEQ ID NO: 1095 - DNA, 201 bp, Homo sapiens; identical to SEQ ID NO: 1051

SEQ ID NO: 1096 - DNA, 201 bp, Homo sapiens; identical to SEQ ID NO: 1053

SEQ ID NO: 1097 - DNA, 201 bp, Homo sapiens; identical to SEQ ID NO: 1064

SEQ ID NO: 1098 - DNA, 201 bp, Homo sapiens; identical to SEQ ID NO: 1055

SEQ ID NO: 1099 - DNA, 201 bp, Homo sapiens; identical to SEQ ID NO: 1057

SEQ ID NO: 1100 - DNA, 201 bp, Homo sapiens; identical to SEQ ID NO: 1058

SEQ ID NO: 1101 - DNA, 201 bp, Homo sapiens; identical to SEQ ID NO: 1059

SEQ ID NO: 1102 - DNA, 201 bp, Homo sapiens; identical to SEQ ID NO: 1060

SEQ ID NO: 1103 - DNA, 201 bp, Homo sapiens; identical to SEQ ID NO: 1066

SEQ ID NO: 1104 - DNA, 201 bp, Homo sapiens; identical to SEQ ID NO: 1062

SEQ ID NO: 1105 - DNA, 201 bp, Homo sapiens; identical to SEQ ID NO: 1066

SEQ ID NO: 1106 - DNA, 201 bp, Homo sapiens; identical to SEQ ID NO: 1051

SEQ ID NO: 1107 - DNA, 201 bp, Homo sapiens; identical to SEQ ID NO: 1053

SEQ ID NO: 1108 - DNA, 201 bp, Homo sapiens; identical to SEQ ID NO: 1064

SEQ ID NO: 1109 - DNA, 201 bp, Homo sapiens; identical to SEQ ID NO: 1055

SEQ ID NO: 1110 - DNA, 201 bp, Homo sapiens; identical to SEQ ID NO: 1057

SEQ ID NO: 1111 - DNA, 201 bp, Homo sapiens; identical to SEQ ID NO: 1058

SEQ ID NO: 1112 - DNA, 201 bp, Homo sapiens; identical to SEQ ID NO: 1059

SEQ ID NO: 1113 - DNA, 201 bp, Homo sapiens; identical to SEQ ID NO: 1060

SEQ ID NO: 1114 - DNA, 201 bp, Homo sapiens; identical to SEQ ID NO: 1066

SEQ ID NO: 1115 - DNA, 201 bp, Homo sapiens; identical to SEQ ID NO: 1056

SEQ ID NO: 1116 - DNA, 201 bp, Homo sapiens; identical to SEQ ID NO: 1063

SEQ ID NO: 1117 - DNA, 201 bp, Homo sapiens; identical to SEQ ID NO: 1053

SEQ ID NO: 1118 - DNA, 201 bp, Homo sapiens; identical to SEQ ID NO: 1054

SEQ ID NO: 1119 - DNA, 201 bp, Homo sapiens; identical to SEQ ID NO: 1055

SEQ ID NO: 1120 - DNA, 201 bp, Homo sapiens; identical to SEQ ID NO: 1056

SEQ ID NO: 1121 - DNA, 201 bp, Homo sapiens; identical to SEQ ID NO: 1062

SEQ ID NO: 1122 - DNA, 201 bp, Homo sapiens; identical to SEQ ID NO: 1056

SEQ ID NO: 1123 - DNA, 201 bp, Homo sapiens; identical to SEQ ID NO: 1063

SEQ ID NO: 1124 - DNA, 201 bp, Homo sapiens; identical to SEQ ID NO: 1053

SEQ ID NO: 1125 - DNA, 201 bp, Homo sapiens; identical to SEQ ID NO: 1054

SEQ ID NO: 1126 - DNA, 201 bp, Homo sapiens; identical to SEQ ID NO: 1055

SEQ ID NO: 1127 - DNA, 201 bp, Homo sapiens; identical to SEQ ID NO: 1057

SEQ ID NO: 1128 - DNA, 201 bp, Homo sapiens; identical to SEQ ID NO: 1059

SEQ ID NO: 1129 - DNA, 201 bp, Homo sapiens; identical to SEQ ID NO: 1060

SEQ ID NO: 1130 - DNA, 201 bp, Homo sapiens; identical to SEQ ID NO: 1056

SEQ ID NO: 1131 - DNA, 201 bp, Homo sapiens; identical to SEQ ID NO: 1079

SEQ ID NO: 1132 - DNA, 201 bp, Homo sapiens; identical to SEQ ID NO: 1080

SEQ ID NO: 1133 - DNA, 201 bp, Homo sapiens; identical to SEQ ID NO: 1081

SEQ ID NO: 1134 - DNA, 201 bp, Homo sapiens; identical to SEQ ID NO: 1082

SEQ ID NO: 1135 - DNA, 201 bp, Homo sapiens; identical to SEQ ID NO: 1083

SEQ ID NO: 1136 - DNA, 201 bp, Homo sapiens; identical to SEQ ID NO: 1084

SEQ ID NO: 1137 - DNA, 201 bp, Homo sapiens; identical to SEQ ID NO: 1056

SEQ ID NO: 1138 - DNA, 201 bp, Homo sapiens; identical to SEQ ID NO: 1063

SEQ ID NO: 1139 - DNA, 201 bp, Homo sapiens; identical to SEQ ID NO: 1053

SEQ ID NO: 1140 - DNA, 201 bp, Homo sapiens; identical to SEQ ID NO: 1054

SEQ ID NO: 1141 - DNA, 201 bp, Homo sapiens; identical to SEQ ID NO: 1055

SEQ ID NO: 1142 - DNA, 201 bp, Homo sapiens; identical to SEQ ID NO: 1057

SEQ ID NO: 1143 - DNA, 201 bp, Homo sapiens; identical to SEQ ID NO: 1059

SEQ ID NO: 1144 - DNA, 201 bp, Homo sapiens; identical to SEQ ID NO: 1060

SEQ ID NO: 1145 - DNA, 201 bp, Homo sapiens; identical to SEQ ID NO: 1056

SEQ ID NO: 1146 - DNA, 201 bp, Homo sapiens; identical to SEQ ID NO: 1062

SEQ ID NO: 1147 - DNA, 201 bp, Homo sapiens; identical to SEQ ID NO: 1066

SEQ ID NO: 1148 - DNA, 201 bp, Homo sapiens; identical to SEQ ID NO: 1051

SEQ ID NO: 1149 - DNA, 201 bp, Homo sapiens; identical to SEQ ID NO: 1063

SEQ ID NO: 1150 - DNA, 201 bp, Homo sapiens; identical to SEQ ID NO: 1064

SEQ ID NO: 1151 - DNA, 201 bp, Homo sapiens; identical to SEQ ID NO: 1055

SEQ ID NO: 1152 - DNA, 201 bp, Homo sapiens; identical to SEQ ID NO: 1057

SEQ ID NO: 1153 - DNA, 201 bp, Homo sapiens; identical to SEQ ID NO: 1058

SEQ ID NO: 1154 - DNA, 201 bp, Homo sapiens; identical to SEQ ID NO: 1059

SEQ ID NO: 1155 - DNA, 201 bp, Homo sapiens; identical to SEQ ID NO: 1060

SEQ ID NO: 1156 - DNA, 201 bp, Homo sapiens; identical to SEQ ID NO: 1066

SEQ ID NO: 1157 - DNA, 201 bp, Homo sapiens; identical to SEQ ID NO: 1062

SEQ ID NO: 1158 - DNA, 201 bp, Homo sapiens; identical to SEQ ID NO: 1056

SEQ ID NO: 1159 - DNA, 201 bp, Homo sapiens; identical to SEQ ID NO: 1053

SEQ ID NO: 1160 - DNA, 201 bp, Homo sapiens; identical to SEQ ID NO: 1054

SEQ ID NO: 1161 - DNA, 201 bp, Homo sapiens; identical to SEQ ID NO: 1055

SEQ ID NO: 1162 - DNA, 201 bp, Homo sapiens; identical to SEQ ID NO: 1057

SEQ ID NO: 1163 - DNA, 201 bp, Homo sapiens; identical to SEQ ID NO: 1059

SEQ ID NO: 1164 - DNA, 201 bp, Homo sapiens; identical to SEQ ID NO: 1060

SEQ ID NO: 1165 - DNA, 201 bp, Homo sapiens; identical to SEQ ID NO: 1056

SEQ ID NO: 1166 - DNA, 201 bp, Homo sapiens; identical to SEQ ID NO: 1062

SEQ ID NO: 1167 - DNA, 201 bp, Homo sapiens; identical to SEQ ID NO: 1056

SEQ ID NO: 1168 - DNA, 201 bp, Homo sapiens; identical to SEQ ID NO: 1055

SEQ ID NO: 1169 - DNA, 201 bp, Homo sapiens; identical to SEQ ID NO: 1054

SEQ ID NO: 1170 - DNA, 201 bp, Homo sapiens; identical to SEQ ID NO: 1057

SEQ ID NO: 1171 - DNA, 201 bp, Homo sapiens; identical to SEQ ID NO: 1059

SEQ ID NO: 1172 - DNA, 201 bp, Homo sapiens; identical to SEQ ID NO: 1060

SEQ ID NO: 1173 - DNA, 201 bp, Homo sapiens; identical to SEQ ID NO: 1056

SEQ ID NO: 1174 - DNA, 201 bp, Homo sapiens; identical to SEQ ID NO: 1079

SEQ ID NO: 1175 - DNA, 201 bp, Homo sapiens; identical to SEQ ID NO: 1080

SEQ ID NO: 1176 - DNA, 201 bp, Homo sapiens; identical to SEQ ID NO: 1081

SEQ ID NO: 1177 - DNA, 201 bp, Homo sapiens; identical to SEQ ID NO: 1082

SEQ ID NO: 1178 - DNA, 201 bp, Homo sapiens; identical to SEQ ID NO: 1083

SEQ ID NO: 1179 - DNA, 201 bp, Homo sapiens; identical to SEQ ID NO: 1084

SEQ ID NO: 1180 - DNA, 201 bp, Homo sapiens; identical to SEQ ID NO: 1056

SEQ ID NO: 1181 - DNA, 201 bp, Homo sapiens; identical to SEQ ID NO: 1063

SEQ ID NO: 1182 - DNA, 201 bp, Homo sapiens; identical to SEQ ID NO: 1053

SEQ ID NO: 1183 - DNA, 201 bp, Homo sapiens; identical to SEQ ID NO: 1055

SEQ ID NO: 1184 - DNA, 201 bp, Homo sapiens; identical to SEQ ID NO: 1054

SEQ ID NO: 1185 - DNA, 201 bp, Homo sapiens; identical to SEQ ID NO: 1057

SEQ ID NO: 1186 - DNA, 201 bp, Homo sapiens; identical to SEQ ID NO: 1059

SEQ ID NO: 1187 - DNA, 201 bp, Homo sapiens; identical to SEQ ID NO: 1060

SEQ ID NO: 1188 - DNA, 201 bp, Homo sapiens; identical to SEQ ID NO: 1056

SEQ ID NO: 1189 - DNA, 201 bp, Homo sapiens; identical to SEQ ID NO: 1079

SEQ ID NO: 1190 - DNA, 201 bp, Homo sapiens; identical to SEQ ID NO: 1080

SEQ ID NO: 1191 - DNA, 201 bp, Homo sapiens; identical to SEQ ID NO: 1081

SEQ ID NO: 1192 - DNA, 201 bp, Homo sapiens; identical to SEQ ID NO: 1082

SEQ ID NO: 1193 - DNA, 201 bp, Homo sapiens; identical to SEQ ID NO: 1083

SEQ ID NO: 1194 - DNA, 201 bp, Homo sapiens; identical to SEQ ID NO: 1084

SEQ ID NO: 1195 - DNA, 201 bp, Homo sapiens; identical to SEQ ID NO: 1056

SEQ ID NO: 1196 - DNA, 201 bp, Homo sapiens; identical to SEQ ID NO: 1053

SEQ ID NO: 1197 - DNA, 201 bp, Homo sapiens; identical to SEQ ID NO: 1055

SEQ ID NO: 1198 - DNA, 201 bp, Homo sapiens; identical to SEQ ID NO: 1054

SEQ ID NO: 1199 - DNA, 201 bp, Homo sapiens; identical to SEQ ID NO: 1057

SEQ ID NO: 1200 - DNA, 201 bp, Homo sapiens; identical to SEQ ID NO: 1059

SEQ ID NO: 1201 - DNA, 201 bp, Homo sapiens; identical to SEQ ID NO: 1060

SEQ ID NO: 1202 - DNA, 201 bp, Homo sapiens; identical to SEQ ID NO: 1056

SEQ ID NO: 1203 - DNA, 201 bp, Homo sapiens; identical to SEQ ID NO: 1079

SEQ ID NO: 1204 - DNA, 153 bp, Homo sapiens
agatggatccccatccatgtacctttgctcaactgtcctcagaccagatccasaattcaccctgctgtttctccatgagtctgacctgcatcaactgcctcccttattctgggattccagttgtggagctcaaggacaagtccattctgggct

SEQ ID NO: 1205 - DNA, 201 bp, Homo sapiens
aagccaggctctttccaacagctgtcacccatgcctctttctatgtttgttatctgtctctaggttctggtaactacttccttcccttgccccttctggcmtagggtgctaccaatccctcctccaaatccaactgtcactagcctcaaagtacttgtagcttcctcaccttactttcaccttaataaatggtccccctac

SEQ ID NO: 1206 - DNA, 201 bp, Homo sapiens
cccttctggcctagggtgctaccaatccctcctccaaatccaactgtcactagcctcaaagtacttgtagcttcctcaccttactttcaccttaataaatrgtccccctactatctctcttcaaagcacccaatttgagtgtgccatctgtttcttgccaggatcctggttggtacatcaaccaagctgcactgatggagg

SEQ ID NO: 1207 - DNA, 201 bp, Homo sapiens
gtcactagcctcaaagtacttgtagcttcctcaccttactttcaccttaataaatggtccccctactatctctcttcaaagcacccaatttgagtgtgccrtctgtttcttgccaggatcctggttggtacatcaaccaagctgcactgatggaggagcactgtgctgaactttaggaatgaagccacagggccctcactg

SEQ ID NO: 1208 - DNA, 201 bp, Homo sapiens
taataaatggtccccctactatctctcttcaaagcacccaatttgagtgtgccatctgtttcttgccaggatcctggttggtacatcaaccaagctgcacwgatggaggagcactgtgctgaactttaggaatgaagccacagggccctcactgcccccatagtcaccttggtcatcttctgcctccctgaaagactaaat

SEQ ID NO: 1209 - DNA, 201 bp, Homo sapiens
ttaggaatgaagccacagggccctcactgcccccatagtcaccttggtcatcttctgcctccctgaaagactaaattcagtcagttcagatacatacacayccagacatgtcagggaaaactccattttgtaaggatctctgcttaaaatgccaaaggtttgaaagttggcaaacacttgagaaaagcacagttctctgtc

SEQ ID NO: 1210 - DNA, 201 bp, Homo sapiens
gccctcactgcccccatagtcaccttggtcatcttctgcctccctgaaagactaaattcagtcagttcagatacatacacatccagacatgtcagggaaamctccattttgtaaggatctctgcttaaaatgccaaaggtttgaaagttggcaaacacttgagaaaagcacagttctctgtcttactcttactctaaactt

SEQ ID NO: 1211 - DNA, 201 bp, Homo sapiens
gcctccctgaaagactaaattcagtcagttcagatacatacacatccagacatgtcagggaaaactccattttgtaaggatctctgcttaaaatgccaaargtttgaaagttggcaaacacttgagaaaagcacagttctctgtcttactcttactctaaacttggagataaatgcatttttaaaattgtgcatgttagag

SEQ ID NO: 1212 - DNA, 201 bp, Homo sapiens
ggaaagccgggcacatagttccccacctgaggagcctgggcctctcaaggaaagtcccggggaagcctttaaggctctgtctgccgtggaagaggagtgtracagcgtgggcagcggcgtgcaggtggtgattgaggagctgcggcagctgggagcagcctcagtggggcctgggcctttgggcttcccagcaactcagag

SEQ ID NO: 1213 - DNA, 201 bp, Homo sapiens
accatcctcattgagaaaggaaagtgagtccagagaagttgatgcttcctacctgttggagcggcccagcagtgtaagcgtggttgttactgccccatccrccatgtccttcagtgccaccattctcttctcccctcccagtggcagcgaggccagatgctgctgctgcgcctgtaagagtgagactaatggaggcaacac

SEQ ID NO: 1214 - DNA, 201 bp, Homo sapiens
gcttggggcctgggctcctctgaccatcctcattgagaaaggaaagtgagtccagagaagttgatgcttcctacctgttggagcggcccagcagtgtaagygtggttgttactgccccatccgccatgtccttcagtgccaccattctcttctcccctcccagtggcagcgaggccagatgctgctgctgcgcctgtaaga

SEQ ID NO: 1215 - DNA, 153 bp, Homo sapiens
ctttttgcacacacacgaatacaaagagccatacgaccttcggatgccggaargtccttctgaatcccttccctgttccttaggttgcactagtcgggggttccatgctggggggcagaaggaatgctctctaccgtctgaaaccgttcatca

SEQ ID NO: 1216 - DNA, 201 bp, Homo sapiens
tcttcatggcttgtttactcttctttcacagaccctacagcttggggcctgggctcctctgaccatcctcattgagaaaggaaagtgagtccagagaagtygatgcttcctacctgttggagcggcccagcagtgtaagcgtggttgttactgccccatccgccatgtccttcagtgccaccattctcttctcccctccca

SEQ ID NO: 1217 - DNA, 201 bp, Homo sapiens
accttcggatgccggaaggtccttctgaatcccttccctgttccttaggttgcactagtcgggggttccatgctggggggcagaaggaatgctctctaccstctgaaaccgttcatcaggaaggccttgatttgtgatgtgctaggagagcacaggatctgcaaatagaaggcacctgtctcccttctgcaggccgaggag

SEQ ID NO: 1218 - DNA, 201 bp, Homo sapiens
cctcagacagactgccttctgctgaagcccagctccttccaccagaactttacaatcctaatttccaagaagaggaagatgagggaggggatgagaatgcmcctggctccccatcttttgaccaaccccacaaaacctgctgtcctgacttgaactcattcattgaaatcaaggtggaaaaggatgaataaaatctacagc

SEQ ID NO: 1219 - DNA, 200 bp, Homo sapiens
gaggagctgcggcagctgggagcagcctcagtggggcctgggcctttgggcttcccagcaactcagagggacatgcggctcccagggtgcacgctggctgcagcgaggcggcccccctgctcaatcctctggtggatgattacgtggcctctgagggtgcagtacagcgagttctggtccctgcttatgccaagcaactc

SEQ ID NO: 1220 - DNA, 201 bp, Homo sapiens
gccaagaataactctggcttccgccatgccccatgtctcagaaataggtggccatggggcttcacaaaataatgagatgctctgtgcagtctgagaaagcraatttgcctcttttcttaacacagtctctactggggaagcagaacactggtgggataaaaacttatctagaaggggagaaactccctccactgtgaacag

SEQ ID NO: 1221 - DNA, 201 bp, Homo sapiens
tcgcacatatatatcgttggcttggccttccaaagcaaagcaaaactaaactctgttgattttgcctgggaatcctcggggcccctagtattggaaacttmtttgaactgtgaggagctgctaatttgcaggtgacatgtgaaagaaatgtaaccgaggccagcagtaactaaaagtcggccaccacccaacgtgtgacgc

SEQ ID NO: 1222 - DNA, 201 bp, Homo sapiens
gccagcagtaactaaaagtcggccaccacccaacgtgtgacgccgatttgtggccactgtgcttataatcgtgtacacacaggtttgtgagcagcagagarcaaaagcaagtaaacaaaaacaagctaaagatggcgtctgacggccttgaaaaagcctcacagtcttgtccctccctgaggaggcccctcccctacctga

SEQ ID NO: 1223 - DNA, 201 bp, Homo sapiens
gagaacaaaagcaagtaaacaaaaacaagctaaagatggcgtctgacggccttgaaaaagcctcacagtcttgtccctccctgaggaggcccctcccctamctgactttttgagtgactgttgtttgcagccaatagtgtccgtgaccctgctccccagccatcgtctaaccgccaatcaccgggagccagaaggcaaacg

SEQ ID NO: 1224 - DNA, 201 bp, Homo sapiens
ctaaagatggcgtctgacggccttgaaaaagcctcacagtcttgtccctccctgaggaggcccctcccctacctgactttttgagtgactgttgtttgcarccaatagtgtccgtgaccctgctccccagccatcgtctaaccgccaatcaccgggagccagaaggcaaacggggcggtgtctccccgcgtgcgcgcggta

SEQ ID NO: 1225 - DNA, 201 bp, Homo sapiens
agccgctcctccggccgctctgctctccgcatccctcgcgggaatgaccccctttacccgggactcccagagcgcactgtatggtagggcacagtggcgaktcaccctgtcccctgaggcctcttgagcagtcgccgatctctgcttcccgcgtcgctgcgatcgcctttcccgtagctgaatcacactgacccatcggaa

SEQ ID NO: 1226 - DNA, 201 bp, Homo sapiens
gcactgtatggtagggcacagtggcgagtcaccctgtcccctgaggcctcttgagcagtcgccgatctctgcttcccgcgtcgctgcgatcgcctttcccrtagctgaatcacactgacccatcggaaacggttctgccctccctggggtccaccttgtcatccttgactaatatttaatcaactaacatttaccaagttc

SEQ ID NO: 1227 - DNA, 201 bp, Homo sapiens; identical to SEQ ID NO: 1212

SEQ ID NO: 1228 - DNA, 201 bp, Homo sapiens; identical to SEQ ID NO: 1213

SEQ ID NO: 1229 - DNA, 201 bp, Homo sapiens; identical to SEQ ID NO: 1214

SEQ ID NO: 1230 - DNA, 201 bp, Homo sapiens
tttaaaaatagagatctgtagcagtgttgggaccctacagcttggggcctgggctcctctgaccatcctcattgagaaaggaaagtgagtccagagaagtygatgcttcctacctgttggagcggcccagcagtgtaagcgtggttgttactgccccatccgccatgtccttcagtgccaccattctcttctcccctccca

SEQ ID NO: 1231 - DNA, 201 bp, Homo sapiens
agccagacagactgccttctgctgaagcccagctccttccaccagaactttacaatcctaatttccaagaagaggaagatgagggaggggatgagaatgcmcctggctccccatcttttgaccaaccccacaaaacctgctgtcctgacttgaactcattcattgaaatcaaggtggaaaaggatgaataaaatctacagc

SEQ ID NO: 1232 - DNA, 200 bp, Homo sapiens; identical to SEQ ID NO: 1219

SEQ ID NO: 1233 - DNA, 201 bp, Homo sapiens; identical to SEQ ID NO: 1220

SEQ ID NO: 1234 - DNA, 201 bp, Homo sapiens; identical to SEQ ID NO: 1212

SEQ ID NO: 1235 - DNA, 201 bp, Homo sapiens; identical to SEQ ID NO: 1213

SEQ ID NO: 1236 - DNA, 201 bp, Homo sapiens; identical to SEQ ID NO: 1214

SEQ ID NO: 1237 - DNA, 201 bp, Homo sapiens; identical to SEQ ID NO: 1230

SEQ ID NO: 1238 - DNA, 201 bp, Homo sapiens; identical to SEQ ID NO: 1218

SEQ ID NO: 1239 - DNA, 200 bp, Homo sapiens; identical to SEQ ID NO: 1219

SEQ ID NO: 1240 - DNA, 201 bp, Homo sapiens; identical to SEQ ID NO: 1220

SEQ ID NO: 1241 - DNA, 201 bp, Homo sapiens; identical to SEQ ID NO: 1212

SEQ ID NO: 1242 - DNA, 201 bp, Homo sapiens; identical to SEQ ID NO: 1213

SEQ ID NO: 1243 - DNA, 201 bp, Homo sapiens; identical to SEQ ID NO: 1214

SEQ ID NO: 1244 - DNA, 201 bp, Homo sapiens
tttacccgggactcccagagcgcactgtatgaccctacagcttggggcctgggctcctctgaccatcctcattgagaaaggaaagtgagtccagagaagtygatgcttcctacctgttggagcggcccagcagtgtaagcgtggttgttactgccccatccgccatgtccttcagtgccaccattctcttctcccctccca

SEQ ID NO: 1245 - DNA, 201 bp, Homo sapiens; identical to SEQ ID NO: 1218

SEQ ID NO: 1246 - DNA, 200 bp, Homo sapiens; identical to SEQ ID NO: 1219

SEQ ID NO: 1247 - DNA, 201 bp, Homo sapiens; identical to SEQ ID NO: 1220

SEQ ID NO: 1248 - DNA, 201 bp, Homo sapiens
tcctgctggtgtggctggtggtcttctgttgcaggattatggccctggccgccgcggccctgctccccaccttccacatggcctccttcttcagcaatgcyctctacaactccttctacctcgccgggggcttcatgataaacttgagcagcctgtggacagtgcccgcgtggatttccaaagtgtccttcctgcggtggt

SEQ ID NO: 1249 - DNA, 201 bp, Homo sapiens
tgggtctaagagagctgcagcccagggtcacagacctgtgggccccatggccgggaaggcggcagaggagagagggctgccgaaaggggccactccccagsatacctcgggcctccaggatagattgttctcctctgaaagtgacaacagcctgtacttcacctacagtggccagcccaacaccctggaggtcagagacct

SEQ ID NO: 1250 - DNA, 154 bp, Homo sapiens
agacactggccctggcaggcagcagctgggtctaagagagctgcagcccagggkcacagacctgtgggccccatggccgggaaggcggcagaggagagagggctgccgaaaggggccactccccaggatacctcgggcctccaggatagattgt

SEQ ID NO: 1251 - DNA, 201 bp, Homo sapiens
tcgggcctccaggatagattgttctcctctgaaagtgacaacagcctgtacttcacctacagtggccagcccaacaccctggaggtcagagacctcaactrccaggtggacctggcctctcaggtcccttggtttgagcagctggctcagttcaagatgccctggacatctcccagctgccagaattcttgtgagctgggc

SEQ ID NO: 1252 - DNA, 201 bp, Homo sapiens
actgtgcgagagaccttggccttcattgcccagatgcggctgcccagaaccttctcccaggcccagcgtgacaaaagggtggaggacgtgatcgcggagcwgcggcttaggcagtgcgctgacacccgcgtgggcaacatgtacgtgcgggggttgtcggggggtgagcgcaggagagtcagcattggggtgcagctcctg

SEQ ID NO: 1253 - DNA, 201 bp, Homo sapiens
gtgcgccagcacaaccagctgctccccaacttgactgtgcgagagaccttggccttcattgcccagatgcggctgcccagaaccttctcccaggcccagcrtgacaaaagggtggaggacgtgatcgcggagctgcggcttaggcagtgcgctgacacccgcgtgggcaacatgtacgtgcgggggttgtcggggggtgag

SEQ ID NO: 1254 - DNA, 201 bp, Homo sapiens
taggcagtgcgctgacacccgcgtgggcaacatgtacgtgcgggggttgtcggggggtgagcgcaggagagtcagcattggggtgcagctcctgtggaacmcaggaatccttattctcgacgaacccacctctgggctcgacagcttcacagcccacaacctggtgaagaccttgtccaggctggccaaaggcaaccggct

SEQ ID NO: 1255 - DNA, 201 bp, Homo sapiens
acctgtgtggaaagcagcgtgaccccactagacaccaactgcctcccgagtcctacgaagatgcctggggcggtgcagcagtttacgacgctgatccgtcrtcagatttccaacgacttccgagacctgcccaccctcctcatccatggggcggaggcctgtctgatgtcaatgaccatcggcttcctctattttggccat

SEQ ID NO: 1256 - DNA, 201 bp, Homo sapiens
atctccaaatgttactcagagagggcaatgctttactatgaactggaagacgggctgtacaccactggtccatatttctttgccaagatcctcggggagcytccggagcactgtgcctacatcatcatctacgggatgcccacctactggctggccaacctgaggccaggcctccagcccttcctgctgcacttcctgctg

SEQ ID NO: 1257 - DNA, 201 bp, Homo sapiens
acaggcgcagcagagagcaggaattggccaccagggagaaggctcagtcactcgcagccctgtttctagaaaaagtgcgtgacttagatgactttctatgraaagcagagacgaaggatcttgacgaggacacctgtgtggaaagcagcgtgaccccactagacaccaactgcctcccgagtcctacgaagatgcctgggg

SEQ ID NO: 1258 - DNA, 201 bp, Homo sapiens
cagctcgcctcagctggtgaggaagtgtgtggcccacgtgcgccagcacaaccagctgctccccaacttgactgtgcgagagaccttggccttcattgccyagatgcggctgcccagaaccttctcccaggcccagcgtgacaaaagggtggaggacgtgatcgcggagctgcggcttaggcagtgcgctgacacccgcgt

SEQ ID NO: 1259 - DNA, 201 bp, Homo sapiens
agcactgtgcctacatcatcatctacgggatgcccacctactggctggccaacctgaggccaggcctccagcccttcctgctgcacttcctgctggtgtgrctggtggtcttctgttgcaggattatggccctggccgccgcggccctgctccccaccttccacatggcctccttcttcagcaatgccctctacaactcct

SEQ ID NO: 1260 - DNA, 201 bp, Homo sapiens
aacccaggaatccttattctcgacgaacccacctctgggctcgacagcttcacagcccacaacctggtgaagaccttgtccaggctggccaaaggcaaccrgctggtgctcatctccctccaccagcctcgctctgacatcttcaggctgtttgatctggtcctcctgatgacgtctggcacccccatctacttaggggcg

SEQ ID NO: 1261 - DNA, 201 bp, Homo sapiens
catccagaacctaagcttcaaagtgagaagtgggcagatgctggccatcatagggagctcaggttgtgggagagcctccttgctagatgtgatcactggcygaggtcacggcggcaagatcaagtcaggccagatctggatcaatgggcagcccagctcgcctcagctggtgaggaagtgtgtggcccacgtgcgccagca

SEQ ID NO: 1262 - DNA, 201 bp, Homo sapiens
tctacgggatgcccacctactggctggccaacctgaggccaggcctccagcccttcctgctgcacttcctgctggtgtggctggtggtcttctgttgcagkattatggccctggccgccgcggccctgctccccaccttccacatggcctccttcttcagcaatgccctctacaactccttctacctcgccgggggcttca

SEQ ID NO: 1263 - DNA, 201 bp, Homo sapiens
caggagataaaatcctcagtgccatggagctggactcgtaccctctctacgccatctacctcatcgtcattggcctcagcggtggcttcatggtcctgtastacgtgtccttaaggttcatcaaacagaaaccaagtcaagactggtgattcacgccagacgtctgcccgctggtgggggacctgagcagacccttcaact

SEQ ID NO: 1264 - DNA, 201 bp, Homo sapiens
ccagatctggatcaatgggcagcccagctcgcctcagctggtgaggaagtgtgtggcccacgtgcgccagcacaaccagctgctccccaacttgactgtgygagagaccttggccttcattgcccagatgcggctgcccagaaccttctcccaggcccagcgtgacaaaagggtggaggacgtgatcgcggagctgcggct

SEQ ID NO: 1265 - DNA, 201 bp, Homo sapiens
gtcttctgttgcaggattatggccctggccgccgcggccctgctccccaccttccacatggcctccttcttcagcaatgccctctacaactccttctaccycgccgggggcttcatgataaacttgagcagcctgtggacagtgcccgcgtggatttccaaagtgtccttcctgcggtggtgttttgaagggctgatgaag

SEQ ID NO: 1266 - DNA, 201 bp, Homo sapiens
catcgcggtctcaggagataaaatcctcagtgccatggagctggactcgtaccctctctacgccatctacctcatcgtcattggcctcagcggtggcttcrtggtcctgtactacgtgtccttaaggttcatcaaacagaaaccaagtcaagactggtgattcacgccagacgtctgcccgctggtgggggacctgagcag

SEQ ID NO: 1267 - DNA, 201 bp, Homo sapiens
gatcttgacgaggacacctgtgtggaaagcagcgtgaccccactagacaccaactgcctcccgagtcctacgaagatgcctggggcggtgcagcagtttamgacgctgatccgtcgtcagatttccaacgacttccgagacctgcccaccctcctcatccatggggcggaggcctgtctgatgtcaatgaccatcggcttc

SEQ ID NO: 1268 - DNA, 201 bp, Homo sapiens
tgttttgaagggctgatgaagattcagttcagcagaagaacttataaaatgcctctcgggaacctcaccatcgcggtctcaggagataaaatcctcagtgycatggagctggactcgtaccctctctacgccatctacctcatcgtcattggcctcagcggtggcttcatggtcctgtactacgtgtccttaaggttcatc

SEQ ID NO: 1269 - DNA, 201 bp, Homo sapiens
cggaggcctgtctgatgtcaatgaccatcggcttcctctattttggccatgggagcatccagctctccttcatggatacagccgccctcttgttcatgatyggtgctctcatccctttcaacgtcattctggatgtcatctccaaatgttactcagagagggcaatgctttactatgaactggaagacgggctgtacacca

SEQ ID NO: 1270 - DNA, 201 bp, Homo sapiens
tcgcggagctgcggcttaggcagtgcgctgacacccgcgtgggcaacatgtacgtgcgggggttgtcggggggtgagcgcaggagagtcagcattggggtrcagctcctgtggaacccaggaatccttattctcgacgaacccacctctgggctcgacagcttcacagcccacaacctggtgaagaccttgtccaggctgg

SEQ ID NO: 1271 - DNA, 201 bp, Homo sapiens
cagaaccttctcccaggcccagcgtgacaaaagggtggaggacgtgatcgcggagctgcggcttaggcagtgcgctgacacccgcgtgggcaacatgtacrtgcgggggttgtcggggggtgagcgcaggagagtcagcattggggtgcagctcctgtggaacccaggaatccttattctcgacgaacccacctctgggct

SEQ ID NO: 1272 - DNA, 201 bp, Homo sapiens
cagatctggatcaatgggcagcccagctcgcctcagctggtgaggaagtgtgtggcccacgtgcgccagcacaaccagctgctccccaacttgactgtgcragagaccttggccttcattgcccagatgcggctgcccagaaccttctcccaggcccagcgtgacaaaagggtggaggacgtgatcgcggagctgcggctt

SEQ ID NO: 1273 - DNA, 201 bp, Homo sapiens
tcactggccgaggtcacggcggcaagatcaagtcaggccagatctggatcaatgggcagcccagctcgcctcagctggtgaggaagtgtgtggcccacgtrcgccagcacaaccagctgctccccaacttgactgtgcgagagaccttggccttcattgcccagatgcggctgcccagaaccttctcccaggcccagcgtg

SEQ ID NO: 1274 - DNA, 201 bp, Homo sapiens
catggatactttgtggtggagtcatatggggatcagaaaagcctttgaggcctttggagttagagggcagaaggcaaggcctgagccgctgtaagccttakgagtttaggaaggctccagaagacaaatggggtctgtagaggctgttaactcagccaggcttcttagagttgcatttcactaactgatatggtttggctc

SEQ ID NO: 1275 - DNA, 126 bp, Homo sapiens
ccaagtgtcaagggcgggaccagatggagataattgaatcataggggtggtttctctgatgctgttctcctgagagtgagtgagttctgatgagatccgayggttttataaggggcttccctcttc

SEQ ID NO: 1276 - DNA, 201 bp, Homo sapiens; identical to SEQ ID NO: 1249

SEQ ID NO: 1277 - DNA, 154 bp, Homo sapiens; identical to SEQ ID NO: 1250

SEQ ID NO: 1278 - DNA, 201 bp, Homo sapiens; identical to SEQ ID NO: 1251

SEQ ID NO: 1279 - DNA, 201 bp, Homo sapiens; identical to SEQ ID NO: 1252

SEQ ID NO: 1280 - DNA, 201 bp, Homo sapiens; identical to SEQ ID NO: 1253

SEQ ID NO: 1281 - DNA, 201 bp, Homo sapiens; identical to SEQ ID NO: 1254

SEQ ID NO: 1282 - DNA, 201 bp, Homo sapiens; identical to SEQ ID NO: 1258

SEQ ID NO: 1283 - DNA, 201 bp, Homo sapiens; identical to SEQ ID NO: 1260

SEQ ID NO: 1284 - DNA, 201 bp, Homo sapiens; identical to SEQ ID NO: 1261

SEQ ID NO: 1285 - DNA, 201 bp, Homo sapiens; identical to SEQ ID NO: 1264

SEQ ID NO: 1286 - DNA, 201 bp, Homo sapiens; identical to SEQ ID NO: 1257

SEQ ID NO: 1287 - DNA, 113 bp, Homo sapiens
gatcttgacgaggacacctgtgtggaaagcagcgtgaccccactagacaccaactgcctcccgagtcctacgaagatgcctggggcggtgcagcagtttamgacgctgatccg

SEQ ID NO: 1288 - DNA, 201 bp, Homo sapiens; identical to SEQ ID NO: 1270

SEQ ID NO: 1289 - DNA, 201 bp, Homo sapiens; identical to SEQ ID NO: 1271

SEQ ID NO: 1290 - DNA, 201 bp, Homo sapiens; identical to SEQ ID NO: 1272

SEQ ID NO: 1291 - DNA, 201 bp, Homo sapiens; identical to SEQ ID NO: 1273

SEQ ID NO: 1292 - DNA, 201 bp, Homo sapiens
tgagactgaaaagttgcagaagcagctggcttcggagaaggaaatccagatgcagctccaggaagagagcgtgtgggtgggttcccagctgcaggacctgygggagaagtacatggattgtgggggcatgctgattgagatgcaggaggaggtgaagaccctccgccagcaacccccggtgtccactgggtctgccaccca

SEQ ID NO: 1293 - DNA, 201 bp, Homo sapiens
tgggttcccagctgcaggacctgcgggagaagtacatggattgtgggggcatgctgattgagatgcaggaggaggtgaagaccctccgccagcaacccccrgtgtccactgggtctgccacccattacccatacagcgtgcctctggagactcttcctggtttccaggagacgctggctgaggagctcagaacgtctctaa

SEQ ID NO: 1294 - DNA, 201 bp, Homo sapiens
gtgaggatcgagagcaggtgcgggggtttgaggctgaggaagggttgatgctggcagcggatatcatgcggggggaagatttcacgcctgcggaggagttsgtgccccaggaggagctgggggctgccaagaaggtgccggctgaggaaggggtgatggaagaggcagagctggtgtcagaggagaccgagggctgggagg

SEQ ID NO: 1295 - DNA, 201 bp, Homo sapiens
ctggaggaggagaatcatcagctgagagaagaggcctctcaactcgacactcttgaggatgaggaacagatgctcattctggagtgtgtggagcagttttyggaggccagccaacagatggctgagctgtcggaggtgctggtgctcaggctggaaaactatgaacggcagcagcaggaggtcgctcggctgcaggcccag

SEQ ID NO: 1296 - DNA, 184 bp, Homo sapiens
cagactcgagatgcgcccgaggaggttgggccggtgctgcgcggggagccggctcggacccggggacccagcagcactcacctrtgcaccttcgccctcagccagtcccgctccggagccctctgcgcagccgcaggcacggggcactggacagagagtaggatcccgagccacctctggaacc

SEQ ID NO: 1297 - DNA, 121 bp, Homo sapiens
cagactcgagatgcgcccgargaggttgggccggtgctgcgcggggagccggctcggacccggggacccagcagcactcacctgtgcaccttcgccctcagccagtcccgctccggagccc

SEQ ID NO: 1298 - DNA, 102 bp, Homo sapiens
cwgactcgagatgcgcccgaggaggttgggccggtgctgcgcggggagccggctcggacccggggacccagcagcactcacctgtgcaccttcgccctcagc

SEQ ID NO: 1299 - DNA, 201 bp, Homo sapiens
ctgtgcaccttcgccctcagccagtcccgctccggagccctctgcgcagccgcaggcacggggcactggacagagagtaggatcccgagccacctctggawcccagttcctctcggaagcccgcaccggagctcgcccggcctcggaggctggagccaaggcaggagcccggcgcccgtccgcattctcggccatccaagg

SEQ ID NO: 1300 - DNA, 201 bp, Homo sapiens
ggacatgaattatgtcctccagcagctggccaactggcaagatgcccattacaggcggcagctgaggtggaagatgctccagaaaggtgagtgcccccacrgggccctccctgccgccagccggacaagctgcagatcgtcgtgccgatgaaaagagagggtggataagctccccgagtgctcacctgccccagcctggct

SEQ ID NO: 1301 - DNA, 201 bp, Homo sapiens
aagggttgatgctggcagcggatatcatgcggggggaagatttcacgcctgcggaggagttggtgccccaggaggagctgggggctgccaagaaggtgccrgctgaggaaggggtgatggaagaggcagagctggtgtcagaggagaccgagggctgggaggaggtggaactggagctggatgaggcaacgcggatgaacg

SEQ ID NO: 1302 - DNA, 201 bp, Homo sapiens
tttcgctacagtgaggatcgagagcaggtgcgggggtttgaggctgaggaagggttgatgctggcagcggatatcatgcggggggaagatttcacgcctgyggaggagttggtgccccaggaggagctgggggctgccaagaaggtgccggctgaggaaggggtgatggaagaggcagagctggtgtcagaggagaccgag

SEQ ID NO: 1303 - DNA, 201 bp, Homo sapiens
caagatgcccattacaggcggcagctgaggtggaagatgctccagaaaggtgagtgcccccacggggccctccctgccgccagccggacaagctgcagatmgtcgtgccgatgaaaagagagggtggataagctccccgagtgctcacctgccccagcctggctctacctgctgtgcttatttgcatggactttgcatatc

SEQ ID NO: 1304 - DNA, 201 bp, Homo sapiens
aaaactatgaacggcagcagcaggaggtcgctcggctgcaggcccaggtgctgaagctgcagcagcgctgccggatgtatggggctgagactgaaaagttkcagaagcagctggcttcggagaaggaaatccagatgcagctccaggaagagagcgtgtgggtgggttcccagctgcaggacctgcgggagaagtacatgg

SEQ ID NO: 1305 - DNA, 201 bp, Homo sapiens
cccccggtgtccactgggtctgccacccattacccatacagcgtgcctctggagactcttcctggtttccaggagacgctggctgaggagctcagaacgtytctaaggaggatgatctcagaccctgtgtattttatggagaggaattatgagatgcccagaggggacacatccagcctaaggtatgattttcgctacagt

SEQ ID NO: 1306 - DNA, 201 bp, Homo sapiens
tggattgtgggggcatgctgattgagatgcaggaggaggtgaagaccctccgccagcaacccccggtgtccactgggtctgccacccattacccatacagygtgcctctggagactcttcctggtttccaggagacgctggctgaggagctcagaacgtctctaaggaggatgatctcagaccctgtgtattttatggaga

SEQ ID NO: 1307 - DNA, 201 bp, Homo sapiens
tccatccacttttctcctgggggctgggctgggggttagggctgggactgtgcccccacactgcgcctcagcttcccatctctgcccgcttgcttcccctrcccccaacccctgcctcctctataccccaggctctccaactctgcagcagtggcagcagcagtcaaaacaaacacggggggcggtgggtgggatggtgga

SEQ ID NO: 1308 - DNA, 201 bp, Homo sapiens
tgggctgggggttagggctgggactgtgcccccacactgcgcctcagcttcccatctctgcccgcttgcttcccctacccccaacccctgcctcctctatmccccaggctctccaactctgcagcagtggcagcagcagtcaaaacaaacacggggggcggtgggtgggatggtggagcagcctgggggctgacccaggct

SEQ ID NO: 1309 - DNA, 201 bp, Homo sapiens
acccctgcctcctctataccccaggctctccaactctgcagcagtggcagcagcagtcaaaacaaacacggggggcggtgggtgggatggtggagcagccygggggctgacccaggctggaggacaggaccagccaccctcccacggcctgggaggaagagaggccttctgggactgcccaggctatggggacaaaggcct

SEQ ID NO: 1310 - DNA, 201 bp, Homo sapiens
ggcagcagcagtcaaaacaaacacggggggcggtgggtgggatggtggagcagcctgggggctgacccaggctggaggacaggaccagccaccctcccacsgcctgggaggaagagaggccttctgggactgcccaggctatggggacaaaggccttcaccagcaagggccacagttggaacagtcccctgggtgtcagaa

SEQ ID NO: 1311 - DNA, 201 bp, Homo sapiens
ctgggtgtcagaaggtgggctagggcctcctgcagggttgtggggtggaacagggtctcctctccccagccagaaaccccaaagtctgggagctgcacctkccgagtgcaggccatgtgagccctgcctctttaaggagccgcaggacatgaaagatgaccttgtgacactcatgcacagcagccattgcacgtgcatcag

SEQ ID NO: 1312 - DNA, 201 bp, Homo sapiens
cctttcccacatgttggaggcttttccaacgtcttcagggacaggcggtaggaaccccggccctcgctctgcagctggtgcaaaagctgtggctgccaggyctgggccacatggcagcccagggggcaggagaagcccgggagaggcccgctggctaccagactcagccctgagcagggaacagggcccagcttccaccgg

SEQ ID NO: 1313 - DNA, 201 bp, Homo sapiens
aggaaccccggccctcgctctgcagctggtgcaaaagctgtggctgccaggcctgggccacatggcagcccagggggcaggagaagcccgggagaggcccrctggctaccagactcagccctgagcagggaacagggcccagcttccaccggcagggagttgtgagcgccttcccaacaatgtgcccctcaccccttgatg

SEQ ID NO: 1314 - DNA, 201 bp, Homo sapiens
tctgtgtgtgggtgggtgagggcccctctgcccagtggtgtgtctcctctccctccctccctcttctgccagtggcctgggggtgtccaggctcccatccrtggcccagcccctctcccctctgtcttgatccccccctccctgcccctggcttcctcttccatgttctgccctttcccacacctttgttcctcaatagct

SEQ ID NO: 1315 - DNA, 201 bp, Homo sapiens; identical to SEQ ID NO: 1294

SEQ ID NO: 1316 - DNA, 201 bp, Homo sapiens; identical to SEQ ID NO: 1295

SEQ ID NO: 1317 - DNA, 184 bp, Homo sapiens; identical to SEQ ID NO: 1296

SEQ ID NO: 1318 - DNA, 121 bp, Homo sapiens; identical to SEQ ID NO: 1297

SEQ ID NO: 1319 - DNA, 102 bp, Homo sapiens; identical to SEQ ID NO: 1298

SEQ ID NO: 1320 - DNA, 201 bp, Homo sapiens; identical to SEQ ID NO: 1299

SEQ ID NO: 1321 - DNA, 201 bp, Homo sapiens; identical to SEQ ID NO: 1300

SEQ ID NO: 1322 - DNA, 201 bp, Homo sapiens; identical to SEQ ID NO: 1301

SEQ ID NO: 1323 - DNA, 201 bp, Homo sapiens; identical to SEQ ID NO: 1302

SEQ ID NO: 1324 - DNA, 201 bp, Homo sapiens; identical to SEQ ID NO: 1303

SEQ ID NO: 1325 - DNA, 201 bp, Homo sapiens
aaaactatgaacggcagcagcaggaggtcgctcggctgcaggcccaggtgctgaagctgcagcagcgctgccggatgtatggggctgagactgaaaagttkcagaagcagctggcttcggagaaggaaatccagatgcagctccaggaagaggagactcttcctggtttccaggagacgctggctgaggagctcagaacgt

SEQ ID NO: 1326 - DNA, 201 bp, Homo sapiens
cagaagcagctggcttcggagaaggaaatccagatgcagctccaggaagaggagactcttcctggtttccaggagacgctggctgaggagctcagaacgtytctaaggaggatgatctcagaccctgtgtattttatggagaggaattatgagatgcccagaggggacacatccagcctaaggtatgattttcgctacagt

SEQ ID NO: 1327 - DNA, 201 bp, Homo sapiens; identical to SEQ ID NO: 1307

SEQ ID NO: 1328 - DNA, 201 bp, Homo sapiens; identical to SEQ ID NO: 1308

SEQ ID NO: 1329 - DNA, 201 bp, Homo sapiens; identical to SEQ ID NO: 1309

SEQ ID NO: 1330 - DNA, 201 bp, Homo sapiens; identical to SEQ ID NO: 1310

SEQ ID NO: 1331 - DNA, 201 bp, Homo sapiens; identical to SEQ ID NO: 1311

SEQ ID NO: 1332 - DNA, 201 bp, Homo sapiens; identical to SEQ ID NO: 1312

SEQ ID NO: 1333 - DNA, 201 bp, Homo sapiens; identical to SEQ ID NO: 1313

SEQ ID NO: 1334 - DNA, 201 bp, Homo sapiens; identical to SEQ ID NO: 1314

SEQ ID NO: 1335 - DNA, 201 bp, Homo sapiens; identical to SEQ ID NO: 1294

SEQ ID NO: 1336 - DNA, 201 bp, Homo sapiens; identical to SEQ ID NO: 1295

SEQ ID NO: 1337 - DNA, 184 bp, Homo sapiens; identical to SEQ ID NO: 1296

SEQ ID NO: 1338 - DNA, 121 bp, Homo sapiens; identical to SEQ ID NO: 1297

SEQ ID NO: 1339 - DNA, 102 bp, Homo sapiens; identical to SEQ ID NO: 1298

SEQ ID NO: 1340 - DNA, 201 bp, Homo sapiens; identical to SEQ ID NO: 1299

SEQ ID NO: 1341 - DNA, 201 bp, Homo sapiens; identical to SEQ ID NO: 1300

SEQ ID NO: 1342 - DNA, 201 bp, Homo sapiens; identical to SEQ ID NO: 1301

SEQ ID NO: 1343 - DNA, 201 bp, Homo sapiens; identical to SEQ ID NO: 1302

SEQ ID NO: 1344 - DNA, 201 bp, Homo sapiens; identical to SEQ ID NO: 1303

SEQ ID NO: 1345 - DNA, 201 bp, Homo sapiens
gtcgctcggctgcaggcccaggtgctgaagctgcagcagcgctgccggatggagactcttcctggtttccaggagacgctggctgaggagctcagaacgtytctaaggaggatgatctcagaccctgtgtattttatggagaggaattatgagatgcccagaggggacacatccagcctaaggtatgattttcgctacagt

SEQ ID NO: 1346 - DNA, 201 bp, Homo sapiens; identical to SEQ ID NO: 1307

SEQ ID NO: 1347 - DNA, 201 bp, Homo sapiens; identical to SEQ ID NO: 1308

SEQ ID NO: 1348 - DNA, 201 bp, Homo sapiens; identical to SEQ ID NO: 1309

SEQ ID NO: 1349 - DNA, 201 bp, Homo sapiens; identical to SEQ ID NO: 1310

SEQ ID NO: 1350 - DNA, 201 bp, Homo sapiens; identical to SEQ ID NO: 1311

SEQ ID NO: 1351 - DNA, 201 bp, Homo sapiens; identical to SEQ ID NO: 1312

SEQ ID NO: 1352 - DNA, 201 bp, Homo sapiens; identical to SEQ ID NO: 1313

SEQ ID NO: 1353 - DNA, 201 bp, Homo sapiens; identical to SEQ ID NO: 1314

SEQ ID NO: 1354 - DNA, 201 bp, Homo sapiens; identical to SEQ ID NO: 1292

SEQ ID NO: 1355 - DNA, 201 bp, Homo sapiens; identical to SEQ ID NO: 1293

SEQ ID NO: 1356 - DNA, 201 bp, Homo sapiens; identical to SEQ ID NO: 1294

SEQ ID NO: 1357 - DNA, 201 bp, Homo sapiens; identical to SEQ ID NO: 1295

SEQ ID NO: 1358 - DNA, 184 bp, Homo sapiens; identical to SEQ ID NO: 1296

SEQ ID NO: 1359 - DNA, 121 bp, Homo sapiens; identical to SEQ ID NO: 1297

SEQ ID NO: 1360 - DNA, 102 bp, Homo sapiens; identical to SEQ ID NO: 1298

SEQ ID NO: 1361 - DNA, 201 bp, Homo sapiens; identical to SEQ ID NO: 1299

SEQ ID NO: 1362 - DNA, 201 bp, Homo sapiens; identical to SEQ ID NO: 1300

SEQ ID NO: 1363 - DNA, 201 bp, Homo sapiens; identical to SEQ ID NO: 1301

SEQ ID NO: 1364 - DNA, 201 bp, Homo sapiens; identical to SEQ ID NO: 1302

SEQ ID NO: 1365 - DNA, 201 bp, Homo sapiens; identical to SEQ ID NO: 1303

SEQ ID NO: 1366 - DNA, 201 bp, Homo sapiens; identical to SEQ ID NO: 1304

SEQ ID NO: 1367 - DNA, 201 bp, Homo sapiens; identical to SEQ ID NO: 1305

SEQ ID NO: 1368 - DNA, 201 bp, Homo sapiens; identical to SEQ ID NO: 1306

SEQ ID NO: 1369 - DNA, 201 bp, Homo sapiens; identical to SEQ ID NO: 1307

SEQ ID NO: 1370 - DNA, 201 bp, Homo sapiens; identical to SEQ ID NO: 1308

SEQ ID NO: 1371 - DNA, 201 bp, Homo sapiens; identical to SEQ ID NO: 1309

SEQ ID NO: 1372 - DNA, 201 bp, Homo sapiens; identical to SEQ ID NO: 1310

SEQ ID NO: 1373 - DNA, 201 bp, Homo sapiens; identical to SEQ ID NO: 1311

SEQ ID NO: 1374 - DNA, 201 bp, Homo sapiens; identical to SEQ ID NO: 1312

SEQ ID NO: 1375 - DNA, 201 bp, Homo sapiens; identical to SEQ ID NO: 1313

SEQ ID NO: 1376 - DNA, 201 bp, Homo sapiens; identical to SEQ ID NO: 1314

SEQ ID NO: 1377 - DNA, 201 bp, Homo sapiens
tgtagcagtgtttgaggattatgtgtggttctcagattgggctatgccatcagtaatgagagtaaacaagaggactggcaaagatagagtacgtctccaasgcagcatgctgaagccctcatcactggttgtggttcatccattggcaaaaccaggagcagatccctgcttatatcaaaacggaggctgtgaacatatttg

SEQ ID NO: 1378 - DNA, 201 bp, Homo sapiens
actgttgggagaggaatcgtatctccatatttcttctttcagccccaatccaagggttgtagctggaactttccatcagttcttcctttctttttcctctytaagcctttgccttgctctgtcacagtgaagtcagccagagcagggctgttaaactctgtgaaatttgtcataagggtgtcaggtatttcttactggctt

SEQ ID NO: 1379 - DNA, 201 bp, Homo sapiens
ccttggcaggctgcattcagaaggtctctcagttgaagaaagagcttggaggacaacagcacaacaggagagtaaaagatgccccagggctgaggcctccrctcaggcagccgcatctggggtcaatcatactcaccttgcccgggccatgctccagcaaaatcaagctgttttcttttgaaagttcaaactcatcaagat

SEQ ID NO: 1380 - DNA, 201 bp, Homo sapiens
catgctccagcaaaatcaagctgttttcttttgaaagttcaaactcatcaagattatgctgctcactcttatcattctgttgccagtagtttcaaaatttmgttttgttagtctctcagcaccgcagcactggagctgtcctgaaggtactctcgcaggaaatgggaattctacttgtgtgggtcctgcacccttcttaat

SEQ ID NO: 1381 - DNA, 201 bp, Homo sapiens
gactgatttgccctgactctactccaccccctcacctcagggaagatgaccaccactattccgtaagaaatagtgactctgaatgtcccctgtcccacgawgggtactgcctccatgatggtgtgtgcatgtatattgaagcattggacaagtatgcatgcaactgtgttgttggctacatcggggagcgatgtcagtacc

SEQ ID NO: 1382 - DNA, 201 bp, Homo sapiens
ggagcgatgtcagtaccgagacctgaagtggtgggaactgcgccacgctggccacgggcagcagcagaaggtcatcgtggtggctgtctgcgtggtggtgyttgtcatgctgctcctcctgagcctgtggggggcccactactacaggactcagaagctgctatcgaaaaacccaaagaatccttatgaggagtcgagcag

SEQ ID NO: 1383 - DNA, 201 bp, Homo sapiens
ttcatccaatggccaagagattattctggactgatacagggattaatccacgaattgaaagttcttccctccaaggccttggccgtctggttatagccagstctgatctaatctggcccagtggaataacgattgacttcttaactgacaagttgtactggtgcgatgccaagcagtctgtgattgaaatggccaatctgg

SEQ ID NO: 1384 - DNA, 201 bp, Homo sapiens
cttccctccaaggccttggccgtctggttatagccagctctgatctaatctggcccagtggaataacgattgacttcttaactgacaagttgtactggtgygatgccaagcagtctgtgattgaaatggccaatctggatggttcaaaacgccgaagacttacccagaatgatgtaggtcacccatttgctgtagcagtgt

SEQ ID NO: 1385 - DNA, 201 bp, Homo sapiens
aagacctccagtcacacttgtgcatgtgtgcagagggatacgccctaagtcgagaccggaagtactgtgaagatgttaatgaatgtgctttttggaatcayggctgtactcttgggtgtaaaaacacccctggatcctattactgcacgtgccctgtaggatttgttctgcttcctgatgggaaacgatgtcatcaacttg

SEQ ID NO: 1386 - DNA, 201 bp, Homo sapiens
cagtgcttgagagagatgggaaaacatgtagcggttgttcctcacccgataatggtggatgtagccagctctgcgttcctcttagcccagtatcctgggartgtgattgctttcctgggtatgacctacaactggatgaaaaaagctgtgcagcttcaggaccacaaccatttttgctgtttgccaattctcaagatattc

SEQ ID NO: 1387 - DNA, 201 bp, Homo sapiens; identical to SEQ ID NO: 1386

SEQ ID NO: 1388 - DNA, 201 bp, Homo sapiens
aagcaattctcttatttgctcctgtgattatgatggaggttctgtccacattagtaaacatccaacacagcataatttgtttgcaatgtccctttttggtsaccgtatcttctattcaacatggaaaatgaagacaatttggatagccaacaaacacactggaaaggacatggttagaattaacctccattcatcatttgt

SEQ ID NO: 1389 - DNA, 171 bp, Homo sapiens
aaaaagagaaactgttgggagaggaatcgtatctccatatttcttctttcagccccaatccaagggttgtrgctggaactttccatcagttcttcctttctttttcctctctaagcctttgccttgctctgtcacagtgaagtcagccagagcagggctgttaaactctgt

SEQ ID NO: 1390 - DNA, 201 bp, Homo sapiens
ggctgtgaacatatttgcaaaaagaggcttggaactgcttggtgttcgtgtcgtgaaggttttatgaaagcctcagatgggaaaacgtgtctggctctggwtggtcatcagctgttggcaggtggtgaagttgatctaaagaaccaagtaacaccattggacatcttgtccaagactagagtgtcagaagataacattaca

SEQ ID NO: 1391 - DNA, 201 bp, Homo sapiens
aacgccgaagacttacccagaatgatgtaggtcacccatttgctgtagcagtgtttgaggattatgtgtggttctcagattgggctatgccatcagtaatragagtaaacaagaggactggcaaagatagagtacgtctccaaggcagcatgctgaagccctcatcactggttgtggttcatccattggcaaaaccaggag

SEQ ID NO: 1392 - DNA, 201 bp, Homo sapiens
ctgtggggggcccactactacaggactcagaagctgctatcgaaaaacccaaagaatccttatgaggagtcgagcagagatgtgaggagtcgcaggcctgstgacactgaggatgggatgtcctcttgccctcaaccttggtttgtggttataaaagaacaccaagacctcaagaatgggggtcaaccagtggctggtgag

SEQ ID NO: 1393 - DNA, 201 bp, Homo sapiens
aagtgcatcaacaccgaaggtggttatgtctgccggtgctcagaaggctaccaaggagatgggattcactgtcttgatattgatgagtgccaactgggggwgcacagctgtggagagaatgccagctgcacaaatacagagggaggctatacctgcatgtgtgctggacgcctgtctgaaccaggactgatttgccctgac

SEQ ID NO: 1394 - DNA, 201 bp, Homo sapiens
actagagtgtcagaagataacattacagaatctcaacacatgctagtggctgaaatcatggtgtcagatcaagatgactgtgctcctgtgggatgcagcaygtatgctcggtgtatttcagagggagaggatgccacatgtcagtgtttgaaaggatttgctggggatggaaaactatgttctgatatagatgaatgtgag

SEQ ID NO: 1395 - DNA, 201 bp, Homo sapiens; identical to SEQ ID NO: 1394

SEQ ID NO: 1396 - DNA, 201 bp, Homo sapiens
tgtttctggaatggcaataaattggataaatgaagaagttatttggtcaaatcaacaggaaggaatcattacagtaacagatatgaaaggaaataattccyacattcttttaagtgctttaaaatatcctgcaaatgtagcagttgatccagtagaaaggtttatattttggtcttcagaggtggctggaagcctttatag

SEQ ID NO: 1397 - DNA, 201 bp, Homo sapiens
gtatctttaggattgacacagaaggaaccaattatgagcaattggtggtggatgctggtgtctcagtgatcatggattttcattataatgagaaaagaatytattgggtggatttagaaagacaacttttgcaaagagtttttctgaatgggtcaaggcaagagagagtatgtaatatagagaaaaatgtttctggaatgg

SEQ ID NO: 1398 - DNA, 201 bp, Homo sapiens
cttgtttcctgtccacgcaatgtgtctgaatgcagccatgactgtgttctgacatcagaaggtcccttatgtttctgtcctgaaggctcagtgcttgagaragatgggaaaacatgtagcggttgttcctcacccgataatggtggatgtagccagctctgcgttcctcttagcccagtatcctgggaatgtgattgcttt

SEQ ID NO: 1399 - DNA, 201 bp, Homo sapiens
atcttctattcaacatggaaaatgaagacaatttggatagccaacaaacacactggaaaggacatggttagaattaacctccattcatcatttgtaccacwtggtgaactgaaagtagtgcatccacttgcacaacccaaggcagaagatgacacttgggagcctgagcagaaactttgcaaattgaggaaaggaaactgc

SEQ ID NO: 1400 - DNA, 201 bp, Homo sapiens
tcttttaagtgctttaaaatatcctgcaaatgtagcagttgatccagtagaaaggtttatattttggtcttcagaggtggctggaagcctttatagagcasatctcgatggtgtgggagtgaaggctctgttggagacatcagagaaaataacagctgtgtcattggatgtgcttgataagcggctgttttggattcagta

SEQ ID NO: 1401 - DNA, 201 bp, Homo sapiens
ggtgcgatgccaagcagtctgtgattgaaatggccaatctggatggttcaaaacgccgaagacttacccagaatgatgtaggtcacccatttgctgtagcrgtgtttgaggattatgtgtggttctcagattgggctatgccatcagtaatgagagtaaacaagaggactggcaaagatagagtacgtctccaaggcagca

SEQ ID NO: 1402 - DNA, 201 bp, Homo sapiens
ctaacccattatggcaacaaagggccctggacccaccacaccaaatggagctgactcagtgaaaactggaattaaaaggaaagtcaagaagaatgaactaygtcgatgcacagtatcttttctttcaaaagtagagcaaaactataggttttggttccacaatctctacgactaatcacctactcaatgcctggagacaga

SEQ ID NO: 1403 - DNA, 201 bp, Homo sapiens
acccattatggcaacaaagggccctggacccaccacaccaaatggagctgactcagtgaaaactggaattaaaaggaaagtcaagaagaatgaactatgtygatgcacagtatcttttctttcaaaagtagagcaaaactataggttttggttccacaatctctacgactaatcacctactcaatgcctggagacagatac

SEQ ID NO: 1404 - DNA, 201 bp, Homo sapiens
aatagatttttgtttttgttgttcctgcagccccagaagaaattaggggttaaagcagacagtcacactggtttggtcagttacaaagtaatttctttgayctggacagaacatttatatcagtttcatgaaatgattggaatattacaataccgttaagatacagtgtaggcatttaactcctcattggcgtggtccatg

SEQ ID NO: 1405 - DNA, 201 bp, Homo sapiens
atttctttgatctggacagaacatttatatcagtttcatgaaatgattggaatattacaataccgttaagatacagtgtaggcatttaactcctcattggygtggtccatgctgatgattttgcaaaatgagttgtgatgaatcaatgaaaaatgtaatttagaaactgatttcttcagaattagatggcttattttttaa

SEQ ID NO: 1406 - DNA, 201 bp, Homo sapiens
taggcatttaactcctcattggcgtggtccatgctgatgattttgcaaaatgagttgtgatgaatcaatgaaaaatgtaatttagaaactgatttcttcasaattagatggcttattttttaaaatatttgaatgaaaacattttatttttaaaatattacacaggaggcttcggagtttcttagtcattactgtcctttt

SEQ ID NO: 1407 - DNA, 201 bp, Homo sapiens
cacatgaaatgaagatcacctctgcctatctacaggacattgagaatgcctataagaaaacctttctccctgagatgagtgaaaaatgtgaggttttacartattctgcaagggaagctcaagattcaaaaaaggtggtagaggacattgaatacctgaagttcgataaagggccgtggctcaagcaggacaatcgcactt

SEQ ID NO: 1408 - DNA, 201 bp, Homo sapiens; identical to SEQ ID NO: 1407

SEQ ID NO: 1409 - DNA, 201 bp, Homo sapiens; identical to SEQ ID NO: 1407

SEQ ID NO: 1410 - DNA, 201 bp, Homo sapiens; identical to SEQ ID NO: 1407

SEQ ID NO: 1411 - DNA, 201 bp, Homo sapiens
gaggcgatgtacaaccagggattcatccgaaagcagtgtgtggaccactacaacgaggtgaagagcgtcaccatctgcgattacctgcccccccacctggkgatttacatcgatgtgcccgttccagaggtccagaggcggattcagaagaaaggagatccacatgaaatgaagatcacctctgcctatctacaggacatt

SEQ ID NO: 1412 - DNA, 187 bp, Homo sapiens
acggcagcgcgccggccgcgagagagggccccgtcgcgaccgcgtccccttgggtccttgatcctgagctgaccgggtagccatggscttgcggctcctgaagctggcagcgacgtccgcgtccgcccgggtcgtggcggcgggcgcccagcgcgtgagaggaattcatagcagtgtgcagtgcaag

SEQ ID NO: 1413 - DNA, 201 bp, Homo sapiens; identical to SEQ ID NO: 1407

SEQ ID NO: 1414 - DNA, 201 bp, Homo sapiens
gatttacatcgatgtgcccgttccagaggtccagaggcggattcagaagaaaggagatccacatgaaatgaagatcacctctgcctatctacaggacattragaatgcctataagaaaacctttctccctgagatgagtgaaaaatgtgaggttttacaatattctgcaagggaagctcaagattcaaaaaaggtggtaga

SEQ ID NO: 1415 - DNA, 201 bp, Homo sapiens
gtgcagtgcaagctgcgctatggaatgtggcatttcctacttggggataaagcaagcaaaagactgacagaacgcagcagagtgataactgtagatggcaytatatgtactggaaaaggcaaacttgcaaaagaaatagcagagaaactaggcttcaagcactttcctgaagcggggattcattatccagacagtaccaca

SEQ ID NO: 1416 - DNA, 200 bp, Homo sapiens
ccttgcggctcctgaagctggcagcgacgtccgcgtccgcccgggtcgtggcggcgggcgcccagcgcgtgagaggaattcatagcagtgtgcagtgcaactgcgctatggaatgtggcatttcctacttggggataaagcaagcaaaagactgacagaacgcagcagagtgataactgtagatggcaatatatgtactg

SEQ ID NO: 1417 - DNA, 201 bp, Homo sapiens
ccctttagctttgttttggaatggcccaccattctcactggaaaacagtggtctgctgtgaaaggccagctctcggcagcccctgtggtttcagcgctgcygctctgtgtcattcaggttgtgcacattgtttttcttctgacttccagaaataaaagtgtttccatgggaatttccccatcgtacgtctatgtgcgtgcg

SEQ ID NO: 1418 - DNA, 201 bp, Homo sapiens
gtgtcattcaggttgtgcacattgtttttcttctgacttccagaaataaaagtgtttccatgggaatttccccatcgtacgtctatgtgcgtgcgggcacrtcgaaactgcacacgtgcacacacgctgctctgggccctgtttggtgtggtgtggtttaattgaggcttacattatgctgaagagtttttctaaaggcct

SEQ ID NO: 1419 - DNA, 201 bp, Homo sapiens
tttttcttctgacttccagaaataaaagtgtttccatgggaatttccccatcgtacgtctatgtgcgtgcgggcacgtcgaaactgcacacgtgcacacaygctgctctgggccctgtttggtgtggtgtggtttaattgaggcttacattatgctgaagagtttttctaaaggcctactgtatttattttagtaatgtgc

SEQ ID NO: 1420 - DNA, 201 bp, Homo sapiens
taatgtgctacattagagtagaaaaaataagaacgtgaagaagaaatagcaaaaggagaaaattaccacagatttacagaacaatatgttttaagagagaygttgagaaagattcacgtggccgtcctcagcgtctcaaactcctttgaagggagatttgagcttaggctgttgatgacataagatgcaaaagcaaaataa

SEQ ID NO: 1421 - DNA, 167 bp, Homo sapiens
caaccatgcagggctccgtgtcggcatggtgtggactcgggtgctctgatcatcccctgtgtttgcgtctgaccctgtgtggttgcattcccttgatggartgggaagtatgtaatttgtagtgctgaggacattcgtctgtttgattttctggtgttttcaatgac

SEQ ID NO: 1422 - DNA, 187 bp, Homo sapiens; identical to SEQ ID NO: 1412

SEQ ID NO: 1423 - DNA, 201 bp, Homo sapiens; identical to SEQ ID NO: 1415

SEQ ID NO: 1424 - DNA, 200 bp, Homo sapiens; identical to SEQ ID NO: 1416

SEQ ID NO: 1425 - DNA, 201 bp, Homo sapiens; identical to SEQ ID NO: 1407

SEQ ID NO: 1426 - DNA, 201 bp, Homo sapiens; identical to SEQ ID NO: 1407

SEQ ID NO: 1427 - DNA, 201 bp, Homo sapiens; identical to SEQ ID NO: 1407

SEQ ID NO: 1428 - DNA, 201 bp, Homo sapiens; identical to SEQ ID NO: 1407

SEQ ID NO: 1429 - DNA, 201 bp, Homo sapiens
gcattgcagacccacttctggactggggtggctggagccagtggaaagctggaatctgggagctcagaggaagtactgttgattaatgaaagaggaggccraagcaagccaggtgtggaccactacaacgaggtgaagagcgtcaccatctgcgattacctgcccccccacctggtgatttacatcgatgtgcccgttcca

SEQ ID NO: 1430 - DNA, 201 bp, Homo sapiens
ctgttgattaatgaaagaggaggccgaagcaagccaggtgtggaccactacaacgaggtgaagagcgtcaccatctgcgattacctgcccccccacctggkgatttacatcgatgtgcccgttccagagccacatgaaatgaagatcacctctgcctatctacaggacattgagaatgcctataagaaaacctttctccct

SEQ ID NO: 1431 - DNA, 187 bp, Homo sapiens; identical to SEQ ID NO: 1412

SEQ ID NO: 1432 - DNA, 201 bp, Homo sapiens
acatcagttcagagagcgattagattggactgtgtgttttggggaggaatccacagaggtgaagcatcaggggcacttgctgtcagtgcagcctggcaccrtggccctgaccgtgggctcctggctgaggtcgtgcttgctgggtctccactggaagctgctcttcctctttccagaaagccccatgcacaccacagcctt

SEQ ID NO: 1433 - DNA, 201 bp, Homo sapiens; identical to SEQ ID NO: 1407

SEQ ID NO: 1434 - DNA, 201 bp, Homo sapiens
catctgcgattacctgcccccccacctggtgatttacatcgatgtgcccgttccagagccacatgaaatgaagatcacctctgcctatctacaggacattragaatgcctataagaaaacctttctccctgagatgagtgaaaaatgtgaggttttacaatattctgcaagggaagctcaagattcaaaaaaggtggtaga

SEQ ID NO: 1435 - DNA, 201 bp, Homo sapiens; identical to SEQ ID NO: 1415

SEQ ID NO: 1436 - DNA, 200 bp, Homo sapiens; identical to SEQ ID NO: 1416

SEQ ID NO: 1437 - DNA, 201 bp, Homo sapiens; identical to SEQ ID NO: 1407

SEQ ID NO: 1438 - DNA, 201 bp, Homo sapiens; identical to SEQ ID NO: 1407

SEQ ID NO: 1439 - DNA, 201 bp, Homo sapiens; identical to SEQ ID NO: 1407

SEQ ID NO: 1440 - DNA, 201 bp, Homo sapiens; identical to SEQ ID NO: 1407

SEQ ID NO: 1441 - DNA, 201 bp, Homo sapiens; identical to SEQ ID NO: 1411

SEQ ID NO: 1442 - DNA, 187 bp, Homo sapiens; identical to SEQ ID NO: 1412

SEQ ID NO: 1443 - DNA, 201 bp, Homo sapiens; identical to SEQ ID NO: 1407

SEQ ID NO: 1444 - DNA, 201 bp, Homo sapiens; identical to SEQ ID NO: 1414

SEQ ID NO: 1445 - DNA, 201 bp, Homo sapiens; identical to SEQ ID NO: 1415

SEQ ID NO: 1446 - DNA, 200 bp, Homo sapiens; identical to SEQ ID NO: 1416

SEQ ID NO: 1447 - DNA, 201 bp, Homo sapiens
tgtagtataggtaatggagaatggcccaccattctcactggaaaacagtggtctgctgtgaaaggccagctctcggcagcccctgtggtttcagcgctgcygctctgtgtcattcaggttgtgcacattgtttttcttctgacttccagaaataaaagtgtttccatgggaatttccccatcgtacgtctatgtgcgtgcg

SEQ ID NO: 1448 - DNA, 201 bp, Homo sapiens; identical to SEQ ID NO: 1418

SEQ ID NO: 1449 - DNA, 201 bp, Homo sapiens; identical to SEQ ID NO: 1419

SEQ ID NO: 1450 - DNA, 201 bp, Homo sapiens; identical to SEQ ID NO: 1420

SEQ ID NO: 1451 - DNA, 167 bp, Homo sapiens; identical to SEQ ID NO: 1421

SEQ ID NO: 1452 - DNA, 157 bp, Homo sapiens
cgctccggcagtggtgctgggagtgtcgtggacgccgtgccgttactcgtagtcagkcggcggcgcaggcggcggcggcggcatagcgcacagcgcgccttagcagcagcagcagcagcagcagcatcggaggtacccccgccgtcgcagcccccgc

SEQ ID NO: 1453 - DNA, 201 bp, Homo sapiens
ggcggcatagcgcacagcgcgccttagcagcagcagcagcagcagcagcatcggaggtacccccgccgtcgcagcccccgcgctggtgcagccaccctcgytccctctgctcttcctcccttcgctcgcaccatggctgatcagctgaccgaagaacagattgctgaattcaaggaagccttctccctatttgataaagat

SEQ ID NO: 1454 - DNA, 186 bp, Homo sapiens
cgctccggcagtggtgctgggagtgtcgtggacgccgtgccgttactcgtagtcaggcggcggcgcaggcggcggcggcggcatakcgcacagcgcgccttagcagcagcagcagcagcagcagcatcggaggtacccccgccgtcgcagcccccgcgctggtgcagccaccctcgctccctctgc

SEQ ID NO: 1455 - DNA, 141 bp, Homo sapiens
cgctccggcagtggtgctgggagtgtcgtggacgccgtgcygttactcgtagtcaggcggcggcgcaggcggcggcggcggcatagcgcacagcgcgccttagcagcagcagcagcagcagcagcatcggaggtacccccg

SEQ ID NO: 1456 - DNA, 201 bp, Homo sapiens
gtgtcgtggacgccgtgccgttactcgtagtcaggcggcggcgcaggcggcggcggcggcatagcgcacagcgcgccttagcagcagcagcagcagcagcrgcatcggaggtacccccgccgtcgcagcccccgcgctggtgcagccaccctcgctccctctgctcttcctcccttcgctcgcaccatggctgatcagctg

SEQ ID NO: 1457 - DNA, 201 bp, Homo sapiens
atgcagcttgacgattgagcacagtcaggcctttgtattaaaaatgaaaaatgaaaaaacaaattcaaaacctattcaaatgggttctagttcaatttgtytagtataaattgtcatagctggtttactgaaaacaaacacatttaaaattggtttacctcaggatgacgtgcagaaaaatgggtgaaggataaaccgttg

SEQ ID NO: 1458 - DNA, 201 bp, Homo sapiens
ctagagtgaaacaggtgtcaggctgtcactgttcacacaaatttttaataagaaacatttaccaagggagcatctttggactctctgtttttaaaaccttytgaaccatgacttggagccggcagagtaggctgtggctgtggacttcagcacaaccatcaacattgctgttcaaagaaattacagtttacgtccattcca

SEQ ID NO: 1459 - DNA, 201 bp, Homo sapiens
ccggcagagtaggctgtggctgtggacttcagcacaaccatcaacattgctgttcaaagaaattacagtttacgtccattccaagttgtaaatgctagtcttttttttttttttttccaataaaaagaccattaacttaaagtggtgttaaatgctttgtaaagctgagatctaaatggggacaaggcaggtggaggggag

SEQ ID NO: 1460 - DNA, 201 bp, Homo sapiens
cagcattgggtttccctcccaaggccccagcaccaacctctgagcccaagaccttgcctgaaaacaagcagataccgattgcttcatcctatttatggacrtgtaggtctagttgcattttcactggggggaggggggaaggtgaattatggtaacttttaatgatctattcaggcagtagagctcttaaggaaaaaaaaa

SEQ ID NO: 1461 - DNA, 201 bp, Homo sapiens
ggtagaagcagtagtcacttttgtaagccagtctcttcatgcctaaaagacactaccagtcacctttgattcgcgacttttaatttatgattatacttagcctcctcctcctttttttttttttcccaagttgacttgactttgcttttttccccccaagtagaactaatgctagcttccagcttgaaagtaaaactccag

SEQ ID NO: 1462 - DNA, 201 bp, Homo sapiens
gtagaagcagtagtcacttttgtaagccagtctcttcatgcctaaaagacactaccagtcacctttgattcgcgacttttaatttatgattatacttagcctcctcctcctttttttttttttcccaagttgacttgactttgcttttttccccccaagtagaactaatgctagcttccagcttgaaagtaaaactccagt

SEQ ID NO: 1463 - DNA, 201 bp, Homo sapiens
tagaagcagtagtcacttttgtaagccagtctcttcatgcctaaaagacactaccagtcacctttgattcgcgacttttaatttatgattatacttagcctcctcctcctttttttttttttcccaagttgacttgactttgcttttttccccccaagtagaactaatgctagcttccagcttgaaagtaaaactccagtg

SEQ ID NO: 1464 - DNA, 201 bp, Homo sapiens
tagtcacttttgtaagccagtctcttcatgcctaaaagacactaccagtcacctttgattcgcgacttttaatttatgattatacttagcctcctcctcctttttttttttttcccaagttgacttgactttgcttttttccccccaagtagaactaatgctagcttccagcttgaaagtaaaactccagtgtggagtgaa

SEQ ID NO: 1465 - DNA, 201 bp, Homo sapiens
gccagtctcttcatgcctaaaagacactaccagtcacctttgattcgcgacttttaatttatgattatacttagcctcctcctcctttttttttttttccsaagttgacttgactttgcttttttccccccaagtagaactaatgctagcttccagcttgaaagtaaaactccagtgtggagtgaattttgtgtctaatta

SEQ ID NO: 1466 - DNA, 201 bp, Homo sapiens
gtccctgtaaaaccccctttaaaagcatattgcatttagtacagagctcttttttgaaatgaaggctggagatgtgcatttttcacggtgttaactggttrtatcttattagcaaggagattggggttttgagtgtttgcgtgggtggtttcaatttgccagggaacagtggcaggctgctagcaaggcagtgagaagctc

SEQ ID NO: 1467 - DNA, 201 bp, Homo sapiens
caggctgctagcaaggcagtgagaagctcttggcagccaaatgggtgcattcagggctgatttatagagacccttggcttctccttctcctactccctgtytttctggcattttgtagcttgttagattttctgccagaggggtgggtcagagcagtggaggggagacatcgcccatgtgcttctgctactggtccttggg

SEQ ID NO: 1468 - DNA, 201 bp, Homo sapiens
ccttctcctactccctgtctttctggcattttgtagcttgttagattttctgccagaggggtgggtcagagcagtggaggggagacatcgcccatgtgctkctgctactggtccttgggctgggtggttggtagaggagatgttgacactatgagctaagggttggcttttgtaattacctgaatctgaaaggaatgccta

SEQ ID NO: 1469 - DNA, 201 bp, Homo sapiens
tctaaccctcaagtctttagaagctgggtggactcttagtggtcctgcagcgtatcctaaaagactacctttgaaacaggattcttgtatggccaggatcstgtctgggaaccagaaaccctacaccctccccctccagggaatgctgagttccagttttgagcagaggtgaggcagaatccactgtagccttccgccctg

SEQ ID NO: 1470 - DNA, 201 bp, Homo sapiens
ggcatcctgctttagcctgagacttgccataagaaactgctgagtacttggcaaaccctttcatagttttgttctccatctgtttggggtaggtgttgagygaggcaaatggatctcgatatttcagatgggcttttgatgcactgttgccaaggaaggctttttctgattttttgacaaatgaatttttgcacactttca

SEQ ID NO: 1471 - DNA, 187 bp, Homo sapiens
aagttgcccttcaccatggctatttgaaaaggagatgtacttggacgtttctgtaaatcttgagataaactgtttggagatttaaccacctctctgatggrggaccaactctatggaaattgtaaatacgttttatttataaacctggcactgtattcaataaacatttctgcagcctttcatctct

SEQ ID NO: 1472 - DNA, 157 bp, Homo sapiens; identical to SEQ ID NO: 1452

SEQ ID NO: 1473 - DNA, 201 bp, Homo sapiens; identical to SEQ ID NO: 1453

SEQ ID NO: 1474 - DNA, 186 bp, Homo sapiens; identical to SEQ ID NO: 1454

SEQ ID NO: 1475 - DNA, 141 bp, Homo sapiens; identical to SEQ ID NO: 1455

SEQ ID NO: 1476 - DNA, 201 bp, Homo sapiens; identical to SEQ ID NO: 1456

SEQ ID NO: 1477 - DNA, 201 bp, Homo sapiens
atgcagcttgacgattgagcacagtcaggcctttgtattaaaaatgaaaaatgaaaaaacaaattcaaaacctattcaaatgggttctagttcaatttgtytagtataaattgtcatagctggtttactgaaaacaaacacatttaaaattggtttacctcaggatgacgtggtcctcttgtacttcgtgtgctccgaccc

SEQ ID NO: 1478 - DNA, 201 bp, Homo sapiens; identical to SEQ ID NO: 1458

SEQ ID NO: 1479 - DNA, 201 bp, Homo sapiens; identical to SEQ ID NO: 1459

SEQ ID NO: 1480 - DNA, 192 bp, Homo sapiens
cagcattgggtttccctcccaaggccccagcaccaacctctgagcccaagaccttgcctgaaaacaagcagataccgattgcttcatcctatttatggacrtgtaggtctagttgcattttcactggggggaggggggaaggtgaattatggtaacttttaatgatctattcaggcagtagagctcttaagg

SEQ ID NO: 1481 - DNA, 201 bp, Homo sapiens
ggcacttgagcaagcgagacacaggggctgcattgctggctgagtccagggctgagaagaaccgcctctggggccctttggaggtcaggcgcgtgggccgmagctccaagcagctggtcgacatccctgagggccagctggaggcccgagctggacggggccgaggccagtggctgcaggtgctgggagggggcttctctt

SEQ ID NO: 1482 - DNA, 201 bp, Homo sapiens
gccaatgtggtgagaaagtttggtgtcaccgacttcccctcttgctacctgctgttccggaatggctctgtctcccgagtccccgtgctcatggaatccakgtccttctataccgcttacctgcagagactctctgggctcaccagggaggctgcccagaccacagttgcaccaaccactgctaacaagatagctcccact

SEQ ID NO: 1483 - DNA, 201 bp, Homo sapiens
tgcgggcggaggcaggcggtgccgcggcgccgggacccgactcatccggtgcttgcgtgtggtggtgagcgcagcgccgaggatgaggaggtgcaacagcsgctccgggccgccgccgtcgctgctgctgctgctgctgtggctgctcgcggttcccggcgctaacgcggccccgcggtcggcgctctattcgccttccga

SEQ ID NO: 1484 - DNA, 201 bp, Homo sapiens
tggactgtgctgaggagaccaacagtgcagtctgcagagacttcaacatccctggcttcccgactgtgaggttcttcaaggcctttaccaagaacggctcrggagcagtatttccagtggctggtgctgacgtgcagacgctgcgggagaggctcattgacgccctggagtcccatcatgacacgtggcccccagcctgtc

SEQ ID NO: 1485 - DNA, 201 bp, Homo sapiens
ccctcaacttcctcaaggcccacttctccccaagcaacatcatcctggacttccctgcagctgggtcagctgcccggagggatgtgcagaatgtggcagcmgccccagagctggcgatgggagccctggagctggaaagccggaattcaactctggaccctgggaagcctgagatgatgaagtcccccacaaacaccaccc

SEQ ID NO: 1486 - DNA, 201 bp, Homo sapiens
cgcttacctgcagagactctctgggctcaccagggaggctgcccagaccacagttgcaccaaccactgctaacaagatagctcccactgtttggaaattgkcagatcgctccaagatctacatggctgacctggaatctgcactgcactacatcctgcggatagaagtgggcaggttcccggtcctggaagggcagcgcct

SEQ ID NO: 1487 - DNA, 201 bp, Homo sapiens
cagatggctgctgcctccatgcaccgggtggggagtcccaacgccgctgtcctctggctctggtctagccacaacagggtcaatgctcgccttgcaggtgmccccagcgaggacccccagttccccaaggtgcagtggccaccccgtgaactttgttctgcctgccacaatgaacgcctggatgtgcccgtgtgggacgtg

SEQ ID NO: 1488 - DNA, 201 bp, Homo sapiens
cagcgaggacccccagttccccaaggtgcagtggccaccccgtgaactttgttctgcctgccacaatgaacgcctggatgtgcccgtgtgggacgtggaarccaccctcaacttcctcaaggcccacttctccccaagcaacatcatcctggacttccctgcagctgggtcagctgcccggagggatgtgcagaatgtggc

SEQ ID NO: 1489 - DNA, 201 bp, Homo sapiens
gggtgctgaacacagaggccaatgtggtgagaaagtttggtgtcaccgacttcccctcttgctacctgctgttccggaatggctctgtctcccgagtcccygtgctcatggaatccaggtccttctataccgcttacctgcagagactctctgggctcaccagggaggctgcccagaccacagttgcaccaaccactgcta

SEQ ID NO: 1490 - DNA, 201 bp, Homo sapiens
acgacaggaaagagggtgccgttcttgccaagaaggtgaactggattggctgccaggggagtgagccgcatttccggggctttccctgctccctgtgggtyctcttccacttcttgactgtgcaggcagctcggcaaaatgtagaccactcacaggaagcagccaaggccaaggaggtcctcccagccatccgaggctacg

SEQ ID NO: 1491 - DNA, 201 bp, Homo sapiens
acaggaaagagggtgccgttcttgccaagaaggtgaactggattggctgccaggggagtgagccgcatttccggggctttccctgctccctgtgggtcctyttccacttcttgactgtgcaggcagctcggcaaaatgtagaccactcacaggaagcagccaaggccaaggaggtcctcccagccatccgaggctacgtgc

SEQ ID NO: 1492 - DNA, 201 bp, Homo sapiens
ccactggagcctgccaagctggaggagattgatggattctttgcgagaaataacgaagagtacctggctctgatctttgaaaagggaggctcctacctggstagagaggtggctctggacctgtcccagcacaaaggcgtggcggtgcgcagggtgctgaacacagaggccaatgtggtgagaaagtttggtgtcaccgac

SEQ ID NO: 1493 - DNA, 201 bp, Homo sapiens
aaattccctacagtttctttaaaactgccctggacgacaggaaagagggtgccgttcttgccaagaaggtgaactggattggctgccaggggagtgagccrcatttccggggctttccctgctccctgtgggtcctcttccacttcttgactgtgcaggcagctcggcaaaatgtagaccactcacaggaagcagccaagg

SEQ ID NO: 1494 - DNA, 201 bp, Homo sapiens
tgtggcagccgccccagagctggcgatgggagccctggagctggaaagccggaattcaactctggaccctgggaagcctgagatgatgaagtcccccacamacaccaccccacatgtgccggctgagggacctgaggcaagtcgacccccgaagctgcaccctggcctcagagctgcaccaggccaggagcctcctgagca

SEQ ID NO: 1495 - DNA, 201 bp, Homo sapiens
aaggcgctggccgaagacgtcaaagcctggaggccggccctgtatctcgccgccctggactgtgctgaggagaccaacagtgcagtctgcagagacttcarcatccctggcttcccgactgtgaggttcttcaaggcctttaccaagaacggctcgggagcagtatttccagtggctggtgctgacgtgcagacgctgcgg

SEQ ID NO: 1496 - DNA, 201 bp, Homo sapiens
acttcaacatccctggcttcccgactgtgaggttcttcaaggcctttaccaagaacggctcgggagcagtatttccagtggctggtgctgacgtgcagacrctgcgggagaggctcattgacgccctggagtcccatcatgacacgtggcccccagcctgtcccccactggagcctgccaagctggaggagattgatggat

SEQ ID NO: 1497 - DNA, 201 bp, Homo sapiens
ttccacttcttgactgtgcaggcagctcggcaaaatgtagaccactcacaggaagcagccaaggccaaggaggtcctcccagccatccgaggctacgtgcrctacttcttcggctgccgagactgcgctagccacttcgagcagatggctgctgcctccatgcaccgggtggggagtcccaacgccgctgtcctctggctc

SEQ ID NO: 1498 - DNA, 201 bp, Homo sapiens
tctattcgccttccgacccgctgacgctgctgcaggcggacacggtgcgcggcgcggtgctgggctcccgcagcgcctgggccgtggagttcttcgcctcstggtgcggccactgcatcgccttcgccccgacgtggaaggcgctggccgaagacgtcaaagcctggaggccggccctgtatctcgccgccctggactgtg

SEQ ID NO: 1499 - DNA, 201 bp, Homo sapiens
gaaagccggaattcaactctggaccctgggaagcctgagatgatgaagtcccccacaaacaccaccccacatgtgccggctgagggacctgaggcaagtcsacccccgaagctgcaccctggcctcagagctgcaccaggccaggagcctcctgagcacatggcagagcttcagaggaatgagcaggagcagccgcttggg

SEQ ID NO: 1500 - DNA, 201 bp, Homo sapiens
caactggggcaagtgaagccagaggagggtcccccagctgggtgggctggaatggaactcctcactagctgctggggctccgcccaccctgctcccttccrgacaatgaagaagcctttgcaccctgggaggaaggaccaccccgggccctctatgcctggccagcctccagctcctcagacctcctgggtggggtttggc

SEQ ID NO: 1501 - DNA, 201 bp, Homo sapiens
gagtggcttgcttggtgggacctgacgagttggtggcatgggaaggatgtgggtctctagtgccttgccctggcttagctgcaggagaagatggctgcttycacttccccccattgagctctgctccctctgagcctggtcttttgtccttttttattttggtctccaagatgaatgctcatctttggagggtgccaggta

SEQ ID NO: 1502 - DNA, 201 bp, Homo sapiens
ttggtggcatgggaaggatgtgggtctctagtgccttgccctggcttagctgcaggagaagatggctgctttcacttccccccattgagctctgctccctytgagcctggtcttttgtccttttttattttggtctccaagatgaatgctcatctttggagggtgccaggtagaagctagggaggggagtgtcttctctct

SEQ ID NO: 1503 - DNA, 201 bp, Homo sapiens
cacttccccccattgagctctgctccctctgagcctggtcttttgtccttttttattttggtctccaagatgaatgctcatctttggagggtgccaggtaraagctagggaggggagtgtcttctctctccaggtttcaccttccagtgtgcagaagttagaagggtctggcgggggcagtgccttacacatgcttgattc

SEQ ID NO: 1504 - DNA, 201 bp, Homo sapiens
gtcttttgtccttttttattttggtctccaagatgaatgctcatctttggagggtgccaggtagaagctagggaggggagtgtcttctctctccaggtttyaccttccagtgtgcagaagttagaagggtctggcgggggcagtgccttacacatgcttgattcccacgctaccccctgccttgggaggtgtgtggaataa

SEQ ID NO: 1505 - DNA, 201 bp, Homo sapiens
tcttttgtccttttttattttggtctccaagatgaatgctcatctttggagggtgccaggtagaagctagggaggggagtgtcttctctctccaggtttcmccttccagtgtgcagaagttagaagggtctggcgggggcagtgccttacacatgcttgattcccacgctaccccctgccttgggaggtgtgtggaataaa

SEQ ID NO: 1506 - DNA, 201 bp, Homo sapiens
tattttggtctccaagatgaatgctcatctttggagggtgccaggtagaagctagggaggggagtgtcttctctctccaggtttcaccttccagtgtgcaraagttagaagggtctggcgggggcagtgccttacacatgcttgattcccacgctaccccctgccttgggaggtgtgtggaataaattatttttgttaagg

SEQ ID NO: 1507 - DNA, 201 bp, Homo sapiens
gtctccaagatgaatgctcatctttggagggtgccaggtagaagctagggaggggagtgtcttctctctccaggtttcaccttccagtgtgcagaagttaraagggtctggcgggggcagtgccttacacatgcttgattcccacgctaccccctgccttgggaggtgtgtggaataaattatttttgttaaggcaagcat

SEQ ID NO: 1508 - DNA, 201 bp, Homo sapiens
tcatctttggagggtgccaggtagaagctagggaggggagtgtcttctctctccaggtttcaccttccagtgtgcagaagttagaagggtctggcgggggyagtgccttacacatgcttgattcccacgctaccccctgccttgggaggtgtgtggaataaattatttttgttaaggcaagcattggtgtgttctttaact

SEQ ID NO: 1509 - DNA, 201 bp, Homo sapiens
gctagggaggggagtgtcttctctctccaggtttcaccttccagtgtgcagaagttagaagggtctggcgggggcagtgccttacacatgcttgattcccmcgctaccccctgccttgggaggtgtgtggaataaattatttttgttaaggcaagcattggtgtgttctttaacttgctacttggagacctagtgtccagt

SEQ ID NO: 1510 - DNA, 201 bp, Homo sapiens
tgtctgcacccaaaccccatggccttttcatgcacggagacaggcctctggatgtgcagccttgccaccccctgccccaatcctccctgagagctcctgcstcagtgccctgggctggtgagggagaagcctgtctgcacctgcctaattccagctcctccaggaagcaagggcttgtttgtcagagctgcagggttggcc

SEQ ID NO: 1511 - DNA, 201 bp, Homo sapiens
ttcatgcacggagacaggcctctggatgtgcagccttgccaccccctgccccaatcctccctgagagctcctgcctcagtgccctgggctggtgagggagragcctgtctgcacctgcctaattccagctcctccaggaagcaagggcttgtttgtcagagctgcagggttggccactcggtggggaggagtcagccagga

SEQ ID NO: 1512 - DNA, 201 bp, Homo sapiens
tcctccaggaagcaagggcttgtttgtcagagctgcagggttggccactcggtggggaggagtcagccaggattagagagcctgcccctaatccggcctgmtgggttttacaaggatcagagctgctgataatgaacctcattaagggggagcaggagcctcaatccgatttggttttctctttgacatcttcactctgct

SEQ ID NO: 1513 - DNA, 201 bp, Homo sapiens
gagagcctgcccctaatccggcctgctgggttttacaaggatcagagctgctgataatgaacctcattaagggggagcaggagcctcaatccgatttggtyttctctttgacatcttcactctgctcagatggcctgggtgctatgtggagcaggtgggatgccaaggccactcctgctatggggcagctggggctgggga

SEQ ID NO: 1514 - DNA, 201 bp, Homo sapiens
tagaattagcgccatgttggaaacactgtcgcagcagcccgggctgcacagtgtgtagcccagcctccaggtccacggagtggtgtggacctcccacctcmcagctgcctctggcagccaagcctcttttcgcccggccccagcccctctggttgataaacgggtgggcctcctcagcagcgtggctgcctttcaccttga

SEQ ID NO: 1515 - DNA, 201 bp, Homo sapiens
ttcttggaggtccaagaggggcagcgccaccttgggccaggctcctctccagcagccttggtatggggtgggggtgggaagacccctgatgcagcctgtcytctgggtgtgggggtggaggagagggctccaggggacccagccagccttgaccctggaggaaagtcaggtgggctcagagagagccctcaaatctgggcc

SEQ ID NO: 1516 - DNA, 201 bp, Homo sapiens
tccagccttgaagagaatggactctggaatctgacgtctgggtttgaatccagcttccaacactcactggctgtgtgactttgggcaagataacttatccycttgtccccatgtgtcattggagataaactacccacctaccagattgttgtaccatgctgggcaaacactaagtgcttaataatggtagcccactgctca

SEQ ID NO: 1517 - DNA, 201 bp, Homo sapiens
ctgggtttgaatccagcttccaacactcactggctgtgtgactttgggcaagataacttatccccttgtccccatgtgtcattggagataaactacccacytaccagattgttgtaccatgctgggcaaacactaagtgcttaataatggtagcccactgctcatgtcgtgtcgtctcctgtcttgatacctgaaaactca

SEQ ID NO: 1518 - DNA, 201 bp, Homo sapiens
tgactttgggcaagataacttatccccttgtccccatgtgtcattggagataaactacccacctaccagattgttgtaccatgctgggcaaacactaagtrcttaataatggtagcccactgctcatgtcgtgtcgtctcctgtcttgatacctgaaaactcaaggggccctgttgtgcttggaggggggtgccgttccca

SEQ ID NO: 1519 - DNA, 201 bp, Homo sapiens
tctcctgtcttgatacctgaaaactcaaggggccctgttgtgcttggaggggggtgccgttcccacaggatattctgtgaagggtgtccctggagctgggyctccaggtggcaagccccaagccaccccggcaggtgccactggccagagttgaactgaggtgttgagtggaaagtgcctccccacccccatctgccacag

SEQ ID NO: 1520 - DNA, 201 bp, Homo sapiens; identical to SEQ ID NO: 1482

SEQ ID NO: 1521 - DNA, 201 bp, Homo sapiens; identical to SEQ ID NO: 1483

SEQ ID NO: 1522 - DNA, 201 bp, Homo sapiens; identical to SEQ ID NO: 1484

SEQ ID NO: 1523 - DNA, 201 bp, Homo sapiens; identical to SEQ ID NO: 1485

SEQ ID NO: 1524 - DNA, 201 bp, Homo sapiens; identical to SEQ ID NO: 1486

SEQ ID NO: 1525 - DNA, 201 bp, Homo sapiens; identical to SEQ ID NO: 1487

SEQ ID NO: 1526 - DNA, 201 bp, Homo sapiens; identical to SEQ ID NO: 1488

SEQ ID NO: 1527 - DNA, 201 bp, Homo sapiens; identical to SEQ ID NO: 1489

SEQ ID NO: 1528 - DNA, 201 bp, Homo sapiens; identical to SEQ ID NO: 1490

SEQ ID NO: 1529 - DNA, 201 bp, Homo sapiens; identical to SEQ ID NO: 1491

SEQ ID NO: 1530 - DNA, 201 bp, Homo sapiens; identical to SEQ ID NO: 1492

SEQ ID NO: 1531 - DNA, 201 bp, Homo sapiens; identical to SEQ ID NO: 1493

SEQ ID NO: 1532 - DNA, 201 bp, Homo sapiens
tgtggcagccgccccagagctggcgatgggagccctggagctggaaagccggaattcaactctggaccctgggaagcctgagatgatgaagtcccccacamacaccaccccacatgtgccggctgagggacctgagcttatttgaagtcctgcctcattctcactggagcctcagtctctcctgcttggtcttggccctca

SEQ ID NO: 1533 - DNA, 201 bp, Homo sapiens; identical to SEQ ID NO: 1495

SEQ ID NO: 1534 - DNA, 201 bp, Homo sapiens; identical to SEQ ID NO: 1496

SEQ ID NO: 1535 - DNA, 201 bp, Homo sapiens; identical to SEQ ID NO: 1497

SEQ ID NO: 1536 - DNA, 201 bp, Homo sapiens; identical to SEQ ID NO: 1498

SEQ ID NO: 1537 - DNA, 201 bp, Homo sapiens; identical to SEQ ID NO: 1500

SEQ ID NO: 1538 - DNA, 201 bp, Homo sapiens; identical to SEQ ID NO: 1501

SEQ ID NO: 1539 - DNA, 201 bp, Homo sapiens; identical to SEQ ID NO: 1502

SEQ ID NO: 1540 - DNA, 201 bp, Homo sapiens; identical to SEQ ID NO: 1503

SEQ ID NO: 1541 - DNA, 201 bp, Homo sapiens; identical to SEQ ID NO: 1504

SEQ ID NO: 1542 - DNA, 201 bp, Homo sapiens; identical to SEQ ID NO: 1505

SEQ ID NO: 1543 - DNA, 201 bp, Homo sapiens; identical to SEQ ID NO: 1506

SEQ ID NO: 1544 - DNA, 201 bp, Homo sapiens; identical to SEQ ID NO: 1507

SEQ ID NO: 1545 - DNA, 201 bp, Homo sapiens; identical to SEQ ID NO: 1508

SEQ ID NO: 1546 - DNA, 201 bp, Homo sapiens; identical to SEQ ID NO: 1509

SEQ ID NO: 1547 - DNA, 201 bp, Homo sapiens; identical to SEQ ID NO: 1510

SEQ ID NO: 1548 - DNA, 201 bp, Homo sapiens; identical to SEQ ID NO: 1511

SEQ ID NO: 1549 - DNA, 201 bp, Homo sapiens; identical to SEQ ID NO: 1512

SEQ ID NO: 1550 - DNA, 201 bp, Homo sapiens; identical to SEQ ID NO: 1513

SEQ ID NO: 1551 - DNA, 201 bp, Homo sapiens; identical to SEQ ID NO: 1514

SEQ ID NO: 1552 - DNA, 201 bp, Homo sapiens; identical to SEQ ID NO: 1515

SEQ ID NO: 1553 - DNA, 201 bp, Homo sapiens; identical to SEQ ID NO: 1516

SEQ ID NO: 1554 - DNA, 201 bp, Homo sapiens; identical to SEQ ID NO: 1517

SEQ ID NO: 1555 - DNA, 201 bp, Homo sapiens; identical to SEQ ID NO: 1518

SEQ ID NO: 1556 - DNA, 201 bp, Homo sapiens; identical to SEQ ID NO: 1519

SEQ ID NO: 1557 - DNA, 201 bp, Homo sapiens
ttagcttcagctcggacttacaaagtacccaagcatctagtctggaactgacagagataagtagagaaaatgttccaaagtctggcacgccccagcttagsctgccattcgctgcaaggttgaacacccccatgggccctggacgaactgtcgtcgttaaaggagaagtgaatgcaaatgccaaaagctttaatgttgacc

SEQ ID NO: 1558 - DNA, 201 bp, Homo sapiens
tttgcaatactttgataaatgaaaaatggggacgggaagagatcacctatgacacgcctttcaaaagagaaaagtcttttgagatcgtgattatggtgctraaggacaaattccaggtggctgtaaatggaaaacatactctgctctatggccacaggatcggcccagagaaaatagacactctgggcatttatggcaaag

SEQ ID NO: 1559 - DNA, 201 bp, Homo sapiens
ggagcgcctgaaacaccagtctttggggccagtgcctcagtttcaatccaggtaacctttaaatgaaacttgcctaaaatcttaggtcatacacagaagakactccaatcgacaagaagctggaaaagaatgatgttgtccttaaacaacctacagaatatcatctataacccggtaatcccgtatgttggcaccattcct

SEQ ID NO: 1560 - DNA, 201 bp, Homo sapiens
atcttaggtcatacacagaagagactccaatcgacaagaagctggaaaagaatgatgttgtccttaaacaacctacagaatatcatctataacccggtaaycccgtatgttggcaccattcctgatcagctggatcctggaactttgattgtgatacgtgggcatgttcctagtgacgcagacagattccaggtggatctg

SEQ ID NO: 1561 - DNA, 201 bp, Homo sapiens
cacagaagagactccaatcgacaagaagctggaaaagaatgatgttgtccttaaacaacctacagaatatcatctataacccggtaatcccgtatgttggyaccattcctgatcagctggatcctggaactttgattgtgatacgtgggcatgttcctagtgacgcagacagattccaggtggatctgcagaatggcagca

SEQ ID NO: 1562 - DNA, 201 bp, Homo sapiens
cattcctgatcagctggatcctggaactttgattgtgatacgtgggcatgttcctagtgacgcagacagattccaggtggatctgcagaatggcagcagcrtgaaacctcgagccgatgtggcctttcatttcaatcctcgtttcaaaagggccggctgcattgtttgcaatactttgataaatgaaaaatggggacggga

SEQ ID NO: 1563 - DNA, 201 bp, Homo sapiens
ttgtaagaaattcttttcttcaggagtcctggggagaagaagagagaaatattacctctttcccatttagtcctgggatgtactttgagatgataatttaytgtgatgttagagaattcaaggttgcagtaaatggcgtacacagcctggagtacaaacacagatttaaagagctcagcagtattgacacgctggaaatta

SEQ ID NO: 1564 - DNA, 201 bp, Homo sapiens
aatactttgataaatgaaaaatggggacgggaagagatcacctatgacacgcctttcaaaagagaaaagtcttttgagatcgtgattatggtgctgaaggmcaaattccaggtggctgtaaatggaaaacatactctgctctatggccacaggatcggcccagagaaaatagacactctgggcatttatggcaaagtgaat

SEQ ID NO: 1565 - DNA, 201 bp, Homo sapiens
ccattcctgatcagctggatcctggaactttgattgtgatacgtgggcatgttcctagtgacgcagacagattccaggtggatctgcagaatggcagcagyatgaaacctcgagccgatgtggcctttcatttcaatcctcgtttcaaaagggccggctgcattgtttgcaatactttgataaatgaaaaatggggacggg

SEQ ID NO: 1566 - DNA, 201 bp, Homo sapiens
tcttttgagatcgtgattatggtgctgaaggacaaattccaggtggctgtaaatggaaaacatactctgctctatggccacaggatcggcccagagaaaayagacactctgggcatttatggcaaagtgaatattcactcaattggttttagcttcagctcggacttacaaagtacccaagcatctagtctggaactgaca

SEQ ID NO: 1567 - DNA, 201 bp, Homo sapiens; identical to SEQ ID NO: 1566

SEQ ID NO: 1568 - DNA, 201 bp, Homo sapiens
accaaaatacagaatggcttctgtgatactggccttgctgaaacgcatctcactgtcattctattgtttatattgttaaaatgagcttgtgcaccattagrtcctgctgggtgttctcagtccttgccatgaagtatggtggtgtctagcactgaatggggaaactgggggcagcaacacttatagccagttaaagccact

SEQ ID NO: 1569 - DNA, 201 bp, Homo sapiens
ccttgctgaaacgcatctcactgtcattctattgtttatattgttaaaatgagcttgtgcaccattaggtcctgctgggtgttctcagtccttgccatgamgtatggtggtgtctagcactgaatggggaaactgggggcagcaacacttatagccagttaaagccactctgccctctctcctactttggctgactcttca

SEQ ID NO: 1570 - DNA, 201 bp, Homo sapiens
gagcttgtgcaccattaggtcctgctgggtgttctcagtccttgccatgaagtatggtggtgtctagcactgaatggggaaactgggggcagcaacacttrtagccagttaaagccactctgccctctctcctactttggctgactcttcaagaatgccattcaacaagtatttatggagtacctactataatacagtagc

SEQ ID NO: 1571 - DNA, 201 bp, Homo sapiens
gactcttcaagaatgccattcaacaagtatttatggagtacctactataatacagtagctaacatgtattgagcacagattttttttggtaaaactgtgargagctaggatatatacttggtgaaacaaaccagtatgttccctgttctcttgagcttcgactcttctgtgcgctactgctgcgcactgctttttctacag

SEQ ID NO: 1572 - DNA, 201 bp, Homo sapiens
gcacagattttttttggtaaaactgtgaagagctaggatatatacttggtgaaacaaaccagtatgttccctgttctcttgagcttcgactcttctgtgckctactgctgcgcactgctttttctacaggcattacatcaactcctaaggggtcctctgggattagttatgcagatattaaatcacccgaagacactaact

SEQ ID NO: 1573 - DNA, 201 bp, Homo sapiens
agattttttttggtaaaactgtgaagagctaggatatatacttggtgaaacaaaccagtatgttccctgttctcttgagcttcgactcttctgtgcgctaytgctgcgcactgctttttctacaggcattacatcaactcctaaggggtcctctgggattagttatgcagatattaaatcacccgaagacactaacttaca

SEQ ID NO: 1574 - DNA, 201 bp, Homo sapiens
cctgttctcttgagcttcgactcttctgtgcgctactgctgcgcactgctttttctacaggcattacatcaactcctaaggggtcctctgggattagttawgcagatattaaatcacccgaagacactaacttacagaagacacaactccttccccagtgatcactgtcataaccagtgctctaccgtatcccatcactga

SEQ ID NO: 1575 - DNA, 201 bp, Homo sapiens
tctcttgagcttcgactcttctgtgcgctactgctgcgcactgctttttctacaggcattacatcaactcctaaggggtcctctgggattagttatgcagmtattaaatcacccgaagacactaacttacagaagacacaactccttccccagtgatcactgtcataaccagtgctctaccgtatcccatcactgaggact

SEQ ID NO: 1576 - DNA, 201 bp, Homo sapiens
cgctactgctgcgcactgctttttctacaggcattacatcaactcctaaggggtcctctgggattagttatgcagatattaaatcacccgaagacactaayttacagaagacacaactccttccccagtgatcactgtcataaccagtgctctaccgtatcccatcactgaggactgatgttgactgacatcattttcttt

SEQ ID NO: 1577 - DNA, 201 bp, Homo sapiens
cccatcactgaggactgatgttgactgacatcattttctttatcgtaataaacatgtggctctattagctgcaagctttaccaagtaattggcatgacatytgagcacagaaattaaggcaaaaaaccaaagcaaaacaaatacatggtgctgaaattaacttgatgccaagcccaaggcagctgatttctgtgtatttga

SEQ ID NO: 1578 - DNA, 201 bp, Homo sapiens
gaaattaacttgatgccaagcccaaggcagctgatttctgtgtatttgaacttagggcaaatcagagtctacacagacgcctacagaaagtttcaggaagmggcaagatgcattcaatttgaaagatatttatgggcaacaaagtaaggtcaggattagacttcaggcattcataaggcaggcactatcagaaagtgtacg

SEQ ID NO: 1579 - DNA, 201 bp, Homo sapiens
gactggggcagaactctgccaggatttaggaatattttcagaacagattttagatattatttctatccatatattgaaaagaataccattgtcaatcttatttttttaaaagtactcagtgtagaaatcgctagcccttaattcttttccagcttttcatattaatgtatgcagagtctcaccaagctcaaagacactggt

SEQ ID NO: 1580 - DNA, 201 bp, Homo sapiens
ggaatattttcagaacagattttagatattatttctatccatatattgaaaagaataccattgtcaatcttatttttttaaaagtactcagtgtagaaatygctagcccttaattcttttccagcttttcatattaatgtatgcagagtctcaccaagctcaaagacactggttgggggtggagggtgccacagggaaagc

SEQ ID NO: 1581 - DNA, 201 bp, Homo sapiens
attaatgtatgcagagtctcaccaagctcaaagacactggttgggggtggagggtgccacagggaaagctgtagaaggcaagaagactcgagaatcccccmgagttatttttctccataaagaccatcagagtgcttaactgagctgttggagactgtgaggcatttaggaaaaaaatagcccactcacatcattccttgt

SEQ ID NO: 1582 - DNA, 201 bp, Homo sapiens
tcttaagttcattttcattttacgtggaggaaaaaaatttaaaaagctattagtatttattaatgaattttactgagacatttcttagaaatatgcacttstatactagcaagctctgtctctaaaatgcaagttggccttttgcttgccacatttctgcattaaacttctatattagcttcaaaggcttttaaactcaat

SEQ ID NO: 1583 - DNA, 201 bp, Homo sapiens
gcacttctatactagcaagctctgtctctaaaatgcaagttggccttttgcttgccacatttctgcattaaacttctatattagcttcaaaggcttttaawctcaatgcgaacattctacgggatgttcttagatgcctttaaaaagggggcagatctaattttatttgaaccctcactttccaacttcaccatgacccag

SEQ ID NO: 1584 - DNA, 201 bp, Homo sapiens
ttcttagttaaccaccaatggaactgggttcattctgaatcctggaggagcttcctcgtgccacccagtgtttctgggccctctgtgtgagcagccaggtrtgagctgttttagaagcagcgtgttgccttcatctctcccgtttcccaaaagaacaaaggataaaggtgacagtcacactcctgggttaaaaaaagcatt

SEQ ID NO: 1585 - DNA, 201 bp, Homo sapiens
gagctgttttagaagcagcgtgttgccttcatctctcccgtttcccaaaagaacaaaggataaaggtgacagtcacactcctgggttaaaaaaagcattcmagaaccacttctctttatgggcacaacaaagaaacgaaggctgaagttcgcctacccaaaatgaaaagtaggctttacagtcaaaagtacttctgttgat

SEQ ID NO: 1586 - DNA, 201 bp, Homo sapiens
aggctttacagtcaaaagtacttctgttgattgctaaataacttcattttcttgaaatagagcaactttgagtgaaatctgcaacatggataccatgtatrtaagatactgctgtacagaagagttaaggcttacagtgcaaatgaggcgtcagctttgggtgctaaaattaacaagtctaatattattaccatcaatcag

SEQ ID NO: 1587 - DNA, 201 bp, Homo sapiens
tctgtataaaaataccgtgtatcatttactctttctgcagctctatacgataggcaggagaggcttatgtggcagcacaagccaggtggggattttgtaamgaagtgataaaacatttgtaagtaatccaagtaggtgtattaaggcaccaaaagtaacatggcacccaacacccaaaaataaaaatatgaaatatgagtg

SEQ ID NO: 1588 - DNA, 153 bp, Homo sapiens
aaaataaaaatatgaaatatgagtgtgaactctgagtagagtatgaaacaccacagaaagtcttagaaatagctctggagtggctctcccaggacagtttscagttgctgaatagtcttttggcactgatgttctacttcttcacattcatct

SEQ ID NO: 1589 - DNA, 107 bp, Homo sapiens
attttgbctttacattttacataatttcagatacattttcctcatatcaaataattcagcattttttagtactaacatcatagtctgtaagccattcaaaaaatgta

SEQ ID NO: 1590 - DNA, 201 bp, Homo sapiens
gtcactaagattcttttattttatgacaaaaccatagttctagaagcttgtttctcccacctgaaaagactggatttgggacatgatcctgtagaacttcrgagccgcccacggacgccagagccgggaaccctgacggcacttagctgctgacaaacaacctgctccgtggagcgcctgaaacaccagtctttggggcca

SEQ ID NO: 1591 - DNA, 201 bp, Homo sapiens
aaatcgcacccagaactgtctacaccaagagcaaagattcgactgtcaatcacactttgacttgcaccaaaataccacctatgaactatgtgtcaaagagsctgccattcgctgcaaggttgaacacccccatgggccctggacgaactgtcgtcgttaaaggagaagtgaatgcaaatgccaaaagctttaatgttgacc

SEQ ID NO: 1592 - DNA, 201 bp, Homo sapiens; identical to SEQ ID NO: 1558

SEQ ID NO: 1593 - DNA, 201 bp, Homo sapiens
ttacaaagtacccaagcatctagtctggaactgacagagataagtagagaaaatgttccaaagtctggcacgccccagcttcctagtaatagaggaggagrcatttctaaaatcgcacccagaactgtctacaccaagagcaaagattcgactgtcaatcacactttgacttgcaccaaaataccacctatgaactatgtg

SEQ ID NO: 1594 - DNA, 201 bp, Homo sapiens; identical to SEQ ID NO: 1559

SEQ ID NO: 1595 - DNA, 201 bp, Homo sapiens; identical to SEQ ID NO: 1560

SEQ ID NO: 1596 - DNA, 201 bp, Homo sapiens; identical to SEQ ID NO: 1561

SEQ ID NO: 1597 - DNA, 201 bp, Homo sapiens
ggcacgccccagcttcctagtaatagaggaggagacatttctaaaatcgcacccagaactgtctacaccaagagcaaagattcgactgtcaatcacacttwgacttgcaccaaaataccacctatgaactatgtgtcaaagaggctgccattcgctgcaaggttgaacacccccatgggccctggacgaactgtcgtcgtt

SEQ ID NO: 1598 - DNA, 201 bp, Homo sapiens
aaaatgttccaaagtctggcacgccccagcttcctagtaatagaggaggagacatttctaaaatcgcacccagaactgtctacaccaagagcaaagattcractgtcaatcacactttgacttgcaccaaaataccacctatgaactatgtgtcaaagaggctgccattcgctgcaaggttgaacacccccatgggccctg

SEQ ID NO: 1599 - DNA, 201 bp, Homo sapiens
tagagaaaatgttccaaagtctggcacgccccagcttcctagtaatagaggaggagacatttctaaaatcgcacccagaactgtctacaccaagagcaaakattcgactgtcaatcacactttgacttgcaccaaaataccacctatgaactatgtgtcaaagaggctgccattcgctgcaaggttgaacacccccatggg

SEQ ID NO: 1600 - DNA, 201 bp, Homo sapiens; identical to SEQ ID NO: 1562

SEQ ID NO: 1601 - DNA, 201 bp, Homo sapiens; identical to SEQ ID NO: 1563

SEQ ID NO: 1602 - DNA, 201 bp, Homo sapiens; identical to SEQ ID NO: 1564

SEQ ID NO: 1603 - DNA, 201 bp, Homo sapiens; identical to SEQ ID NO: 1565

SEQ ID NO: 1604 - DNA, 201 bp, Homo sapiens; identical to SEQ ID NO: 1566

SEQ ID NO: 1605 - DNA, 201 bp, Homo sapiens; identical to SEQ ID NO: 1566

SEQ ID NO: 1606 - DNA, 201 bp, Homo sapiens; identical to SEQ ID NO: 1568

SEQ ID NO: 1607 - DNA, 201 bp, Homo sapiens; identical to SEQ ID NO: 1569

SEQ ID NO: 1608 - DNA, 201 bp, Homo sapiens; identical to SEQ ID NO: 1570

SEQ ID NO: 1609 - DNA, 201 bp, Homo sapiens; identical to SEQ ID NO: 1571

SEQ ID NO: 1610 - DNA, 201 bp, Homo sapiens; identical to SEQ ID NO: 1572

SEQ ID NO: 1611 - DNA, 201 bp, Homo sapiens; identical to SEQ ID NO: 1573

SEQ ID NO: 1612 - DNA, 201 bp, Homo sapiens; identical to SEQ ID NO: 1574

SEQ ID NO: 1613 - DNA, 201 bp, Homo sapiens; identical to SEQ ID NO: 1575

SEQ ID NO: 1614 - DNA, 201 bp, Homo sapiens; identical to SEQ ID NO: 1576

SEQ ID NO: 1615 - DNA, 201 bp, Homo sapiens; identical to SEQ ID NO: 1577

SEQ ID NO: 1616 - DNA, 201 bp, Homo sapiens; identical to SEQ ID NO: 1578

SEQ ID NO: 1617 - DNA, 201 bp, Homo sapiens; identical to SEQ ID NO: 1579

SEQ ID NO: 1618 - DNA, 201 bp, Homo sapiens; identical to SEQ ID NO: 1580

SEQ ID NO: 1619 - DNA, 201 bp, Homo sapiens; identical to SEQ ID NO: 1581

SEQ ID NO: 1620 - DNA, 201 bp, Homo sapiens; identical to SEQ ID NO: 1582

SEQ ID NO: 1621 - DNA, 201 bp, Homo sapiens; identical to SEQ ID NO: 1583

SEQ ID NO: 1622 - DNA, 201 bp, Homo sapiens; identical to SEQ ID NO: 1584

SEQ ID NO: 1623 - DNA, 201 bp, Homo sapiens; identical to SEQ ID NO: 1585

SEQ ID NO: 1624 - DNA, 201 bp, Homo sapiens; identical to SEQ ID NO: 1586

SEQ ID NO: 1625 - DNA, 201 bp, Homo sapiens; identical to SEQ ID NO: 1587

SEQ ID NO: 1626 - DNA, 153 bp, Homo sapiens; identical to SEQ ID NO: 1588

SEQ ID NO: 1627 - DNA, 107 bp, Homo sapiens; identical to SEQ ID NO: 1589

SEQ ID NO: 1628 - DNA, 201 bp, Homo sapiens; identical to SEQ ID NO: 1590

SEQ ID NO: 1629 - DNA, 201 bp, Homo sapiens
acaccagtctttggatggagtctcgttctgttgcccaggctggagtgcagtggcacaatctcggctcacttcaacctccgtctcccaggttcaagcaattstcctgtctcagcctcctgagtagctgggactacagggccagtgcctcagtttcaatccaggtaacctttaaatgaaacttgcctaaaatcttaggtcata

SEQ ID NO: 1630 - DNA, 201 bp, Homo sapiens; identical to SEQ ID NO: 1557

SEQ ID NO: 1631 - DNA, 201 bp, Homo sapiens; identical to SEQ ID NO: 1558

SEQ ID NO: 1632 - DNA, 201 bp, Homo sapiens
agcctcctgagtagctgggactacagggccagtgcctcagtttcaatccaggtaacctttaaatgaaacttgcctaaaatcttaggtcatacacagaagakactccaatcgacaagaagctggaaaagaatgatgttgtccttaaacaacctacagaatatcatctataacccggtaatcccgtatgttggcaccattcct

SEQ ID NO: 1633 - DNA, 201 bp, Homo sapiens; identical to SEQ ID NO: 1560

SEQ ID NO: 1634 - DNA, 201 bp, Homo sapiens; identical to SEQ ID NO: 1561

SEQ ID NO: 1635 - DNA, 201 bp, Homo sapiens; identical to SEQ ID NO: 1562

SEQ ID NO: 1636 - DNA, 201 bp, Homo sapiens; identical to SEQ ID NO: 1563

SEQ ID NO: 1637 - DNA, 201 bp, Homo sapiens; identical to SEQ ID NO: 1564

SEQ ID NO: 1638 - DNA, 201 bp, Homo sapiens; identical to SEQ ID NO: 1565

SEQ ID NO: 1639 - DNA, 201 bp, Homo sapiens; identical to SEQ ID NO: 1566

SEQ ID NO: 1640 - DNA, 201 bp, Homo sapiens; identical to SEQ ID NO: 1566

SEQ ID NO: 1641 - DNA, 201 bp, Homo sapiens; identical to SEQ ID NO: 1568

SEQ ID NO: 1642 - DNA, 201 bp, Homo sapiens; identical to SEQ ID NO: 1569

SEQ ID NO: 1643 - DNA, 201 bp, Homo sapiens; identical to SEQ ID NO: 1570

SEQ ID NO: 1644 - DNA, 201 bp, Homo sapiens; identical to SEQ ID NO: 1571

SEQ ID NO: 1645 - DNA, 201 bp, Homo sapiens; identical to SEQ ID NO: 1572

SEQ ID NO: 1646 - DNA, 201 bp, Homo sapiens; identical to SEQ ID NO: 1573

SEQ ID NO: 1647 - DNA, 201 bp, Homo sapiens; identical to SEQ ID NO: 1574

SEQ ID NO: 1648 - DNA, 201 bp, Homo sapiens; identical to SEQ ID NO: 1575

SEQ ID NO: 1649 - DNA, 201 bp, Homo sapiens; identical to SEQ ID NO: 1576

SEQ ID NO: 1650 - DNA, 201 bp, Homo sapiens; identical to SEQ ID NO: 1577

SEQ ID NO: 1651 - DNA, 201 bp, Homo sapiens; identical to SEQ ID NO: 1578

SEQ ID NO: 1652 - DNA, 201 bp, Homo sapiens; identical to SEQ ID NO: 1579

SEQ ID NO: 1653 - DNA, 201 bp, Homo sapiens; identical to SEQ ID NO: 1580

SEQ ID NO: 1654 - DNA, 201 bp, Homo sapiens; identical to SEQ ID NO: 1581

SEQ ID NO: 1655 - DNA, 201 bp, Homo sapiens; identical to SEQ ID NO: 1582

SEQ ID NO: 1656 - DNA, 201 bp, Homo sapiens; identical to SEQ ID NO: 1583

SEQ ID NO: 1657 - DNA, 201 bp, Homo sapiens; identical to SEQ ID NO: 1584

SEQ ID NO: 1658 - DNA, 201 bp, Homo sapiens; identical to SEQ ID NO: 1585

SEQ ID NO: 1659 - DNA, 201 bp, Homo sapiens; identical to SEQ ID NO: 1586

SEQ ID NO: 1660 - DNA, 201 bp, Homo sapiens; identical to SEQ ID NO: 1587

SEQ ID NO: 1661 - DNA, 153 bp, Homo sapiens; identical to SEQ ID NO: 1588

SEQ ID NO: 1662 - DNA, 201 bp, Homo sapiens
cagagataagtagagaaaatgttccaaagtctggcacgccccagcttgcagactgtctctcccctcctgggatttacagggtcatggctctgaaacattcygtagtgttctttggacacgagttttccctggagatcgctttctgcaggcctcttggtcctgactgtggcttcttttcagaggctgccattcgctgcaagg

SEQ ID NO: 1663 - DNA, 201 bp, Homo sapiens; identical to SEQ ID NO: 1558

SEQ ID NO: 1664 - DNA, 201 bp, Homo sapiens
catggctctgaaacattccgtagtgttctttggacacgagttttccctggagatcgctttctgcaggcctcttggtcctgactgtggcttcttttcagagsctgccattcgctgcaaggttgaacacccccatgggccctggacgaactgtcgtcgttaaaggagaagtgaatgcaaatgccaaaagctttaatgttgacc

SEQ ID NO: 1665 - DNA, 201 bp, Homo sapiens
gggatttacagggtcatggctctgaaacattccgtagtgttctttggacacgagttttccctggagatcgctttctgcaggcctcttggtcctgactgtgscttcttttcagaggctgccattcgctgcaaggttgaacacccccatgggccctggacgaactgtcgtcgttaaaggagaagtgaatgcaaatgccaaaag

SEQ ID NO: 1666 - DNA, 201 bp, Homo sapiens
gagataagtagagaaaatgttccaaagtctggcacgccccagcttgcagactgtctctcccctcctgggatttacagggtcatggctctgaaacattccgkagtgttctttggacacgagttttccctggagatcgctttctgcaggcctcttggtcctgactgtggcttcttttcagaggctgccattcgctgcaaggtt

SEQ ID NO: 1667 - DNA, 201 bp, Homo sapiens
ttacaaagtacccaagcatctagtctggaactgacagagataagtagagaaaatgttccaaagtctggcacgccccagcttgcagactgtctctcccctcstgggatttacagggtcatggctctgaaacattccgtagtgttctttggacacgagttttccctggagatcgctttctgcaggcctcttggtcctgactgt

SEQ ID NO: 1668 - DNA, 201 bp, Homo sapiens; identical to SEQ ID NO: 1559

SEQ ID NO: 1669 - DNA, 201 bp, Homo sapiens; identical to SEQ ID NO: 1560

SEQ ID NO: 1670 - DNA, 201 bp, Homo sapiens; identical to SEQ ID NO: 1561

SEQ ID NO: 1671 - DNA, 181 bp, Homo sapiens
tggacttggatccgaggcagacgaggaagctgagaaaaccctggcgttgaccccgtggacctgggcgccccgggaaggccrgcgcttggtccaggcaggcggggcctgtgcggtgaccaccctggtcctgaaaagtcccagccccgagcgccctccctcctagacctggaggcctggaaca

SEQ ID NO: 1672 - DNA, 201 bp, Homo sapiens
gtagagaaaatgttccaaagtctggcacgccccagcttgcagactgtctctcccctcctgggatttacagggtcatggctctgaaacattccgtagtgttstttggacacgagttttccctggagatcgctttctgcaggcctcttggtcctgactgtggcttcttttcagaggctgccattcgctgcaaggttgaacacc

SEQ ID NO: 1673 - DNA, 201 bp, Homo sapiens; identical to SEQ ID NO: 1562

SEQ ID NO: 1674 - DNA, 201 bp, Homo sapiens; identical to SEQ ID NO: 1564

SEQ ID NO: 1675 - DNA, 201 bp, Homo sapiens; identical to SEQ ID NO: 1565

SEQ ID NO: 1676 - DNA, 201 bp, Homo sapiens; identical to SEQ ID NO: 1566

SEQ ID NO: 1677 - DNA, 201 bp, Homo sapiens; identical to SEQ ID NO: 1566

SEQ ID NO: 1678 - DNA, 201 bp, Homo sapiens; identical to SEQ ID NO: 1563

SEQ ID NO: 1679 - DNA, 201 bp, Homo sapiens; identical to SEQ ID NO: 1568

SEQ ID NO: 1680 - DNA, 201 bp, Homo sapiens; identical to SEQ ID NO: 1569

SEQ ID NO: 1681 - DNA, 201 bp, Homo sapiens; identical to SEQ ID NO: 1570

SEQ ID NO: 1682 - DNA, 201 bp, Homo sapiens; identical to SEQ ID NO: 1571

SEQ ID NO: 1683 - DNA, 201 bp, Homo sapiens; identical to SEQ ID NO: 1572

SEQ ID NO: 1684 - DNA, 201 bp, Homo sapiens; identical to SEQ ID NO: 1573

SEQ ID NO: 1685 - DNA, 201 bp, Homo sapiens; identical to SEQ ID NO: 1574

SEQ ID NO: 1686 - DNA, 201 bp, Homo sapiens; identical to SEQ ID NO: 1575

SEQ ID NO: 1687 - DNA, 201 bp, Homo sapiens; identical to SEQ ID NO: 1576

SEQ ID NO: 1688 - DNA, 201 bp, Homo sapiens; identical to SEQ ID NO: 1577

SEQ ID NO: 1689 - DNA, 201 bp, Homo sapiens; identical to SEQ ID NO: 1578

SEQ ID NO: 1690 - DNA, 201 bp, Homo sapiens; identical to SEQ ID NO: 1579

SEQ ID NO: 1691 - DNA, 201 bp, Homo sapiens; identical to SEQ ID NO: 1580

SEQ ID NO: 1692 - DNA, 201 bp, Homo sapiens; identical to SEQ ID NO: 1581

SEQ ID NO: 1693 - DNA, 201 bp, Homo sapiens; identical to SEQ ID NO: 1582

SEQ ID NO: 1694 - DNA, 201 bp, Homo sapiens; identical to SEQ ID NO: 1583

SEQ ID NO: 1695 - DNA, 201 bp, Homo sapiens; identical to SEQ ID NO: 1584

SEQ ID NO: 1696 - DNA, 201 bp, Homo sapiens; identical to SEQ ID NO: 1585

SEQ ID NO: 1697 - DNA, 201 bp, Homo sapiens; identical to SEQ ID NO: 1586

SEQ ID NO: 1698 - DNA, 201 bp, Homo sapiens; identical to SEQ ID NO: 1587

SEQ ID NO: 1699 - DNA, 153 bp, Homo sapiens; identical to SEQ ID NO: 1588

SEQ ID NO: 1700 - DNA, 195 bp, Homo sapiens
tggacttggatccgaggcagacgaggaagctgagaaaaccctggcgttgaccccgtggacctgggcgccccgggaaggccagcgcttggtccagrcaggcggggcctgtgcggtgaccaccctggtcctgaaaagtcccagccccgagcgccctccctcctagacctggaggcctggaacagccagccgcccacg

SEQ ID NO: 1701 - DNA, 201 bp, Homo sapiens
gcagggactatctgcacttgctcattgggctgtttgagatgatgctcaatggtgccgatgctgttcatttcagagttctgatgaaacttttcataaaggtkcatctagaagatgtttttcagttattcaagttctgttctgttttatggacctatggttctagcctttcaaatccactaaactgcagtgtgaaaacagtgc

SEQ ID NO: 1702 - DNA, 201 bp, Homo sapiens
tacccaaagatattttagatgaggagaagttcaacgtggagttgatagttcagtgcatccgcctttcggagatgccgcagacccatcaccatgcccttttrcttttgggcactgttgctggaatatttccggataaagttttacacaatatcatgtctatttttacatttatgggagccaatgtcatgcgcctagatgata

SEQ ID NO: 1703 - DNA, 201 bp, Homo sapiens
gcttaatgaacaatttcttccactcattaggcttttagaaagcaaataccccagaacattagatgttgtattagaggaacacttaaaggaaattgcagatmtgaaaaaacaagagcttttccatcagtttgtttctctttctacaagtggaggaaagtatcaggagggtgttgatgaatctttcataaaagaagctgtttt

SEQ ID NO: 1704 - DNA, 201 bp, Homo sapiens
acatattaattaaagaagagatactgagtgaaaatgatcagttgtcaaatcaggtggttgtatgtttgctgccatttatggttatcaataatgatgatacrgaatctgctgagatgaaaattgctatatatttatcaaaatcaggaatctgctccctgcaccctctattaagaggctgggaagaagctcttgaaaatgtaa

SEQ ID NO: 1705 - DNA, 201 bp, Homo sapiens
atctctataatcaagatagcctcattgcttgtgttctgccataccacgagacaagaatatttgtgcgagtcatacagcttctaaaaattaataattcaaarcacagatggttctggttgttgccagttaagcaatctggagtgccgttagctaaaggaactttgattacccactgctacaaagatcttggattcatggatt

SEQ ID NO: 1706 - DNA, 201 bp, Homo sapiens
cagcccgtgtcattaaaactccgctggcgtgaaagatgacgtccttagcccagcagctgcaacgactcgccctccctcaaagtgatgccagcctcttatcyagagatgaagttgcttctttgttatttgaccctaaggaagcggccacaatcgacagggacaccgccttcgccattggatgtactggcctggaagagttgc

SEQ ID NO: 1707 - DNA, 201 bp, Homo sapiens
ccttagcccagcagctgcaacgactcgccctccctcaaagtgatgccagcctcttatctagagatgaagttgcttctttgttatttgaccctaaggaagcrgccacaatcgacagggacaccgccttcgccattggatgtactggcctggaagagttgcttggaattgatccttcctttgagcagtttgaagcaccgttgt

SEQ ID NO: 1708 - DNA, 201 bp, Homo sapiens
cgaggtacttaagatagccgctgacatattaattaaagaagagatactgagtgaaaatgatcagttgtcaaatcaggtggttgtatgtttgctgccatttrtggttatcaataatgatgatacggaatctgctgagatgaaaattgctatatatttatcaaaatcaggaatctgctccctgcaccctctattaagaggctg

SEQ ID NO: 1709 - DNA, 201 bp, Homo sapiens
ggtgctagtcagaggccattccctcacttatgtaatgttcctgatcttattacaatacttcatgggatttctgaaacttacgatgtcagtcctcttctgcrttacatgcttccccatctggtcgtctccatcattcatcatgttacaggagaagaaactgaaggaatggatggtcaaatctacaagagacacttagaagct

SEQ ID NO: 1710 - DNA, 201 bp, Homo sapiens
ctagccttctatttgaagagtatatttcatatagttcacaggaagaaatggattctaataaagtgtctttgcttaatgaacaatttcttccactcattagrcttttagaaagcaaataccccagaacattagatgttgtattagaggaacacttaaaggaaattgcagatctgaaaaaacaagagcttttccatcagtttg

SEQ ID NO: 1711 - DNA, 201 bp, Homo sapiens
tcttccaataattttctgaaaaaggtagttgagagtggtggtcctgagattttaaaaggccttgaagagaggttgctggagaccgttctcggctatatcartgcagttgcacagtccatggaaaggaacgcagacaaactcaccgtgaagttctggcgcgcgctccttagtaaagcttacgacctgttagataaggtcaat

SEQ ID NO: 1712 - DNA, 201 bp, Homo sapiens
tgctatcaagatgtttagaacccttgccacaagagcagggaaatatggaatacaccaaacaattaattcttagttgtctgctcaacatctgccaaaaactrtctccagatggtggcaaaatacccaaagatattttagatgaggagaagttcaacgtggagttgatagttcagtgcatccgcctttcggagatgccgcaga

SEQ ID NO: 1713 - DNA, 201 bp, Homo sapiens
attcttagttgtctgctcaacatctgccaaaaactatctccagatggtggcaaaatacccaaagatattttagatgaggagaagttcaacgtggagttgayagttcagtgcatccgcctttcggagatgccgcagacccatcaccatgcccttttacttttgggcactgttgctggaatatttccggataaagttttacac

SEQ ID NO: 1714 - DNA, 201 bp, Homo sapiens
taagaaaaaggaaggggaagaagaacaagcaatcaacagacagacagcgttgtataccttaaagcttttatgcaagaattttggtgcagaaaatccagatscttttgtcccagtgctgaacactgctgtgaaactgattgctccagagagaaaggaggagaagaatgtcctgggaagcgcgctgctgtgcatagcagaggt

SEQ ID NO: 1715 - DNA, 201 bp, Homo sapiens
cacctgataccatgcatcgcacagttttcggtggccatggcggatgactctctttggaaaccactgaactaccagattctgctaaagacgagagactcctygcctaaggttcgatttgctgctttgattactgtgttagcactggctgaaaaactaaaggagaattatattgtcttgctaccagaatccattcctttctta

SEQ ID NO: 1716 - DNA, 201 bp, Homo sapiens
tgaaggtttttgctgagtacccgggcagctcagctcagttgagggtgctcttggctttctatgcttctaccatagtgtcggcgctggtagctgcagaggaygtatcagacaatatcatcgccaaactatttccctatatccaaaagtctttgtacctcactggaaggaggacggagcagacagtctctttgaggcatcatc

SEQ ID NO: 1717 - DNA, 201 bp, Homo sapiens
tggtgcagaaaatccagatccttttgtcccagtgctgaacactgctgtgaaactgattgctccagagagaaaggaggagaagaatgtcctgggaagcgcgytgctgtgcatagcagaggtgacctccaccctggaggcgctggccatcccccagcttcccagcctgatgccatcgttgctgacaacaatgaagaacaccag

SEQ ID NO: 1718 - DNA, 201 bp, Homo sapiens
gaagaacaagcaatcaacagacagacagcgttgtataccttaaagcttttatgcaagaattttggtgcagaaaatccagatccttttgtcccagtgctgarcactgctgtgaaactgattgctccagagagaaaggaggagaagaatgtcctgggaagcgcgctgctgtgcatagcagaggtgacctccaccctggaggcg

SEQ ID NO: 1719 - DNA, 201 bp, Homo sapiens
tggctgataatataaatttaggagatccttcttcaatgttaaagatggaaatcccctcagaatggcacattgaactgatgttagacagagggatcccagtrgagctgtgggcacattatgtagaagagctcaacagcactcagagggtggccgtggaggactcggtttttcttgtattttccttgaaaaaatttatttatg

SEQ ID NO: 1720 - DNA, 201 bp, Homo sapiens
gttgacattttacaacttggcagattgcattgctgaaaagctgaaagggctttttactctgtttgccggccacttagtgaagccttttgctgacaccttgraccaggtgaacatctccaaaacagatgaagcattttttgactctgaaaatgaccctgaaaagtgctgcttgctgttgcagtttattttgaactgtttata

SEQ ID NO: 1721 - DNA, 201 bp, Homo sapiens
acatgggtccgtttatgagcatcttgcaagagcatattggggtgatgaagaaggaagagctcacctcccatcagtctcagctaaccgcctttttcctggargccctggacttccgagcccagcactctgagaacgatctggaggaagttggaaaaacggaaaattgtatcattgactgtctagtagccatggttgtcaaac

SEQ ID NO: 1722 - DNA, 201 bp, Homo sapiens
gtcctgttgcccgccatcaaaaaaacttacaagcagattgagaagaactggaagaatcacatgggtccgtttatgagcatcttgcaagagcatattggggygatgaagaaggaagagctcacctcccatcagtctcagctaaccgcctttttcctggaagccctggacttccgagcccagcactctgagaacgatctggag

SEQ ID NO: 1723 - DNA, 201 bp, Homo sapiens
gttcaacttgttgatacactgggtgcagagaaattcctctggattctcctcatcttgctttttgaacagtatgtcacaaaaacagtgctggcggctgcctrtggcgaaaaggatgctattttagaagcagacactgaattttggttttcagtctgttgtgagtttagtgtccagcatcagatacaaagcttgatgaatatc

SEQ ID NO: 1724 - DNA, 201 bp, Homo sapiens
accctgaaaagtgctgcttgctgttgcagtttattttgaactgtttatacaaaatcttcctttttgatacccagcattttataagtaaagagagagcagargccttgatgatgcctctggtggatcagctggaaaacaggcttgggggagaagagaaattccaggaacgggtgacaaagcacctgataccatgcatcgcac

SEQ ID NO: 1725 - DNA, 201 bp, Homo sapiens
tgatgcctctggtggatcagctggaaaacaggcttgggggagaagagaaattccaggaacgggtgacaaagcacctgataccatgcatcgcacagttttcrgtggccatggcggatgactctctttggaaaccactgaactaccagattctgctaaagacgagagactcctcgcctaaggttcgatttgctgctttgatta

SEQ ID NO: 1726 - DNA, 201 bp, Homo sapiens
cccatccttgttcaacttgttgatacactgggtgcagagaaattcctctggattctcctcatcttgctttttgaacagtatgtcacaaaaacagtgctggyggctgcctgtggcgaaaaggatgctattttagaagcagacactgaattttggttttcagtctgttgtgagtttagtgtccagcatcagatacaaagcttg

SEQ ID NO: 1727 - DNA, 201 bp, Homo sapiens
tattgtcttgctaccagaatccattcctttcttagcagagttgatggaagatgaatgtgaagaagtagaacatcagtgccaaaagactattcagcaactgsaaactgtcctgggagagccactccagagctatttctaagactttctgtggtgtttcatactctactcagagttcacactcatatttcatatttttatttt

SEQ ID NO: 1728 - DNA, 201 bp, Homo sapiens
tagttacccgtttcctaaaactggttccagaccttttggccattgtgcagcgtaagaaaaaggaaggggaagaagaacaagcaatcaacagacagacagcrttgtataccttaaagcttttatgcaagaattttggtgcagaaaatccagatccttttgtcccagtgctgaacactgctgtgaaactgattgctccagaga

SEQ ID NO: 1729 - DNA, 201 bp, Homo sapiens
actcctcgcctaaggttcgatttgctgctttgattactgtgttagcactggctgaaaaactaaaggagaattatattgtcttgctaccagaatccattccyttcttagcagagttgatggaagatgaatgtgaagaagtagaacatcagtgccaaaagactattcagcaactggaaactgtcctgggagagccactccaga

SEQ ID NO: 1730 - DNA, 201 bp, Homo sapiens
gaccttttgaataacaagctgcagcaaaatatatcctggaagaagacaatagttacccgtttcctaaaactggttccagaccttttggccattgtgcagcrtaagaaaaaggaaggggaagaagaacaagcaatcaacagacagacagcgttgtataccttaaagcttttatgcaagaattttggtgcagaaaatccagat

SEQ ID NO: 1731 - DNA, 201 bp, Homo sapiens
cacagagacattcattcctgtgatcagagggctggtgggcaatcccctgccatctgttcgccgcaaagcgctggaccttttgaataacaagctgcagcaaratatatcctggaagaagacaatagttacccgtttcctaaaactggttccagaccttttggccattgtgcagcgtaagaaaaaggaaggggaagaagaaca

SEQ ID NO: 1732 - DNA, 201 bp, Homo sapiens
aaacaggcttgggggagaagagaaattccaggaacgggtgacaaagcacctgataccatgcatcgcacagttttcggtggccatggcggatgactctcttyggaaaccactgaactaccagattctgctaaagacgagagactcctcgcctaaggttcgatttgctgctttgattactgtgttagcactggctgaaaaact

SEQ ID NO: 1733 - DNA, 201 bp, Homo sapiens
ctcattaacctgggaagccccgtaaaagaagttcgtagggctgccattcagtgtctccaggccctcagtggagtggcatccccgttttatctgataatagrtcatttgatttctaaagcagaggagatcacttcagatgctgcctatgttattcaggatttggctactttatttgaggaactacagagagaaaagaaactg

SEQ ID NO: 1734 - DNA, 201 bp, Homo sapiens
cacacaacaaaggaactttacgcgggaatgccaaccattcagatcacagcccttgaaaagattacaaaaccattttttgcagccatatcagatgaaaaagktcagcagaagcttttaagaatgttgtttgatttattggtgaactgtaaaaactcacattgtgctcagactgtcagcagtgtttttaaagggatttccgtt

SEQ ID NO: 1735 - DNA, 201 bp, Homo sapiens
cactcatatttcatatttttatttttgggtgttgggtgccatgttacttttggtgccttaatacacctacttggattacttacaaatgttttatcacttckttacaaaatccccacctggcttgtgctgccacataagcctctcctgcctatcgtatagagctgcagaaagagtaaatgatacacggtatttttatacaga

SEQ ID NO: 1736 - DNA, 201 bp, Homo sapiens
ctgattgatggtaataatattagacttgttaattttagcacccaaagctgacgcctcatttgcactgtaagccttaactcttctgtacagcagtatcttayatacatggtatccatgttgcagatttcactcaaagttgctctatttcaagaaaatgaagttatttagcaatcaacagaagtacttttgactgtaaagcct

SEQ ID NO: 1737 - DNA, 201 bp, Homo sapiens
atcaacagaagtacttttgactgtaaagcctacttttcattttgggtaggcgaacttcagccttcgtttctttgttgtgcccataaagagaagtggttctkgaatgctttttttaacccaggagtgtgactgtcacctttatcctttgttcttttgggaaacgggagagatgaaggcaacacgctgcttctaaaacagctc

SEQ ID NO: 1738 - DNA, 201 bp, Homo sapiens
aatgctttttttaacccaggagtgtgactgtcacctttatcctttgttcttttgggaaacgggagagatgaaggcaacacgctgcttctaaaacagctcayacctggctgctcacacagagggcccagaaacactgggtggcacgaggaagctcctccaggattcagaatgaacccagttccattggtggttaactaagaa

SEQ ID NO: 1739 - DNA, 201 bp, Homo sapiens
ctgggtcatggtgaagttggaaagtgagggttcaaataaaattagatctgccccctttttaaaggcatctaagaacatcccgtagaatgttcgcattgagwttaaaagcctttgaagctaatatagaagtttaatgcagaaatgtggcaagcaaaaggccaacttgcattttagagacagagcttgctagtatagaagtgc

SEQ ID NO: 1740 - DNA, 201 bp, Homo sapiens
attgagtttaaaagcctttgaagctaatatagaagtttaatgcagaaatgtggcaagcaaaaggccaacttgcattttagagacagagcttgctagtatasaagtgcatatttctaagaaatgtctcagtaaaattcattaataaatactaatagctttttaaatttttttcctccacgtaaaatgaaaatgaacttaaga

SEQ ID NO: 1741 - DNA, 201 bp, Homo sapiens
acaaggaatgatgtgagtgggctatttttttcctaaatgcctcacagtctccaacagctcagttaagcactctgatggtctttatggagaaaaataactckgggggattctcgagtcttcttgccttctacagctttccctgtggcaccctccacccccaaccagtgtctttgagcttggtgagactctgcatacattaat

SEQ ID NO: 1742 - DNA, 201 bp, Homo sapiens
gctttccctgtggcaccctccacccccaaccagtgtctttgagcttggtgagactctgcatacattaatatgaaaagctggaaaagaattaagggctagcratttctacactgagtacttttaaaaaaataagattgacaatggtattcttttcaatatatggatagaaataatatctaaaatctgttctgaaaatattcc

SEQ ID NO: 1743 - DNA, 201 bp, Homo sapiens
accagtgtctttgagcttggtgagactctgcatacattaatatgaaaagctggaaaagaattaagggctagcgatttctacactgagtacttttaaaaaaataagattgacaatggtattcttttcaatatatggatagaaataatatctaaaatctgttctgaaaatattcctaaatcctggcagagttctgccccagtc

SEQ ID NO: 1744 - DNA, 201 bp, Homo sapiens; identical to SEQ ID NO: 1701

SEQ ID NO: 1745 - DNA, 201 bp, Homo sapiens; identical to SEQ ID NO: 1702

SEQ ID NO: 1746 - DNA, 201 bp, Homo sapiens
gcttaatgaacaatttcttccactcattaggcttttagaaagcaaataccccagaacattagatgttgtattagaggaacacttaaaggaaattgcagatmtgaaaaaacaagagcttttccatcagtttgtttctctttctacaagtggaggaaagtatcagtttttagcagattctgatacttctttgatgctcagcct

SEQ ID NO: 1747 - DNA, 201 bp, Homo sapiens; identical to SEQ ID NO: 1704

SEQ ID NO: 1748 - DNA, 201 bp, Homo sapiens; identical to SEQ ID NO: 1705

SEQ ID NO: 1749 - DNA, 201 bp, Homo sapiens; identical to SEQ ID NO: 1706

SEQ ID NO: 1750 - DNA, 201 bp, Homo sapiens; identical to SEQ ID NO: 1707

SEQ ID NO: 1751 - DNA, 201 bp, Homo sapiens
cttcaatgttaaagatggtggaggatttaataagcgtgggtgaggaggagtcctttaacctgaagcagaaagtaacgtttcatgtgatcctgtctgtgctygtctcttgttgttcatctttaaaagaaacccactttccatttgcgataagagtcttcagtttgttgcagaaaaaaataaagaagcttgaaagtgtcatta

SEQ ID NO: 1752 - DNA, 201 bp, Homo sapiens; identical to SEQ ID NO: 1708

SEQ ID NO: 1753 - DNA, 201 bp, Homo sapiens
agccttgggaaaaagccattccctcacttatgtaatgttcctgatcttattacaatacttcatgggatttctgaaacttacgatgtcagtcctcttctgcrttacatgcttccccatctggtcgtctccatcattcatcatgttacaggagaagaaactgaaggaatggatggtcaaatctacaagagacacttagaagct

SEQ ID NO: 1754 - DNA, 201 bp, Homo sapiens; identical to SEQ ID NO: 1710

SEQ ID NO: 1755 - DNA, 201 bp, Homo sapiens; identical to SEQ ID NO: 1711

SEQ ID NO: 1756 - DNA, 201 bp, Homo sapiens; identical to SEQ ID NO: 1712

SEQ ID NO: 1757 - DNA, 201 bp, Homo sapiens; identical to SEQ ID NO: 1713

SEQ ID NO: 1758 - DNA, 201 bp, Homo sapiens; identical to SEQ ID NO: 1714

SEQ ID NO: 1759 - DNA, 201 bp, Homo sapiens; identical to SEQ ID NO: 1715

SEQ ID NO: 1760 - DNA, 201 bp, Homo sapiens
tgaaggtttttgctgagtacccgggcagctcagctcagttgagggtgctcttggctttctatgcttctaccatagtgtcggcgctggtagctgcagaggaygtatcagacaatatcatcgccaaactatttccctatatccaaaagggattgaaatcatctttaccagattacagagctgcaacatacatgataatatgtc

SEQ ID NO: 1761 - DNA, 201 bp, Homo sapiens; identical to SEQ ID NO: 1717

SEQ ID NO: 1762 - DNA, 201 bp, Homo sapiens; identical to SEQ ID NO: 1718

SEQ ID NO: 1763 - DNA, 201 bp, Homo sapiens
tgttgcagaaaaaaataaagaagcttgaaagtgtcattactgcagtggaaatcccctcagaatggcacattgaactgatgttagacagagggatcccagtrgagctgtgggcacattatgtagaagagctcaacagcactcagagggtggccgtggaggactcggtttttcttgtattttccttgaaaaaatttatttatg

SEQ ID NO: 1764 - DNA, 201 bp, Homo sapiens
gaaaactaatcggtgtagcaaatcagaagatgattgagttgttggctgataatataaatttaggagatccttcttcaatgttaaagatggtggaggatttrataagcgtgggtgaggaggagtcctttaacctgaagcagaaagtaacgtttcatgtgatcctgtctgtgctcgtctcttgttgttcatctttaaaagaaa

SEQ ID NO: 1765 - DNA, 201 bp, Homo sapiens; identical to SEQ ID NO: 1720

SEQ ID NO: 1766 - DNA, 201 bp, Homo sapiens; identical to SEQ ID NO: 1721

SEQ ID NO: 1767 - DNA, 201 bp, Homo sapiens; identical to SEQ ID NO: 1722

SEQ ID NO: 1768 - DNA, 201 bp, Homo sapiens; identical to SEQ ID NO: 1723

SEQ ID NO: 1769 - DNA, 201 bp, Homo sapiens; identical to SEQ ID NO: 1724

SEQ ID NO: 1770 - DNA, 201 bp, Homo sapiens; identical to SEQ ID NO: 1725

SEQ ID NO: 1771 - DNA, 201 bp, Homo sapiens; identical to SEQ ID NO: 1726

SEQ ID NO: 1772 - DNA, 201 bp, Homo sapiens; identical to SEQ ID NO: 1727

SEQ ID NO: 1773 - DNA, 201 bp, Homo sapiens; identical to SEQ ID NO: 1728

SEQ ID NO: 1774 - DNA, 201 bp, Homo sapiens; identical to SEQ ID NO: 1729

SEQ ID NO: 1775 - DNA, 201 bp, Homo sapiens; identical to SEQ ID NO: 1730

SEQ ID NO: 1776 - DNA, 201 bp, Homo sapiens; identical to SEQ ID NO: 1731

SEQ ID NO: 1777 - DNA, 201 bp, Homo sapiens; identical to SEQ ID NO: 1732

SEQ ID NO: 1778 - DNA, 201 bp, Homo sapiens; identical to SEQ ID NO: 1733

SEQ ID NO: 1779 - DNA, 201 bp, Homo sapiens; identical to SEQ ID NO: 1734

SEQ ID NO: 1780 - DNA, 201 bp, Homo sapiens
cactcatatttcatatttttatttttgggtgttgggtgccatgttacttttggtgccttaatacacctacttggattacttacaaatgttttatcacttckttacaaactgcagaaagagtaaatgatacacggtatttttatacagactgctgtgtttgtttaaacatttattattctcttcctgattgatggtaataat

SEQ ID NO: 1781 - DNA, 201 bp, Homo sapiens; identical to SEQ ID NO: 1736

SEQ ID NO: 1782 - DNA, 201 bp, Homo sapiens; identical to SEQ ID NO: 1737

SEQ ID NO: 1783 - DNA, 201 bp, Homo sapiens; identical to SEQ ID NO: 1738

SEQ ID NO: 1784 - DNA, 201 bp, Homo sapiens; identical to SEQ ID NO: 1739

SEQ ID NO: 1785 - DNA, 201 bp, Homo sapiens; identical to SEQ ID NO: 1740

SEQ ID NO: 1786 - DNA, 201 bp, Homo sapiens; identical to SEQ ID NO: 1741

SEQ ID NO: 1787 - DNA, 201 bp, Homo sapiens; identical to SEQ ID NO: 1742

SEQ ID NO: 1788 - DNA, 201 bp, Homo sapiens; identical to SEQ ID NO: 1743

SEQ ID NO: 1789 - DNA, 201 bp, Homo sapiens; identical to SEQ ID NO: 1701

SEQ ID NO: 1790 - DNA, 201 bp, Homo sapiens; identical to SEQ ID NO: 1702

SEQ ID NO: 1791 - DNA, 201 bp, Homo sapiens; identical to SEQ ID NO: 1703

SEQ ID NO: 1792 - DNA, 201 bp, Homo sapiens; identical to SEQ ID NO: 1704

SEQ ID NO: 1793 - DNA, 201 bp, Homo sapiens; identical to SEQ ID NO: 1705

SEQ ID NO: 1794 - DNA, 201 bp, Homo sapiens; identical to SEQ ID NO: 1706

SEQ ID NO: 1795 - DNA, 201 bp, Homo sapiens; identical to SEQ ID NO: 1707

SEQ ID NO: 1796 - DNA, 201 bp, Homo sapiens; identical to SEQ ID NO: 1708

SEQ ID NO: 1797 - DNA, 201 bp, Homo sapiens; identical to SEQ ID NO: 1753

SEQ ID NO: 1798 - DNA, 201 bp, Homo sapiens; identical to SEQ ID NO: 1710

SEQ ID NO: 1799 - DNA, 201 bp, Homo sapiens; identical to SEQ ID NO: 1711

SEQ ID NO: 1800 - DNA, 201 bp, Homo sapiens; identical to SEQ ID NO: 1712

SEQ ID NO: 1801 - DNA, 201 bp, Homo sapiens; identical to SEQ ID NO: 1713

SEQ ID NO: 1802 - DNA, 201 bp, Homo sapiens; identical to SEQ ID NO: 1714

SEQ ID NO: 1803 - DNA, 201 bp, Homo sapiens; identical to SEQ ID NO: 1715

SEQ ID NO: 1804 - DNA, 201 bp, Homo sapiens; identical to SEQ ID NO: 1760

SEQ ID NO: 1805 - DNA, 201 bp, Homo sapiens; identical to SEQ ID NO: 1717

SEQ ID NO: 1806 - DNA, 201 bp, Homo sapiens; identical to SEQ ID NO: 1718

SEQ ID NO: 1807 - DNA, 201 bp, Homo sapiens; identical to SEQ ID NO: 1719

SEQ ID NO: 1808 - DNA, 201 bp, Homo sapiens; identical to SEQ ID NO: 1720

SEQ ID NO: 1809 - DNA, 201 bp, Homo sapiens; identical to SEQ ID NO: 1721

SEQ ID NO: 1810 - DNA, 201 bp, Homo sapiens; identical to SEQ ID NO: 1722

SEQ ID NO: 1811 - DNA, 201 bp, Homo sapiens; identical to SEQ ID NO: 1723

SEQ ID NO: 1812 - DNA, 201 bp, Homo sapiens; identical to SEQ ID NO: 1724

SEQ ID NO: 1813 - DNA, 201 bp, Homo sapiens; identical to SEQ ID NO: 1725

SEQ ID NO: 1814 - DNA, 201 bp, Homo sapiens; identical to SEQ ID NO: 1726

SEQ ID NO: 1815 - DNA, 201 bp, Homo sapiens; identical to SEQ ID NO: 1727

SEQ ID NO: 1816 - DNA, 201 bp, Homo sapiens; identical to SEQ ID NO: 1728

SEQ ID NO: 1817 - DNA, 201 bp, Homo sapiens; identical to SEQ ID NO: 1729

SEQ ID NO: 1818 - DNA, 201 bp, Homo sapiens; identical to SEQ ID NO: 1730

SEQ ID NO: 1819 - DNA, 201 bp, Homo sapiens; identical to SEQ ID NO: 1731

SEQ ID NO: 1820 - DNA, 201 bp, Homo sapiens; identical to SEQ ID NO: 1732

SEQ ID NO: 1821 - DNA, 201 bp, Homo sapiens; identical to SEQ ID NO: 1733

SEQ ID NO: 1822 - DNA, 201 bp, Homo sapiens; identical to SEQ ID NO: 1734

SEQ ID NO: 1823 - DNA, 201 bp, Homo sapiens; identical to SEQ ID NO: 1735

SEQ ID NO: 1824 - DNA, 201 bp, Homo sapiens; identical to SEQ ID NO: 1736

SEQ ID NO: 1825 - DNA, 201 bp, Homo sapiens; identical to SEQ ID NO: 1737

SEQ ID NO: 1826 - DNA, 201 bp, Homo sapiens; identical to SEQ ID NO: 1738

SEQ ID NO: 1827 - DNA, 201 bp, Homo sapiens; identical to SEQ ID NO: 1739

SEQ ID NO: 1828 - DNA, 201 bp, Homo sapiens; identical to SEQ ID NO: 1740

SEQ ID NO: 1829 - DNA, 201 bp, Homo sapiens; identical to SEQ ID NO: 1741

SEQ ID NO: 1830 - DNA, 201 bp, Homo sapiens; identical to SEQ ID NO: 1742

SEQ ID NO: 1831 - DNA, 201 bp, Homo sapiens; identical to SEQ ID NO: 1743

SEQ ID NO: 1832 - DNA, 201 bp, Homo sapiens; identical to SEQ ID NO: 1715

SEQ ID NO: 1833 - DNA, 201 bp, Homo sapiens; identical to SEQ ID NO: 1721

SEQ ID NO: 1834 - DNA, 201 bp, Homo sapiens; identical to SEQ ID NO: 1722

SEQ ID NO: 1835 - DNA, 201 bp, Homo sapiens; identical to SEQ ID NO: 1724

SEQ ID NO: 1836 - DNA, 201 bp, Homo sapiens; identical to SEQ ID NO: 1720

SEQ ID NO: 1837 - DNA, 201 bp, Homo sapiens; identical to SEQ ID NO: 1725

SEQ ID NO: 1838 - DNA, 201 bp, Homo sapiens; identical to SEQ ID NO: 1727

SEQ ID NO: 1839 - DNA, 201 bp, Homo sapiens; identical to SEQ ID NO: 1729

SEQ ID NO: 1840 - DNA, 201 bp, Homo sapiens; identical to SEQ ID NO: 1732

SEQ ID NO: 1841 - DNA, 201 bp, Homo sapiens; identical to SEQ ID NO: 1735

SEQ ID NO: 1842 - DNA, 201 bp, Homo sapiens; identical to SEQ ID NO: 1736

SEQ ID NO: 1843 - DNA, 201 bp, Homo sapiens; identical to SEQ ID NO: 1737

SEQ ID NO: 1844 - DNA, 201 bp, Homo sapiens; identical to SEQ ID NO: 1738

SEQ ID NO: 1845 - DNA, 201 bp, Homo sapiens; identical to SEQ ID NO: 1739

SEQ ID NO: 1846 - DNA, 201 bp, Homo sapiens; identical to SEQ ID NO: 1740

SEQ ID NO: 1847 - DNA, 201 bp, Homo sapiens; identical to SEQ ID NO: 1741

SEQ ID NO: 1848 - DNA, 201 bp, Homo sapiens; identical to SEQ ID NO: 1742

SEQ ID NO: 1849 - DNA, 201 bp, Homo sapiens; identical to SEQ ID NO: 1743

SEQ ID NO: 1850 - DNA, 201 bp, Homo sapiens; identical to SEQ ID NO: 1701

SEQ ID NO: 1851 - DNA, 201 bp, Homo sapiens; identical to SEQ ID NO: 1702

SEQ ID NO: 1852 - DNA, 201 bp, Homo sapiens; identical to SEQ ID NO: 1703

SEQ ID NO: 1853 - DNA, 201 bp, Homo sapiens; identical to SEQ ID NO: 1704

SEQ ID NO: 1854 - DNA, 201 bp, Homo sapiens; identical to SEQ ID NO: 1705

SEQ ID NO: 1855 - DNA, 201 bp, Homo sapiens; identical to SEQ ID NO: 1706

SEQ ID NO: 1856 - DNA, 201 bp, Homo sapiens; identical to SEQ ID NO: 1707

SEQ ID NO: 1857 - DNA, 201 bp, Homo sapiens; identical to SEQ ID NO: 1708

SEQ ID NO: 1858 - DNA, 201 bp, Homo sapiens; identical to SEQ ID NO: 1709

SEQ ID NO: 1859 - DNA, 201 bp, Homo sapiens; identical to SEQ ID NO: 1710

SEQ ID NO: 1860 - DNA, 201 bp, Homo sapiens; identical to SEQ ID NO: 1711

SEQ ID NO: 1861 - DNA, 201 bp, Homo sapiens; identical to SEQ ID NO: 1712

SEQ ID NO: 1862 - DNA, 201 bp, Homo sapiens; identical to SEQ ID NO: 1713

SEQ ID NO: 1863 - DNA, 201 bp, Homo sapiens; identical to SEQ ID NO: 1714

SEQ ID NO: 1864 - DNA, 201 bp, Homo sapiens; identical to SEQ ID NO: 1715

SEQ ID NO: 1865 - DNA, 201 bp, Homo sapiens; identical to SEQ ID NO: 1716

SEQ ID NO: 1866 - DNA, 201 bp, Homo sapiens; identical to SEQ ID NO: 1717

SEQ ID NO: 1867 - DNA, 201 bp, Homo sapiens; identical to SEQ ID NO: 1718

SEQ ID NO: 1868 - DNA, 201 bp, Homo sapiens; identical to SEQ ID NO: 1719

SEQ ID NO: 1869 - DNA, 201 bp, Homo sapiens; identical to SEQ ID NO: 1721

SEQ ID NO: 1870 - DNA, 201 bp, Homo sapiens; identical to SEQ ID NO: 1722

SEQ ID NO: 1871 - DNA, 201 bp, Homo sapiens; identical to SEQ ID NO: 1723

SEQ ID NO: 1872 - DNA, 201 bp, Homo sapiens; identical to SEQ ID NO: 1724

SEQ ID NO: 1873 - DNA, 201 bp, Homo sapiens; identical to SEQ ID NO: 1720

SEQ ID NO: 1874 - DNA, 201 bp, Homo sapiens; identical to SEQ ID NO: 1725

SEQ ID NO: 1875 - DNA, 201 bp, Homo sapiens; identical to SEQ ID NO: 1726

SEQ ID NO: 1876 - DNA, 201 bp, Homo sapiens; identical to SEQ ID NO: 1727

SEQ ID NO: 1877 - DNA, 201 bp, Homo sapiens; identical to SEQ ID NO: 1728

SEQ ID NO: 1878 - DNA, 201 bp, Homo sapiens; identical to SEQ ID NO: 1729

SEQ ID NO: 1879 - DNA, 201 bp, Homo sapiens; identical to SEQ ID NO: 1730

SEQ ID NO: 1880 - DNA, 201 bp, Homo sapiens; identical to SEQ ID NO: 1731

SEQ ID NO: 1881 - DNA, 201 bp, Homo sapiens; identical to SEQ ID NO: 1732

SEQ ID NO: 1882 - DNA, 201 bp, Homo sapiens; identical to SEQ ID NO: 1733

SEQ ID NO: 1883 - DNA, 201 bp, Homo sapiens; identical to SEQ ID NO: 1734

SEQ ID NO: 1884 - DNA, 201 bp, Homo sapiens; identical to SEQ ID NO: 1735

SEQ ID NO: 1885 - DNA, 201 bp, Homo sapiens; identical to SEQ ID NO: 1736

SEQ ID NO: 1886 - DNA, 201 bp, Homo sapiens; identical to SEQ ID NO: 1737

SEQ ID NO: 1887 - DNA, 201 bp, Homo sapiens; identical to SEQ ID NO: 1738

SEQ ID NO: 1888 - DNA, 201 bp, Homo sapiens; identical to SEQ ID NO: 1739

SEQ ID NO: 1889 - DNA, 201 bp, Homo sapiens; identical to SEQ ID NO: 1740

SEQ ID NO: 1890 - DNA, 201 bp, Homo sapiens; identical to SEQ ID NO: 1741

SEQ ID NO: 1891 - DNA, 201 bp, Homo sapiens; identical to SEQ ID NO: 1742

SEQ ID NO: 1892 - DNA, 201 bp, Homo sapiens; identical to SEQ ID NO: 1743

SEQ ID NO: 1893 - DNA, 201 bp, Homo sapiens; identical to SEQ ID NO: 1701

SEQ ID NO: 1894 - DNA, 201 bp, Homo sapiens; identical to SEQ ID NO: 1702

SEQ ID NO: 1895 - DNA, 201 bp, Homo sapiens; identical to SEQ ID NO: 1703

SEQ ID NO: 1896 - DNA, 201 bp, Homo sapiens; identical to SEQ ID NO: 1704

SEQ ID NO: 1897 - DNA, 201 bp, Homo sapiens; identical to SEQ ID NO: 1705

SEQ ID NO: 1898 - DNA, 201 bp, Homo sapiens; identical to SEQ ID NO: 1707

SEQ ID NO: 1899 - DNA, 201 bp, Homo sapiens; identical to SEQ ID NO: 1706

SEQ ID NO: 1900 - DNA, 201 bp, Homo sapiens; identical to SEQ ID NO: 1708

SEQ ID NO: 1901 - DNA, 201 bp, Homo sapiens; identical to SEQ ID NO: 1709

SEQ ID NO: 1902 - DNA, 201 bp, Homo sapiens; identical to SEQ ID NO: 1710

SEQ ID NO: 1903 - DNA, 201 bp, Homo sapiens; identical to SEQ ID NO: 1711

SEQ ID NO: 1904 - DNA, 201 bp, Homo sapiens; identical to SEQ ID NO: 1713

SEQ ID NO: 1905 - DNA, 201 bp, Homo sapiens; identical to SEQ ID NO: 1712

SEQ ID NO: 1906 - DNA, 201 bp, Homo sapiens; identical to SEQ ID NO: 1714

SEQ ID NO: 1907 - DNA, 201 bp, Homo sapiens; identical to SEQ ID NO: 1715

SEQ ID NO: 1908 - DNA, 201 bp, Homo sapiens; identical to SEQ ID NO: 1716

SEQ ID NO: 1909 - DNA, 201 bp, Homo sapiens; identical to SEQ ID NO: 1717

SEQ ID NO: 1910 - DNA, 201 bp, Homo sapiens; identical to SEQ ID NO: 1718

SEQ ID NO: 1911 - DNA, 201 bp, Homo sapiens; identical to SEQ ID NO: 1719

SEQ ID NO: 1912 - DNA, 201 bp, Homo sapiens; identical to SEQ ID NO: 1721

SEQ ID NO: 1913 - DNA, 201 bp, Homo sapiens; identical to SEQ ID NO: 1722

SEQ ID NO: 1914 - DNA, 201 bp, Homo sapiens; identical to SEQ ID NO: 1723

SEQ ID NO: 1915 - DNA, 201 bp, Homo sapiens; identical to SEQ ID NO: 1724

SEQ ID NO: 1916 - DNA, 201 bp, Homo sapiens; identical to SEQ ID NO: 1720

SEQ ID NO: 1917 - DNA, 201 bp, Homo sapiens; identical to SEQ ID NO: 1725

SEQ ID NO: 1918 - DNA, 201 bp, Homo sapiens; identical to SEQ ID NO: 1726

SEQ ID NO: 1919 - DNA, 201 bp, Homo sapiens; identical to SEQ ID NO: 1727

SEQ ID NO: 1920 - DNA, 201 bp, Homo sapiens; identical to SEQ ID NO: 1728

SEQ ID NO: 1921 - DNA, 201 bp, Homo sapiens; identical to SEQ ID NO: 1729

SEQ ID NO: 1922 - DNA, 201 bp, Homo sapiens; identical to SEQ ID NO: 1730

SEQ ID NO: 1923 - DNA, 201 bp, Homo sapiens; identical to SEQ ID NO: 1731

SEQ ID NO: 1924 - DNA, 201 bp, Homo sapiens; identical to SEQ ID NO: 1732

SEQ ID NO: 1925 - DNA, 201 bp, Homo sapiens; identical to SEQ ID NO: 1733

SEQ ID NO: 1926 - DNA, 201 bp, Homo sapiens; identical to SEQ ID NO: 1734

SEQ ID NO: 1927 - DNA, 201 bp, Homo sapiens; identical to SEQ ID NO: 1780

SEQ ID NO: 1928 - DNA, 201 bp, Homo sapiens; identical to SEQ ID NO: 1736

SEQ ID NO: 1929 - DNA, 201 bp, Homo sapiens; identical to SEQ ID NO: 1737

SEQ ID NO: 1930 - DNA, 201 bp, Homo sapiens; identical to SEQ ID NO: 1738

SEQ ID NO: 1931 - DNA, 201 bp, Homo sapiens; identical to SEQ ID NO: 1739

SEQ ID NO: 1932 - DNA, 201 bp, Homo sapiens; identical to SEQ ID NO: 1740

SEQ ID NO: 1933 - DNA, 201 bp, Homo sapiens; identical to SEQ ID NO: 1741

SEQ ID NO: 1934 - DNA, 201 bp, Homo sapiens; identical to SEQ ID NO: 1742

SEQ ID NO: 1935 - DNA, 201 bp, Homo sapiens; identical to SEQ ID NO: 1743

SEQ ID NO: 1936 - DNA, 201 bp, Homo sapiens
acatggataccgtctctgtcgtggctgctttgaactcagacctttgtgtctctggagggaaagataagacagttgtggcctataattggaaaactggaaakgtggtgaaaaggttcaaaggacatgaacatgagatcaccaaggtagcctgtattcccaaatccagccagttcttcagtgcctctcgtgacaggatggtca

SEQ ID NO: 1937 - DNA, 201 bp, Homo sapiens
agggaaagataagacagttgtggcctataattggaaaactggaaatgtggtgaaaaggttcaaaggacatgaacatgagatcaccaaggtagcctgtattyccaaatccagccagttcttcagtgcctctcgtgacaggatggtcatgatgtgggacttgcacggttcctcacaaccaaggcagcaattgtgtggccatgc

SEQ ID NO: 1938 - DNA, 201 bp, Homo sapiens
acgttgtgggacctaagacagactcgaaacagaatatgtgagtataaggggcatttccagactgtcgcatcctgcgtctttctaccaagagcattggcctygatgcctttaattgctacctcatcacatgattgcaaggtgaagatttggaaccaagatactggagcctgccttttcaccttgtctctggatggatcagga

SEQ ID NO: 1939 - DNA, 201 bp, Homo sapiens
catatgtttcctgcaaagcagcacattcagacctactgtgaagtcagtgtggatggacacaagtgtatctcctgcagcaatggctttggaggagaaggctstgaagccacgttgtgggacctaagacagactcgaaacagaatatgtgagtataaggggcatttccagactgtcgcatcctgcgtctttctaccaagagca

SEQ ID NO: 1940 - DNA, 201 bp, Homo sapiens; identical to SEQ ID NO: 1939

SEQ ID NO: 1941 - DNA, 201 bp, Homo sapiens; identical to SEQ ID NO: 1939

SEQ ID NO: 1942 - DNA, 201 bp, Homo sapiens; identical to SEQ ID NO: 1939

SEQ ID NO: 1943 - DNA, 190 bp, Homo sapiens
gctcggaggctgttcccacccccaggctccgcgttcccgccggccccagctccagccccgcagcccaccgtgcaaacatgcttagacagrgaagagattaacttcagtggcttcccactaattacagagattaagaagtggctgcctgaactattttccaaaggatacacattacaaattattgaatagg

SEQ ID NO: 1944 - DNA, 201 bp, Homo sapiens
gcttttaggactactcttcaaaaaaagtgtattgctcagaatgatgacctgtaaatgtaagagtggcaggcctctgtctgtgaaagtcagaacacagggcycgagcctctggaactgaccctttgcaagtctttacaaaagaaaaaaggcagtggggagagagagtgttttggttacatcagaaataattgagatgggaaa

SEQ ID NO: 1945 - DNA, 201 bp, Homo sapiens
ggagagagagtgttttggttacatcagaaataattgagatgggaaagaatagtgcagctccatagaggagacggactgtagacaatgagattaagcttcartcactgctcctcagcaatgtgaagaatcaaagtcagggcaagaaagcgaaagcttggacttctattcaaagtggcagcagagtgggagggcggtaccctt

SEQ ID NO: 1946 - DNA, 201 bp, Homo sapiens
gagctgaggtatgaatctgggtctgcctgactcaaagcccaaacgctttcctttgcatcgtgtcacaaagtcatagaccatgacattgtttgtatcttcargaccagttattaactttctggctccaaggagatcccctgcccaagtgcctaggggcagtagacagctgtctcagggacagtcgtagcatgtgctggatta

SEQ ID NO: 1947 - DNA, 201 bp, Homo sapiens; identical to SEQ ID NO: 1936

SEQ ID NO: 1948 - DNA, 201 bp, Homo sapiens; identical to SEQ ID NO: 1937

SEQ ID NO: 1949 - DNA, 201 bp, Homo sapiens; identical to SEQ ID NO: 1938

SEQ ID NO: 1950 - DNA, 201 bp, Homo sapiens; identical to SEQ ID NO: 1939

SEQ ID NO: 1951 - DNA, 201 bp, Homo sapiens; identical to SEQ ID NO: 1939

SEQ ID NO: 1952 - DNA, 201 bp, Homo sapiens; identical to SEQ ID NO: 1939

SEQ ID NO: 1953 - DNA, 201 bp, Homo sapiens; identical to SEQ ID NO: 1939

SEQ ID NO: 1954 - DNA, 201 bp, Homo sapiens; identical to SEQ ID NO: 1944

SEQ ID NO: 1955 - DNA, 201 bp, Homo sapiens; identical to SEQ ID NO: 1945

SEQ ID NO: 1956 - DNA, 201 bp, Homo sapiens
ggagaatcacttgaacctgggaggcagagtttgcagtgagctgagattgtgccactgcactccagtctgtgtgacagaatgagaccttgtcttgaaaaaamaaaaaacaaaaaaccacatacaggaaaaaagagagggatggagtcaactgtgccccagacattaagcccccttcagtgaggaggggcaaggtgctcaggc

SEQ ID NO: 1957 - DNA, 201 bp, Homo sapiens
aactgtgccccagacattaagcccccttcagtgaggaggggcaaggtgctcaggcctgcctgtgtggcccccaggagtcagacctcagcctcatgctcacwggtccattttcctccagggaaaatggagttctttctgccttcagagatgcccacacataaggcacatgaggctgttggtgacaccatcaccaacactgga

SEQ ID NO: 1958 - DNA, 201 bp, Homo sapiens
gggaaaatggagttctttctgccttcagagatgcccacacataaggcacatgaggctgttggtgacaccatcaccaacactggagattccctttctgacamgtcccagccaaagaaagattttgcatttgtcttctctgtcctctgcttgtctctgataccagtgactgacagccaccttccttcttccctctcttggtgt

SEQ ID NO: 1959 - DNA, 167 bp, Homo sapiens
caccatcaccaacactggagattccctttctgacaagtcccagccaaagaaagattttgcatttgtcttctctgtcctctgcttgtctctgataccagtgrctgacagccaccttccttcttccctctcttggtgtgatcatggctaactgcagcctcaatcaccag

SEQ ID NO: 1960 - DNA, 201 bp, Homo sapiens; identical to SEQ ID NO: 1936

SEQ ID NO: 1961 - DNA, 201 bp, Homo sapiens; identical to SEQ ID NO: 1937

SEQ ID NO: 1962 - DNA, 201 bp, Homo sapiens; identical to SEQ ID NO: 1938

SEQ ID NO: 1963 - DNA, 201 bp, Homo sapiens; identical to SEQ ID NO: 1939

SEQ ID NO: 1964 - DNA, 201 bp, Homo sapiens; identical to SEQ ID NO: 1939

SEQ ID NO: 1965 - DNA, 201 bp, Homo sapiens; identical to SEQ ID NO: 1939

SEQ ID NO: 1966 - DNA, 201 bp, Homo sapiens; identical to SEQ ID NO: 1939

SEQ ID NO: 1967 - DNA, 201 bp, Homo sapiens; identical to SEQ ID NO: 1944

SEQ ID NO: 1968 - DNA, 201 bp, Homo sapiens; identical to SEQ ID NO: 1945

SEQ ID NO: 1969 - DNA, 201 bp, Homo sapiens; identical to SEQ ID NO: 1946

SEQ ID NO: 1970 - DNA, 201 bp, Homo sapiens
aggtcagctttgcggcgcccccaaactccagccacccgtcgtctccgtgccctccagaatgtagctgctgaccccgcgccccccggactccagcagcagtstccgccacctccgggctccagcagccaactcttgtgtctctcaggaacccgccgacgtctccgcgtcccccggattccaggttcgcgacccccgccgtct

SEQ ID NO: 1971 - DNA, 201 bp, Homo sapiens
acggcctgtcggtgagctcgtcctccaccggctcgctgggctcggcggccggggcgggcggcggcgggggcgcggggctgcggttactgtctgccaacgtrcgccagctgcaccaagcgctgaccgcgctgctgagcgaggcggagcgggagcagttcacccactgcctgaacgcttaccacgcgcgccgcaacgtcttcg

SEQ ID NO: 1972 - DNA, 201 bp, Homo sapiens
cgcctccgggactctagcagcggtctccgcgaccccctaggatccagccactgtacccgtgctccccaaacccaggctccagccgtcgtctccgcgctccyggggatccagctgtcgcgccagtacccgcgaggacagcggcaccgcccacaccccgcgcgctcagagcccggccgggcctcggcgtggagatgaacgcgc

SEQ ID NO: 1973 - DNA, 201 bp, Homo sapiens
gcgcggaggctccccgggcggctgcatcccggggctgccccggacatgccccgcaccccttgtcggacgcccgcgccgcttcaccggctgccactccccgragtgctctgggactagagcgccctccgccccaacttctgactttggggtcccccagccctagaggaacgggcgcccggctgggggagccccgggcatggt

SEQ ID NO: 1974 - DNA, 201 bp, Homo sapiens
cgccctccgccccaacttctgactttggggtcccccagccctagaggaacgggcgcccggctgggggagccccgggcatggtgtgacggggcagtcaggtmagctttgcggcgcccccaaactccagccacccgtcgtctccgtgccctccagaatgtagctgctgaccccgcgccccccggactccagcagcagtctccg

SEQ ID NO: 1975 - DNA, 201 bp, Homo sapiens
gggcggagctttctcaacatcctacacgacgaggctgtcaggctgcttaagtcatctcggcacctcatcctgacagtgaaggacgtcgggaggctgccccrtgcccgcaccactgtggacgagaccaagtggatcgccagttcccggatcagggagaccatggcgaactcggcagggtttcttggcgatctcacaacagaa

SEQ ID NO: 1976 - DNA, 201 bp, Homo sapiens
agcactttgtcatggtggaggtccaccgccccgacagcgagccagacgtcaatgaagtgagggcgctgccccagacgcgcacagcctctacgctctcccasctctcggacagcgggcagactctaagcgaggacagtggtgtggatgctggcgaggcagaggccagcgccccaggccgaggaaggcagtcggtgtccacca

SEQ ID NO: 1977 - DNA, 201 bp, Homo sapiens
ctctcccagctctcggacagcgggcagactctaagcgaggacagtggtgtggatgctggcgaggcagaggccagcgccccaggccgaggaaggcagtcggygtccaccaagagcaggagtagcaaggagctgcctcggaacgagaggcccacagatggggccaacaaaccgcctggacttctggagcccacgtccactctg

SEQ ID NO: 1978 - DNA, 201 bp, Homo sapiens
gccccgacagcgagccagacgtcaatgaagtgagggcgctgccccagacgcgcacagcctctacgctctcccagctctcggacagcgggcagactctaagygaggacagtggtgtggatgctggcgaggcagaggccagcgccccaggccgaggaaggcagtcggtgtccaccaagagcaggagtagcaaggagctgcctc

SEQ ID NO: 1979 - DNA, 201 bp, Homo sapiens
cacaggcagccacggcacctccaccaccgtcagctcggccaggaacactctggacctggaggaaactggcgaggctgtccagggcaatatcaacgccctcscagatgtgtccgtggatgatgtcagatccacctcccaggggctgtcaagcttcaagccactgcctcgcccaccacctctggcccaaggcaacgacctccc

SEQ ID NO: 1980 - DNA, 201 bp, Homo sapiens
gggcccagccggctcccaggtgaccctgagcagcctggggaaccagacacgagtgctgctggaggagcaggctcggcacctgctgaacgagcaggaacacrccaccatggcctactacctggatgagtaccgtggcggcagcgtctctgtggaggccctcgtcatggccctgttcaagctgctcaacacccacgccaagtt

SEQ ID NO: 1981 - DNA, 201 bp, Homo sapiens
acagtggtgtggatgctggcgaggcagaggccagcgccccaggccgaggaaggcagtcggtgtccaccaagagcaggagtagcaaggagctgcctcggaamgagaggcccacagatggggccaacaaaccgcctggacttctggagcccacgtccactctggtccgtgtgaagaaaagtgcggccaccctgggcatcgcca

SEQ ID NO: 1982 - DNA, 147 bp, Homo sapiens
aaactcctaggcagcagaggcccacgactacttcctcctgagtgccrttcagtggcctgtgtccaggctctgaagggctccaagaagctggtgctgtctgtgtactcagcagggcgcatccctgggggctacgtcaccaaccacatc

SEQ ID NO: 1983 - DNA, 201 bp, Homo sapiens
ccatctatgcctccgtctcccctgccaaccccagctccaagaggccgctggacgcccatctggccctggtcaaccaacaccccatcggccccttcccacgsgtccagtcacccccgcacctgaaaagcccctctgcagaggccacagtggctgggggctgccttctgcccccatcaccctctggccacccagaccagacag

SEQ ID NO: 1984 - DNA, 201 bp, Homo sapiens
agttctcactcctctctgaggtgagaggcaccatttccccgcaagacctagaacgcttcgaccacctggtgctgaggcgtgagattgagtccatgaaggcrcggcagcccccaggccccggggctggggacacctactccatggtctcctacagtgacacgggttcatccacaggcagccacggcacctccaccaccgtca

SEQ ID NO: 1985 - DNA, 201 bp, Homo sapiens
tggggaaccagacacgagtgctgctggaggagcaggctcggcacctgctgaacgagcaggaacacgccaccatggcctactacctggatgagtaccgtggyggcagcgtctctgtggaggccctcgtcatggccctgttcaagctgctcaacacccacgccaagttctcactcctctctgaggtgagaggcaccatttccc

SEQ ID NO: 1986 - DNA, 201 bp, Homo sapiens
tttcttggcgatctcacaacagaaggaataaacaagccaggattttacaagggcccagccggctcccaggtgaccctgagcagcctggggaaccagacacsagtgctgctggaggagcaggctcggcacctgctgaacgagcaggaacacgccaccatggcctactacctggatgagtaccgtggcggcagcgtctctgtg

SEQ ID NO: 1987 - DNA, 201 bp, Homo sapiens
ggcagtcggtgtccaccaagagcaggagtagcaaggagctgcctcggaacgagaggcccacagatggggccaacaaaccgcctggacttctggagcccacrtccactctggtccgtgtgaagaaaagtgcggccaccctgggcatcgccatcgagggtggcgccaacacccgccagcccctgcctaggattgtcactattc

SEQ ID NO: 1988 - DNA, 201 bp, Homo sapiens
aagccactgcctcgcccaccacctctggcccaaggcaacgacctcccactaggccagccaaggaagctggggagagaggacctccagccaccttcctccaygccttcctgctcgggcactgtcttctcggctccacagaaccgcagcccgccagcgggcaccgcacccaccccagggacctcctctgcacaggacttgccc

SEQ ID NO: 1989 - DNA, 201 bp, Homo sapiens
cggctcccaggtgaccctgagcagcctggggaaccagacacgagtgctgctggaggagcaggctcggcacctgctgaacgagcaggaacacgccaccatgkcctactacctggatgagtaccgtggcggcagcgtctctgtggaggccctcgtcatggccctgttcaagctgctcaacacccacgccaagttctcactcct

SEQ ID NO: 1990 - DNA, 201 bp, Homo sapiens; identical to SEQ ID NO: 1976

SEQ ID NO: 1991 - DNA, 201 bp, Homo sapiens; identical to SEQ ID NO: 1977

SEQ ID NO: 1992 - DNA, 201 bp, Homo sapiens; identical to SEQ ID NO: 1978

SEQ ID NO: 1993 - DNA, 201 bp, Homo sapiens; identical to SEQ ID NO: 1979

SEQ ID NO: 1994 - DNA, 201 bp, Homo sapiens; identical to SEQ ID NO: 1980

SEQ ID NO: 1995 - DNA, 201 bp, Homo sapiens
gttcaccggcccctaagctcctgagggttggcctgaccctgaggttgcctgtcaatcaccatttcttccctccactccttgtgttacctgcctggtcctgmggggttggcaacaactcaggagcccacctcgggtggttttggaggtgccgtgcacactgctgattgggaggctggacgctgccagtctgtccggagtttc

SEQ ID NO: 1996 - DNA, 201 bp, Homo sapiens; identical to SEQ ID NO: 1981

SEQ ID NO: 1997 - DNA, 201 bp, Homo sapiens; identical to SEQ ID NO: 1984

SEQ ID NO: 1998 - DNA, 201 bp, Homo sapiens
ttcaccggcccctaagctcctgagggttggcctgaccctgaggttgcctgtcaatcaccatttcttccctccactccttgtgttacctgcctggtcctgcrgggttggcaacaactcaggagcccacctcgggtggttttggaggtgccgtgcacactgctgattgggaggctggacgctgccagtctgtccggagtttcc

SEQ ID NO: 1999 - DNA, 201 bp, Homo sapiens; identical to SEQ ID NO: 1985

SEQ ID NO: 2000 - DNA, 201 bp, Homo sapiens; identical to SEQ ID NO: 1986

SEQ ID NO: 2001 - DNA, 201 bp, Homo sapiens; identical to SEQ ID NO: 1987

SEQ ID NO: 2002 - DNA, 201 bp, Homo sapiens; identical to SEQ ID NO: 1983

SEQ ID NO: 2003 - DNA, 201 bp, Homo sapiens; identical to SEQ ID NO: 1988

SEQ ID NO: 2004 - DNA, 201 bp, Homo sapiens; identical to SEQ ID NO: 1989

SEQ ID NO: 2005 - DNA, 201 bp, Homo sapiens; identical to SEQ ID NO: 1975

SEQ ID NO: 2006 - DNA, 201 bp, Homo sapiens; identical to SEQ ID NO: 1970

SEQ ID NO: 2007 - DNA, 201 bp, Homo sapiens; identical to SEQ ID NO: 1976

SEQ ID NO: 2008 - DNA, 201 bp, Homo sapiens; identical to SEQ ID NO: 1977

SEQ ID NO: 2009 - DNA, 201 bp, Homo sapiens; identical to SEQ ID NO: 1978

SEQ ID NO: 2010 - DNA, 201 bp, Homo sapiens; identical to SEQ ID NO: 1979

SEQ ID NO: 2011 - DNA, 201 bp, Homo sapiens; identical to SEQ ID NO: 1980

SEQ ID NO: 2012 - DNA, 201 bp, Homo sapiens; identical to SEQ ID NO: 1971

SEQ ID NO: 2013 - DNA, 201 bp, Homo sapiens; identical to SEQ ID NO: 1972

SEQ ID NO: 2014 - DNA, 201 bp, Homo sapiens; identical to SEQ ID NO: 1981

SEQ ID NO: 2015 - DNA, 201 bp, Homo sapiens; identical to SEQ ID NO: 1984

SEQ ID NO: 2016 - DNA, 201 bp, Homo sapiens; identical to SEQ ID NO: 1985

SEQ ID NO: 2017 - DNA, 201 bp, Homo sapiens; identical to SEQ ID NO: 1986

SEQ ID NO: 2018 - DNA, 201 bp, Homo sapiens; identical to SEQ ID NO: 1987

SEQ ID NO: 2019 - DNA, 201 bp, Homo sapiens; identical to SEQ ID NO: 1983

SEQ ID NO: 2020 - DNA, 201 bp, Homo sapiens; identical to SEQ ID NO: 1973

SEQ ID NO: 2021 - DNA, 201 bp, Homo sapiens; identical to SEQ ID NO: 1974

SEQ ID NO: 2022 - DNA, 201 bp, Homo sapiens; identical to SEQ ID NO: 1988

SEQ ID NO: 2023 - DNA, 201 bp, Homo sapiens; identical to SEQ ID NO: 1989

SEQ ID NO: 2024 - DNA, 201 bp, Homo sapiens
agatggcggttcctggctcagagtttgaggggcacaaacggatttctgaacagccccttcccaacaagacaatcagcccacccccagcccccgcccctgcygctgcgcctctaccctgtggaccaacagagaccatccccagcttcctgctcaccagggcagggcgagaccaggccatctgtgagctgcaagaagaggtgt

SEQ ID NO: 2025 - DNA, 201 bp, Homo sapiens
aggggcacaaacggatttctgaacagccccttcccaacaagacaatcagcccacccccagcccccgcccctgccgctgcgcctctaccctgtggaccaacrgagaccatccccagcttcctgctcaccagggcagggcgagaccaggccatctgtgagctgcaagaagaggtgtcccggcttcgtctgcggctggaagaca

SEQ ID NO: 2026 - DNA, 201 bp, Homo sapiens
cggcttcgtctgcggctggaagacagcctgcaccagccactccagggcagcccgacacgcccagcatctgcctttgaccgccccgcccggacccgcggccrgccagcagactccccagccacctggggctcccattatggcagtaaatccacagagagattgcctggtgagcctagaggtgaagagcagattgtccctcca

SEQ ID NO: 2027 - DNA, 201 bp, Homo sapiens; identical to SEQ ID NO: 2026

SEQ ID NO: 2028 - DNA, 201 bp, Homo sapiens; identical to SEQ ID NO: 2026

SEQ ID NO: 2029 - DNA, 201 bp, Homo sapiens; identical to SEQ ID NO: 2026

SEQ ID NO: 2030 - DNA, 201 bp, Homo sapiens
ggcggggtcgtcgccacgcccaccccccggactgtggtatctggcaacagcgcccccagcaccagcccctccagcctttgcctacatctcctcggttcccrtcatgccttatccacctgccgctgtgtactatgcgcctgcaggacctacctcagcccaaccagctgccaagtggccgcccacagcctctcccccaccagc

SEQ ID NO: 2031 - DNA, 201 bp, Homo sapiens
gagaaggccaccacgaggagaaaagcaccttcaactcccagccccaagcagaggagcaagcaggcggggtcgtcgccacgcccaccccccggactgtggtrtctggcaacagcgcccccagcaccagcccctccagcctttgcctacatctcctcggttcccatcatgccttatccacctgccgctgtgtactatgcgcct

SEQ ID NO: 2032 - DNA, 201 bp, Homo sapiens
gtagtatgaccagcctggagggaagcggcatctctgagcgccttccacagaagcctttgcaccgaggcggtgggccccacctggaggagacctggatggcrtccccagagacagacagtggctttgtgggctcagaaacaagcagagtttcacccctcacccagactccagagcaccggctctcccacatcagcacagcag

SEQ ID NO: 2033 - DNA, 201 bp, Homo sapiens
ggcagggcgagaccaggccatctgtgagctgcaagaagaggtgtcccggcttcgtctgcggctggaagacagcctgcaccagccactccagggcagcccgrcacgcccagcatctgcctttgaccgccccgcccggacccgcggccggccagcagactccccagccacctggggctcccattatggcagtaaatccacaga

SEQ ID NO: 2034 - DNA, 201 bp, Homo sapiens
gggcgagaccaggccatctgtgagctgcaagaagaggtgtcccggcttcgtctgcggctggaagacagcctgcaccagccactccagggcagcccgacacrcccagcatctgcctttgaccgccccgcccggacccgcggccggccagcagactccccagccacctggggctcccattatggcagtaaatccacagagaga

SEQ ID NO: 2035 - DNA, 201 bp, Homo sapiens
agatggtatctatgaagccaccaggtttccaggcatccctggctagagacgggcacatgtcaggcctgggcaaggctgaggcagcccctccaggccctggygtgccaccccaccctccaggcaccaagtccgcagcatcccaccaaagtagtatgaccagcctggagggaagcggcatctctgagcgccttccacagaagc

SEQ ID NO: 2036 - DNA, 201 bp, Homo sapiens
caatcagcccacccccagcccccgcccctgccgctgcgcctctaccctgtggaccaacagagaccatccccagcttcctgctcaccagggcagggcgagaycaggccatctgtgagctgcaagaagaggtgtcccggcttcgtctgcggctggaagacagcctgcaccagccactccagggcagcccgacacgcccagcat

SEQ ID NO: 2037 - DNA, 201 bp, Homo sapiens
tcagtgtcccctgtgtggtcaagttgggtctcccccagaggcagatggtccaggctcagccacctctggggcagagaaggccaccacgaggagaaaagcaycttcaactcccagccccaagcagaggagcaagcaggcggggtcgtcgccacgcccaccccccggactgtggtatctggcaacagcgcccccagcaccagc

SEQ ID NO: 2038 - DNA, 201 bp, Homo sapiens
atggcagtaaatccacagagagattgcctggtgagcctagaggtgaagagcagattgtccctccaggaaggcagcgagccaggtcttcctcagtgcctcgrgaggtgctccgactgtccctgagttcagaatctgagctgccctccctaccactgttctctgagaagagcaagaccaccaaggacagtccacaggcagctc

SEQ ID NO: 2039 - DNA, 201 bp, Homo sapiens
cccagcttcctgctcaccagggcagggcgagaccaggccatctgtgagctgcaagaagaggtgtcccggcttcgtctgcggctggaagacagcctgcaccrgccactccagggcagcccgacacgcccagcatctgcctttgaccgccccgcccggacccgcggccggccagcagactccccagccacctggggctcccat

SEQ ID NO: 2040 - DNA, 201 bp, Homo sapiens
cggtgcaggctgagaaaagtcatggggctcccctggaggaggccacggagaagatggtatctatgaagccaccaggtttccaggcatccctggctagagaygggcacatgtcaggcctgggcaaggctgaggcagcccctccaggccctggcgtgccaccccaccctccaggcaccaagtccgcagcatcccaccaaagta

SEQ ID NO: 2041 - DNA, 201 bp, Homo sapiens
gcccagaaggcccgcatagttcctcaccaggagggtctccctccagcacaggtcccgcctgctcagtccctgtgctttccaagtggagggggtgtcagctyggtcaccaagagaagtgacttcccaggagcaccagtcccctcacagaggtgctgtgagcgaggcctccttcggtccaggcagaacctcaggcagtctctc

SEQ ID NO: 2042 - DNA, 201 bp, Homo sapiens
tttccctcagacaagctacaaagtgcccaggatgccatccaccatggtccccttcagtacctcacgcatggtccccagcttctcctaggatcccagtggcrtttatcagtggccagctacctgccaggcccgggctggggcacggtctgcggccatgaggccaggccgcctcccgcacccctaccccgtggcagcagcata

SEQ ID NO: 2043 - DNA, 201 bp, Homo sapiens
cccttcagtacctcacgcatggtccccagcttctcctaggatcccagtggcatttatcagtggccagctacctgccaggcccgggctggggcacggtctgyggccatgaggccaggccgcctcccgcacccctaccccgtggcagcagcatacctctgcatttctggaatgtgtgtgcatcaatgatgtttgtatatttga

SEQ ID NO: 2044 - DNA, 201 bp, Homo sapiens
ttggtgaccctggggtggccatcagctcgaggagacttgagcccctcctcgcttaccagcatgcccaccctggggtggcttccggagaaccgggacatctytgaggaccagtcctcagcagagcagacccaggcactggcttctcaggccagccagttcctggccaaggtggagtcctttgaaagactgatacaggcagga

SEQ ID NO: 2045 - DNA, 201 bp, Homo sapiens; identical to SEQ ID NO: 2024

SEQ ID NO: 2046 - DNA, 201 bp, Homo sapiens; identical to SEQ ID NO: 2025

SEQ ID NO: 2047 - DNA, 201 bp, Homo sapiens; identical to SEQ ID NO: 2026

SEQ ID NO: 2048 - DNA, 201 bp, Homo sapiens; identical to SEQ ID NO: 2026

SEQ ID NO: 2049 - DNA, 201 bp, Homo sapiens; identical to SEQ ID NO: 2026

SEQ ID NO: 2050 - DNA, 201 bp, Homo sapiens; identical to SEQ ID NO: 2026

SEQ ID NO: 2051 - DNA, 201 bp, Homo sapiens; identical to SEQ ID NO: 2030

SEQ ID NO: 2052 - DNA, 201 bp, Homo sapiens; identical to SEQ ID NO: 2031

SEQ ID NO: 2053 - DNA, 131 bp, Homo sapiens
cccaccccagcccaaccacagcatccacacrggaatggtgccccaggggaccaaggtcttgtccttcaccatcccacagccccgctctgcagagtggtggccgggcccggccgaggacccccaggcctctg

SEQ ID NO: 2054 - DNA, 183 bp, Homo sapiens
cccaccccagcccaaccacagcatccacacgggaatggtgccccaggggaccaaggtcttgtccttcaccatcccacagcccygctctgcagagtggtggccgggcccggccgaggacccccaggcctctgcggcctcagcctgggggcagccctggccctgccacttggcatcttggtgacc

SEQ ID NO: 2055 - DNA, 201 bp, Homo sapiens
gggggcagccctggccctgccacttggcatcttggtgaccctggggtggccatcagctcgaggagacttgagcccctcctcgcttaccagcatgcccaccstggggtggcttccggagaaccgggacatctctgaggaccagtcctcagcagagcagacccaggcactggcttctcaggccagccagttcctggccaaggt

SEQ ID NO: 2056 - DNA, 201 bp, Homo sapiens; identical to SEQ ID NO: 2032

SEQ ID NO: 2057 - DNA, 201 bp, Homo sapiens; identical to SEQ ID NO: 2033

SEQ ID NO: 2058 - DNA, 201 bp, Homo sapiens; identical to SEQ ID NO: 2034

SEQ ID NO: 2059 - DNA, 201 bp, Homo sapiens
ctgaaggaacacatagaccagacccagcaagagcctgagccgcccgggtcagactcagctctggacagcaccccagccctgccctgcctccatcagccaaygcacctgcctgctccttctggacaagcccccatgccagccatcaagacctcctgccctgagcctgctaccaccactgccgccgccagcactggcccctgc

SEQ ID NO: 2060 - DNA, 201 bp, Homo sapiens
gcctggaagagctgaaggaacacatagaccagacccagcaagagcctgagccgcccgggtcagactcagctctggacagcaccccagccctgccctgcctycatcagccaacgcacctgcctgctccttctggacaagcccccatgccagccatcaagacctcctgccctgagcctgctaccaccactgccgccgccagca

SEQ ID NO: 2061 - DNA, 201 bp, Homo sapiens; identical to SEQ ID NO: 2035

SEQ ID NO: 2062 - DNA, 201 bp, Homo sapiens; identical to SEQ ID NO: 2036

SEQ ID NO: 2063 - DNA, 201 bp, Homo sapiens; identical to SEQ ID NO: 2037

SEQ ID NO: 2064 - DNA, 201 bp, Homo sapiens
ccccaggaccaagtcaagggcttccagcggctgaaggctgcccacgcggccctagaggaggagtacctgaaggcttgtcgggagcaacaccctgcccagcygcttgccggctccaaggggacgcctggaagatttgatcctcgcagggagctggaggcagagatataccgtctgggaagctgcctggaagagctgaaggaa

SEQ ID NO: 2065 - DNA, 201 bp, Homo sapiens
cattgcacgtaaatgtggaggtgagctctggcaacagtgaggtggaggacaggccacaggaccccctggcccgactcaggcacaaggagctgcagatggarcaagtttaccatggcctcatggagcggtacctcagtgtgaagtctctcccagaagccatgagaatggaggaggaggaagaaggagaggaggaggaggagg

SEQ ID NO: 2066 - DNA, 201 bp, Homo sapiens; identical to SEQ ID NO: 2038

SEQ ID NO: 2067 - DNA, 201 bp, Homo sapiens; identical to SEQ ID NO: 2039

SEQ ID NO: 2068 - DNA, 201 bp, Homo sapiens; identical to SEQ ID NO: 2040

SEQ ID NO: 2069 - DNA, 201 bp, Homo sapiens; identical to SEQ ID NO: 2041

SEQ ID NO: 2070 - DNA, 201 bp, Homo sapiens; identical to SEQ ID NO: 2042

SEQ ID NO: 2071 - DNA, 201 bp, Homo sapiens; identical to SEQ ID NO: 2043

SEQ ID NO: 2072 - DNA, 201 bp, Homo sapiens
tctgcggcctcagggtggccatcagctcgaggagacttgagcccctcctcgcttaccagcatgcccaccctggggtggcttccggagaaccgggacatctytgaggaccagtcctcagcagagcagacccaggcactggcttctcaggccagccagttcctggccaaggtggagtcctttgaaagactgatacaggcagga

SEQ ID NO: 2073 - DNA, 201 bp, Homo sapiens
ggaggtgcccaaggtcagaaggaagcaccacacagagggcacaggcaggatggccgatgctgacaggaaccagcggtgactctggggcccctggcagcagmtctgtctcctgaagatgaagtggcccaggtgaagcccaggccagccccaatggccagctcggagactgagatccgctgggctgagcctggcctggggaag

SEQ ID NO: 2074 - DNA, 201 bp, Homo sapiens
cagttttcccttccacaaaatgaggaggggcaactgaagacggaggtgcccaaggtcagaaggaagcaccacacagagggcacaggcaggatggccgatgstgacaggaaccagcggtgactctggggcccctggcagcagctctgtctcctgaagatgaagtggcccaggtgaagcccaggccagccccaatggccagct

SEQ ID NO: 2075 - DNA, 201 bp, Homo sapiens
atgggcatcaggattccgagtcaggagagacttcgggagaagaggctgaagcagaggatgtggacagcccagcaagttcccatgagcctcttgcctggctyccccagcagggccgtcagctggacatgactgaagaggagccagatgggaccctcggaagtctggaggttgaggaggctggagagagctcctcaaggttgg

SEQ ID NO: 2076 - DNA, 201 bp, Homo sapiens; identical to SEQ ID NO: 2024

SEQ ID NO: 2077 - DNA, 201 bp, Homo sapiens; identical to SEQ ID NO: 2025

SEQ ID NO: 2078 - DNA, 201 bp, Homo sapiens; identical to SEQ ID NO: 2026

SEQ ID NO: 2079 - DNA, 201 bp, Homo sapiens; identical to SEQ ID NO: 2026

SEQ ID NO: 2080 - DNA, 201 bp, Homo sapiens; identical to SEQ ID NO: 2026

SEQ ID NO: 2081 - DNA, 201 bp, Homo sapiens; identical to SEQ ID NO: 2030

SEQ ID NO: 2082 - DNA, 201 bp, Homo sapiens; identical to SEQ ID NO: 2031

SEQ ID NO: 2083 - DNA, 201 bp, Homo sapiens
cagagggccccagccaccacctcctaagcccagatggcagaactggaggcagtgttgctcgggcaacccccatggaattccaggactcctcagctcccccrgcccagagtccgcagcatgccacagatagatggaggagagaaacgaccagattcttctgccctcagcccaaggaacacatctggaagcagacaaagacgt

SEQ ID NO: 2084 - DNA, 201 bp, Homo sapiens
gcagaactggaggcagtgttgctcgggcaacccccatggaattccaggactcctcagctcccccagcccagagtccgcagcatgccacagatagatggagragagaaacgaccagattcttctgccctcagcccaaggaacacatctggaagcagacaaagacgtcacctaagccactcccttcccgattcattggctcca

SEQ ID NO: 2085 - DNA, 201 bp, Homo sapiens
ccaagtacgctgaggccgagaacaccattgaccagctacgcctcggggccaaggtgaacctgttctctgacccaccccagcccaaccacagcatccacacrggaatggtgccccaggggaccaaggtcttgtccttcaccatcccacagccccgctctgcagagtggtggccgggcccggccgaggacccccaggcctctg

SEQ ID NO: 2086 - DNA, 201 bp, Homo sapiens
ggtgaacctgttctctgacccaccccagcccaaccacagcatccacacgggaatggtgccccaggggaccaaggtcttgtccttcaccatcccacagcccygctctgcagagtggtggccgggcccggccgaggacccccaggcctctgcggcctcagggtggccatcagctcgaggagacttgagcccctcctcgcttac

SEQ ID NO: 2087 - DNA, 201 bp, Homo sapiens
gtggccgggcccggccgaggacccccaggcctctgcggcctcagggtggccatcagctcgaggagacttgagcccctcctcgcttaccagcatgcccaccstggggtggcttccggagaaccgggacatctctgaggaccagtcctcagcagagcagacccaggcactggcttctcaggccagccagttcctggccaaggt

SEQ ID NO: 2088 - DNA, 201 bp, Homo sapiens; identical to SEQ ID NO: 2032

SEQ ID NO: 2089 - DNA, 201 bp, Homo sapiens; identical to SEQ ID NO: 2033

SEQ ID NO: 2090 - DNA, 201 bp, Homo sapiens; identical to SEQ ID NO: 2034

SEQ ID NO: 2091 - DNA, 201 bp, Homo sapiens; identical to SEQ ID NO: 2026

SEQ ID NO: 2092 - DNA, 201 bp, Homo sapiens; identical to SEQ ID NO: 2059

SEQ ID NO: 2093 - DNA, 201 bp, Homo sapiens; identical to SEQ ID NO: 2060

SEQ ID NO: 2094 - DNA, 201 bp, Homo sapiens; identical to SEQ ID NO: 2035

SEQ ID NO: 2095 - DNA, 201 bp, Homo sapiens; identical to SEQ ID NO: 2036

SEQ ID NO: 2096 - DNA, 201 bp, Homo sapiens; identical to SEQ ID NO: 2037

SEQ ID NO: 2097 - DNA, 201 bp, Homo sapiens; identical to SEQ ID NO: 2064

SEQ ID NO: 2098 - DNA, 201 bp, Homo sapiens; identical to SEQ ID NO: 2065

SEQ ID NO: 2099 - DNA, 201 bp, Homo sapiens; identical to SEQ ID NO: 2038

SEQ ID NO: 2100 - DNA, 201 bp, Homo sapiens; identical to SEQ ID NO: 2039

SEQ ID NO: 2101 - DNA, 201 bp, Homo sapiens; identical to SEQ ID NO: 2040

SEQ ID NO: 2102 - DNA, 201 bp, Homo sapiens; identical to SEQ ID NO: 2041

SEQ ID NO: 2103 - DNA, 201 bp, Homo sapiens; identical to SEQ ID NO: 2042

SEQ ID NO: 2104 - DNA, 201 bp, Homo sapiens; identical to SEQ ID NO: 2043

SEQ ID NO: 2105 - DNA, 201 bp, Homo sapiens
agaccgggaagaattttcttggcataatatcactgtccttgctatggaaatgaacaatccctcccaggttggaagtgttcctgtcacaatcaaagtcttaratgtgaatgacaatgctccagagttccccagattctatgaagcttttgtctgtgagaacgccaaggcaggacagctgatccagacagtgagtgcggtgga

SEQ ID NO: 2106 - DNA, 201 bp, Homo sapiens; identical to SEQ ID NO: 2105

SEQ ID NO: 2107 - DNA, 201 bp, Homo sapiens; identical to SEQ ID NO: 2105

SEQ ID NO: 2108 - DNA, 201 bp, Homo sapiens
gagacggatccatcaaatacatcctctcgggagaaggtgctggcatcgtgtttaccatcgacgacaccactggagacatccacgccattcagaggctcgaycgagaggaaagagcccagtatactctaagggctcaagccctagacaggcggacgggcaggccaatggagcccgagtcagagttcatcatcaaaattcaag

SEQ ID NO: 2109 - DNA, 201 bp, Homo sapiens
ccatgtggaacccccgggaggcgcaggcgggggccgcccccaagacgcggcaggacatgctgcccgagatcgagagcctctcccgctacgtgcctcagacrtgcgcagtgaacagcactgtccacagctacgtgctggccaagctctacgaggccgacatggacctgtgggcaccgcccttcgactccctccagacgtata

SEQ ID NO: 2110 - DNA, 201 bp, Homo sapiens
ggcggcaccggaaacaaccatacatcatcgacgacgaggaaaacatccacgagaacatcgtccgctacgacgacgagggcggcggcgaggaggacaccgargccttcgacatcgcggccatgtggaacccccgggaggcgcaggcgggggccgcccccaagacgcggcaggacatgctgcccgagatcgagagcctctccc

SEQ ID NO: 2111 - DNA, 184 bp, Homo sapiens
cctggcaatcccatgtggacttctggtagaatgagcaatgcaaagaactggcttggacttggcatgtccttgtacttctggggkctgatggaccttacgaccaccgttctctcggacaccccaacaccacaaggtgaattagaagcactcctgtcagacaagccacagtcacatcagcggacca

SEQ ID NO: 2112 - DNA, 201 bp, Homo sapiens
gaatgagcaatgcaaagaactggcttggacttggcatgtccttgtacttctgggggctgatggaccttacgaccaccgttctctcggacaccccaacaccrcaaggtgaattagaagcactcctgtcagacaagccacagtcacatcagcggaccaagaggagctgggtttggaaccagtttttcgttctggaagagtaca

SEQ ID NO: 2113 - DNA, 201 bp, Homo sapiens
gagatggtgcagatgcctttgacattagcacagatcccaatttccaagttggtatcataactgtgaagaagcccctgagttttgaaagcaagaaaagctayaccttaaaggtggagggagccaatcctcacctagagatgcgttttctgaacttgggcccatttcaggacacaacaacagtgcacatcagtgtggaagacg

SEQ ID NO: 2114 - DNA, 201 bp, Homo sapiens
aagaagcccctgagttttgaaagcaagaaaagctacaccttaaaggtggagggagccaatcctcacctagagatgcgttttctgaacttgggcccatttcrggacacaacaacagtgcacatcagtgtggaagacgtggacgagccccctgtgtttgaacctggcttttactttgtggaggtgcctgaggatgtggcgatt

SEQ ID NO: 2115 - DNA, 201 bp, Homo sapiens
cctcacctagagatgcgttttctgaacttgggcccatttcaggacacaacaacagtgcacatcagtgtggaagacgtggacgagccccctgtgtttgaacytggcttttactttgtggaggtgcctgaggatgtggcgattggaacaaccatacagatcatttctgccaaggacccagatgtgaccaacaactcaatcaga

SEQ ID NO: 2116 - DNA, 201 bp, Homo sapiens
tcatgaacatggacagagaagccaaagaatactacgaagtgattatccaagccaaggacatgggagggcagcttggaggattagctgggaccacaacagtsaacatcaccctctcagatgtcaatgataacccaccccgctttccccagaaacattaccagatgagtgtgttggaatcagctccaattagctccactgtcg

SEQ ID NO: 2117 - DNA, 201 bp, Homo sapiens
gaggcctacatgctcccagtcagtttgagccggggcgccctcattgccatcctcgcctgcatctttgtcctcttagtgctggtgttgctcattttgtccaygaggcggcaccggaaacaaccatacatcatcgacgacgaggaaaacatccacgagaacatcgtccgctacgacgacgagggcggcggcgaggaggacacc

SEQ ID NO: 2118 - DNA, 201 bp, Homo sapiens
agagtgtttgccaaggacttggatgaaggcatcaatgcagagatgaaatatactattgtggatggagatggtgcagatgcctttgacattagcacagatcmcaatttccaagttggtatcataactgtgaagaagcccctgagttttgaaagcaagaaaagctacaccttaaaggtggagggagccaatcctcacctagag

SEQ ID NO: 2119 - DNA, 201 bp, Homo sapiens
gaagaatctctacttgtgctgcctttctcttatgtcccagacattcttaaactctttaacgaattcattcagctgggctctgatgttgaacttatatgccrgtgcctcttcttcctccttaggattcactttggacagatcactagcaatcaaatgcttgtgccagtgatagaaaaattaagggaaacaactatttcaaaa

SEQ ID NO: 2120 - DNA, 201 bp, Homo sapiens
gtcagaagaaaagcgactcatcactggggcctcagacagtgaactgagggtatgggacatagcttatctgcaagagattgaagacccggaagaaccagacsccaagaaaatcaaaggatcttctcctggaatacaagatactcttgaggcagaggatggtgcctttgagacggatgaagcccctgaggatcgaatcctttc

SEQ ID NO: 2121 - DNA, 201 bp, Homo sapiens
atagacaggtagtcataggaacaaagacagggaagctgcagctttatgacttggcttcagggaatctgctggagacaatagatgcacatgatggagctttrtggtccatgtccctctctccagatcagcgtggctttgtgacaggtggtgcagataaatctgtcaaattctgggattttgagttagtgaaagatgaaaata

SEQ ID NO: 2122 - DNA, 201 bp, Homo sapiens
gaccttgatactcagcactgctttaaaacaatggttggccaccggactgaggtatgggggttggttctgttgtcagaagaaaagcgactcatcactggggyctcagacagtgaactgagggtatgggacatagcttatctgcaagagattgaagacccggaagaaccagaccccaagaaaatcaaaggatcttctcctgga

SEQ ID NO: 2123 - DNA, 201 bp, Homo sapiens
agtttgtacccaagtctcacctcttcttcactgccggaaaagatcataagattaaacagtgggatgcagacaaatttgaacacatacagactctggagggkcatcaccaggaaatatggtgtttggctgtaagccccagtggagactatgttgtatcatcgtcccatgacaaatctctgagactttgggagagaacaaggg

SEQ ID NO: 2124 - DNA, 201 bp, Homo sapiens
ctactagccacttggaagagaagaagaggaagaggaaaaagagggagaagttgattctaacgttgacttagaactgaaatttggcgtcatcttaaaaataycaaataacagaagatcgcattgcagatgatatcaggatgtggtttccagctttgcctgagggaattccaacatgagattatgggctggctccatttcttg

SEQ ID NO: 2125 - DNA, 201 bp, Homo sapiens
ggtgcataattgattgccctttggccataaaaatgcagtgtcatggatcttagagctaaaaaggactgtaaaaattacccagaacagcgtcctcagacttraccttctgcaagttatgtctgtatataagaagattctaattgctaactgtttatacttttctgaataaaatagttgtttctaattaaaaagtagccaagc

SEQ ID NO: 2126 - DNA, 201 bp, Homo sapiens; identical to SEQ ID NO: 2119

SEQ ID NO: 2127 - DNA, 201 bp, Homo sapiens
gtcagaagaaaagcgactcatcactggggcctcagacagtgaactgagggtatgggacatagcttatctgcaagagattgaagacccggaagaaccagacsccaagaaaatcaaaggatcttctcctggaatacaagatactcttgaggcagaggatggtgcctttgagacggatgaagcccctgaggatgtaattcattt

SEQ ID NO: 2128 - DNA, 201 bp, Homo sapiens; identical to SEQ ID NO: 2122

SEQ ID NO: 2129 - DNA, 201 bp, Homo sapiens; identical to SEQ ID NO: 2121

SEQ ID NO: 2130 - DNA, 201 bp, Homo sapiens; identical to SEQ ID NO: 2123

SEQ ID NO: 2131 - DNA, 201 bp, Homo sapiens; identical to SEQ ID NO: 2124

SEQ ID NO: 2132 - DNA, 201 bp, Homo sapiens; identical to SEQ ID NO: 2125

SEQ ID NO: 2133 - DNA, 201 bp, Homo sapiens; identical to SEQ ID NO: 2119

SEQ ID NO: 2134 - DNA, 201 bp, Homo sapiens; identical to SEQ ID NO: 2120

SEQ ID NO: 2135 - DNA, 201 bp, Homo sapiens; identical to SEQ ID NO: 2122

SEQ ID NO: 2136 - DNA, 201 bp, Homo sapiens; identical to SEQ ID NO: 2121

SEQ ID NO: 2137 - DNA, 201 bp, Homo sapiens; identical to SEQ ID NO: 2123

SEQ ID NO: 2138 - DNA, 201 bp, Homo sapiens
ttgacttagaactgaaatgtggtatctttttttttttcaactttttcctttaaaggactcctaaactaagcacagaagagttggcgtcatcttaaaaataycaaataacagaagatcgcattgcagatgatatcaggatgtggtttccagctttgcctgagggaattccaacatgagattatgggctggctccatttcttg

SEQ ID NO: 2139 - DNA, 201 bp, Homo sapiens; identical to SEQ ID NO: 2125

SEQ ID NO: 2140 - DNA, 201 bp, Homo sapiens
tggcttagactcaagcacagcaaatgctgtccttttgctcctgaaaaggatgtctaagcagggacgaacaatcatcttctccattcatcagcctcgatatyccatcttcaagttgtttgatagcctcaccttattggcctcaggaagacttatgttccacgggcctgctcaggaggccttgggatactttgaatcagctgg

SEQ ID NO: 2141 - DNA, 201 bp, Homo sapiens
atgaaaaaaacgaacggattaacagggtcattcaagagttaggtctggataaagtggcagactccaaggttggaactcagtttatccgtggtgtgtctggrggagaaagaaaaaggactagtataggaatggagcttatcactgatccttccatcttgttcttggatgagcctacaactggcttagactcaagcacagcaa

SEQ ID NO: 2142 - DNA, 201 bp, Homo sapiens
agattccactgctgtggcattaaacagagaagaagactttaaagccacagagatcatagagccttccaagcaggataagccactcatagaaaaattagcgkagatttatgtcaactcctccttctacaaagagacaaaagctgaattacatcaactttccgggggtgagaagaagaagaagatcacagtcttcaaggagat

SEQ ID NO: 2143 - DNA, 201 bp, Homo sapiens
aacacttctcatgaccatctgttttgtgtttatgatgattttttcaggtctgttggtcaatctcacaaccattgcatcttggctgtcatggcttcagtacwtcagcattccacgatatggatttacggctttgcagcataatgaatttttgggacaaaacttctgcccaggactcaatgcaacaggaaacaatccttgtaa

SEQ ID NO: 2144 - DNA, 201 bp, Homo sapiens
agtggcagactccaaggttggaactcagtttatccgtggtgtgtctggaggagaaagaaaaaggactagtataggaatggagcttatcactgatccttccmtcttgttcttggatgagcctacaactggcttagactcaagcacagcaaatgctgtccttttgctcctgaaaaggatgtctaagcagggacgaacaatcat

SEQ ID NO: 2145 - DNA, 201 bp, Homo sapiens
atgtcgaagtttttatcccagtgtcacaaggaaacaccaatggcttccccgcgacagcttccaatgacctgaaggcatttactgaaggagctgtgttaagytttcataacatctgctatcgagtaaaactgaagagtggctttctaccttgtcgaaaaccagttgagaaagaaatattatcgaatatcaatgggatcatga

SEQ ID NO: 2146 - DNA, 152 bp, Homo sapiens
aagaggcagtgcccgccactcccactgagattgagagacgcggcaaggaggmagcctgtggaggaactggaaagataaaaactctccagatgtcttccagtaatgtcgaagtttttatcccagtgtcacaaggaaacaccaatggcttcccc

SEQ ID NO: 2147 - DNA, 201 bp, Homo sapiens
tatgatgtttacccttatgatggtggcttattcagccagttccatggcactggccatagcagcaggtcagagtgtggtttctgtagcaacacttctcatgrccatctgttttgtgtttatgatgattttttcaggtctgttggtcaatctcacaaccattgcatcttggctgtcatggcttcagtacttcagcattccacg

SEQ ID NO: 2148 - DNA, 201 bp, Homo sapiens
atagtgtacttcatgttaggattgaagccaaaggcagatgccttcttcgttatgatgtttacccttatgatggtggcttattcagccagttccatggcackggccatagcagcaggtcagagtgtggtttctgtagcaacacttctcatgaccatctgttttgtgtttatgatgattttttcaggtctgttggtcaatctc

SEQ ID NO: 2149 - DNA, 201 bp, Homo sapiens
tttgggacaaaacttctgcccaggactcaatgcaacaggaaacaatccttgtaactatgcaacatgtactggcgaagaatatttggtaaagcagggcatcratctctcaccctggggcttgtggaagaatcacgtggccttggcttgtatgattgttattttcctcacaattgcctacctgaaattgttatttcttaaaaa

SEQ ID NO: 2150 - DNA, 201 bp, Homo sapiens
cactgagattgagagacgcggcaaggaggcagcctgtggaggaactggaaagataaaaactctccagatgtcttccagtaatgtcgaagtttttatcccartgtcacaaggaaacaccaatggcttccccgcgacagcttccaatgacctgaaggcatttactgaaggagctgtgttaagttttcataacatctgctatcg

SEQ ID NO: 2151 - DNA, 119 bp, Homo sapiens
aagaggcagtgcccgccaytcccactgagattgagagacgcggcaaggaggcagcctgtggaggaactggaaagataaaaactctccagatgtcttccagtaatgtcgaagtttttatc

SEQ ID NO: 2152 - DNA, 201 bp, Homo sapiens
tagatgtcttagctgcaaggaaagatccaagtggattatctggagatgttctgataaatggagcaccgcgacctgccaatttcaaatgtaattcaggttaygtggtacaagatgatgttgtgatgggcactctgacggtgagagaaaacttacagttctcagcagctcttcggcttgcaacaactatgacgaatcatgaaa

SEQ ID NO: 2153 - DNA, 201 bp, Homo sapiens
gataaatggagcaccgcgacctgccaatttcaaatgtaattcaggttacgtggtacaagatgatgttgtgatgggcactctgacggtgagagaaaacttamagttctcagcagctcttcggcttgcaacaactatgacgaatcatgaaaaaaacgaacggattaacagggtcattcaagagttaggtctggataaagtggc

SEQ ID NO: 2154 - DNA, 201 bp, Homo sapiens
gactccaaggttggaactcagtttatccgtggtgtgtctggaggagaaagaaaaaggactagtataggaatggagcttatcactgatccttccatcttgtycttggatgagcctacaactggcttagactcaagcacagcaaatgctgtccttttgctcctgaaaaggatgtctaagcagggacgaacaatcatcttctcc

SEQ ID NO: 2155 - DNA, 201 bp, Homo sapiens
cactctgacggtgagagaaaacttacagttctcagcagctcttcggcttgcaacaactatgacgaatcatgaaaaaaacgaacggattaacagggtcattsaagagttaggtctggataaagtggcagactccaaggttggaactcagtttatccgtggtgtgtctggaggagaaagaaaaaggactagtataggaatgga

SEQ ID NO: 2156 - DNA, 190 bp, Homo sapiens
aagaggcagtgcccgccactcccactgagattgagagacgcggcaaggaggcagcctgtggaggaactggaaagataaaaactctccagktgtcttccagtaatgtcgaagtttttatcccagtgtcacaaggaaacaccaatggcttccccgcgacagcttccaatgacctgaaggcatttactgaagg

SEQ ID NO: 2157 - DNA, 201 bp, Homo sapiens
tgtctctggcatttgtttcctcatctttaaaatgaataggtaggttagtagcccttcagtcttaatactttatgatgctatggtttgccattatttaatawatgacaaatgtattaatgctatactggaaatgtaaaattgaaaatatgttggaaaaaagattctgtcttatagggtaaaaaaagccaccgtgatagaaaa

SEQ ID NO: 2158 - DNA, 201 bp, Homo sapiens; identical to SEQ ID NO: 2140

SEQ ID NO: 2159 - DNA, 201 bp, Homo sapiens; identical to SEQ ID NO: 2141

SEQ ID NO: 2160 - DNA, 201 bp, Homo sapiens; identical to SEQ ID NO: 2142

SEQ ID NO: 2161 - DNA, 201 bp, Homo sapiens; identical to SEQ ID NO: 2143

SEQ ID NO: 2162 - DNA, 201 bp, Homo sapiens; identical to SEQ ID NO: 2144

SEQ ID NO: 2163 - DNA, 201 bp, Homo sapiens; identical to SEQ ID NO: 2145

SEQ ID NO: 2164 - DNA, 186 bp, Homo sapiens
cactcccactgagattgagagacgcggcaaggaggcagcctgtggaggaactgggtaggatttaggaacgcaccgtgcacatgctwggtggtcttgttaagtggaaactgctgctttagagtttgtttggaaggtccgggtgactcatcccaacatttacatccttaattgttaaagcgctgcctc

SEQ ID NO: 2165 - DNA, 173 bp, Homo sapiens
cactcccactgagattgagagacgcggcaaggaggcagcctgtggaggaactgggtaggatttaggaacgcamcgtgcacatgcttggtggtcttgttaagtggaaactgctgctttagagtttgtttggaaggtccgggtgactcatcccaacatttacatccttaattgtt

SEQ ID NO: 2166 - DNA, 169 bp, Homo sapiens
cactcccactgagattgagagacgcggcaaggaggcagcctgtggaggaactgggtaggatttaggaaygcaccgtgcacatgcttggtggtcttgttaagtggaaactgctgctttagagtttgtttggaaggtccgggtgactcatcccaacatttacatccttaat

SEQ ID NO: 2167 - DNA, 136 bp, Homo sapiens
cactcccactgagattgagagacgcggcaaggaggmagcctgtggaggaactgggtaggatttaggaacgcaccgtgcacatgcttggtggtcttgttaagtggaaactgctgctttagagtttgtttggaaggtc

SEQ ID NO: 2168 - DNA, 201 bp, Homo sapiens; identical to SEQ ID NO: 2148

SEQ ID NO: 2169 - DNA, 201 bp, Homo sapiens; identical to SEQ ID NO: 2149

SEQ ID NO: 2170 - DNA, 201 bp, Homo sapiens; identical to SEQ ID NO: 2147

SEQ ID NO: 2171 - DNA, 103 bp, Homo sapiens
caytcccactgagattgagagacgcggcaaggaggcagcctgtggaggaactgggtaggatttaggaacgcaccgtgcacatgcttggtggtcttgttaagtg

SEQ ID NO: 2172 - DNA, 201 bp, Homo sapiens; identical to SEQ ID NO: 2152

SEQ ID NO: 2173 - DNA, 201 bp, Homo sapiens
atcctgagatcctgagcctttggttaagaccgagctctattaagctgaaaagataaaaactctccagatgtcttccagtaatgtcgaagtttttatcccartgtcacaaggaaacaccaatggcttccccgcgacagcttccaatgacctgaaggcatttactgaaggagctgtgttaagttttcataacatctgctatcg

SEQ ID NO: 2174 - DNA, 201 bp, Homo sapiens; identical to SEQ ID NO: 2153

SEQ ID NO: 2175 - DNA, 201 bp, Homo sapiens; identical to SEQ ID NO: 2154

SEQ ID NO: 2176 - DNA, 201 bp, Homo sapiens; identical to SEQ ID NO: 2155

SEQ ID NO: 2177 - DNA, 201 bp, Homo sapiens
ttaattgttaaagcgctgcctccgagcgcacgcatcctgagatcctgagcctttggttaagaccgagctctattaagctgaaaagataaaaactctccagktgtcttccagtaatgtcgaagtttttatcccagtgtcacaaggaaacaccaatggcttccccgcgacagcttccaatgacctgaaggcatttactgaagg

SEQ ID NO: 2178 - DNA, 201 bp, Homo sapiens; identical to SEQ ID NO: 2157

SEQ ID NO: 2179 - DNA, 201 bp, Homo sapiens
tgatggaggaatctgctgagcaggctcagcgccgggatgagatgcttcgaatgtatcaagcactgaaagaagcccttgggataattggggacatcagcacrgccaccgtgtccactccggcaccccctccagtggatgactcctggatacagcactctcgcaggtcacctcctccaagccccacaacccaaaggaggccaa

SEQ ID NO: 2180 - DNA, 201 bp, Homo sapiens
tgtctagcaagcacatctttgcactctttaatacagagcaaaggaatgtatacaaagactatcgcttccttgagctggcatgtgattcccaggaggatgtygacagctggaaggcatctctactaagagctggggtctatcctgacaaatctgtagctgaaaatgatgagaatggacaagcagaaaacttttccatggacc

SEQ ID NO: 2181 - DNA, 201 bp, Homo sapiens
tcgagaacttcgtgggcagggactttctccctcgagggtcgggcattgtaacaagacgacctcttgtgctgcagcttgttacttctaaagcagaatatgcygagtttctacattgcaaaggaaagaaatttacagattttgatgaagttcgccttgagattgaagcagaaacagatcgcgtgactggaatgaataaaggca

SEQ ID NO: 2182 - DNA, 201 bp, Homo sapiens
ctggggctcctccagtcccattccgtccaggcccattacctcctttccccagcagcagtgactccttcggagcccctccacaagttccatctaggcctacragggccccgcccagtgtcccaagccggagaccacccccatcaccaactcgtcccactataatccgcccactagaatcctccctgttagactaaacgaagt

SEQ ID NO: 2183 - DNA, 201 bp, Homo sapiens
cccatcaccaactcgtcccactataatccgcccactagaatcctccctgttagactaaacgaagtgtctggcatggcaattaatcactaatgaattatgcraaagcaacatatttgataaccgttgcagtaaatcatgagtagtcgcatgtgtggacatcagtaggcaagtaaccagttttactaatgcattcatcgctca

SEQ ID NO: 2184 - DNA, 201 bp, Homo sapiens
ataatccgcccactagaatcctccctgttagactaaacgaagtgtctggcatggcaattaatcactaatgaattatgcgaaagcaacatatttgataaccrttgcagtaaatcatgagtagtcgcatgtgtggacatcagtaggcaagtaaccagttttactaatgcattcatcgctcatcttcattgctcatggtatgtc

SEQ ID NO: 2185 - DNA, 201 bp, Homo sapiens
gactcagaaactgctaaccttttagaggctttatatgttgtactgaccaaggtaggtttgtatagcagccctatactttggggatcatttgcctaccatgrcatatatttgaaattgctttggacaagttttctaggctatctaccaggtagctcattaaacgtaattcttcagatatgagatagtgggcttagacctaag

SEQ ID NO: 2186 - DNA, 201 bp, Homo sapiens
ggatgacagtaattctgttgtctaccattaatgctactacctactccataattgcctatttagctcctcttttcttcctttttatttcataagactgctargaagtgattttttaaaattaggactccttaagaataaacttttccagaagcacgaggtagtttgcaaaggaaaagtctgcactgtttgctctaaagagct

SEQ ID NO: 2187 - DNA, 201 bp, Homo sapiens
ggtaggtcatccactttttcaggtaaacatttttcatttggcaaatggcataattatttgaaagtgacaggaatctcctcagaatgaagaataaagcctamtaggtctctaactgttgaactcatgaaagaagatagtgtatgagacttaagccatgagttttgtatcatttcaattagaagactactagctgtgagctca

SEQ ID NO: 2188 - DNA, 201 bp, Homo sapiens
ctcaaatgagtcttctagatactcttactcatcctgtctggttgctatgtttaaaattatgtggtgctgtgtaggtgaaactttaagaatatttttgaagsatatgtaatatatgcactgctatttgtgtgtgtgtgtgtgtctttgtatatatgtaagaatgtgtgtatgtgtgagagcaagagagaggaaactcaaaga

SEQ ID NO: 2189 - DNA, 201 bp, Homo sapiens
actcatcctgtctggttgctatgtttaaaattatgtggtgctgtgtaggtgaaactttaagaatatttttgaagcatatgtaatatatgcactgctatttktgtgtgtgtgtgtgtctttgtatatatgtaagaatgtgtgtatgtgtgagagcaagagagaggaaactcaaagaggagtgtttgtcttaagacctgttca

SEQ ID NO: 2190 - DNA, 201 bp, Homo sapiens
atactggtatattggtgagacttctcacttctggttggaggtttcacatatggctcaactcaagtcattaatctctttttaatttttactcttgaattccytaaacttcgctcattatgaaatgttttaaaattatgacaaaaattactctgtctaaccacttgccttgtctgctaccagtttgttaaaaattattccccc

SEQ ID NO: 2191 - DNA, 201 bp, Homo sapiens; identical to SEQ ID NO: 2179

SEQ ID NO: 2192 - DNA, 201 bp, Homo sapiens; identical to SEQ ID NO: 2180

SEQ ID NO: 2193 - DNA, 201 bp, Homo sapiens
tggaatactttgaagcacgaaaaatcattatatcttgaaataatttttaaaataatccaataacaaactcagaactactgaagaataataaagaatatgcygagtttctacattgcaaaggaaagaaatttacagattttgatgaagttcgccttgagattgaagcagaaacagatcgcgtgactggaatgaataaaggca

SEQ ID NO: 2194 - DNA, 201 bp, Homo sapiens; identical to SEQ ID NO: 2182

SEQ ID NO: 2195 - DNA, 130 bp, Homo sapiens
tctgcatcctactgctattttcattttatmgatggaatactttgaagcacgaaaaatcattatatcttgaaataatttttaaaataatccaataacaaactcagaactactgaagaataataaagaatat

SEQ ID NO: 2196 - DNA, 201 bp, Homo sapiens; identical to SEQ ID NO: 2183

SEQ ID NO: 2197 - DNA, 201 bp, Homo sapiens; identical to SEQ ID NO: 2184

SEQ ID NO: 2198 - DNA, 201 bp, Homo sapiens; identical to SEQ ID NO: 2185

SEQ ID NO: 2199 - DNA, 201 bp, Homo sapiens; identical to SEQ ID NO: 2186

SEQ ID NO: 2200 - DNA, 201 bp, Homo sapiens; identical to SEQ ID NO: 2187

SEQ ID NO: 2201 - DNA, 201 bp, Homo sapiens; identical to SEQ ID NO: 2188

SEQ ID NO: 2202 - DNA, 201 bp, Homo sapiens; identical to SEQ ID NO: 2189

SEQ ID NO: 2203 - DNA, 201 bp, Homo sapiens; identical to SEQ ID NO: 2190

SEQ ID NO: 2204 - DNA, 201 bp, Homo sapiens; identical to SEQ ID NO: 2181

SEQ ID NO: 2205 - DNA, 201 bp, Homo sapiens; identical to SEQ ID NO: 2179

SEQ ID NO: 2206 - DNA, 201 bp, Homo sapiens; identical to SEQ ID NO: 2180

SEQ ID NO: 2207 - DNA, 201 bp, Homo sapiens; identical to SEQ ID NO: 2182

SEQ ID NO: 2208 - DNA, 201 bp, Homo sapiens; identical to SEQ ID NO: 2183

SEQ ID NO: 2209 - DNA, 201 bp, Homo sapiens; identical to SEQ ID NO: 2184

SEQ ID NO: 2210 - DNA, 201 bp, Homo sapiens; identical to SEQ ID NO: 2185

SEQ ID NO: 2211 - DNA, 201 bp, Homo sapiens; identical to SEQ ID NO: 2186

SEQ ID NO: 2212 - DNA, 201 bp, Homo sapiens; identical to SEQ ID NO: 2187

SEQ ID NO: 2213 - DNA, 201 bp, Homo sapiens; identical to SEQ ID NO: 2188

SEQ ID NO: 2214 - DNA, 201 bp, Homo sapiens; identical to SEQ ID NO: 2189

SEQ ID NO: 2215 - DNA, 201 bp, Homo sapiens; identical to SEQ ID NO: 2190

SEQ ID NO: 2216 - DNA, 201 bp, Homo sapiens; identical to SEQ ID NO: 2179

SEQ ID NO: 2217 - DNA, 201 bp, Homo sapiens; identical to SEQ ID NO: 2180

SEQ ID NO: 2218 - DNA, 201 bp, Homo sapiens; identical to SEQ ID NO: 2181

SEQ ID NO: 2219 - DNA, 201 bp, Homo sapiens; identical to SEQ ID NO: 2182

SEQ ID NO: 2220 - DNA, 201 bp, Homo sapiens; identical to SEQ ID NO: 2183

SEQ ID NO: 2221 - DNA, 201 bp, Homo sapiens; identical to SEQ ID NO: 2184

SEQ ID NO: 2222 - DNA, 201 bp, Homo sapiens; identical to SEQ ID NO: 2185

SEQ ID NO: 2223 - DNA, 201 bp, Homo sapiens; identical to SEQ ID NO: 2186

SEQ ID NO: 2224 - DNA, 201 bp, Homo sapiens; identical to SEQ ID NO: 2187

SEQ ID NO: 2225 - DNA, 201 bp, Homo sapiens; identical to SEQ ID NO: 2188

SEQ ID NO: 2226 - DNA, 201 bp, Homo sapiens; identical to SEQ ID NO: 2189

SEQ ID NO: 2227 - DNA, 201 bp, Homo sapiens; identical to SEQ ID NO: 2190

SEQ ID NO: 2228 - DNA, 201 bp, Homo sapiens
agccagtgcaggaacagccaggcaccctaaccatcacagtccttcgccctttccatgaagcatcaccatggcaagtaaaaaaggaagatacaattgtcccycctaatctccggtcaaggtcatgggaaacatttccctcagttgagaaaaaaactccaggacctccgtttggtactcagatttggaaaggcctttgcattg

SEQ ID NO: 2229 - DNA, 201 bp, Homo sapiens
ttaatctagaatccctgcctcttaatggctttcttatatttagtctttctaaagagagtggcagaaaaggtacctcattcattgtaaaacaccttcttcartgtttgttcatgcaaacattagtagtcattatatcattttacaaaatatcactttataaggttcattttgggttttctagatttcaagccacataaggtt

SEQ ID NO: 2230 - DNA, 201 bp, Homo sapiens
tctccggtcaaggtcatgggaaacatttccctcagttgagaaaaaaactccaggacctccgtttggtactcagatttggaaaggcctttgcattgagtccraacagctagtgagtgccccgggtgccatactcaagagccccagtgtgctacagatgcgccaattcattcagcatgaggtcataaagaatgaggtgaaact

SEQ ID NO: 2231 - DNA, 201 bp, Homo sapiens
gcagaatcttatgagcccgtgaaaattccaacccagtccttgctgcaggatgttgcgggacaaacaagaaaagaaaaagtgaagttgcctcattatttgcwgagttccaagcctaagtctcaacctcttgcaaaggtgcaagattctgttggaggaaaagtgaacacatcctctgttgcatctgctgccattaataatgca

SEQ ID NO: 2232 - DNA, 201 bp, Homo sapiens
ctggacctgtggcagctggtatgcagacagaactgaatatagagttatttgccacagctgttggagaggatggggccaagggatcagcacacatctctcamaatatcgagattatgacagagcatgagtgtcttcagccaaacagatattagatagatatcaagaacctattacctccaagatgccgaaacgcctgccttt

SEQ ID NO: 2233 - DNA, 201 bp, Homo sapiens
ctgtggcagctggtatgcagacagaactgaatatagagttatttgccacagctgttggagaggatggggccaagggatcagcacacatctctcacaatatygagattatgacagagcatgagtgtcttcagccaaacagatattagatagatatcaagaacctattacctccaagatgccgaaacgcctgcctttatgtag

SEQ ID NO: 2234 - DNA, 108 bp, Homo sapiens
tcatcacaacatactccatcatcccaggacactgaaactggaagaactgaccagaaatttgccaaatgaaatagcttcaatctgtttaataaagacgtgcsaatagag

SEQ ID NO: 2235 - DNA, 201 bp, Homo sapiens
tgaaagaagagctcctagcagtcggcaagttcacacggacgtcaggggagaccacgcacacgcacagagagccagcaggagatggcaagagcatcagaacrtttaaggagtctccaaagcagatcctggacccagcagcccgtgtaactggaatgaagaagtggccaagaacgcctaaggaagaggcccagtcactagaag

SEQ ID NO: 2236 - DNA, 201 bp, Homo sapiens
gagccgggcgcccggggacgtagcctgtagggccaccgggtccccgtcagaggcggcggcgggagcagcggggactgcaggccggggtgcagcgaacgcgrccccgcgggctgcggcccggtgtgtgcggagcgtggcgggcgcagcttaccgggcggaggtgagcgcggcgccggctcctcctgcggcggactttgggtg

SEQ ID NO: 2237 - DNA, 201 bp, Homo sapiens
agcggggactgcaggccggggtgcagcgaacgcgaccccgcgggctgcggcccggtgtgtgcggagcgtggcgggcgcagcttaccgggcggaggtgagckcggcgccggctcctcctgcggcggactttgggtgcgacttgacgagcggtggttcgacaagtggccttgcgggccggatcgtcccagtggaagagttgta

SEQ ID NO: 2238 - DNA, 201 bp, Homo sapiens
aagtggccaagaacgcctaaggaagaggcccagtcactagaagacctggctggcttcaaagagctcttccagacaccaggtccctctgaggaatcaatgastgatgagaaaactaccaaaatagcctgcaaatctccaccaccagaatcagtggacactccaacaagcacaaagcaatggcctaagagaagtctcaggaaa

SEQ ID NO: 2239 - DNA, 201 bp, Homo sapiens
atgcacactccacctgtcctgaagaaaatcatcaaggaacagcctcaaccatcaggaaaacaagagtcaggttcagaaatccatgtggaagtgaaggcacmaagcttggttataagccctccagctcctagtcctaggaaaactccagttgccagtgatcaacgccgtaggtcctgcaaaacagcccctgcttccagcagc

SEQ ID NO: 2240 - DNA, 201 bp, Homo sapiens
caatagacggctacaaactcgtaaggaaaaggcccaggctctagaagaactgactggcttcagagagcttttccagacaccatgcactgataaccccacgrctgatgagaaaactaccaaaaaaatactctgcaaatctccgcaatcagacccagcggacaccccaacaaacacaaagcaacggcccaagagaagcctcaa

SEQ ID NO: 2241 - DNA, 201 bp, Homo sapiens
gcagcccaagacacctttggagaaaagggacgtacagaaggagctctcagccctgaagaagctcacacagacatcaggggaaaccacacacacagataaartaccaggaggtgaggataaaagcatcaacgcgtttagggaaactgcaaaacagaaactggacccagcagcaagtgtaactggtagcaagaggcacccaaa

SEQ ID NO: 2242 - DNA, 201 bp, Homo sapiens
acgactcacgagaaaactaccaaaatagcctgcagatcacaaccagacccagtggacacaccaacaagctccaagccacagtccaagagaagtctcaggamagtggacgtagaagaagaattcttcgcactcaggaaacgaacaccatcagcaggcaaagccatgcacacacccaaaccagcagtaagtggtgagaaaaac

SEQ ID NO: 2243 - DNA, 201 bp, Homo sapiens
agagccgggcgcccggggacgtagcctgtagggccaccgggtccccgtcagaggcggcggcgggagcagcggggactgcaggccggggtgcagcgaacgckaccccgcgggctgcggcccggtgtgtgcggagcgtggcgggcgcagcttaccgggcggaggtgagcgcggcgccggctcctcctgcggcggactttgggt

SEQ ID NO: 2244 - DNA, 201 bp, Homo sapiens
gtcctgcaaaacagcccctgcttccagcagcaaatctcagacagaggttcctaagagaggagggagaaagagtggcaacctgccttcaaagagagtgtctmtcagccgaagtcaacatgatattttacagatgatatgttccaaaagaagaagtggtgcttcggaagcaaatctgattgttgcaaaatcatgggcagatgt

SEQ ID NO: 2245 - DNA, 201 bp, Homo sapiens
actgcaaaacagaaactggacccagcagcaagtgtaactggtagcaagaggcacccaaaaactaaggaaaaggcccaacccctagaagacctggctggctkgaaagagctcttccagacaccagtatgcactgacaagcccacgactcacgagaaaactaccaaaatagcctgcagatcacaaccagacccagtggacaca

SEQ ID NO: 2246 - DNA, 201 bp, Homo sapiens
gcaagctcacacaaacctcaggggagaccacgcacaccgacaaagagccggtaggtgagggcaaaggcacgaaagcatttaagcaacctgcaaagcggaasctggacgcagaagatgtaattggcagcaggagacagccaagagcacctaaggaaaaggcccaacccctggaagatctggccagcttccaagagctctctc

SEQ ID NO: 2247 - DNA, 201 bp, Homo sapiens
actttggagagcgaatctgtgcagagagtaacgcggagtgtcaagagatgtgcagaaaatccaaagaaggctgaggacaatgtgtgtgtcaagaaaataasaaccagaagtcatagggacagtgaagatatttgacagaaaaatcgaactgggaaaaatataataaagttagttttgtgataagttctagtgcagtttttg

SEQ ID NO: 2248 - DNA, 201 bp, Homo sapiens
catttaagcaacctgcaaagcggaagctggacgcagaagatgtaattggcagcaggagacagccaagagcacctaaggaaaaggcccaacccctggaagayctggccagcttccaagagctctctcaaacaccaggccacactgaggaactggcaaatggtgctgctgatagctttacaagcgctccaaagcaaacacctg

SEQ ID NO: 2249 - DNA, 201 bp, Homo sapiens
caagctcacacaaacctcaggggagaccacgcacaccgacaaagagccggtaggtgagggcaaaggcacgaaagcatttaagcaacctgcaaagcggaagstggacgcagaagatgtaattggcagcaggagacagccaagagcacctaaggaaaaggcccaacccctggaagatctggccagcttccaagagctctctca

SEQ ID NO: 2250 - DNA, 201 bp, Homo sapiens
gctggctttaaagagctcttccagacacgaggtcacactgaggaatcaatgactaacgataaaactgccaaagtagcctgcaaatcttcacaaccagaccyagacaaaaacccagcaagctccaagcgacggctcaagacatccctggggaaagtgggcgtgaaagaagagctcctagcagttggcaagctcacacagaca

SEQ ID NO: 2251 - DNA, 201 bp, Homo sapiens
accagcaagcggtgatgagggcatcaaagtattgaagcaacgtgcaaagaagaaaccaaacccagtagaagaggaacccagcaggagaaggccaagagcayctaaggaaaaggcccaacccctggaagacctggccggcttcacagagctctctgaaacatcaggtcacactcaggaatcactgactgctggcaaagccac

SEQ ID NO: 2252 - DNA, 201 bp, Homo sapiens
atgagggcatcaaagtattgaagcaacgtgcaaagaagaaaccaaacccagtagaagaggaacccagcaggagaaggccaagagcacctaaggaaaaggcycaacccctggaagacctggccggcttcacagagctctctgaaacatcaggtcacactcaggaatcactgactgctggcaaagccactaaaataccctgcg

SEQ ID NO: 2253 - DNA, 201 bp, Homo sapiens
gctggacgcagaagatgtaattggcagcaggagacagccaagagcacctaaggaaaaggcccaacccctggaagatctggccagcttccaagagctctctmaaacaccaggccacactgaggaactggcaaatggtgctgctgatagctttacaagcgctccaaagcaaacacctgacagtggaaaacctctaaaaatatc

SEQ ID NO: 2254 - DNA, 201 bp, Homo sapiens
gaagaactgactggcttcagagagcttttccagacaccatgcactgataaccccacgactgatgagaaaactaccaaaaaaatactctgcaaatctccgcwatcagacccagcggacaccccaacaaacacaaagcaacggcccaagagaagcctcaagaaagcagacgtagaggaagaatttttagcattcaggaaacta

SEQ ID NO: 2255 - DNA, 201 bp, Homo sapiens
gagtcaatgactattgacaaaaacacaaaaattccctgcaaatctcccccaccagaactaacagacactgccacgagcacaaagagatgccccaagacacrtcccaggaaagaagtaaaagaggagctctcagcagttgagaggctcacgcaaacatcagggcaaagcacacacacacacaaagaaccagcaagcggtgat

SEQ ID NO: 2256 - DNA, 201 bp, Homo sapiens
acgtagaagaagaattcttcgcactcaggaaacgaacaccatcagcaggcaaagccatgcacacacccaaaccagcagtaagtggtgagaaaaacatctaygcatttatgggaactccagtgcagaaactggacctgacagagaacttaactggcagcaagagacggctacaaactcctaaggaaaaggcccaggctctag

SEQ ID NO: 2257 - DNA, 201 bp, Homo sapiens
tcacaaccagacccagtggacacaccaacaagctccaagccacagtccaagagaagtctcaggaaagtggacgtagaagaagaattcttcgcactcaggawacgaacaccatcagcaggcaaagccatgcacacacccaaaccagcagtaagtggtgagaaaaacatctacgcatttatgggaactccagtgcagaaactg

SEQ ID NO: 2258 - DNA, 201 bp, Homo sapiens
gcagatcacaaccagacccagtggacacaccaacaagctccaagccacagtccaagagaagtctcaggaaagtggacgtagaagaagaattcttcgcactyaggaaacgaacaccatcagcaggcaaagccatgcacacacccaaaccagcagtaagtggtgagaaaaacatctacgcatttatgggaactccagtgcaga

SEQ ID NO: 2259 - DNA, 201 bp, Homo sapiens
aaggcccaacccctagaagacctggctggcttgaaagagctcttccagacaccagtatgcactgacaagcccacgactcacgagaaaactaccaaaatagmctgcagatcacaaccagacccagtggacacaccaacaagctccaagccacagtccaagagaagtctcaggaaagtggacgtagaagaagaattcttcgca

SEQ ID NO: 2260 - DNA, 201 bp, Homo sapiens
gacccaagagaagtatcaggaaagcagatgtagagggagaactcttagcgtgcaggaatctaatgccatcagcaggcaaagccatgcacacgcctaaaccrtcagtaggtgaagagaaagacatcatcatatttgtgggaactccagtgcagaaactggacctgacagagaacttaaccggcagcaagagacggccacaaa

SEQ ID NO: 2261 - DNA, 201 bp, Homo sapiens
actccagtgcagaaactggacctggcaggaactttacctggcagcaaaagacagctacagactcctaaggaaaaggcccaggctctagaagacctggctgkctttaaagagctcttccagactcctggtcacaccgaggaattagtggctgctggtaaaaccactaaaataccctgcgactctccacagtcagacccagtg

SEQ ID NO: 2262 - DNA, 201 bp, Homo sapiens
aagaaggcagcccaagacacctttggagaaaagggacgtacagaaggagctctcagccctgaagaagctcacacagacatcaggggaaaccacacacacasataaagtaccaggaggtgaggataaaagcatcaacgcgtttagggaaactgcaaaacagaaactggacccagcagcaagtgtaactggtagcaagaggca

SEQ ID NO: 2263 - DNA, 201 bp, Homo sapiens
attcctcagaacatgctggacgtaatggcagaaatgcagctgatcccatttctggggattttaaagaaatttccagcgttaaattagtgagccgttatggwgaattgaagtctgttcccactacacaatgtcttgacaatagcaaaaaaaatgaatctcccttttggaagctttatgagtcagtgaagaaagagttggatg

SEQ ID NO: 2264 - DNA, 201 bp, Homo sapiens
caacacatttgtggggactccagtggagaaactggacctgctaggaaatttacctggcagcaagagacggccacaaactcctaaagaaaaggccaaggctmtagaagatctggctggcttcaaagagctcttccagacaccaggtcacactgaggaatcaatgaccgatgacaaaatcacagaagtatcctgcaaatctcc

SEQ ID NO: 2265 - DNA, 201 bp, Homo sapiens
tgaaagaagagcccctagcagtcagcaagctcacacggacatcaggggagactacgcaaacacacacagagccaacaggagatagtaagagcatcaaagcrtttaaggagtctccaaagcagatcctggacccagcagcaagtgtaactggtagcaggaggcagctgagaactcgtaaggaaaaggcccgtgctctagaag

SEQ ID NO: 2266 - DNA, 201 bp, Homo sapiens
tcaacgcgtttagggaaactgcaaaacagaaactggacccagcagcaagtgtaactggtagcaagaggcacccaaaaactaaggaaaaggcccaacccctrgaagacctggctggcttgaaagagctcttccagacaccagtatgcactgacaagcccacgactcacgagaaaactaccaaaatagcctgcagatcacaac

SEQ ID NO: 2267 - DNA, 201 bp, Homo sapiens
ccacgactcacgagaaaactaccaaaatagcctgcagatcacaaccagacccagtggacacaccaacaagctccaagccacagtccaagagaagtctcagsaaagtggacgtagaagaagaattcttcgcactcaggaaacgaacaccatcagcaggcaaagccatgcacacacccaaaccagcagtaagtggtgagaaaa

SEQ ID NO: 2268 - DNA, 201 bp, Homo sapiens
gaaacaaacgccatcagcaggcaaagccatgcacacacccaaaccagcagtaggtgaagagaaagacatcaacacgtttttgggaactccagtgcagaaastggaccagccaggaaatttacctggcagcaatagacggctacaaactcgtaaggaaaaggcccaggctctagaagaactgactggcttcagagagctttt

SEQ ID NO: 2269 - DNA, 201 bp, Homo sapiens
gacaccaggtccctctgaggaatcaatgactgatgagaaaactaccaaaatagcctgcaaatctccaccaccagaatcagtggacactccaacaagcacaragcaatggcctaagagaagtctcaggaaagcagatgtagaggaagaattcttagcactcaggaaactaacaccatcagcagggaaagccatgcttacgcc

SEQ ID NO: 2270 - DNA, 201 bp, Homo sapiens
aaggcatccctggggaaagtaggtgtgaaagaagagctcctagcagtcggcaagttcacacggacgtcaggggagaccacgcacacgcacagagagccagyaggagatggcaagagcatcagaacgtttaaggagtctccaaagcagatcctggacccagcagcccgtgtaactggaatgaagaagtggccaagaacgcct

SEQ ID NO: 2271 - DNA, 201 bp, Homo sapiens
aagcaatgaagagatcaagaacttgggggcagaaatgtgcaccaatgtctgacctgacagacctcaagagcttgcctgatacagaactcatgaaagacacrgcacgtggccagaatctcctccaaacccaagatcatgccaaggcaccaaagagtgagaaaggcaaaatcactaaaatgccctgccagtcattacaaccag

SEQ ID NO: 2272 - DNA, 201 bp, Homo sapiens
ggaaacgtagcaaaaacgcccaggaacacctacaaaatgacttctctggagacaaaaacttcagatactgagacagagccttcaaaaacagtatccactgyaaacaggtcaggaaggtctacagagttcaggaatatacagaagctacctgtggaaagtaagagtgaagaaacaaatacagaaattgttgagtgcatccta

SEQ ID NO: 2273 - DNA, 201 bp, Homo sapiens
gctccccacctcagagagttttggaggaaatgtgttcttcagtgcacagaatgcagcaaaacagccatctgataaatgctctgcaagccctcccttaagayggcagtgtattagagaaaatggaaacgtagcaaaaacgcccaggaacacctacaaaatgacttctctggagacaaaaacttcagatactgagacagagcc

SEQ ID NO: 2274 - DNA, 201 bp, Homo sapiens
atcaaagcattgaaggaatctgcaaaacagacaccggctccagcagcaagtgtaactggcagcaggagacggccaagagcacccagggaaagtgcccaagycatagaagacctagctggcttcaaagacccagcagcaggtcacactgaagaatcaatgactgatgacaaaaccactaaaataccctgcaaatcatcacca

SEQ ID NO: 2275 - DNA, 201 bp, Homo sapiens
ctggcttcaaagacccagcagcaggtcacactgaagaatcaatgactgatgacaaaaccactaaaataccctgcaaatcatcaccagaactagaagacacygcaacaagctcaaagagacggcccaggacacgtgcccagaaagtagaagtgaaggaggagctgttagcagttggcaagctcacacaaacctcaggggaga

SEQ ID NO: 2276 - DNA, 201 bp, Homo sapiens
tcaagaaagacaaaaagccagcctgcagcaagcactttggagagcgaatctgtgcagagagtaacgcggagtgtcaagagatgtgcagaaaatccaaagarggctgaggacaatgtgtgtgtcaagaaaataagaaccagaagtcatagggacagtgaagatatttgacagaaaaatcgaactgggaaaaatataataaag

SEQ ID NO: 2277 - DNA, 201 bp, Homo sapiens
gcctaaggtggcagaggagagcggagggcagaagagtgcgaaggttctcatgcagaatcagaaagggaaaggagaagcaggaaattcagactccatgtgcytgagatcaagaaagacaaaaagccagcctgcagcaagcactttggagagcgaatctgtgcagagagtaacgcggagtgtcaagagatgtgcagaaaatcc

SEQ ID NO: 2278 - DNA, 201 bp, Homo sapiens
gcatcaaagcgtttaaggaatctgcaaagcagatgctggacccagcaaactatggaactgggatggagaggtggccaagaacacctaaggaagaggcccartcactagaagacctggccggcttcaaagagctcttccagacaccagaccacactgaggaatcaacaactgatgacaaaactaccaaaatagcctgcaaat

SEQ ID NO: 2279 - DNA, 201 bp, Homo sapiens
gaagaggcccaatcactagaagacctggccggcttcaaagagctcttccagacaccagaccacactgaggaatcaacaactgatgacaaaactaccaaaayagcctgcaaatctccaccaccagaatcaatggacactccaacaagcacaaggaggcggcccaaaacacctttggggaaaagggatatagtggaagagctc

SEQ ID NO: 2280 - DNA, 201 bp, Homo sapiens
ctggcagcaagagacggccacaaactcctaaagaaaaggccaaggctctagaagatctggctggcttcaaagagctcttccagacaccaggtcacactgasgaatcaatgaccgatgacaaaatcacagaagtatcctgcaaatctccacaaccagacccagtcaaaaccccaacaagctccaagcaacgactcaagatat

SEQ ID NO: 2281 - DNA, 201 bp, Homo sapiens
gagagacagcaggagatggaaagagcatcaaagcgtttaaggaatctgcaaagcagatgctggacccagcaaactatggaactgggatggagaggtggccragaacacctaaggaagaggcccaatcactagaagacctggccggcttcaaagagctcttccagacaccagaccacactgaggaatcaacaactgatgaca

SEQ ID NO: 2282 - DNA, 201 bp, Homo sapiens
agaaactggacctgctaggaaatttacctggcagcaagagacggccacaaactcctaaagaaaaggccaaggctctagaagatctggctggcttcaaagarctcttccagacaccaggtcacactgaggaatcaatgaccgatgacaaaatcacagaagtatcctgcaaatctccacaaccagacccagtcaaaaccccaa

SEQ ID NO: 2283 - DNA, 201 bp, Homo sapiens
gtaaatgggtctgttattgatgagcctgtacggctaaaacatggagatgtaataactattattgatcgttccttcaggtatgaaaatgaaagtcttcagartggaaggaagtcaactgaatttccaagaaaaatacgtgaacaggagccagcacgtcgtgtctcaagatctagcttctcttctgaccctgatgagaaagct

SEQ ID NO: 2284 - DNA, 201 bp, Homo sapiens
gcaatagacggctacaaactcgtaaggaaaaggcccaggctctagaagaactgactggcttcagagagcttttccagacaccatgcactgataaccccacractgatgagaaaactaccaaaaaaatactctgcaaatctccgcaatcagacccagcggacaccccaacaaacacaaagcaacggcccaagagaagcctca

SEQ ID NO: 2285 - DNA, 201 bp, Homo sapiens
aaaatgccctgcgaatcttctccaccagaatcagcagacaccccaacaagcacaagaaggcagcccaagacacctttggagaaaagggacgtacagaaggwgctctcagccctgaagaagctcacacagacatcaggggaaaccacacacacagataaagtaccaggaggtgaggataaaagcatcaacgcgtttagggaa

SEQ ID NO: 2286 - DNA, 201 bp, Homo sapiens
accgacaaagagccggtaggtgagggcaaaggcacgaaagcatttaagcaacctgcaaagcggaagctggacgcagaagatgtaattggcagcaggagacrgccaagagcacctaaggaaaaggcccaacccctggaagatctggccagcttccaagagctctctcaaacaccaggccacactgaggaactggcaaatggt

SEQ ID NO: 2287 - DNA, 201 bp, Homo sapiens
gaagaatcaatgactgatgacaaaaccactaaaataccctgcaaatcatcaccagaactagaagacaccgcaacaagctcaaagagacggcccaggacacrtgcccagaaagtagaagtgaaggaggagctgttagcagttggcaagctcacacaaacctcaggggagaccacgcacaccgacaaagagccggtaggtgag

SEQ ID NO: 2288 - DNA, 201 bp, Homo sapiens
gacaaagaaccagcaggtgaagataaaggcatcaaagcattgaaggaatctgcaaaacagacaccggctccagcagcaagtgtaactggcagcaggagacrgccaagagcacccagggaaagtgcccaagccatagaagacctagctggcttcaaagacccagcagcaggtcacactgaagaatcaatgactgatgacaaa

SEQ ID NO: 2289 - DNA, 201 bp, Homo sapiens
gataaaggcatcaaagcattgaaggaatctgcaaaacagacaccggctccagcagcaagtgtaactggcagcaggagacggccaagagcacccagggaaartgcccaagccatagaagacctagctggcttcaaagacccagcagcaggtcacactgaagaatcaatgactgatgacaaaaccactaaaataccctgcaaa

SEQ ID NO: 2290 - DNA, 201 bp, Homo sapiens
aaggcatcaaagcattgaaggaatctgcaaaacagacaccggctccagcagcaagtgtaactggcagcaggagacggccaagagcacccagggaaagtgcycaagccatagaagacctagctggcttcaaagacccagcagcaggtcacactgaagaatcaatgactgatgacaaaaccactaaaataccctgcaaatcat

SEQ ID NO: 2291 - DNA, 201 bp, Homo sapiens
cctaaggaaaaggcccaggctctagaagacctggctggctttaaagagctcttccagactcctggtcacaccgaggaattagtggctgctggtaaaaccaytaaaataccctgcgactctccacagtcagacccagtggacaccccaacaagcacaaagcaacgacccaagagaagtatcaggaaagcagatgtagaggga

SEQ ID NO: 2292 - DNA, 201 bp, Homo sapiens
cgcactcaggaaacgaacaccatcagcaggcaaagccatgcacacacccaaaccagcagtaagtggtgagaaaaacatctacgcatttatgggaactccartgcagaaactggacctgacagagaacttaactggcagcaagagacggctacaaactcctaaggaaaaggcccaggctctagaagacctggctggctttaa

SEQ ID NO: 2293 - DNA, 201 bp, Homo sapiens
gacatgaaaaccaacaaagaggaacacaaattacaagactcggtccctgaaaataagggaatatccctgcgctccagacgccaaaataagactgaggcagracagcaaataactgaggtctttgtattagcagaaagaatagaaataaacagaaatgaaaagaagcccatgaagacctccccagagatggacattcagaat

SEQ ID NO: 2294 - DNA, 201 bp, Homo sapiens
ctctcagcagttgagaggctcacgcaaacatcagggcaaagcacacacacacacaaagaaccagcaagcggtgatgagggcatcaaagtattgaagcaacrtgcaaagaagaaaccaaacccagtagaagaggaacccagcaggagaaggccaagagcacctaaggaaaaggcccaacccctggaagacctggccggcttc

SEQ ID NO: 2295 - DNA, 201 bp, Homo sapiens
agccaagaactcctaagggaaaagcccaacccctagaagacttggctggcttgaaagagctcttccagacaccaatatgcactgacaagcccacgactcaygagaaaactaccaaaatagcctgcagatctccacaaccagacccagtgggtaccccaacaatcttcaagccacagtccaagagaagtctcaggaaagcag

SEQ ID NO: 2296 - DNA, 201 bp, Homo sapiens; identical to SEQ ID NO: 2295

SEQ ID NO: 2297 - DNA, 201 bp, Homo sapiens; identical to SEQ ID NO: 2295

SEQ ID NO: 2298 - DNA, 201 bp, Homo sapiens; identical to SEQ ID NO: 2295

SEQ ID NO: 2299 - DNA, 201 bp, Homo sapiens
tgcactgataaccccacgactgatgagaaaactaccaaaaaaatactctgcaaatctccgcaatcagacccagcggacaccccaacaaacacaaagcaacrgcccaagagaagcctcaagaaagcagacgtagaggaagaatttttagcattcaggaaactaacaccatcagcaggcaaagccatgcacacgcctaaagca

SEQ ID NO: 2300 - DNA, 201 bp, Homo sapiens
actgataaccccacgactgatgagaaaactaccaaaaaaatactctgcaaatctccgcaatcagacccagcggacaccccaacaaacacaaagcaacggcycaagagaagcctcaagaaagcagacgtagaggaagaatttttagcattcaggaaactaacaccatcagcaggcaaagccatgcacacgcctaaagcagca

SEQ ID NO: 2301 - DNA, 201 bp, Homo sapiens
cagcaggaggtgatgagaaagacattaaagcatttatgggaactccagtgcagaaactggacctggcaggaactttacctggcagcaaaagacagctacaractcctaaggaaaaggcccaggctctagaagacctggctggctttaaagagctcttccagactcctggtcacaccgaggaattagtggctgctggtaaaa

SEQ ID NO: 2302 - DNA, 201 bp, Homo sapiens
caaactcctaaggaaaaggcccaggctctagaagacctggctggcttcaaagagctcttccagacaccaggcactgacaagcccacgactgatgagaaaamtaccaaaatagcctgcaaatctccacaaccagacccagtggacaccccagcaagcacaaagcaacggcccaagagaagcctcaggaaagcagacgtagag

SEQ ID NO: 2303 - DNA, 201 bp, Homo sapiens; identical to SEQ ID NO: 2302

SEQ ID NO: 2304 - DNA, 201 bp, Homo sapiens; identical to SEQ ID NO: 2302

SEQ ID NO: 2305 - DNA, 201 bp, Homo sapiens; identical to SEQ ID NO: 2302

SEQ ID NO: 2306 - DNA, 201 bp, Homo sapiens
gcaacaagctcaaagagacggcccaggacacgtgcccagaaagtagaagtgaaggaggagctgttagcagttggcaagctcacacaaacctcaggggagascacgcacaccgacaaagagccggtaggtgagggcaaaggcacgaaagcatttaagcaacctgcaaagcggaagctggacgcagaagatgtaattggcagc

SEQ ID NO: 2307 - DNA, 201 bp, Homo sapiens
gtcattacaaccagaaccaataaacaccccaacacacacaaaacaacagttgaaggcatccctggggaaagtaggtgtgaaagaagagctcctagcagtcrgcaagttcacacggacgtcaggggagaccacgcacacgcacagagagccagcaggagatggcaagagcatcagaacgtttaaggagtctccaaagcagat

SEQ ID NO: 2308 - DNA, 201 bp, Homo sapiens
agagctgaacagcaacgacatgaaaaccaacaaagaggaacacaaattacaagactcggtccctgaaaataagggaatatccctgcgctccagacgccaarataagactgaggcagaacagcaaataactgaggtctttgtattagcagaaagaatagaaataaacagaaatgaaaagaagcccatgaagacctccccaga

SEQ ID NO: 2309 - DNA, 201 bp, Homo sapiens
agctgagaactcctaagggaaagtctgaagtccctgaagacctggccggcttcatcgagctcttccagacaccaagtcacactaaggaatcaatgactaaygaaaaaactaccaaagtatcctacagagcttcacagccagacctagtggacaccccaacaagctccaagccacagcccaagagaagtctcaggaaagcag

SEQ ID NO: 2310 - DNA, 201 bp, Homo sapiens
cgtgtgcagaaggtacaagtaaaagaagagccttcagcagtcaagttcacacaaacatcaggggaaaccacggatgcagacaaagaaccagcaggtgaagrtaaaggcatcaaagcattgaaggaatctgcaaaacagacaccggctccagcagcaagtgtaactggcagcaggagacggccaagagcacccagggaaagt

SEQ ID NO: 2311 - DNA, 201 bp, Homo sapiens; identical to SEQ ID NO: 2287

SEQ ID NO: 2312 - DNA, 201 bp, Homo sapiens; identical to SEQ ID NO: 2286

SEQ ID NO: 2313 - DNA, 201 bp, Homo sapiens
agagaagtttgaggacttctgcaaaaagaattgaacctgcggaagagctgaacagcaacgacatgaaaaccaacaaagaggaacacaaattacaagactcrgtccctgaaaataagggaatatccctgcgctccagacgccaaaataagactgaggcagaacagcaaataactgaggtctttgtattagcagaaagaatag

SEQ ID NO: 2314 - DNA, 201 bp, Homo sapiens; identical to SEQ ID NO: 2291

SEQ ID NO: 2315 - DNA, 201 bp, Homo sapiens; identical to SEQ ID NO: 2292

SEQ ID NO: 2316 - DNA, 201 bp, Homo sapiens; identical to SEQ ID NO: 2302

SEQ ID NO: 2317 - DNA, 201 bp, Homo sapiens; identical to SEQ ID NO: 2302

SEQ ID NO: 2318 - DNA, 201 bp, Homo sapiens; identical to SEQ ID NO: 2302

SEQ ID NO: 2319 - DNA, 201 bp, Homo sapiens; identical to SEQ ID NO: 2302

SEQ ID NO: 2320 - DNA, 201 bp, Homo sapiens
tcaatgactattgacaaaaacacaaaaattccctgcaaatctcccccaccagaactaacagacactgccacgagcacaaagagatgccccaagacacgtcycaggaaagaagtaaaagaggagctctcagcagttgagaggctcacgcaaacatcagggcaaagcacacacacacacaaagaaccagcaagcggtgatgag

SEQ ID NO: 2321 - DNA, 201 bp, Homo sapiens; identical to SEQ ID NO: 2294

SEQ ID NO: 2322 - DNA, 201 bp, Homo sapiens
tgaaacatcaggtcacactcaggaatcactgactgctggcaaagccactaaaataccctgcgaatctcccccactagaagtggtagacaccacagcaagcmcaaagaggcatctcaggacacgtgtgcagaaggtacaagtaaaagaagagccttcagcagtcaagttcacacaaacatcaggggaaaccacggatgcaga

SEQ ID NO: 2323 - DNA, 201 bp, Homo sapiens
ctgagaaattgggcactacagctggacagatgtgctctgggttacctggtcttagttcagttgatatcaacaactttggtgattccattaatgagagtgasggaatacctttgaaaagaaggcgtgtgtcctttggtgggcacctaagacctgaactatttgatgaaaacttgcctcctaatacgcctctcaaaaggggag

SEQ ID NO: 2324 - DNA, 201 bp, Homo sapiens
atctgataaatgctctgcaagccctcccttaagacggcagtgtattagagaaaatggaaacgtagcaaaaacgcccaggaacacctacaaaatgacttctstggagacaaaaacttcagatactgagacagagccttcaaaaacagtatccactgcaaacaggtcaggaaggtctacagagttcaggaatatacagaagct

SEQ ID NO: 2325 - DNA, 201 bp, Homo sapiens; identical to SEQ ID NO: 2307

SEQ ID NO: 2326 - DNA, 201 bp, Homo sapiens
cagactccatgtgcctgagatcaagaaagacaaaaagccagcctgcagcaagcactttggagagcgaatctgtgcagagagtaacgcggagtgtcaagagrtgtgcagaaaatccaaagaaggctgaggacaatgtgtgtgtcaagaaaataagaaccagaagtcatagggacagtgaagatatttgacagaaaaatcgaa

SEQ ID NO: 2327 - DNA, 201 bp, Homo sapiens
agaaatttccagcgttaaattagtgagccgttatggagaattgaagtctgttcccactacacaatgtcttgacaatagcaaaaaaaatgaatctccctttwggaagctttatgagtcagtgaagaaagagttggatgtaaaatcacaaaaagaaaatgtcctacagtattgtagaaaatctggattacaaactgattacgc

SEQ ID NO: 2328 - DNA, 201 bp, Homo sapiens; identical to SEQ ID NO: 2244

SEQ ID NO: 2329 - DNA, 201 bp, Homo sapiens
ggaacacaaattacaagactcggtccctgaaaataagggaatatccctgcgctccagacgccaaaataagactgaggcagaacagcaaataactgaggtcwttgtattagcagaaagaatagaaataaacagaaatgaaaagaagcccatgaagacctccccagagatggacattcagaatccagatgatggagcccggaa

SEQ ID NO: 2330 - DNA, 201 bp, Homo sapiens
ataaacagaaatgaaaagaagcccatgaagacctccccagagatggacattcagaatccagatgatggagcccggaaacccatacctagagacaaagtcastgagaacaaaaggtgcttgaggtctgctagacagaatgagagctcccagcctaaggtggcagaggagagcggagggcagaagagtgcgaaggttctcatg

SEQ ID NO: 2331 - DNA, 201 bp, Homo sapiens
gcagaatcagaaagggaaaggagaagcaggaaattcagactccatgtgcctgagatcaagaaagacaaaaagccagcctgcagcaagcactttggagagcraatctgtgcagagagtaacgcggagtgtcaagagatgtgcagaaaatccaaagaaggctgaggacaatgtgtgtgtcaagaaaataagaaccagaagtca

SEQ ID NO: 2332 - DNA, 201 bp, Homo sapiens
aggctctagaagacctggctggctttaaagagctcttccagactcctggtcacaccgaggaattagtggctgctggtaaaaccactaaaataccctgcgahtctccacagtcagacccagtggacaccccaacaagcacaaagcaacgacccaagagaagtatcaggaaagcagatgtagagggagaactcttagcgtgca

SEQ ID NO: 2333 - DNA, 201 bp, Homo sapiens
aacaacattgcaaaattgaaatccatgagcaggaggcaatattacataatttcagttccacaaatccaacacaagtaaatgggtctgttattgatgagccwgtacggctaaaacatggagatgtaataactattattgatcgttccttcaggtatgaaaatgaaagtcttcagagtggaaggaagtcaactgaatttccaa

SEQ ID NO: 2334 - DNA, 201 bp, Homo sapiens
ttgtgataagttctagtgcagtttttgtcataaattacaagtgaattctgtaagtaaggctgtcagtctgcttaagggaagaaaactttggatttgctggstctgaatcggcttcataaactccactgggagcactgctgggctcctggactgagaatagttgaacaccgggggctttgtgaaggagtctgggccaaggtt

SEQ ID NO: 2335 - DNA, 201 bp, Homo sapiens
ggtttgccctcagctttgcagaatgaagccttgaggtctgtcaccacccacagccaccctacagcagccttaactgtgacacttgccacactgtgtcgtcrtttgtttgcctatgtcctccagggcacggtggcaggaacaactatcctcgtctgtcccaacactgagcaggcactcggtaaacacgaatgaatggatgag

SEQ ID NO: 2336 - DNA, 201 bp, Homo sapiens
tgcagaatgaagccttgaggtctgtcaccacccacagccaccctacagcagccttaactgtgacacttgccacactgtgtcgtcgtttgtttgcctatgtyctccagggcacggtggcaggaacaactatcctcgtctgtcccaacactgagcaggcactcggtaaacacgaatgaatggatgagcgcacggatgaatgga

SEQ ID NO: 2337 - DNA, 201 bp, Homo sapiens
tcgtttgtttgcctatgtcctccagggcacggtggcaggaacaactatcctcgtctgtcccaacactgagcaggcactcggtaaacacgaatgaatggatragcgcacggatgaatggagcttacaagatctgtctttccaatggccgggggcatttggtccccaaattaaggctattggacatctgcacaggacagtcct

SEQ ID NO: 2338 - DNA, 201 bp, Homo sapiens
tggtccccaaattaaggctattggacatctgcacaggacagtcctatttttgatgtcctttcctttctgaaaataaagttttgtgctttggagaatgactygtgagcacatctttagggaccaagagtgactttctgtaaggagtgactcgtggcttgccttggtctcttgggaatacttttctaactagggttgctctca

SEQ ID NO: 2339 - DNA, 201 bp, Homo sapiens
cagcccgatgccacccagtacaggaagtgacaccagtactctgtaaagcatcatcatccttggagagactgagcactcagcaccttcagccacgatttcargatcgcttccttgtgagccgctgcctccgaaatctcctttgaagcccagacatctttctccagcttcagacttgtagatataactcgttcatcttcattt

SEQ ID NO: 2340 - DNA, 201 bp, Homo sapiens
cagacttgtagatataactcgttcatcttcatttactttccactttgccccctgtcctctctgtgttccccaaatcagagaatagcccgccatcccccagrtcacctgtctggattcctccccattcacccaccttgccaggtgcaggtgaggatggtgcaccagacagggtagctgtcccccaaaatgtgccctgtgcgg

SEQ ID NO: 2341 - DNA, 201 bp, Homo sapiens
tggattcctccccattcacccaccttgccaggtgcaggtgaggatggtgcaccagacagggtagctgtcccccaaaatgtgccctgtgcgggcagtgcccygtctccacgtttgtttccccagtgtctggcggggagccaggtgacatcataaatacttgctgaatgaatgcagaaatcagcggtactgacttgtactata

SEQ ID NO: 2342 - DNA, 201 bp, Homo sapiens
gaacaccacttctacacaaccctccttggtactgggggagggagagatctgacaaatactgcccattcccctaggctgactggatttgagaacaaataccmacccatttccaccatggtatggtaacttctctgagcttcagtttccaagtgaatttccatgtaataggacattcccattaaatacaagctgtttttactt

SEQ ID NO: 2343 - DNA, 201 bp, Homo sapiens
ctgggggagggagagatctgacaaatactgcccattcccctaggctgactggatttgagaacaaatacccacccatttccaccatggtatggtaacttctstgagcttcagtttccaagtgaatttccatgtaataggacattcccattaaatacaagctgtttttactttttcgcctcccagggcctgtgggatctggtc

SEQ ID NO: 2344 - DNA, 201 bp, Homo sapiens
gtaacttctctgagcttcagtttccaagtgaatttccatgtaataggacattcccattaaatacaagctgtttttactttttcgcctcccagggcctgtgsgatctggtcccccagcctctcttgggctttcttacactaactctgtacctaccatctcctgcctcccttaggcaggcacctccaaccaccacacactccc

SEQ ID NO: 2345 - DNA, 201 bp, Homo sapiens
ttcttacactaactctgtacctaccatctcctgcctcccttaggcaggcacctccaaccaccacacactccctgctgttttccctgcctggaactttcccwcctgccccaccaagatcatttcatccagtcctgagctcagcttaagggaggcttcttgcctgtgggttccctcacccccatgcctgtcctccaggctggg

SEQ ID NO: 2346 - DNA, 201 bp, Homo sapiens
ttacactaactctgtacctaccatctcctgcctcccttaggcaggcacctccaaccaccacacactccctgctgttttccctgcctggaactttccctccwgccccaccaagatcatttcatccagtcctgagctcagcttaagggaggcttcttgcctgtgggttccctcacccccatgcctgtcctccaggctggggca

SEQ ID NO: 2347 - DNA, 176 bp, Homo sapiens
cctctttgtagcacgtagtgttgtggaaactaagccactaattgagtttctggctcccctcctggggttgtaagttttgttcattcatgagggccgactgyatttcctggttactgtatcccagtgaccagccacaggagatgtccaataaagtatgtgatgaaatggtcttaaaa

SEQ ID NO: 2348 - DNA, 161 bp, Homo sapiens
tagtgttgtggaaactaagccactaattgagtttctggctcccctcctggggttgtaagttttgttcattcatgagggccgactgtatttcctggttactstatcccagtgaccagccacaggagatgtccaataaagtatgtgatgaaatggtcttaaaa

SEQ ID NO: 2349 - DNA, 201 bp, Homo sapiens; identical to SEQ ID NO: 2235

SEQ ID NO: 2350 - DNA, 201 bp, Homo sapiens; identical to SEQ ID NO: 2236

SEQ ID NO: 2351 - DNA, 201 bp, Homo sapiens; identical to SEQ ID NO: 2237

SEQ ID NO: 2352 - DNA, 201 bp, Homo sapiens; identical to SEQ ID NO: 2238

SEQ ID NO: 2353 - DNA, 201 bp, Homo sapiens; identical to SEQ ID NO: 2239

SEQ ID NO: 2354 - DNA, 201 bp, Homo sapiens; identical to SEQ ID NO: 2240

SEQ ID NO: 2355 - DNA, 201 bp, Homo sapiens; identical to SEQ ID NO: 2241

SEQ ID NO: 2356 - DNA, 201 bp, Homo sapiens; identical to SEQ ID NO: 2242

SEQ ID NO: 2357 - DNA, 201 bp, Homo sapiens; identical to SEQ ID NO: 2243

SEQ ID NO: 2358 - DNA, 201 bp, Homo sapiens; identical to SEQ ID NO: 2244

SEQ ID NO: 2359 - DNA, 201 bp, Homo sapiens; identical to SEQ ID NO: 2245

SEQ ID NO: 2360 - DNA, 201 bp, Homo sapiens; identical to SEQ ID NO: 2246

SEQ ID NO: 2361 - DNA, 201 bp, Homo sapiens; identical to SEQ ID NO: 2247

SEQ ID NO: 2362 - DNA, 201 bp, Homo sapiens; identical to SEQ ID NO: 2248

SEQ ID NO: 2363 - DNA, 201 bp, Homo sapiens; identical to SEQ ID NO: 2249

SEQ ID NO: 2364 - DNA, 201 bp, Homo sapiens; identical to SEQ ID NO: 2250

SEQ ID NO: 2365 - DNA, 201 bp, Homo sapiens; identical to SEQ ID NO: 2251

SEQ ID NO: 2366 - DNA, 201 bp, Homo sapiens; identical to SEQ ID NO: 2252

SEQ ID NO: 2367 - DNA, 201 bp, Homo sapiens; identical to SEQ ID NO: 2253

SEQ ID NO: 2368 - DNA, 201 bp, Homo sapiens; identical to SEQ ID NO: 2254

SEQ ID NO: 2369 - DNA, 201 bp, Homo sapiens; identical to SEQ ID NO: 2255

SEQ ID NO: 2370 - DNA, 201 bp, Homo sapiens; identical to SEQ ID NO: 2256

SEQ ID NO: 2371 - DNA, 201 bp, Homo sapiens; identical to SEQ ID NO: 2257

SEQ ID NO: 2372 - DNA, 201 bp, Homo sapiens; identical to SEQ ID NO: 2258

SEQ ID NO: 2373 - DNA, 201 bp, Homo sapiens; identical to SEQ ID NO: 2259

SEQ ID NO: 2374 - DNA, 201 bp, Homo sapiens; identical to SEQ ID NO: 2260

SEQ ID NO: 2375 - DNA, 201 bp, Homo sapiens; identical to SEQ ID NO: 2261

SEQ ID NO: 2376 - DNA, 201 bp, Homo sapiens; identical to SEQ ID NO: 2262

SEQ ID NO: 2377 - DNA, 201 bp, Homo sapiens; identical to SEQ ID NO: 2265

SEQ ID NO: 2378 - DNA, 201 bp, Homo sapiens; identical to SEQ ID NO: 2266

SEQ ID NO: 2379 - DNA, 201 bp, Homo sapiens; identical to SEQ ID NO: 2267

SEQ ID NO: 2380 - DNA, 201 bp, Homo sapiens; identical to SEQ ID NO: 2268

SEQ ID NO: 2381 - DNA, 201 bp, Homo sapiens; identical to SEQ ID NO: 2269

SEQ ID NO: 2382 - DNA, 201 bp, Homo sapiens; identical to SEQ ID NO: 2270

SEQ ID NO: 2383 - DNA, 201 bp, Homo sapiens; identical to SEQ ID NO: 2271

SEQ ID NO: 2384 - DNA, 201 bp, Homo sapiens; identical to SEQ ID NO: 2272

SEQ ID NO: 2385 - DNA, 201 bp, Homo sapiens; identical to SEQ ID NO: 2273

SEQ ID NO: 2386 - DNA, 201 bp, Homo sapiens; identical to SEQ ID NO: 2274

SEQ ID NO: 2387 - DNA, 201 bp, Homo sapiens; identical to SEQ ID NO: 2275

SEQ ID NO: 2388 - DNA, 201 bp, Homo sapiens; identical to SEQ ID NO: 2276

SEQ ID NO: 2389 - DNA, 201 bp, Homo sapiens; identical to SEQ ID NO: 2277

SEQ ID NO: 2390 - DNA, 201 bp, Homo sapiens; identical to SEQ ID NO: 2278

SEQ ID NO: 2391 - DNA, 201 bp, Homo sapiens; identical to SEQ ID NO: 2279

SEQ ID NO: 2392 - DNA, 201 bp, Homo sapiens; identical to SEQ ID NO: 2280

SEQ ID NO: 2393 - DNA, 201 bp, Homo sapiens; identical to SEQ ID NO: 2281

SEQ ID NO: 2394 - DNA, 201 bp, Homo sapiens; identical to SEQ ID NO: 2282

SEQ ID NO: 2395 - DNA, 201 bp, Homo sapiens; identical to SEQ ID NO: 2264

SEQ ID NO: 2396 - DNA, 201 bp, Homo sapiens; identical to SEQ ID NO: 2283

SEQ ID NO: 2397 - DNA, 201 bp, Homo sapiens; identical to SEQ ID NO: 2284

SEQ ID NO: 2398 - DNA, 201 bp, Homo sapiens; identical to SEQ ID NO: 2285

SEQ ID NO: 2399 - DNA, 201 bp, Homo sapiens; identical to SEQ ID NO: 2286

SEQ ID NO: 2400 - DNA, 201 bp, Homo sapiens; identical to SEQ ID NO: 2287

SEQ ID NO: 2401 - DNA, 201 bp, Homo sapiens; identical to SEQ ID NO: 2288

SEQ ID NO: 2402 - DNA, 201 bp, Homo sapiens; identical to SEQ ID NO: 2289

SEQ ID NO: 2403 - DNA, 201 bp, Homo sapiens; identical to SEQ ID NO: 2290

SEQ ID NO: 2404 - DNA, 201 bp, Homo sapiens; identical to SEQ ID NO: 2291

SEQ ID NO: 2405 - DNA, 201 bp, Homo sapiens; identical to SEQ ID NO: 2292

SEQ ID NO: 2406 - DNA, 201 bp, Homo sapiens; identical to SEQ ID NO: 2293

SEQ ID NO: 2407 - DNA, 201 bp, Homo sapiens; identical to SEQ ID NO: 2294

SEQ ID NO: 2408 - DNA, 201 bp, Homo sapiens; identical to SEQ ID NO: 2295

SEQ ID NO: 2409 - DNA, 201 bp, Homo sapiens; identical to SEQ ID NO: 2295

SEQ ID NO: 2410 - DNA, 201 bp, Homo sapiens; identical to SEQ ID NO: 2295

SEQ ID NO: 2411 - DNA, 201 bp, Homo sapiens; identical to SEQ ID NO: 2295

SEQ ID NO: 2412 - DNA, 201 bp, Homo sapiens; identical to SEQ ID NO: 2299

SEQ ID NO: 2413 - DNA, 201 bp, Homo sapiens; identical to SEQ ID NO: 2300

SEQ ID NO: 2414 - DNA, 201 bp, Homo sapiens; identical to SEQ ID NO: 2301

SEQ ID NO: 2415 - DNA, 201 bp, Homo sapiens; identical to SEQ ID NO: 2302

SEQ ID NO: 2416 - DNA, 201 bp, Homo sapiens; identical to SEQ ID NO: 2302

SEQ ID NO: 2417 - DNA, 201 bp, Homo sapiens; identical to SEQ ID NO: 2302

SEQ ID NO: 2418 - DNA, 201 bp, Homo sapiens; identical to SEQ ID NO: 2302

SEQ ID NO: 2419 - DNA, 201 bp, Homo sapiens; identical to SEQ ID NO: 2306

SEQ ID NO: 2420 - DNA, 201 bp, Homo sapiens; identical to SEQ ID NO: 2307

SEQ ID NO: 2421 - DNA, 201 bp, Homo sapiens; identical to SEQ ID NO: 2308

SEQ ID NO: 2422 - DNA, 201 bp, Homo sapiens; identical to SEQ ID NO: 2309

SEQ ID NO: 2423 - DNA, 201 bp, Homo sapiens; identical to SEQ ID NO: 2287

SEQ ID NO: 2424 - DNA, 201 bp, Homo sapiens; identical to SEQ ID NO: 2286

SEQ ID NO: 2425 - DNA, 201 bp, Homo sapiens; identical to SEQ ID NO: 2313

SEQ ID NO: 2426 - DNA, 201 bp, Homo sapiens; identical to SEQ ID NO: 2291

SEQ ID NO: 2427 - DNA, 201 bp, Homo sapiens; identical to SEQ ID NO: 2292

SEQ ID NO: 2428 - DNA, 201 bp, Homo sapiens; identical to SEQ ID NO: 2302

SEQ ID NO: 2429 - DNA, 201 bp, Homo sapiens; identical to SEQ ID NO: 2302

SEQ ID NO: 2430 - DNA, 201 bp, Homo sapiens; identical to SEQ ID NO: 2302

SEQ ID NO: 2431 - DNA, 201 bp, Homo sapiens; identical to SEQ ID NO: 2302

SEQ ID NO: 2432 - DNA, 201 bp, Homo sapiens; identical to SEQ ID NO: 2320

SEQ ID NO: 2433 - DNA, 201 bp, Homo sapiens; identical to SEQ ID NO: 2294

SEQ ID NO: 2434 - DNA, 201 bp, Homo sapiens; identical to SEQ ID NO: 2322

SEQ ID NO: 2435 - DNA, 201 bp, Homo sapiens; identical to SEQ ID NO: 2310

SEQ ID NO: 2436 - DNA, 201 bp, Homo sapiens; identical to SEQ ID NO: 2324

SEQ ID NO: 2437 - DNA, 201 bp, Homo sapiens; identical to SEQ ID NO: 2307

SEQ ID NO: 2438 - DNA, 201 bp, Homo sapiens; identical to SEQ ID NO: 2326

SEQ ID NO: 2439 - DNA, 201 bp, Homo sapiens; identical to SEQ ID NO: 2244

SEQ ID NO: 2440 - DNA, 201 bp, Homo sapiens; identical to SEQ ID NO: 2329

SEQ ID NO: 2441 - DNA, 201 bp, Homo sapiens; identical to SEQ ID NO: 2330

SEQ ID NO: 2442 - DNA, 201 bp, Homo sapiens; identical to SEQ ID NO: 2331

SEQ ID NO: 2443 - DNA, 201 bp, Homo sapiens; identical to SEQ ID NO: 2332

SEQ ID NO: 2444 - DNA, 201 bp, Homo sapiens; identical to SEQ ID NO: 2334

SEQ ID NO: 2445 - DNA, 201 bp, Homo sapiens; identical to SEQ ID NO: 2335

SEQ ID NO: 2446 - DNA, 201 bp, Homo sapiens; identical to SEQ ID NO: 2336

SEQ ID NO: 2447 - DNA, 201 bp, Homo sapiens; identical to SEQ ID NO: 2337

SEQ ID NO: 2448 - DNA, 201 bp, Homo sapiens; identical to SEQ ID NO: 2338

SEQ ID NO: 2449 - DNA, 201 bp, Homo sapiens; identical to SEQ ID NO: 2339

SEQ ID NO: 2450 - DNA, 201 bp, Homo sapiens; identical to SEQ ID NO: 2340

SEQ ID NO: 2451 - DNA, 201 bp, Homo sapiens; identical to SEQ ID NO: 2341

SEQ ID NO: 2452 - DNA, 201 bp, Homo sapiens; identical to SEQ ID NO: 2342

SEQ ID NO: 2453 - DNA, 201 bp, Homo sapiens; identical to SEQ ID NO: 2343

SEQ ID NO: 2454 - DNA, 201 bp, Homo sapiens; identical to SEQ ID NO: 2344

SEQ ID NO: 2455 - DNA, 201 bp, Homo sapiens; identical to SEQ ID NO: 2345

SEQ ID NO: 2456 - DNA, 201 bp, Homo sapiens; identical to SEQ ID NO: 2346

SEQ ID NO: 2457 - DNA, 176 bp, Homo sapiens; identical to SEQ ID NO: 2347

SEQ ID NO: 2458 - DNA, 161 bp, Homo sapiens; identical to SEQ ID NO: 2348

SEQ ID NO: 2459 - DNA, 201 bp, Homo sapiens; identical to SEQ ID NO: 2333

SEQ ID NO: 2460 - DNA, 201 bp, Homo sapiens; identical to SEQ ID NO: 2235

SEQ ID NO: 2461 - DNA, 201 bp, Homo sapiens; identical to SEQ ID NO: 2236

SEQ ID NO: 2462 - DNA, 201 bp, Homo sapiens; identical to SEQ ID NO: 2237

SEQ ID NO: 2463 - DNA, 201 bp, Homo sapiens; identical to SEQ ID NO: 2238

SEQ ID NO: 2464 - DNA, 201 bp, Homo sapiens; identical to SEQ ID NO: 2239

SEQ ID NO: 2465 - DNA, 201 bp, Homo sapiens; identical to SEQ ID NO: 2241

SEQ ID NO: 2466 - DNA, 201 bp, Homo sapiens; identical to SEQ ID NO: 2242

SEQ ID NO: 2467 - DNA, 201 bp, Homo sapiens; identical to SEQ ID NO: 2243

SEQ ID NO: 2468 - DNA, 201 bp, Homo sapiens; identical to SEQ ID NO: 2244

SEQ ID NO: 2469 - DNA, 201 bp, Homo sapiens; identical to SEQ ID NO: 2245

SEQ ID NO: 2470 - DNA, 201 bp, Homo sapiens; identical to SEQ ID NO: 2240

SEQ ID NO: 2471 - DNA, 201 bp, Homo sapiens; identical to SEQ ID NO: 2246

SEQ ID NO: 2472 - DNA, 201 bp, Homo sapiens; identical to SEQ ID NO: 2247

SEQ ID NO: 2473 - DNA, 201 bp, Homo sapiens; identical to SEQ ID NO: 2248

SEQ ID NO: 2474 - DNA, 201 bp, Homo sapiens; identical to SEQ ID NO: 2249

SEQ ID NO: 2475 - DNA, 201 bp, Homo sapiens; identical to SEQ ID NO: 2250

SEQ ID NO: 2476 - DNA, 201 bp, Homo sapiens; identical to SEQ ID NO: 2251

SEQ ID NO: 2477 - DNA, 201 bp, Homo sapiens; identical to SEQ ID NO: 2252

SEQ ID NO: 2478 - DNA, 201 bp, Homo sapiens; identical to SEQ ID NO: 2253

SEQ ID NO: 2479 - DNA, 201 bp, Homo sapiens; identical to SEQ ID NO: 2254

SEQ ID NO: 2480 - DNA, 201 bp, Homo sapiens; identical to SEQ ID NO: 2255

SEQ ID NO: 2481 - DNA, 201 bp, Homo sapiens; identical to SEQ ID NO: 2256

SEQ ID NO: 2482 - DNA, 201 bp, Homo sapiens; identical to SEQ ID NO: 2257

SEQ ID NO: 2483 - DNA, 201 bp, Homo sapiens; identical to SEQ ID NO: 2258

SEQ ID NO: 2484 - DNA, 201 bp, Homo sapiens; identical to SEQ ID NO: 2259

SEQ ID NO: 2485 - DNA, 201 bp, Homo sapiens; identical to SEQ ID NO: 2260

SEQ ID NO: 2486 - DNA, 201 bp, Homo sapiens; identical to SEQ ID NO: 2261

SEQ ID NO: 2487 - DNA, 201 bp, Homo sapiens; identical to SEQ ID NO: 2262

SEQ ID NO: 2488 - DNA, 201 bp, Homo sapiens; identical to SEQ ID NO: 2265

SEQ ID NO: 2489 - DNA, 201 bp, Homo sapiens; identical to SEQ ID NO: 2266

SEQ ID NO: 2490 - DNA, 201 bp, Homo sapiens; identical to SEQ ID NO: 2267

SEQ ID NO: 2491 - DNA, 201 bp, Homo sapiens; identical to SEQ ID NO: 2268

SEQ ID NO: 2492 - DNA, 201 bp, Homo sapiens; identical to SEQ ID NO: 2269

SEQ ID NO: 2493 - DNA, 201 bp, Homo sapiens; identical to SEQ ID NO: 2270

SEQ ID NO: 2494 - DNA, 201 bp, Homo sapiens; identical to SEQ ID NO: 2271

SEQ ID NO: 2495 - DNA, 201 bp, Homo sapiens; identical to SEQ ID NO: 2272

SEQ ID NO: 2496 - DNA, 201 bp, Homo sapiens; identical to SEQ ID NO: 2273

SEQ ID NO: 2497 - DNA, 201 bp, Homo sapiens; identical to SEQ ID NO: 2274

SEQ ID NO: 2498 - DNA, 201 bp, Homo sapiens; identical to SEQ ID NO: 2275

SEQ ID NO: 2499 - DNA, 201 bp, Homo sapiens; identical to SEQ ID NO: 2276

SEQ ID NO: 2500 - DNA, 201 bp, Homo sapiens; identical to SEQ ID NO: 2277

SEQ ID NO: 2501 - DNA, 201 bp, Homo sapiens; identical to SEQ ID NO: 2278

SEQ ID NO: 2502 - DNA, 201 bp, Homo sapiens; identical to SEQ ID NO: 2279

SEQ ID NO: 2503 - DNA, 201 bp, Homo sapiens; identical to SEQ ID NO: 2280

SEQ ID NO: 2504 - DNA, 201 bp, Homo sapiens; identical to SEQ ID NO: 2281

SEQ ID NO: 2505 - DNA, 201 bp, Homo sapiens; identical to SEQ ID NO: 2282

SEQ ID NO: 2506 - DNA, 201 bp, Homo sapiens; identical to SEQ ID NO: 2264

SEQ ID NO: 2507 - DNA, 201 bp, Homo sapiens
gtaaatgggtctgttattgatgagcctgtacggctaaaacatggagatgtaataactattattgatcgttccttcaggtatgaaaatgaaagtcttcagartggaaggaagtcaactgaatttccaagaaaaatacgtgaacaggagccagcacgtcgtgtctcaagatctagcttctcttctgaccctgatgagagtgac

SEQ ID NO: 2508 - DNA, 201 bp, Homo sapiens; identical to SEQ ID NO: 2284

SEQ ID NO: 2509 - DNA, 201 bp, Homo sapiens; identical to SEQ ID NO: 2285

SEQ ID NO: 2510 - DNA, 201 bp, Homo sapiens; identical to SEQ ID NO: 2286

SEQ ID NO: 2511 - DNA, 201 bp, Homo sapiens; identical to SEQ ID NO: 2287

SEQ ID NO: 2512 - DNA, 201 bp, Homo sapiens; identical to SEQ ID NO: 2288

SEQ ID NO: 2513 - DNA, 201 bp, Homo sapiens; identical to SEQ ID NO: 2289

SEQ ID NO: 2514 - DNA, 201 bp, Homo sapiens; identical to SEQ ID NO: 2290

SEQ ID NO: 2515 - DNA, 201 bp, Homo sapiens; identical to SEQ ID NO: 2291

SEQ ID NO: 2516 - DNA, 201 bp, Homo sapiens; identical to SEQ ID NO: 2292

SEQ ID NO: 2517 - DNA, 201 bp, Homo sapiens; identical to SEQ ID NO: 2293

SEQ ID NO: 2518 - DNA, 201 bp, Homo sapiens; identical to SEQ ID NO: 2294

SEQ ID NO: 2519 - DNA, 201 bp, Homo sapiens; identical to SEQ ID NO: 2295

SEQ ID NO: 2520 - DNA, 201 bp, Homo sapiens; identical to SEQ ID NO: 2295

SEQ ID NO: 2521 - DNA, 201 bp, Homo sapiens; identical to SEQ ID NO: 2295

SEQ ID NO: 2522 - DNA, 201 bp, Homo sapiens; identical to SEQ ID NO: 2295

SEQ ID NO: 2523 - DNA, 201 bp, Homo sapiens; identical to SEQ ID NO: 2299

SEQ ID NO: 2524 - DNA, 201 bp, Homo sapiens; identical to SEQ ID NO: 2300

SEQ ID NO: 2525 - DNA, 201 bp, Homo sapiens; identical to SEQ ID NO: 2301

SEQ ID NO: 2526 - DNA, 201 bp, Homo sapiens; identical to SEQ ID NO: 2302

SEQ ID NO: 2527 - DNA, 201 bp, Homo sapiens; identical to SEQ ID NO: 2302

SEQ ID NO: 2528 - DNA, 201 bp, Homo sapiens; identical to SEQ ID NO: 2302

SEQ ID NO: 2529 - DNA, 201 bp, Homo sapiens; identical to SEQ ID NO: 2302

SEQ ID NO: 2530 - DNA, 201 bp, Homo sapiens; identical to SEQ ID NO: 2306

SEQ ID NO: 2531 - DNA, 201 bp, Homo sapiens; identical to SEQ ID NO: 2307

SEQ ID NO: 2532 - DNA, 201 bp, Homo sapiens; identical to SEQ ID NO: 2308

SEQ ID NO: 2533 - DNA, 201 bp, Homo sapiens; identical to SEQ ID NO: 2309

SEQ ID NO: 2534 - DNA, 201 bp, Homo sapiens; identical to SEQ ID NO: 2287

SEQ ID NO: 2535 - DNA, 201 bp, Homo sapiens; identical to SEQ ID NO: 2286

SEQ ID NO: 2536 - DNA, 201 bp, Homo sapiens; identical to SEQ ID NO: 2313

SEQ ID NO: 2537 - DNA, 201 bp, Homo sapiens; identical to SEQ ID NO: 2292

SEQ ID NO: 2538 - DNA, 201 bp, Homo sapiens; identical to SEQ ID NO: 2302

SEQ ID NO: 2539 - DNA, 201 bp, Homo sapiens; identical to SEQ ID NO: 2302

SEQ ID NO: 2540 - DNA, 201 bp, Homo sapiens; identical to SEQ ID NO: 2302

SEQ ID NO: 2541 - DNA, 201 bp, Homo sapiens; identical to SEQ ID NO: 2302

SEQ ID NO: 2542 - DNA, 201 bp, Homo sapiens; identical to SEQ ID NO: 2320

SEQ ID NO: 2543 - DNA, 201 bp, Homo sapiens; identical to SEQ ID NO: 2294

SEQ ID NO: 2544 - DNA, 201 bp, Homo sapiens; identical to SEQ ID NO: 2322

SEQ ID NO: 2545 - DNA, 201 bp, Homo sapiens; identical to SEQ ID NO: 2310

SEQ ID NO: 2546 - DNA, 201 bp, Homo sapiens
gtggaaggaagtcaactgaatttccaagaaaaatacgtgaacaggagccagcacgtcgtgtctcaagatctagcttctcttctgaccctgatgagagtgasggaatacctttgaaaagaaggcgtgtgtcctttggtgggcacctaagacctgaactatttgatgaaaacttgcctcctaatacgcctctcaaaaggggag

SEQ ID NO: 2547 - DNA, 201 bp, Homo sapiens; identical to SEQ ID NO: 2324

SEQ ID NO: 2548 - DNA, 201 bp, Homo sapiens; identical to SEQ ID NO: 2307

SEQ ID NO: 2549 - DNA, 201 bp, Homo sapiens; identical to SEQ ID NO: 2291

SEQ ID NO: 2550 - DNA, 201 bp, Homo sapiens; identical to SEQ ID NO: 2326

SEQ ID NO: 2551 - DNA, 201 bp, Homo sapiens; identical to SEQ ID NO: 2244

SEQ ID NO: 2552 - DNA, 201 bp, Homo sapiens; identical to SEQ ID NO: 2329

SEQ ID NO: 2553 - DNA, 201 bp, Homo sapiens; identical to SEQ ID NO: 2330

SEQ ID NO: 2554 - DNA, 201 bp, Homo sapiens; identical to SEQ ID NO: 2331

SEQ ID NO: 2555 - DNA, 201 bp, Homo sapiens; identical to SEQ ID NO: 2332

SEQ ID NO: 2556 - DNA, 201 bp, Homo sapiens; identical to SEQ ID NO: 2333

SEQ ID NO: 2557 - DNA, 201 bp, Homo sapiens; identical to SEQ ID NO: 2334

SEQ ID NO: 2558 - DNA, 201 bp, Homo sapiens; identical to SEQ ID NO: 2335

SEQ ID NO: 2559 - DNA, 201 bp, Homo sapiens; identical to SEQ ID NO: 2336

SEQ ID NO: 2560 - DNA, 201 bp, Homo sapiens; identical to SEQ ID NO: 2337

SEQ ID NO: 2561 - DNA, 201 bp, Homo sapiens; identical to SEQ ID NO: 2338

SEQ ID NO: 2562 - DNA, 201 bp, Homo sapiens; identical to SEQ ID NO: 2339

SEQ ID NO: 2563 - DNA, 201 bp, Homo sapiens; identical to SEQ ID NO: 2340

SEQ ID NO: 2564 - DNA, 201 bp, Homo sapiens; identical to SEQ ID NO: 2341

SEQ ID NO: 2565 - DNA, 201 bp, Homo sapiens; identical to SEQ ID NO: 2342

SEQ ID NO: 2566 - DNA, 201 bp, Homo sapiens; identical to SEQ ID NO: 2343

SEQ ID NO: 2567 - DNA, 201 bp, Homo sapiens; identical to SEQ ID NO: 2344

SEQ ID NO: 2568 - DNA, 201 bp, Homo sapiens; identical to SEQ ID NO: 2345

SEQ ID NO: 2569 - DNA, 201 bp, Homo sapiens; identical to SEQ ID NO: 2346

SEQ ID NO: 2570 - DNA, 176 bp, Homo sapiens; identical to SEQ ID NO: 2347

SEQ ID NO: 2571 - DNA, 161 bp, Homo sapiens; identical to SEQ ID NO: 2348

SEQ ID NO: 2572 - DNA, 152 bp, Homo sapiens
atggacattcactggctgaatcgaggagaggagaaaatgttgaacggatatmaggaaactcacagaccagctggaaatattagggaatcaggcttagaaaacacgcaggcgcaaagagtgaccatgaagcccagcactacagccaaaactgc

SEQ ID NO: 2573 - DNA, 145 bp, Homo sapiens
atggacattcactggctgaatcgaggagaggagaaaatgttgaamggatatcaggaaactcacagaccagctggaaatattagggaatcaggcttagaaaacacgcaggcgcaaagagtgaccatgaagcccagcactacagcca

SEQ ID NO: 2574 - DNA, 201 bp, Homo sapiens
gtacccctgccctgagctggtggttcgcaggggccagtcgttcagcctcacgctggagctgagcagagccctggactgtgaggagatcctcatcttcacgrtggagacaggaccccgggcttctgaggccctccacaccaaagctgtgttccagacatcggagctggagcggggtgagggctggacagcagcaagggaggc

SEQ ID NO: 2575 - DNA, 201 bp, Homo sapiens
agtacccctgccctgagctggtggttcgcaggggccagtcgttcagcctcacgctggagctgagcagagccctggactgtgaggagatcctcatcttcacrgtggagacaggaccccgggcttctgaggccctccacaccaaagctgtgttccagacatcggagctggagcggggtgagggctggacagcagcaagggagg

SEQ ID NO: 2576 - DNA, 201 bp, Homo sapiens
aatggcgctgcccaccacacccaggagtacccctgccctgagctggtggttcgcaggggccagtcgttcagcctcacgctggagctgagcagagccctggwctgtgaggagatcctcatcttcacggtggagacaggaccccgggcttctgaggccctccacaccaaagctgtgttccagacatcggagctggagcggggt

SEQ ID NO: 2577 - DNA, 201 bp, Homo sapiens
agcatcgctggcaagttcaaggtgctagagcctcccatgctgggccacgacctgagactggccctgtgcttggccaacctcacctcccgggcccagcgggwgagggtcaacctgagcggtgccaccatcctctatacccgcaagccagtggcagagatcctgcatgaatcccacgccgtgaggctggggccgcaagaaggt

SEQ ID NO: 2578 - DNA, 201 bp, Homo sapiens
ctggtttgcccggcaggacctaggcccctcttacaatggctggcaggttctggatgccaccccccaggaggagagtgaaggtgtgttccggtgcggcccarcctcagtcaccgccatccgcgagggtgatgtgcacctggctcacgatggccccttcgtgtttgcggaggtcaacgccgactacatcacctggctgtggca

SEQ ID NO: 2579 - DNA, 201 bp, Homo sapiens
ggagcctcaggagagggcctcagtccagtttgacatcaccccctccaaaagtggcccaaggcagctgcaggtggaccttccccagtggaaagcagaagccrccccaacagccaatgagaaagccctgcttgtgagtgggagaggtagagaaattgacagaagacagcttagaagtccaagggagagtgtgagtgggaatgt

SEQ ID NO: 2580 - DNA, 201 bp, Homo sapiens
acaggctgttcggcgtggaagcctctggaaggagaatctggatccgcagggctgggggtcgctgtctctggcgtgacgacctcctggagcctgccaccaarcccagcatcgctggcaagttcaaggtgctagagcctcccatgctgggccacgacctgagactggccctgtgcttggccaacctcacctcccgggcccagc

SEQ ID NO: 2581 - DNA, 201 bp, Homo sapiens
accgaggtgtggtgcaaggacagtggcagggcaagtacggcggcggcaccagcccgctgcactggcgcggcagcgtggccattctgcagaagtggctcaarggcaggtacaagccagtcaagtacggccagtgctgggtcttcgccggagtcctgtgcacagtcctcaggtgcttggggatagccacacgggtcgtgtcca

SEQ ID NO: 2582 - DNA, 201 bp, Homo sapiens
gcacagcctctctggggagcagtttgaggaggacatcctgaacatctgcctctccatcctggatcgaagccccggtcaccaaaacaacccagccaccgacrtgtcctgccgccacaaccccatctacgtcaccagggtcatcagtgccatggtgaacagcaacaacgaccgaggtgtggtgcaaggacagtggcagggcaa

SEQ ID NO: 2583 - DNA, 201 bp, Homo sapiens
acctgagcggtgccaccatcctctatacccgcaagccagtggcagagatcctgcatgaatcccacgccgtgaggctggggccgcaagaaggtagttatcascttattgctattaaaaataacactaaacttttgtttatctacagagtgtcagagaagagaatcccaattacaatatcttactctaagtataaagaagacc

SEQ ID NO: 2584 - DNA, 201 bp, Homo sapiens
gcaaggccagagccccagtccacaccgggcctgatgactgcttttcagaggacgatgtgtttctggcctcagaggaggagagacaggagtacgtgctcagygacagcggcatcatcttccgaggcgtggagaagcacatacgagcccagggctggaactacgggcaggtctccaggggcacaggccagacaaggatgtggg

SEQ ID NO: 2585 - DNA, 201 bp, Homo sapiens
cctatgcgttattctttcgtgatactcaggccgccatcaagggccaaaatccaaacgctacctttggcgaagtctctaaaattgtggcttcaatgtgggayggtttaggagaagagcaaaaacaggtctataaaaagaaaaccgaggctgcgaagaaggagtacctgaagcaactcgcagcatacagagccagccttgtat

SEQ ID NO: 2586 - DNA, 201 bp, Homo sapiens
gttgagtctggttaccattctctgtgtcaccccatgaaccataatggcctgctaccatttcatccacaaaacatggacctccctgaaatcacagtctccartatgctgggccaggatggaacactgctttctaattccatttctgtgatgccagatatacgaaacccagaaggaactcagtacagttcccatcctcagatg

SEQ ID NO: 2587 - DNA, 201 bp, Homo sapiens
aatgaaaggtgagtaaccagatagcaaaagaaaagggaaagccatccaaatttgaaagctgttgatagaaattgagattcttgctgtcttttgtgcctctrcaagctactactcattccagaattcctgggtcttccaagaggattcttaaggtaccagagatttgctagggaaccaaaagtgcttgagaatctgcctgag

SEQ ID NO: 2588 - DNA, 201 bp, Homo sapiens
ttgagattcttgctgtcttttgtgcctctacaagctactactcattccagaattcctgggtcttccaagaggattcttaaggtaccagagatttgctaggraaccaaaagtgcttgagaatctgcctgagggcttgcatagctttcacattaaaaaaagaaaaagctagcagatttactcctttttaggggatcatatcaa

SEQ ID NO: 2589 - DNA, 201 bp, Homo sapiens; identical to SEQ ID NO: 2585

SEQ ID NO: 2590 - DNA, 201 bp, Homo sapiens; identical to SEQ ID NO: 2586

SEQ ID NO: 2591 - DNA, 107 bp, Homo sapiens
ccaaacmtacccgcagtcaagattgctgaatgtttactattatttcattcgcagtttgacggtgagaacatgtatatgagcatgacagagccgagccaggactatgt

SEQ ID NO: 2592 - DNA, 201 bp, Homo sapiens; identical to SEQ ID NO: 2587

SEQ ID NO: 2593 - DNA, 201 bp, Homo sapiens; identical to SEQ ID NO: 2588

SEQ ID NO: 2594 - DNA, 201 bp, Homo sapiens; identical to SEQ ID NO: 2585

SEQ ID NO: 2595 - DNA, 201 bp, Homo sapiens; identical to SEQ ID NO: 2586

SEQ ID NO: 2596 - DNA, 201 bp, Homo sapiens; identical to SEQ ID NO: 2587

SEQ ID NO: 2597 - DNA, 201 bp, Homo sapiens; identical to SEQ ID NO: 2588

SEQ ID NO: 2598 - DNA, 201 bp, Homo sapiens
attatcactttgagtgctaccactgtgaggactgccggatgcagctgagtgatgaggaaggctgctgctgtttccctctggatgggcacttgctctgccayggttgccacatgcagcggctcaatgcccgacaaccccctgccaactatatctgagctgcaatcactgctgctgctgtcaccctgcagacaaactgctgtg

SEQ ID NO: 2599 - DNA, 201 bp, Homo sapiens
ggtctgtggctagcgtgagagctaggggggcgggggccggggagagtggggcagtcgggcgagtcgacgcgtgaacagatagacctgcggactggacagcygcggccagagaccctgctagccccgctcagccccagatgcgcggggggacgcagcccctcccgctgggggatgctgtgggattcctggcgcagggcatcc

SEQ ID NO: 2600 - DNA, 201 bp, Homo sapiens
cggcccgggagcaaggttccctggacgctgagcgaaatcagcgcggctcctttgaggcgccgcgctacgaaggctcttttcccgcggggccgccgcccacmcgggccttgcctctacctcagtcgttgccccccgattttcggctggagcccacggccccggccctcagcccccgctctagcttcgccagtagctcggcca

SEQ ID NO: 2601 - DNA, 201 bp, Homo sapiens
gcattgtttgcaacaagtgcctggatggcatccccttcacagtggacttctccaaccaagtatactgtgtcaccgactaccacaaaaattatgctcctaartgtgcagcctgtggccaacccatcctcccctctgagggctgtgaggacatcgtgagggtgatatccatggaccgggattatcactttgagtgctaccact

SEQ ID NO: 2602 - DNA, 201 bp, Homo sapiens
atgctgtgtctgtggtcacttgattttggagaagatcctacaagcaatggggaagtcctatcatccaggctgtttccgatgcattgtttgcaacaagtgcytggatggcatccccttcacagtggacttctccaaccaagtatactgtgtcaccgactaccacaaaaattatgctcctaagtgtgcagcctgtggccaacc

SEQ ID NO: 2603 - DNA, 201 bp, Homo sapiens
gattataggcgtaagccactgtgtctggcctagtgtatgattatgcatgagtcacgcaatgttctggtcctggattccaggagtagaggacctagctttaratcaattagtttcagtttgcttgaaactagttcacctaaagctagatctcttaaaaccaatttactgaaaacttgtttgcttaaagttaatgacttaatg

SEQ ID NO: 2604 - DNA, 201 bp, Homo sapiens
ggcctagtgtatgattatgcatgagtcacgcaatgttctggtcctggattccaggagtagaggacctagctttaaatcaattagtttcagtttgcttgaarctagttcacctaaagctagatctcttaaaaccaatttactgaaaacttgtttgcttaaagttaatgacttaatgactaatttgccaaaagctcaattcct

SEQ ID NO: 2605 - DNA, 201 bp, Homo sapiens
ctagtgtatgattatgcatgagtcacgcaatgttctggtcctggattccaggagtagaggacctagctttaaatcaattagtttcagtttgcttgaaactrgttcacctaaagctagatctcttaaaaccaatttactgaaaacttgtttgcttaaagttaatgacttaatgactaatttgccaaaagctcaattcctatt

SEQ ID NO: 2606 - DNA, 201 bp, Homo sapiens
tattttggtgtgtttatatccatttaggtgtcctattcttttttgtcatgctttggatatttcaaggatttatatctattcatccaagagtacttctgagytattatcagcaacataaatttatcaaatttgcagcactttgtaaatgatgagattgcttcctacctttatggatgtctttttctatgttatctaccattc

SEQ ID NO: 2607 - DNA, 201 bp, Homo sapiens
caatgaaaagttatacagacaacagtaataactaaaagggtgaatctgctaaatccttttgaaatgctgcagatttgataaatatttattttagactaatyggttttaggtgaattggttttaggcaaattaatttagtaatctttgatctttagtcttcattttctgtcactcagtgagtttcttactggaaatgatgac

SEQ ID NO: 2608 - DNA, 173 bp, Homo sapiens
gcaccttgttggagtgagaaatgttctgaaactgaattacttcttgtacagctgagatagcttcttctgaactattattaaataagtgaatacaaaggccytatgatgggaaatccagacaagcttgtgtaactttacatccatcccctcagggatatttttttttttttttt

SEQ ID NO: 2609 - DNA, 115 bp, Homo sapiens
agcttcttctgaactattattaaataagtgaatacaaaggccctatgatgggaaatccagacaagcttgtgtaactttacatccatcccctcagggatatttttttttttttttt

SEQ ID NO: 2610 - DNA, 114 bp, Homo sapiens
gcttcttctgaactattattaaataagtgaatacaaaggccctatgatgggaaatccagacaagcttgtgtaactttacatccatcccctcagggatatttttttttttttttt

SEQ ID NO: 2611 - DNA, 113 bp, Homo sapiens
cttcttctgaactattattaaataagtgaatacaaaggccctatgatgggaaatccagacaagcttgtgtaactttacatccatcccctcagggatatttttttttttttttt

SEQ ID NO: 2612 - DNA, 112 bp, Homo sapiens
ttcttctgaactattattaaataagtgaatacaaaggccctatgatgggaaatccagacaagcttgtgtaactttacatccatcccctcagggatatttttttttttttttt

SEQ ID NO: 2613 - DNA, 201 bp, Homo sapiens; identical to SEQ ID NO: 2598

SEQ ID NO: 2614 - DNA, 201 bp, Homo sapiens; identical to SEQ ID NO: 2599

SEQ ID NO: 2615 - DNA, 201 bp, Homo sapiens; identical to SEQ ID NO: 2600

SEQ ID NO: 2616 - DNA, 201 bp, Homo sapiens; identical to SEQ ID NO: 2601

SEQ ID NO: 2617 - DNA, 201 bp, Homo sapiens; identical to SEQ ID NO: 2602

SEQ ID NO: 2618 - DNA, 201 bp, Homo sapiens; identical to SEQ ID NO: 2603

SEQ ID NO: 2619 - DNA, 201 bp, Homo sapiens; identical to SEQ ID NO: 2604

SEQ ID NO: 2620 - DNA, 201 bp, Homo sapiens; identical to SEQ ID NO: 2605

SEQ ID NO: 2621 - DNA, 201 bp, Homo sapiens; identical to SEQ ID NO: 2606

SEQ ID NO: 2622 - DNA, 201 bp, Homo sapiens; identical to SEQ ID NO: 2607

SEQ ID NO: 2623 - DNA, 201 bp, Homo sapiens
gcaccttgttggagtgagaaatgttctgaaactgaattacttcttgtacagctgagatagcttcttctgaactattattaaataagtgaatacaaaggccytatgatgggaaatccagacaagcttgtgtaactttacatccatcccctcagggatatttttttttttttttttgagactccatctcaaaaaaaaggaaaa

SEQ ID NO: 2624 - DNA, 201 bp, Homo sapiens
agcttcttctgaactattattaaataagtgaatacaaaggccctatgatgggaaatccagacaagcttgtgtaactttacatccatcccctcagggatatttttttttttttttttgagactccatctcaaaaaaaaggaaaaggatggccaggcacagtggctcatgcctgtaatcccagcactttggaaggctgaggtg

SEQ ID NO: 2625 - DNA, 201 bp, Homo sapiens
gcttcttctgaactattattaaataagtgaatacaaaggccctatgatgggaaatccagacaagcttgtgtaactttacatccatcccctcagggatatttttttttttttttttgagactccatctcaaaaaaaaggaaaaggatggccaggcacagtggctcatgcctgtaatcccagcactttggaaggctgaggtgg

SEQ ID NO: 2626 - DNA, 201 bp, Homo sapiens
cttcttctgaactattattaaataagtgaatacaaaggccctatgatgggaaatccagacaagcttgtgtaactttacatccatcccctcagggatatttttttttttttttttgagactccatctcaaaaaaaaggaaaaggatggccaggcacagtggctcatgcctgtaatcccagcactttggaaggctgaggtggg

SEQ ID NO: 2627 - DNA, 201 bp, Homo sapiens
ttcttctgaactattattaaataagtgaatacaaaggccctatgatgggaaatccagacaagcttgtgtaactttacatccatcccctcagggatatttttttttttttttttgagactccatctcaaaaaaaaggaaaaggatggccaggcacagtggctcatgcctgtaatcccagcactttggaaggctgaggtggga

SEQ ID NO: 2628 - DNA, 201 bp, Homo sapiens; identical to SEQ ID NO: 2598

SEQ ID NO: 2629 - DNA, 201 bp, Homo sapiens; identical to SEQ ID NO: 2599

SEQ ID NO: 2630 - DNA, 201 bp, Homo sapiens; identical to SEQ ID NO: 2600

SEQ ID NO: 2631 - DNA, 201 bp, Homo sapiens; identical to SEQ ID NO: 2601

SEQ ID NO: 2632 - DNA, 201 bp, Homo sapiens; identical to SEQ ID NO: 2602

SEQ ID NO: 2633 - DNA, 201 bp, Homo sapiens
gattataggcgtaagccactgtgtctggcctagtgtatgattatgcatgagtcacgcaatgttctggtcctggattccaggagtagaggacctagctttaratcaattagtttcagctaaactgactagaaccaaatcaaagtgtaattctccctccagctcccccaaaccccagagttttggggttgtggttgatgcagt

SEQ ID NO: 2634 - DNA, 201 bp, Homo sapiens
tggcctagtgtatgattatgcatgagtcacgcaatgttctggtcctggattccaggagtagaggacctagctttaaatcaattagtttcagctaaactgastagaaccaaatcaaagtgtaattctccctccagctcccccaaaccccagagttttggggttgtggttgatgcagtgtgggatgtccctgagaggtagcaa

SEQ ID NO: 2635 - DNA, 201 bp, Homo sapiens
tgtatgattatgcatgagtcacgcaatgttctggtcctggattccaggagtagaggacctagctttaaatcaattagtttcagctaaactgactagaaccraatcaaagtgtaattctccctccagctcccccaaaccccagagttttggggttgtggttgatgcagtgtgggatgtccctgagaggtagcaagtctaggg

SEQ ID NO: 2636 - DNA, 201 bp, Homo sapiens
ttatgcatgagtcacgcaatgttctggtcctggattccaggagtagaggacctagctttaaatcaattagtttcagctaaactgactagaaccaaatcaargtgtaattctccctccagctcccccaaaccccagagttttggggttgtggttgatgcagtgtgggatgtccctgagaggtagcaagtctagggtggtgag

SEQ ID NO: 2637 - DNA, 201 bp, Homo sapiens
ctcacttgccacctctcagaggggtcccggattgcatccatcacaatcccaaaactagagttggggggaactggagggagcaaaacactgatttgatactrgtcagtttgcttgaaactagttcacctaaagctagatctcttaaaaccaatttactgaaaacttgtttgcttaaagttaatgacttaatgactaatttgc

SEQ ID NO: 2638 - DNA, 201 bp, Homo sapiens
cagaggggtcccggattgcatccatcacaatcccaaaactagagttggggggaactggagggagcaaaacactgatttgatactagtcagtttgcttgaarctagttcacctaaagctagatctcttaaaaccaatttactgaaaacttgtttgcttaaagttaatgacttaatgactaatttgccaaaagctcaattcct

SEQ ID NO: 2639 - DNA, 201 bp, Homo sapiens
aggggtcccggattgcatccatcacaatcccaaaactagagttggggggaactggagggagcaaaacactgatttgatactagtcagtttgcttgaaactrgttcacctaaagctagatctcttaaaaccaatttactgaaaacttgtttgcttaaagttaatgacttaatgactaatttgccaaaagctcaattcctatt

SEQ ID NO: 2640 - DNA, 201 bp, Homo sapiens; identical to SEQ ID NO: 2606

SEQ ID NO: 2641 - DNA, 201 bp, Homo sapiens; identical to SEQ ID NO: 2607

SEQ ID NO: 2642 - DNA, 173 bp, Homo sapiens; identical to SEQ ID NO: 2608

SEQ ID NO: 2643 - DNA, 115 bp, Homo sapiens; identical to SEQ ID NO: 2609

SEQ ID NO: 2644 - DNA, 114 bp, Homo sapiens; identical to SEQ ID NO: 2610

SEQ ID NO: 2645 - DNA, 113 bp, Homo sapiens; identical to SEQ ID NO: 2611

SEQ ID NO: 2646 - DNA, 112 bp, Homo sapiens; identical to SEQ ID NO: 2612

SEQ ID NO: 2647 - DNA, 201 bp, Homo sapiens
ggtggaacagatgtgcccttttcagaggttgtgaagttagctccaaatcccagactagctgctaccccaagcccgggagcttctcaggtgagagaccatcrgaatttgtttgtagcatttgcattatgaaagcccgctagggttttttcccccaccaaaaggtcacctacattgaacgtgatgtgctcaactaaaggagaa

SEQ ID NO: 2648 - DNA, 201 bp, Homo sapiens
tgccctggaaggccacatcttctgcaacccggttgactcccagcactacatggcactcctgtgctttaaaaatggctccctcatgagagagaagatccgcracgagtctgtatcccgttcctggagcgatttctctaaggcactgcagtccacagagatgggcaacggtggaaacctgggtttttattttgatgtaatgga

SEQ ID NO: 2649 - DNA, 201 bp, Homo sapiens
gcccttttcagaggttgtgaagttagctccaaatcccagactagctgctaccccaagcccgggagcttctcaggtgagagaccatcagaatttgtttgtarcatttgcattatgaaagcccgctagggttttttcccccaccaaaaggtcacctacattgaacgtgatgtgctcaactaaaggagaaattctgctttattg

SEQ ID NO: 2650 - DNA, 201 bp, Homo sapiens
ggactgtttctccatcagcgactgcccggtgtggatggactccagcaccacagcccagtgccgccagctggaggctgctgtgggtggtgctcaggctctcmgctgcctcacggggtcccgtgcctatgagcgttttacagggaaccaaattgcaaaaatttaccagcagaaccccgaggcctactcacatacagagagaat

SEQ ID NO: 2651 - DNA, 201 bp, Homo sapiens
cggaagtatatactggaaggctggagcccagcaggcactgacaagcttatcaccagacctccggctacaccagcagcttcaggactgtttctccatcagcractgcccggtgtggatggactccagcaccacagcccagtgccgccagctggaggctgctgtgggtggtgctcaggctctcagctgcctcacggggtcccg

SEQ ID NO: 2652 - DNA, 201 bp, Homo sapiens
agatgtgtttgatgccccggtgtatgttatagacactgccaactcggcctgtgtgggttctgcataccgagcttttcatggtcttgcaggtggaacagatrtgcccttttcagaggttgtgaagttagctccaaatcccagactagctgctaccccaagcccgggagcttctcaggtgagagaccatcagaatttgtttgt

SEQ ID NO: 2653 - DNA, 201 bp, Homo sapiens
aagattttggccacaggaggagcatctcacaatagagaaatcttacaggtgcttgcagatgtgtttgatgccccggtgtatgttatagacactgccaactyggcctgtgtgggttctgcataccgagcttttcatggtcttgcaggtggaacagatgtgcccttttcagaggttgtgaagttagctccaaatcccagacta

SEQ ID NO: 2654 - DNA, 201 bp, Homo sapiens
cttcagcacgcagcaggtaaaggttgttgctgttgatgcagagttgaatgtcttctatgaggaaagtgtgcattttgacagagatcttccagaatttgggyatgtacttgatgtgcatgtgactcagggcggtgttcatgtgcacaaggatgggctgacggtcacttctccagtactaatgtgggtccaggcactggatat

SEQ ID NO: 2655 - DNA, 201 bp, Homo sapiens
agattttggccacaggaggagcatctcacaatagagaaatcttacaggtgcttgcagatgtgtttgatgccccggtgtatgttatagacactgccaactcsgcctgtgtgggttctgcataccgagcttttcatggtcttgcaggtggaacagatgtgcccttttcagaggttgtgaagttagctccaaatcccagactag

SEQ ID NO: 2656 - DNA, 201 bp, Homo sapiens
aggctctcagctgcctcacggggtcccgtgcctatgagcgttttacagggaaccaaattgcaaaaatttaccagcagaaccccgaggcctactcacatacrgagagaatttctttggtcagtagctttgctgcttccctgttccttggctcttactcccctattgactacagtgatggttctggaatgaatttgttgcaga

SEQ ID NO: 2657 - DNA, 201 bp, Homo sapiens
tgtccggggcgggccagcaacacggaagtatatactggaaggctggagcccagcaggcactgacaagcttatcaccagacctccggctacaccagcagctkcaggactgtttctccatcagcgactgcccggtgtggatggactccagcaccacagcccagtgccgccagctggaggctgctgtgggtggtgctcaggctc

SEQ ID NO: 2658 - DNA, 201 bp, Homo sapiens
ctgttgatgcagagttgaatgtcttctatgaggaaagtgtgcattttgacagagatcttccagaatttgggtatgtacttgatgtgcatgtgactcagggyggtgttcatgtgcacaaggatgggctgacggtcacttctccagtactaatgtgggtccaggcactggatatcatcttggagaagatgaaggcttcgggct

SEQ ID NO: 2659 - DNA, 201 bp, Homo sapiens
ttcatgtgcacaaggatgggctgacggtcacttctccagtactaatgtgggtccaggcactggatatcatcttggagaagatgaaggcttcgggcttcgamttctctcaagtcctagccttgtccggggcgggccagcaacacggaagtatatactggaaggctggagcccagcaggcactgacaagcttatcaccagacc

SEQ ID NO: 2660 - DNA, 201 bp, Homo sapiens
ctggagcccagcaggcactgacaagcttatcaccagacctccggctacaccagcagcttcaggactgtttctccatcagcgactgcccggtgtggatggamtccagcaccacagcccagtgccgccagctggaggctgctgtgggtggtgctcaggctctcagctgcctcacggggtcccgtgcctatgagcgttttacag

SEQ ID NO: 2661 - DNA, 201 bp, Homo sapiens
caggctctcagctgcctcacggggtcccgtgcctatgagcgttttacagggaaccaaattgcaaaaatttaccagcagaaccccgaggcctactcacatayagagagaatttctttggtcagtagctttgctgcttccctgttccttggctcttactcccctattgactacagtgatggttctggaatgaatttgttgcag

SEQ ID NO: 2662 - DNA, 201 bp, Homo sapiens
ctggtcccaggcttgccttggtgcctgtgcacctcatttagaggagaagcttagcccaccagtaccatcatgctcagttgtgggagccatttcttcctacwacgtccagcgctacggatttcctccaggatgcaaagtggtggccttcactggggacaacccagcgtcgctggcaggcatgagactggaggaaggtgacat

SEQ ID NO: 2663 - DNA, 201 bp, Homo sapiens; identical to SEQ ID NO: 2648

SEQ ID NO: 2664 - DNA, 201 bp, Homo sapiens; identical to SEQ ID NO: 2650

SEQ ID NO: 2665 - DNA, 201 bp, Homo sapiens; identical to SEQ ID NO: 2651

SEQ ID NO: 2666 - DNA, 201 bp, Homo sapiens
agatgtgtttgatgccccggtgtatgttatagacactgccaactcggcctgtgtgggttctgcataccgagcttttcatggtcttgcaggtggaacagatrtgcccttttcagaggttgtgaagttagctccaaatcccagactagctgctaccccaagcccgggagcttctcaggtctacgaggcccttctcccccagta

SEQ ID NO: 2667 - DNA, 201 bp, Homo sapiens; identical to SEQ ID NO: 2653

SEQ ID NO: 2668 - DNA, 1 bp, Homo sapiens
y

SEQ ID NO: 2669 - DNA, 201 bp, Homo sapiens; identical to SEQ ID NO: 2655

SEQ ID NO: 2670 - DNA, 201 bp, Homo sapiens; identical to SEQ ID NO: 2656

SEQ ID NO: 2671 - DNA, 201 bp, Homo sapiens; identical to SEQ ID NO: 2657

SEQ ID NO: 2672 - DNA, 201 bp, Homo sapiens
cgcagcaggtaaaggttgttgctgttgatgcagagttgaatgtcttctatgaggaaagtgtgcattttgacagagatcttccagaatttgggactcagggyggtgttcatgtgcacaaggatgggctgacggtcacttctccagtactaatgtgggtccaggcactggatatcatcttggagaagatgaaggcttcgggct

SEQ ID NO: 2673 - DNA, 201 bp, Homo sapiens; identical to SEQ ID NO: 2659

SEQ ID NO: 2674 - DNA, 201 bp, Homo sapiens; identical to SEQ ID NO: 2660

SEQ ID NO: 2675 - DNA, 201 bp, Homo sapiens; identical to SEQ ID NO: 2661

SEQ ID NO: 2676 - DNA, 201 bp, Homo sapiens; identical to SEQ ID NO: 2662

SEQ ID NO: 2677 - DNA, 201 bp, Homo sapiens
aatctagggactcaaatcagcagaatgggggagacaaagcccggtctcaccccctaacctcatcctatctctttctccaaccctgactgcccactcctccrcaaaccgtgacccatagccgcccccaccccataccttgatctaccatccatcctcttccccaatccaaaccccacagtctcttctctcccacaccctgcc

SEQ ID NO: 2678 - DNA, 201 bp, Homo sapiens
tccacttgctgaagaagttgtgtcatttctctggaagaatttccaaaattctggatttcttttttattttggagtatttcatcagctgaaaagtgattctyactttgagttttcttcctatatttgtatagtgagttcctttttccttcctctttatccctcctgttttactttatacctctctattccttgctcaaatta

SEQ ID NO: 2679 - DNA, 201 bp, Homo sapiens
ctctatagaaagtcctctgtgatctgactcctgcagactcttccagatttttctgcccaaggcctttactgagctcaggactccagctaaatcaaaatackcatgttctcacccagagtgacaaaatcctgcagataggtttaagacctagtggatcagagcagtagctactgggaagttaaaaggaaggggcttagaaaa

SEQ ID NO: 2680 - DNA, 201 bp, Homo sapiens
gcccaaggcctttactgagctcaggactccagctaaatcaaaatactcatgttctcacccagagtgacaaaatcctgcagataggtttaagacctagtggmtcagagcagtagctactgggaagttaaaaggaaggggcttagaaaatgaatgggaccaaaggcatcacttctgatggagatgaagccatcttgaaagtga

SEQ ID NO: 2681 - DNA, 201 bp, Homo sapiens
gtgagtggtgtcctttggaggcatggtggatgaaaggcgcaaaggaagcaagaggttaaagataatggcccattagatacaacagcaagcccaagattccraagaagacagacaactccccctagtaccacctagacattactttttaaagacattttacattattgtccagcagaaaaaggctgtcttggaccatgaaac

SEQ ID NO: 2682 - DNA, 201 bp, Homo sapiens; identical to SEQ ID NO: 2647

SEQ ID NO: 2683 - DNA, 201 bp, Homo sapiens; identical to SEQ ID NO: 2649

SEQ ID NO: 2684 - DNA, 201 bp, Homo sapiens; identical to SEQ ID NO: 2648

SEQ ID NO: 2685 - DNA, 201 bp, Homo sapiens; identical to SEQ ID NO: 2650

SEQ ID NO: 2686 - DNA, 201 bp, Homo sapiens; identical to SEQ ID NO: 2651

SEQ ID NO: 2687 - DNA, 201 bp, Homo sapiens; identical to SEQ ID NO: 2652

SEQ ID NO: 2688 - DNA, 201 bp, Homo sapiens; identical to SEQ ID NO: 2653

SEQ ID NO: 2689 - DNA, 201 bp, Homo sapiens
cttcagcacgcagcaggtaaaggttgttgctgttgatgcagagttgaatgtcttctatgaggaaagtgtgcattttgacagagatcttccagaatttgggyatgtacttgatgtgcatgtggcggtgttcatgtgcacaaggatgggctgacggtcacttctccagtactaatgtgggtccaggcactggatatcatcttg

SEQ ID NO: 2690 - DNA, 201 bp, Homo sapiens; identical to SEQ ID NO: 2655

SEQ ID NO: 2691 - DNA, 201 bp, Homo sapiens; identical to SEQ ID NO: 2656

SEQ ID NO: 2692 - DNA, 201 bp, Homo sapiens; identical to SEQ ID NO: 2657

SEQ ID NO: 2693 - DNA, 201 bp, Homo sapiens
gttgttgctgttgatgcagagttgaatgtcttctatgaggaaagtgtgcattttgacagagatcttccagaatttgggtatgtacttgatgtgcatgtggyggtgttcatgtgcacaaggatgggctgacggtcacttctccagtactaatgtgggtccaggcactggatatcatcttggagaagatgaaggcttcgggct

SEQ ID NO: 2694 - DNA, 201 bp, Homo sapiens; identical to SEQ ID NO: 2659

SEQ ID NO: 2695 - DNA, 201 bp, Homo sapiens; identical to SEQ ID NO: 2660

SEQ ID NO: 2696 - DNA, 201 bp, Homo sapiens; identical to SEQ ID NO: 2661

SEQ ID NO: 2697 - DNA, 201 bp, Homo sapiens; identical to SEQ ID NO: 2662

SEQ ID NO: 2698 - DNA, 201 bp, Homo sapiens
tctccggccgtccagcccgcgccgcgtcacctcccctcccggagcgaagggccctgctcgcccgaggacggaggcccgcacgggacacggggccccagttyccgccccggaagcccaggacacggctccagtggcggcgcggcccagggcgcaggcgcgggtgtcggtcccaccgcgcgtcgtcctcgccccggccccggc

SEQ ID NO: 2699 - DNA, 201 bp, Homo sapiens
cgcagccaggggccaacgagagccgacgctgggcgggcagcgtccgggagcccctccgaccctgcgctcccctcgtccgcgccctgaccccgcgtctccgrccgtccagcccgcgccgcgtcacctcccctcccggagcgaagggccctgctcgcccgaggacggaggcccgcacgggacacggggccccagtttccgccc

SEQ ID NO: 2700 - DNA, 201 bp, Homo sapiens
agagccgacgctgggcgggcagcgtccgggagcccctccgaccctgcgctcccctcgtccgcgccctgaccccgcgtctccggccgtccagcccgcgccgygtcacctcccctcccggagcgaagggccctgctcgcccgaggacggaggcccgcacgggacacggggccccagtttccgccccggaagcccaggacacgg

SEQ ID NO: 2701 - DNA, 201 bp, Homo sapiens
cggaggcccgcacgggacacggggccccagtttccgccccggaagcccaggacacggctccagtggcggcgcggcccagggcgcaggcgcgggtgtcggtyccaccgcgcgtcgtcctcgccccggccccggccaatcccttcgaatttggccgaggccgggaaatactagctaatcacggcgcgcgctgttgacgccggc

SEQ ID NO: 2702 - DNA, 201 bp, Homo sapiens
cttctgagttcctacttgcaaaagaaaagtgacgtggaggatcactcggtgcacctgcttttttctgcaaatcgctgggaacaagtaatttttccctagaytggtgtaaacagccagacgtgggccttcccaaacccgacctggtcctgttcctccagttacagctggcggatgctgccaagcggggagcgtttggccatg

SEQ ID NO: 2703 - DNA, 201 bp, Homo sapiens
gaggatcactcggtgcacctgcttttttctgcaaatcgctgggaacaagtaatttttccctagactggtgtaaacagccagacgtgggccttcccaaaccygacctggtcctgttcctccagttacagctggcggatgctgccaagcggggagcgtttggccatgagcgctatgagaacggggctttccaggagcgggcgc

SEQ ID NO: 2704 - DNA, 201 bp, Homo sapiens
ctgggaacaagtaatttttccctagactggtgtaaacagccagacgtgggccttcccaaacccgacctggtcctgttcctccagttacagctggcggatgmtgccaagcggggagcgtttggccatgagcgctatgagaacggggctttccaggagcgggcgctccggtgtttccaccagctcatgaaagacacgactttg

SEQ ID NO: 2705 - DNA, 116 bp, Homo sapiens
tactgaagttcagtgataactctgagcagtttcattgtgatcactgtaaatggtaatcagttggaattctcctaaatgtcttccagacactagtaaaaaamgacctgaaaattgtt

SEQ ID NO: 2706 - DNA, 201 bp, Homo sapiens
taattaaggaaaagttgagccagggcgtgaccctcgtcgtggacagatacgcattttctggtgtggccttcaccggtgccaaggagaatttttccctagaytggtgtaaacagccagacgtgggccttcccaaacccgacctggtcctgttcctccagttacagctggcggatgctgccaagcggggagcgtttggccatg

SEQ ID NO: 2707 - DNA, 129 bp, Homo sapiens
ggcccagggcgcaggcgcgggtgtcggtyccaccgcgcgtcgtcctcgccccggccccggccaatcccttcgaatttggccgaggccgggaaatactagctaatcacggcgcgcgctgttgacgccggc

SEQ ID NO: 2708 - DNA, 201 bp, Homo sapiens
tcgtggacagatacgcattttctggtgtggccttcaccggtgccaaggagaatttttccctagactggtgtaaacagccagacgtgggccttcccaaaccygacctggtcctgttcctccagttacagctggcggatgctgccaagcggggagcgtttggccatgagcgctatgagaacggggctttccaggagcgggcgc

SEQ ID NO: 2709 - DNA, 201 bp, Homo sapiens
caaggagaatttttccctagactggtgtaaacagccagacgtgggccttcccaaacccgacctggtcctgttcctccagttacagctggcggatgctgccmagcggggagcgtttggccatgagcgctatgagaacggggctttccaggagcgggcgctccggtgtttccaccagctcatgaaagacacgactttgaactg

SEQ ID NO: 2710 - DNA, 116 bp, Homo sapiens; identical to SEQ ID NO: 2705

SEQ ID NO: 2711 - DNA, 201 bp, Homo sapiens; identical to SEQ ID NO: 2698

SEQ ID NO: 2712 - DNA, 201 bp, Homo sapiens; identical to SEQ ID NO: 2699

SEQ ID NO: 2713 - DNA, 201 bp, Homo sapiens; identical to SEQ ID NO: 2700

SEQ ID NO: 2714 - DNA, 201 bp, Homo sapiens; identical to SEQ ID NO: 2701

SEQ ID NO: 2715 - DNA, 201 bp, Homo sapiens
ctcagctaatttttgcaattttaatttactttatttttaaatttaatttttgtatttttagtagagacagggtttcaccatgttggccaggatggtctctyttgaccttgtgatccactcgcctcggcctcccaaagttctgggattacgcaggtgtgagccaccgtacctggcccttttttttttatttttaagacaagg

SEQ ID NO: 2716 - DNA, 201 bp, Homo sapiens; identical to SEQ ID NO: 2698

SEQ ID NO: 2717 - DNA, 201 bp, Homo sapiens; identical to SEQ ID NO: 2699

SEQ ID NO: 2718 - DNA, 201 bp, Homo sapiens; identical to SEQ ID NO: 2700

SEQ ID NO: 2719 - DNA, 201 bp, Homo sapiens; identical to SEQ ID NO: 2706

SEQ ID NO: 2720 - DNA, 201 bp, Homo sapiens; identical to SEQ ID NO: 2701

SEQ ID NO: 2721 - DNA, 201 bp, Homo sapiens; identical to SEQ ID NO: 2708

SEQ ID NO: 2722 - DNA, 201 bp, Homo sapiens; identical to SEQ ID NO: 2709

SEQ ID NO: 2723 - DNA, 201 bp, Homo sapiens
cgaagctgtccatgaggacatccgcgtgctctctgaggacgccatccgcactgccacagagaagccgctgggggagctatggaagtgacccaaggctgcccactggagacgcctctccctgcagtcccccgagaggtgggagactcgcggaaggccccgtccccagcggagtccagaccccacaacttcaggagctctttc

SEQ ID NO: 2724 - DNA, 201 bp, Homo sapiens
cactgccacagagaagccgctgggggagctatggaagtgacccaaggctgcccactggagacgcctctccctgcagtcccccgagaggtgggagactcgcrgaaggccccgtccccagcggagtccagaccccacaacttcaggagctctttcccggcagcagagatctgcaggctgcctcttctgccccggagctggggt

SEQ ID NO: 2725 - DNA, 201 bp, Homo sapiens
agagaagccgctgggggagctatggaagtgacccaaggctgcccactggagacgcctctccctgcagtcccccgagaggtgggagactcgcggaaggcccygtccccagcggagtccagaccccacaacttcaggagctctttcccggcagcagagatctgcaggctgcctcttctgccccggagctggggtgcactgggg

SEQ ID NO: 2726 - DNA, 201 bp, Homo sapiens
ctgggggagctatggaagtgacccaaggctgcccactggagacgcctctccctgcagtcccccgagaggtgggagactcgcggaaggccccgtccccagcrgagtccagaccccacaacttcaggagctctttcccggcagcagagatctgcaggctgcctcttctgccccggagctggggtgcactggggacccccgtgg

SEQ ID NO: 2727 - DNA, 201 bp, Homo sapiens
agaggtgggagactcgcggaaggccccgtccccagcggagtccagaccccacaacttcaggagctctttcccggcagcagagatctgcaggctgcctcttytgccccggagctggggtgcactggggacccccgtggtggggaccttggcagtgtggacatgagcagagcgatggagcagtctcctgccctctcccctgtc

SEQ ID NO: 2728 - DNA, 116 bp, Homo sapiens; identical to SEQ ID NO: 2705

SEQ ID NO: 2729 - DNA, 201 bp, Homo sapiens
cccaggattctctacggcctcggggccgctaagccccgcccatagttccgcccatccgagaatttgtccaatccaggcgaagtattcacgctccgcccaargttttgtgttgtcacttccggcccgctccaggaagtcgtgctgcggagccaaatttgaagcaagcggaggcgcgggggcgcgtctacgaagccggacctg

SEQ ID NO: 2730 - DNA, 201 bp, Homo sapiens
gtggccggacaaaattcatccagcctactgacacagtcatgatccgcccattgcctgttaagcccaagaccaaggttaagcagagggtgagggtgaagacmgtgccttctctcttccaggccaagctggacaccttcctgtggtcgtgagaacagtgagtctgaccaatggccagacacatgcctgcaacttgtaggtcaa

SEQ ID NO: 2731 - DNA, 201 bp, Homo sapiens
cctgtggtcgtgagaacagtgagtctgaccaatggccagacacatgcctgcaacttgtaggtcaaggactgtccaggcaggggttttgtggacagagcccyactttcgggaccagcctgaggtgtaagggcagacaaacaggtgagggtgagtgtgacacccagagactgctcttcctgccctcaccctgccccactccta

SEQ ID NO: 2732 - DNA, 201 bp, Homo sapiens
gtaggtcaaggactgtccaggcaggggttttgtggacagagccccactttcgggaccagcctgaggtgtaagggcagacaaacaggtgagggtgagtgtgrcacccagagactgctcttcctgccctcaccctgccccactcctacgactgggagctgacatgaccagcccactgatcctgtcagcaggtcctgctcctgt

SEQ ID NO: 2733 - DNA, 139 bp, Homo sapiens
atgaatcaggaagacccagggtggagaggaggagtagtygcccaaggtccttggccattcctattgtgtgtccctgccttatgggagaccacgtggaggtcagctatgatgctttcctgctgcttattgtgggtattgc

SEQ ID NO: 2734 - DNA, 201 bp, Homo sapiens; identical to SEQ ID NO: 2730

SEQ ID NO: 2735 - DNA, 201 bp, Homo sapiens; identical to SEQ ID NO: 2731

SEQ ID NO: 2736 - DNA, 201 bp, Homo sapiens; identical to SEQ ID NO: 2732

SEQ ID NO: 2737 - DNA, 201 bp, Homo sapiens
gccctcggcgccccgctgagcccgcgatcacttcctccctgtgaccaaccggcgctgcaggttagagcctggcaatgccgtttgggtgtgtgactctgggygacaagaagaactataaccagccatcggaggtgactgacagatatgatttgggacaggtcatcaagactgaggagttttgtgaaatcttccgggccaagg

SEQ ID NO: 2738 - DNA, 201 bp, Homo sapiens
ctgtgtttgtagccccagaggtggtaggccggcagcggtatggacgccctgtggactgctgggccattggagtcatcatgtacatcctgctttcaggcaayccacctttctatgaggaggtggaagaagatgattatgagaaccatgataagaatctcttccgcaagatcctggctggtgactatgagtttgactctccat

SEQ ID NO: 2739 - DNA, 201 bp, Homo sapiens
ggcaggagggtgggagagtggatgaggggcttctcactgtacatagagtcactggcatgatgccctcgctcccccatgcccccacatcccagtggggcatwactaggggtcacgggagagcagtctcgtctcctgtgtgtatgtgtgtgagtggtgggcaggccagtggcagggccggccccagcccctgcatggattcct

SEQ ID NO: 2740 - DNA, 201 bp, Homo sapiens
caataactcataatctgatttggaggtttgccctttacaggggcagattttctgctcagttcaacaatgaaatgaagaggaactccctctttctacagctyacttctatcagaggcccaggtgcctcagagccacattgagttgctttttctgggatgaggaagtagggttaaactccccagtttcctgagggaggctcct

SEQ ID NO: 2741 - DNA, 137 bp, Homo sapiens
gctgcatttggaccaaggaatactccctgggctgagagctcaagtaagggctgctgtttttgactcctgttgaccgaggagccttactcttgatttaggcrtagagctggaatctacctgggccagccagcgcaagg

SEQ ID NO: 2742 - DNA, 108 bp, Homo sapiens
ggctgagagctcaagtaagggctgctgtttttgactcctgttgaccgaggagccttactcttgatttaggcatagagctggaatctacctgggccagccascgcaagg

SEQ ID NO: 2743 - DNA, 201 bp, Homo sapiens; identical to SEQ ID NO: 2737

SEQ ID NO: 2744 - DNA, 201 bp, Homo sapiens
ccgagtatctggccccagaggtggtaggccggcagcggtatggacgccctgtggactgctgggccattggagtcatcatgtacatcctgctttcaggcaayccacctttctatgaggaggtggaagaagatgattatgagaaccatgataagaatctcttccgcaagatcctggctggtgactatgagtttgactctccat

SEQ ID NO: 2745 - DNA, 201 bp, Homo sapiens; identical to SEQ ID NO: 2739

SEQ ID NO: 2746 - DNA, 201 bp, Homo sapiens; identical to SEQ ID NO: 2740

SEQ ID NO: 2747 - DNA, 137 bp, Homo sapiens; identical to SEQ ID NO: 2741

SEQ ID NO: 2748 - DNA, 108 bp, Homo sapiens; identical to SEQ ID NO: 2742

SEQ ID NO: 2749 - DNA, 201 bp, Homo sapiens; identical to SEQ ID NO: 2737

SEQ ID NO: 2750 - DNA, 201 bp, Homo sapiens
ggctgaagaactcgaagattgtcatcagtgacttccatctggctaagctagaaaatggcctcatcaaggagccctgtgggacccccgagctttcaggcaayccacctttctatgaggaggtggaagaagatgattatgagaaccatgataagaatctcttccgcaagatcctggctggtgactatgagtttgactctccat

SEQ ID NO: 2751 - DNA, 201 bp, Homo sapiens; identical to SEQ ID NO: 2739

SEQ ID NO: 2752 - DNA, 201 bp, Homo sapiens; identical to SEQ ID NO: 2740

SEQ ID NO: 2753 - DNA, 137 bp, Homo sapiens; identical to SEQ ID NO: 2741

SEQ ID NO: 2754 - DNA, 108 bp, Homo sapiens; identical to SEQ ID NO: 2742

SEQ ID NO: 2755 - DNA, 117 bp, Homo sapiens
atggaggtcactccacygtcactacaaattccgggaaggaaacttccccagattcctccacttggaggtggcgctcggcctcaggctaggagggaacaggtgagaaagcagcccagg

SEQ ID NO: 2756 - DNA, 201 bp, Homo sapiens
tgggtttgcagcgaggagacaccccagggcaaacagcctgaccccagccagggatgtccaagaaaggccgcgactcctgataatcccttatgccccggagygcctcgcctgcagaggcagcgtccccgccacccagccccggctctgccgcggtgaggaccggcgggtcggggtggactggacactgtcccacccatcaaa

SEQ ID NO: 2757 - DNA, 201 bp, Homo sapiens
atcgtaggaaaggtggggaacgtggggcagacaaactatgcagcatccaaggctggagtgattgggctgacccagaccgcagcccgggagcttggacgacrtgggatccgctgtaactctgtcctcccagggttcattgcaacacccatgacacagaaagtgccacagaaagtggtggacaagattactgaaatgatcccg

SEQ ID NO: 2758 - DNA, 201 bp, Homo sapiens
gagagaagggagcccggggcctgtcggggaagtcagggcctcggggagaacggggccccacgggtccacggggtcagcggggaccccgaggtgccactggkaagtctggagctaagggaacatctggtggtgatggcccccatgggccccctggagagaggggcctccctggacctcagggtcccaacgggtttcctggac

SEQ ID NO: 2759 - DNA, 201 bp, Homo sapiens
gagccgctgcccatggaccccgagggctgaagggagagaaaggagagcctgcagtgttggaacctggtatgctcgtggaggggccccctggcccagaaggscctgcgggattgattggtccccctggcatccaggggaacccaggcccagttggagaccctggagagaggggcccccctggccgagcagggctccctggat

SEQ ID NO: 2760 - DNA, 201 bp, Homo sapiens
gtctccaagctcccctcctgactctctacagtgcccagggtgtccgacagctgggcctggagctgggccgacctgtccgcttcctgtatgaagaccagacwgggcggcctcaacctccctctcagccagtcttccgaggcctcagcctagcagatggcaagtggcaccgtgtggctgtggctgtgaagggccagtctgtca

SEQ ID NO: 2761 - DNA, 201 bp, Homo sapiens
aaatcctggagtcgagcctcttgccaccccttgaggaggagcagacagatctccaggtcccccccacagccgacaggttccaggcagaggaatatggggasggtggcacagacccccctgaagggccctacgattacacctatggctatggggatgattatcgtgaggagacagagcttggccctgccctctctgcggaga

SEQ ID NO: 2762 - DNA, 155 bp, Homo sapiens
cacacagaagcggcagccaccgaggagggagcagtgccgggagccccgacggcgmcttgctgcatggagctgggccgctgacagctgtcgctgcccgcagcctctgacctccctgggaccccggcgtctgaggctcatagtctgctccctgtctt

SEQ ID NO: 2763 - DNA, 129 bp, Homo sapiens
cacacagaagcggcagccaccgaggaggragcagtgccgggagccccgacggcgccttgctgcatggagctgggccgctgacagctgtcgctgcccgcagcctctgacctccctgggaccccggcgtct

SEQ ID NO: 2764 - DNA, 201 bp, Homo sapiens
gaaggtccccctggaaccaaaggaaaccagggtccctctggacctcagggacctctaggatacccaggacctcgaggggtcaagggtgtggacggaattcrgggtctgaagggtcataagggtgagaagggtgaggatggctttcctgggttcaaaggtgacataggcgtgaaaggtgacaggggcgaagttggagtccct

SEQ ID NO: 2765 - DNA, 201 bp, Homo sapiens
cctgatggtgtccggagagcgaaaggcatctgtccagctgatgtggcctaccgagtggcacgacctgcccagctcagtgcacccactcgccagcttttccmaggaggatttcccaaagatttctctctgctgactgttgtccggacccgccctggtctccaagctcccctcctgactctctacagtgcccagggtgtccga

SEQ ID NO: 2766 - DNA, 201 bp, Homo sapiens
ggtttcctggaccgaaaggacccccgggcccccctgggaaggatgggctgccgggacacccaggccaaagaggagaagtgggtttccaagggaagaccggyccccctggtcctccaggagtggtgggacctcagggagcagcaggagaaaccggccctatgggggagagaggtcacccaggccccccggggccccctggag

SEQ ID NO: 2767 - DNA, 201 bp, Homo sapiens
gggtgatgtccaggagctggccattgtcccaggggtccaggcagcctatgaatcatgtgaacagaaggagctggaatgcgaggggggccagagggaaagaycccaaaaccaacagcctcacagagcccagagatctccacagcagcaaccatcaagacttcacaggccacaaaatcaggaaccccagagccagcccactga

SEQ ID NO: 2768 - DNA, 201 bp, Homo sapiens
taccgaccgggggagcccccggcagtcctggggggctggaggagatctttggctcactcgactccctgcgggaggagatcgagcagatgaggcggccaacrgggacccaggacagccctgctcgcacctgccaggacctgaagctgtgccacccagagcttcccgatggagagtactgggtcgaccccaaccagggctgtg

SEQ ID NO: 2769 - DNA, 201 bp, Homo sapiens
cagagcccagagatctccacagcagcaaccatcaagacttcacaggccacaaaatcaggaaccccagagccagcccactgagtctctctactatgactacragcccccctattatgatgtgatgactacggggacaacccctgattatcaggaccccaccccaggtgaagaggaagaaatcctggagtcgagcctcttgcc

SEQ ID NO: 2770 - DNA, 201 bp, Homo sapiens
cctgaaaggagagtctggagacttaggacctcagggccccagaggacctcagggcctcacaggccctcctggcaaggctgggcgaaggggccgggcaggtsctgatggagcccgagggatgcctggagatcctggagtgaagggtgaccgaggttttgatggactcccagggctccctggagagaagggccataggggtga

SEQ ID NO: 2771 - DNA, 201 bp, Homo sapiens
atggcccccatgggccccctggagagaggggcctccctggacctcagggtcccaacgggtttcctggaccgaaaggacccccgggcccccctgggaaggaygggctgccgggacacccaggccaaagaggagaagtgggtttccaagggaagaccggcccccctggtcctccaggagtggtgggacctcagggagcagcag

SEQ ID NO: 2772 - DNA, 201 bp, Homo sapiens
gatctccagggatccagggcgagccaggtgtcaagggtccacgcggggaacgtggagagaaaggagagtcggggcagccaggagagccagggccaccaggscctaaaggccccacaggcgatgatggccccaaagggaaccctggtcctgttggttttcctggtgaccctggcccccctggagaaggtggccctcggggcc

SEQ ID NO: 2773 - DNA, 201 bp, Homo sapiens
atctccagggatccagggcgagccaggtgtcaagggtccacgcggggaacgtggagagaaaggagagtcggggcagccaggagagccagggccaccagggsctaaaggccccacaggcgatgatggccccaaagggaaccctggtcctgttggttttcctggtgaccctggcccccctggagaaggtggccctcggggcca

SEQ ID NO: 2774 - DNA, 201 bp, Homo sapiens
gaacaaagggtgaccctggtccccctggggccccagggaaggatggtcctgctggtctgaggggattcccaggagagagaggcctcccaggcactgctggkggacctggtttgaaggggaatgaaggtccgtctggcccccctggccctgcaggctcccctggggaacgaggtgcagcaggatcagggggacccattggtc

SEQ ID NO: 2775 - DNA, 201 bp, Homo sapiens
gacctggtttgaaggggaatgaaggtccgtctggcccccctggccctgcaggctcccctggggaacgaggtgcagcaggatcagggggacccattggtccsccagggcgcccaggcccgcagggtccccctggagcagcaggagagaaaggtgtcccaggtgagaagggccccattggcccgactggccgagatggagtgc

SEQ ID NO: 2776 - DNA, 201 bp, Homo sapiens
aagggaacatctggtggtgatggcccccatgggccccctggagagaggggcctccctggacctcagggtcccaacgggtttcctggaccgaaaggaccccygggcccccctgggaaggatgggctgccgggacacccaggccaaagaggagaagtgggtttccaagggaagaccggcccccctggtcctccaggagtggtg

SEQ ID NO: 2777 - DNA, 201 bp, Homo sapiens
ccctgggacccagggtcttcccgggccccagggtgccatcggccctcatggagagaagggtcctcaagggaagccagggctccccggcatgcctggctcaracggacccccgggtcacccagggaaggaaggtccccctggaaccaaaggaaaccagggtccctctggacctcagggacctctaggatacccaggacctcg

SEQ ID NO: 2778 - DNA, 201 bp, Homo sapiens
ccctcggggccaggatggtgctaagggtgaccgaggcgaggatggtgagccaggacagcctggatcccctggtcccaccggggagaatggacccccagggmcacttggaaagcgaggtcctgctggctcgcctggttccgaggggcgacaaggagggaagggagccaagggagatcctggcgctataggtgccccggggaa

SEQ ID NO: 2779 - DNA, 201 bp, Homo sapiens
ccggccctatgggggagagaggtcacccaggccccccggggccccctggagagcagggactacctgggacagctggaaaagaaggaacaaagggtgacccyggtccccctggggccccagggaaggatggtcctgctggtctgaggggattcccaggagagagaggcctcccaggcactgctggtggacctggtttgaagg

SEQ ID NO: 2780 - DNA, 201 bp, Homo sapiens
ctcgggatgccttccgagttttctgcaacttcacagcagggggtgagacctgtgtgacgcctagggatgacgtcacgcagttctcttacgtggactcagasggctccccagtgggtgtggtccagctcaccttcctgcggctgctcagcgtctcagcccaccaggacgtctcctacccctgctctggagcagcccgtgacg

SEQ ID NO: 2781 - DNA, 201 bp, Homo sapiens
tgccagacacagcaaggccggacggtgctggaggtgcgaacgcctgtgctggagcagctgccagtgctggatgcctccttctcagacctgggagccccacygaggcggggaggggtgctgctggggcctgtctgcttcatgggataggaccgtctctgtctgatcctgtccattcggaaccaggcccacctggaatcccac

SEQ ID NO: 2782 - DNA, 201 bp, Homo sapiens
cctgctcgcacctgccaggacctgaagctgtgccacccagagcttcccgatggagagtactgggtcgaccccaaccagggctgtgctcgggatgccttccragttttctgcaacttcacagcagggggtgagacctgtgtgacgcctagggatgacgtcacgcagttctcttacgtggactcagagggctccccagtgggt

SEQ ID NO: 2783 - DNA, 201 bp, Homo sapiens
agggcaccaaagggaacaagggtgaacatggccctcctggaccccctggacccattggtcctgtggggcagcctggagcagcgggagcagatggggagccyggagctcggggaccccagggacactttggagccaaaggtgatgaaggaacaagaggattcaatgggcccccaggacccattggcctacagggtttgccag

SEQ ID NO: 2784 - DNA, 201 bp, Homo sapiens
cagggggacccattggtccgccagggcgcccaggcccgcagggtccccctggagcagcaggagagaaaggtgtcccaggtgagaagggccccattggcccractggccgagatggagtgcagggtcctgtggggcttcctggtcctgctgggcctccaggtgtggctggagaggatggagacaagggtgaggtgggggacc

SEQ ID NO: 2785 - DNA, 201 bp, Homo sapiens
gagaacggggccccacgggtccacggggtcagcggggaccccgaggtgccactgggaagtctggagctaagggaacatctggtggtgatggcccccatggsccccctggagagaggggcctccctggacctcagggtcccaacgggtttcctggaccgaaaggacccccgggcccccctgggaaggatgggctgccgggac

SEQ ID NO: 2786 - DNA, 201 bp, Homo sapiens
agaagggcaagctgggtgttcctggtctgcctggctatcctggacgtcagggacccaaggggtccctaggatttcctggctttcctggtgccagtggagaraagggagcccggggcctgtcggggaagtcagggcctcggggagaacggggccccacgggtccacggggtcagcggggaccccgaggtgccactgggaagt

SEQ ID NO: 2787 - DNA, 201 bp, Homo sapiens
ggctccccggcatgcctggctcagacggacccccgggtcacccagggaaggaaggtccccctggaaccaaaggaaaccagggtccctctggacctcagggwcctctaggatacccaggacctcgaggggtcaagggtgtggacggaattcggggtctgaagggtcataagggtgagaagggtgaggatggctttcctgggt

SEQ ID NO: 2788 - DNA, 142 bp, Homo sapiens
cacacagaagcggcagccaccgaggagggagcagtgccgggmgccccgacggcgccttgctgcatggagctgggccgctgacagctgtcgctgcccgcagcctctgacctccctgggaccccggcgtctgaggctcatagtc

SEQ ID NO: 2789 - DNA, 128 bp, Homo sapiens
cacacagaagcggcagccaccgaggagrgagcagtgccgggagccccgacggcgccttgctgcatggagctgggccgctgacagctgtcgctgcccgcagcctctgacctccctgggaccccggcgtc

SEQ ID NO: 2790 - DNA, 201 bp, Homo sapiens
agttggagaccctggagagaggggcccccctggccgagcagggctccctggatcagatggggctcctggtcctcctggcacatctctcatgctcccattcyggtttggcagtggtgggggtgacaagggccctgtggtggcggcccaggaggctcaggcccaggcgatcctgcagcaggcgaggctggcgctccgtggacc

SEQ ID NO: 2791 - DNA, 201 bp, Homo sapiens
cctagcagatggcaagtggcaccgtgtggctgtggctgtgaagggccagtctgtcaccctcattgttgactgcaagaagcgagtcacccggcctctccccygaagtgctcgtccagtattggacacccatggagtgatcatctttggtgcccgtattctggatgaagaagtctttgagggtgatgtccaggagctggccat

SEQ ID NO: 2792 - DNA, 201 bp, Homo sapiens
ggagcagctgccagtgctggatgcctccttctcagacctgggagccccaccgaggcggggaggggtgctgctggggcctgtctgcttcatgggataggacygtctctgtctgatcctgtccattcggaaccaggcccacctggaatcccacaacatcagctctgtgccacctcccaagagggctcctcactatctagggag

SEQ ID NO: 2793 - DNA, 201 bp, Homo sapiens
cttctcagacctgggagccccaccgaggcggggaggggtgctgctggggcctgtctgcttcatgggataggaccgtctctgtctgatcctgtccattcggwaccaggcccacctggaatcccacaacatcagctctgtgccacctcccaagagggctcctcactatctagggagccctgggccagggcgtggagagccctc

SEQ ID NO: 2794 - DNA, 201 bp, Homo sapiens
acagaagcggcagccaccgaggagggagcagtgccgggagccccgacggcgccttgctgcatggagctgggccgctgacagctgtcgctgcccgcagcctmtgacctccctgggaccccggcgtctgaggctcatagtctgctccctgtcttctgtcagcctcagggcatccagcgtctcaggccgacctgggtccctggg

SEQ ID NO: 2795 - DNA, 110 bp, Homo sapiens
atgagtgggragaatgtcaccaaggtcagcaccttcatcctggtgggcctccccacggccccagggctgcagtacctgctcttcctcctcttcctgctcacctacctctt

SEQ ID NO: 2796 - DNA, 201 bp, Homo sapiens
gtgggcctccccacggccccagggctgcagtacctgctcttcctcctcttcctgctcacctacctctttgtcctggtggagaacctggccatcatcctcaycgtctggagcagcacctccctccacaggcccatgtactactttctgagctccatgtctttcctggagatctggtacgtgtctgacatcacccccaagatg

SEQ ID NO: 2797 - DNA, 201 bp, Homo sapiens
cactgcagagctggtggatttcatcctggccttcatcatcctggtgtttccgctcctggccaccatactgtcatattggcacatcaccctggctgtcctgygcatcccctcggccaccggctgctggagagccttctctacctgcgcctctcacctcaccgtggtcaccgtcttctatacagccttgcttttcatgtatgt

SEQ ID NO: 2798 - DNA, 201 bp, Homo sapiens
acggacttctccactgcagagctggtggatttcatcctggccttcatcatcctggtgtttccgctcctggccaccatactgtcatattggcacatcacccyggctgtcctgcgcatcccctcggccaccggctgctggagagccttctctacctgcgcctctcacctcaccgtggtcaccgtcttctatacagccttgctt

SEQ ID NO: 2799 - DNA, 201 bp, Homo sapiens
catcctcaagctggcctgcacggacttctccactgcagagctggtggatttcatcctggccttcatcatcctggtgtttccgctcctggccaccatactgycatattggcacatcaccctggctgtcctgcgcatcccctcggccaccggctgctggagagccttctctacctgcgcctctcacctcaccgtggtcaccgt

SEQ ID NO: 2800 - DNA, 201 bp, Homo sapiens
tctgtggctccaacgtcttgaaccacttcttctgtgacatttcccccatcctcaagctggcctgcacggacttctccactgcagagctggtggatttcatyctggccttcatcatcctggtgtttccgctcctggccaccatactgtcatattggcacatcaccctggctgtcctgcgcatcccctcggccaccggctgct

SEQ ID NO: 2801 - DNA, 201 bp, Homo sapiens
caccgtggtcaccgtcttctatacagccttgcttttcatgtatgtccggccccaagccattgattcccagagctccaacaagctcatctctgccgtgtacrctgttgtcacgccaataattaaccctttgatttactgcctgaggaacaaggaatttaaggacgccttgaaaaaggccttgggcttgggtcaaacttcaca

SEQ ID NO: 2802 - DNA, 201 bp, Homo sapiens
gggcttctcctttgtgagtggcttcaccatctccatgatcaaggtctgttttatctccagcgtcacgttctgtggctccaacgtcttgaaccacttcttcygtgacatttcccccatcctcaagctggcctgcacggacttctccactgcagagctggtggatttcatcctggccttcatcatcctggtgtttccgctcct

SEQ ID NO: 2803 - DNA, 201 bp, Homo sapiens
gccacccgctgcgctaccacgtccttgtgaccccggggctgtgcctccagctggtgggcttctcctttgtgagtggcttcaccatctccatgatcaaggtstgttttatctccagcgtcacgttctgtggctccaacgtcttgaaccacttcttctgtgacatttcccccatcctcaagctggcctgcacggacttctcca

SEQ ID NO: 2804 - DNA, 201 bp, Homo sapiens
gggtgcatgacgcagctctacttcttcagctccctggtgtgcaccgagtgtgtgcttctggcctccatggcctacgaccgctacgtggccatctgccaccygctgcgctaccacgtccttgtgaccccggggctgtgcctccagctggtgggcttctcctttgtgagtggcttcaccatctccatgatcaaggtctgtttt

SEQ ID NO: 2805 - DNA, 201 bp, Homo sapiens
gcagaaacgcatctctttcgtcgggtgcatgacgcagctctacttcttcagctccctggtgtgcaccgagtgtgtgcttctggcctccatggcctacgacygctacgtggccatctgccacccgctgcgctaccacgtccttgtgaccccggggctgtgcctccagctggtgggcttctcctttgtgagtggcttcaccat

SEQ ID NO: 2806 - DNA, 201 bp, Homo sapiens
tggagagccttctctacctgcgcctctcacctcaccgtggtcaccgtcttctatacagccttgcttttcatgtatgtccggccccaagccattgattcccwgagctccaacaagctcatctctgccgtgtacactgttgtcacgccaataattaaccctttgatttactgcctgaggaacaaggaatttaaggacgccttg

SEQ ID NO: 2807 - DNA, 201 bp, Homo sapiens
tgaccccggggctgtgcctccagctggtgggcttctcctttgtgagtggcttcaccatctccatgatcaaggtctgttttatctccagcgtcacgttctgyggctccaacgtcttgaaccacttcttctgtgacatttcccccatcctcaagctggcctgcacggacttctccactgcagagctggtggatttcatcctgg

SEQ ID NO: 2808 - DNA, 169 bp, Homo sapiens
acaatgatgctctattttattttctaaattaagaaagatttgctcagaggtttagatattcaactttcyccaacttttagtacaaatacatccatttagtttttgatgggccttggatacagcattataaagtgagcattttttcagattacactgagatggcctctct

SEQ ID NO: 2809 - DNA, 201 bp, Homo sapiens
agactcttgattatgtagaagaatgcacaggtctcatgcatttggattttcccttaaagcagagaaaactggtaggtctgtagaggaaagcaggagatatyattatctcccaggagtcaagatgcagataatggtattgttccagtcttgaaccatttcatttcatcttcctgatgttcacgaggccatcaaacagacatc

SEQ ID NO: 2810 - DNA, 201 bp, Homo sapiens
agggcgtccagctataaaaagagaagaatcccatgaaggacaacaagcaaactcatatgttatccctttagccggattgtgtgctgatgattgtttccctmtttacacttcgaatcacccctgtggtcttttgtgagtccccaaggcagcctcagccttcgcaaaccgtccagtggggcacgaatctcggaggggtgcggg

SEQ ID NO: 2811 - DNA, 201 bp, Homo sapiens
gctgctccctcatgagatggaggaaaatgtcgcccacacctacttggacctctcaccaaggacactgccctcagagataaatctgttggacggcagccaaragaccccaaattgtctcaacctccaggacacggcaagttgcaagtttccgagttggggaggcaaagcgggaaaacatgtttggcgatttcctcctgccac

SEQ ID NO: 2812 - DNA, 201 bp, Homo sapiens
cttccaagctccttcgcagagttttgggccctagtgtgcagggctgctccctcatgagatggaggaaaatgtcgcccacacctacttggacctctcaccarggacactgccctcagagataaatctgttggacggcagccaagagaccccaaattgtctcaacctccaggacacggcaagttgcaagtttccgagttgggg

SEQ ID NO: 2813 - DNA, 201 bp, Homo sapiens
gtggagtagcaaaacaagtggaacggatgaagaacttccaagctccttcgcagagttttgggccctagtgtgcagggctgctccctcatgagatggaggamaatgtcgcccacacctacttggacctctcaccaaggacactgccctcagagataaatctgttggacggcagccaagagaccccaaattgtctcaacctcc

SEQ ID NO: 2814 - DNA, 102 bp, Homo sapiens
ctggtcctcacccttcgatcggctcgagtccctcggacagttgcccactcacagcgtgcaaaggggtcgcactccctgtgggttctccgccctcagaagcsg

SEQ ID NO: 2815 - DNA, 201 bp, Homo sapiens
agtccctggtcgcactgcgttcccatcccggcagatgtgaactcaaaaacttcctccgctgtgcagtttcaattggcagacacaccctgtacctgaatgaytcagaaggaggcagaatgaacaaacaacagacccctgacttctgggattttgtgagtttgccaaaaaaaaaaaaaaaagaagtatattgtgtctacccag

SEQ ID NO: 2816 - DNA, 201 bp, Homo sapiens
ttctgggattttgtgagtttgccaaaaaaaaaaaaaaaagaagtatattgtgtctacccagcacaacaaaacgggggacttggcattcccccccttctccygcctccacccacactaatttatgcattctttaaagccaaaggaatcaaagtgaaatttcacacctagtctgtatcaagcatgtgctaggttaatttaacc

SEQ ID NO: 2817 - DNA, 201 bp, Homo sapiens
agaaggaggcagaatgaacaaacaacagacccctgacttctgggattttgtgagtttgccaaaaaaaaaaaaaaaagaagtatattgtgtctacccagcamaacaaaacgggggacttggcattcccccccttctcccgcctccacccacactaatttatgcattctttaaagccaaaggaatcaaagtgaaatttcacac

SEQ ID NO: 2818 - DNA, 201 bp, Homo sapiens
agccactttcgcgcgagcagcagaaaacctgagccgcggcccggcgagtgtcggcggcgctctggggaggagaggctgggaaggggctgcgagagatgctrcttaagaacgtgaggctgagaggcggacttggtcagatctgcctgcgtgacaagctcaggacaggacgcttctgcccttgcattactgttgtaaaagttt

SEQ ID NO: 2819 - DNA, 201 bp, Homo sapiens
tttgtgagtttgccaaaaaaaaaaaaaaaagaagtatattgtgtctacccagcacaacaaaacgggggacttggcattcccccccttctcccgcctccacmcacactaatttatgcattctttaaagccaaaggaatcaaagtgaaatttcacacctagtctgtatcaagcatgtgctaggttaatttaaccttactgctc

SEQ ID NO: 2820 - DNA, 201 bp, Homo sapiens
ctgtatcaagcatgtgctaggttaatttaaccttactgctctgtgaagtaagtaagcattgctggccattttattgttgagagaagtgtcattcagacaaytaaggtgacttgtagatttcccagctagtgagtggcagagctgggttccaaaacctaaatattgcaaatgccttgccttgtggctcaaacgctatcagtc

SEQ ID NO: 2821 - DNA, 121 bp, Homo sapiens
aggattctcccgagcccctgaaaaaaaaaaaaggtggagagactttgaaaacttttctctcgaaaagtctgaggaggcagaggacggcccggagtctcgtagcgcaccgccctggtcccac

SEQ ID NO: 2822 - DNA, 165 bp, Homo sapiens
aaactgtggttgtcttctggtgaagatctcagaagtttccactcatggcaaaaggtagataaagaaggagctaatgaagaaaaagaaacaagctgtcaagmggtgggaagggaaccaggaaaacacagcatcatgtcagacaataaaatagtgtaatttcaagaa

SEQ ID NO: 2823 - DNA, 201 bp, Homo sapiens
gaatagttcctaactattggagactatacaagaagcatgacaccaaactgtggttgtcttctggtgaagatctcagaagtttccactcatggcaaaaggtrgataaagaaggagctaatgaagaaaaagaaacaagctgtcaagaggtgggaagggaaccaggaaaacacagcatcatgtcagacaataaaatagtgtaat

SEQ ID NO: 2824 - DNA, 201 bp, Homo sapiens
atcatgaagacatattaactgaaagaatacaaagcgatgtgaatagttcctaactattggagactatacaagaagcatgacaccaaactgtggttgtcttytggtgaagatctcagaagtttccactcatggcaaaaggtagataaagaaggagctaatgaagaaaaagaaacaagctgtcaagaggtgggaagggaacca

SEQ ID NO: 2825 - DNA, 148 bp, Homo sapiens
tggtgaagatctcagaagtttccactcatggcaaaaggtagataaagaaggagctaatgaagaaaaagaaacaagctgtcaagaggtgggaagggaaccasgaaaacacagcatcatgtcagacaataaaatagtgtaatttcaagaa

SEQ ID NO: 2826 - DNA, 201 bp, Homo sapiens
gctgctgctacgtcttcctgccctccggtccattggccttaagtgtctagagcatctgtttttcttcaagctcattggtgacacccccatcgacaccttcytcatggagatgcttgaggctccccatcaactggcctgagctcagacccagacgtggtgcttctcacactggaggagcacacatccaagagggactccaag

SEQ ID NO: 2827 - DNA, 201 bp, Homo sapiens
cccctgaagatgtgaagccaccagtcttaggggtccggggcctgcactgtccaccccctccaggtggccctggggctggcaaacggctatgtgcaatctgyggggacagaagctcaggcaaacactacggggtttacagctgtgagggttgcaagggcttcttcaaacgcaccatccgcaaagaccttacatactcttgcc

SEQ ID NO: 2828 - DNA, 201 bp, Homo sapiens
ttggctgcctgagggcaatcattctgtttaatccagatgccaagggcctctccaaccctagtgaggtggaggtcctgcgggagaaagtgtatgcatcactkgagacctactgcaaacagaagtaccctgagcagcagggacggtttgccaagctgctgctacgtcttcctgccctccggtccattggccttaagtgtctag

SEQ ID NO: 2829 - DNA, 201 bp, Homo sapiens
ttgagtgggcgaagaggatcccacacttttcctccttgcctctggatgatcaggtcatattgctgcgggcaggctggaatgaactcctcattgcctccttytcacaccgatccattgatgttcgagatggcatcctccttgccacaggtcttcacgtgcaccgcaactcagcccattcagcaggagtaggagccatctttg

SEQ ID NO: 2830 - DNA, 201 bp, Homo sapiens
tggagacctactgcaaacagaagtaccctgagcagcagggacggtttgccaagctgctgctacgtcttcctgccctccggtccattggccttaagtgtctrgagcatctgtttttcttcaagctcattggtgacacccccatcgacaccttcctcatggagatgcttgaggctccccatcaactggcctgagctcagaccc

SEQ ID NO: 2831 - DNA, 201 bp, Homo sapiens
cctccggtccattggccttaagtgtctagagcatctgtttttcttcaagctcattggtgacacccccatcgacaccttcctcatggagatgcttgaggctycccatcaactggcctgagctcagacccagacgtggtgcttctcacactggaggagcacacatccaagagggactccaagccctggggcagggtggggggc

SEQ ID NO: 2832 - DNA, 201 bp, Homo sapiens
gggcagaaccaagaacataaaccctccaagggatctgcttgatatcccaagttggaagggaccccagatacctgtgaggactggttgtctctcttcggtgsccttgagtctctgaatttgtcgggttctcccatgatttggggtgatttctcaccctctgtccttcccccagcacaaagcactggccttgcctccaggacc

SEQ ID NO: 2833 - DNA, 201 bp, Homo sapiens
agctgatggacatgagagtagggccctgacaggccttcctcctctcaaacctggcagatgggggcctctctggaagagggaggggccctgtcactgtccaragtctctttttacacttcacctccttctgcagtcagactgaaatataaaaaaggtggtggtggtggtgaaggggctggtggagatgtaggaaccgatctg

SEQ ID NO: 2834 - DNA, 201 bp, Homo sapiens
ctgatggacatgagagtagggccctgacaggccttcctcctctcaaacctggcagatgggggcctctctggaagagggaggggccctgtcactgtccagaktctctttttacacttcacctccttctgcagtcagactgaaatataaaaaaggtggtggtggtggtgaaggggctggtggagatgtaggaaccgatctgct

SEQ ID NO: 2835 - DNA, 201 bp, Homo sapiens
ccagtggtggaggtgggtgtttgggaaaggcagggccctgaaatggcctgtccctagggctctccaagcactagccttcccagcttcccgccgcccccccyatctcttcctgtctaacttggggaaggggcctgggctgtgaggacagggcccccacaggggatggtttcacgagtgtagtcccggaggccttccctttac

SEQ ID NO: 2836 - DNA, 201 bp, Homo sapiens
gccttccctttacagctctcctccagccctgggcacatagcataggctggggacacaggatcctggcctgagaattgaggggaggtggccagcccgcagargtggggtgctggggctgcatgatttttgccctgcgtcccttctctttggggctcctttcccctctcatacataaaatcgctttcaaattaaaatcgctgt

SEQ ID NO: 2837 - DNA, 201 bp, Homo sapiens
ggggttcagaagaggcgaggagggagcacagtacccaaagatgggccagtgagacctcagaacgctgaagaagaaaaaagaggcttagacctgcgtgtgtyggggtacctgaatctggctgctgacttggcacacaacttcactgatggtctggccattggggcttcctttcgagggggccggggactagggatcctgacc

SEQ ID NO: 2838 - DNA, 201 bp, Homo sapiens
ttcttgtcgtggagaaatttgtgagacatgtgaaaggaggacatggtcacagtcatggacatggacacgctcacagtcatacacgtggaagtcatggacayggaagacaagagcgttctaccaaggagaagcagagctcagaggaagaagaaaaggaaacaagaggggttcagaagaggcgaggagggagcacagtaccca

SEQ ID NO: 2839 - DNA, 201 bp, Homo sapiens
tggccatagccatggctactcccatgagagcctctaccacagaggacatggacatgaccatgagcatagccatggaggctatggggagtctggggctccasgcatcaagcaggacctggatgctgtcactctctgggcttatgcactgggggccacagtgctgatctcagcagctccattttttgtcctcttccttatccc

SEQ ID NO: 2840 - DNA, 201 bp, Homo sapiens
tttccaccatggccacagccatgcccatggccatggccacactcacgagagcatctggcatggacatacccacgatcacgaccatggacattcacatgagratttacaccatggccatagccatggctactcccatgagagcctctaccacagaggacatggacatgaccatgagcatagccatggaggctatggggagtc

SEQ ID NO: 2841 - DNA, 165 bp, Homo sapiens
atattggtaaaggcattagggcgaaggtggaacggaacttcctgttctcgcgggatctaaaggcsggactgccacgtccaagcaaaccgggaaaggagaggatcccggagccgcgtgatggccagaggcctgggggccccccactgggtggccgtgggactgctg

SEQ ID NO: 2842 - DNA, 201 bp, Homo sapiens
tggtggctggactcgggggtcatgacgacctgcacgacgatctgcaagaggacttccatggccacagccacaggcactcacatgaagatttccaccatggycacagccatgcccatggccatggccacactcacgagagcatctggcatggacatacccacgatcacgaccatggacattcacatgaggatttacaccatg

SEQ ID NO: 2843 - DNA, 201 bp, Homo sapiens
acttcctgttctcgcgggatctaaaggcgggactgccacgtccaagcaaaccgggaaaggagaggatcccggagccgcgtgatggccagaggcctgggggscccccactgggtggccgtgggactgctgacctgggcgaccttggggcttctggtggctggactcgggggtcatgacgacctgcacgacgatctgcaagag

SEQ ID NO: 2844 - DNA, 201 bp, Homo sapiens
gtcatgacgacctgcacgacgatctgcaagaggacttccatggccacagccacaggcactcacatgaagatttccaccatggccacagccatgcccatggycatggccacactcacgagagcatctggcatggacatacccacgatcacgaccatggacattcacatgaggatttacaccatggccatagccatggctact

SEQ ID NO: 2845 - DNA, 201 bp, Homo sapiens
ctgatggtctggccattggggcttcctttcgagggggccggggactagggatcctgaccacaatgactgtcctgctacatgaagtgccccacgaggtcggrgactttgccatcttggtccagtctggctgcagcaaaaagcaggcgatgcgtctgcaactactgacagcagtaggggcactggcaggcacagcctgtgccc

SEQ ID NO: 2846 - DNA, 201 bp, Homo sapiens
cttccggtgggctcctgggagatgctttcctgcacctcattcctcatgctcttgaacctcattctcaccacactctggagcaacccggacatggacactcscacagtggccagggccccattctgtctgtgggactgtgggttctcagtggaattgttgcctttcttgtcgtggagaaatttgtgagacatgtgaaaggag

SEQ ID NO: 2847 - DNA, 201 bp, Homo sapiens
acctcattcctcatgctcttgaacctcattctcaccacactctggagcaacccggacatggacactcccacagtggccagggccccattctgtctgtgggmctgtgggttctcagtggaattgttgcctttcttgtcgtggagaaatttgtgagacatgtgaaaggaggacatggtcacagtcatggacatggacacgctc

SEQ ID NO: 2848 - DNA, 201 bp, Homo sapiens
agtcatggacatggacacgctcacagtcatacacgtggaagtcatggacatggaagacaagagcgttctaccaaggagaagcagagctcagaggaagaagraaaggaaacaagaggggttcagaagaggcgaggagggagcacagtacccaaagatgggccagtgagacctcagaacgctgaagaagaaaaaagaggctta

SEQ ID NO: 2849 - DNA, 201 bp, Homo sapiens
gggggccggggactagggatcctgaccacaatgactgtcctgctacatgaagtgccccacgaggtcggagactttgccatcttggtccagtctggctgcascaaaaagcaggcgatgcgtctgcaactactgacagcagtaggggcactggcaggcacagcctgtgcccttctcactgaaggaggagcagtgggcagtgaa

SEQ ID NO: 2850 - DNA, 201 bp, Homo sapiens
ggctgcagcaaaaagcaggcgatgcgtctgcaactactgacagcagtaggggcactggcaggcacagcctgtgcccttctcactgaaggaggagcagtggrcagtgaaattgcaggtggtgcaggtcctggctgggtcctgccatttactgcaggtggctttatctacgtagcaacagtgtctgtgttgcccgagctgctg

SEQ ID NO: 2851 - DNA, 201 bp, Homo sapiens
gcatcaagcaggacctggatgctgtcactctctgggcttatgcactgggggccacagtgctgatctcagcagctccattttttgtcctcttccttatcccygtggagtcgaactctccccggcatcgctctctacttcagatcttgctcagttttgcttccggtgggctcctgggagatgctttcctgcacctcattcctc

SEQ ID NO: 2852 - DNA, 201 bp, Homo sapiens
taaaggcattagggcgaaggtggaacggaacttcctgttctcgcgggatctaaaggcgggactgccacgtccaagcaaaccgggaaaggagaggatcccgragccgcgtgatggccagaggcctgggggccccccactgggtggccgtgggactgctgacctgggcgaccttggggcttctggtggctggactcgggggtc

SEQ ID NO: 2853 - DNA, 201 bp, Homo sapiens
cttggggcttctggtggctggactcgggggtcatgacgacctgcacgacgatctgcaagaggacttccatggccacagccacaggcactcacatgaagatytccaccatggccacagccatgcccatggccatggccacactcacgagagcatctggcatggacatacccacgatcacgaccatggacattcacatgagga

SEQ ID NO: 2854 - DNA, 201 bp, Homo sapiens
tggacagagagggtaacaggaggagtcggggataaacatcaaacatcaatcgtgtgtcctgatttgggagtgattggggggatggggtgggagagggttarttggtattctcatggcctgattttttttgtttctattccttttatatcactgtgtttgaatcgagggggaggggtggtaaccggaaataaagacctccga

SEQ ID NO: 2855 - DNA, 201 bp, Homo sapiens; identical to SEQ ID NO: 2837

SEQ ID NO: 2856 - DNA, 201 bp, Homo sapiens; identical to SEQ ID NO: 2838

SEQ ID NO: 2857 - DNA, 201 bp, Homo sapiens; identical to SEQ ID NO: 2839

SEQ ID NO: 2858 - DNA, 201 bp, Homo sapiens; identical to SEQ ID NO: 2840

SEQ ID NO: 2859 - DNA, 201 bp, Homo sapiens; identical to SEQ ID NO: 2842

SEQ ID NO: 2860 - DNA, 201 bp, Homo sapiens
gcgattggagtaaagcggaccctgtgtaggtatagagttgagtcaagtggagtcactgcctctgtccctctggtcagcgtgatggccagaggcctgggggscccccactgggtggccgtgggactgctgacctgggcgaccttggggcttctggtggctggactcgggggtcatgacgacctgcacgacgatctgcaagag

SEQ ID NO: 2861 - DNA, 201 bp, Homo sapiens; identical to SEQ ID NO: 2844

SEQ ID NO: 2862 - DNA, 201 bp, Homo sapiens; identical to SEQ ID NO: 2845

SEQ ID NO: 2863 - DNA, 201 bp, Homo sapiens; identical to SEQ ID NO: 2846

SEQ ID NO: 2864 - DNA, 201 bp, Homo sapiens; identical to SEQ ID NO: 2847

SEQ ID NO: 2865 - DNA, 201 bp, Homo sapiens; identical to SEQ ID NO: 2848

SEQ ID NO: 2866 - DNA, 201 bp, Homo sapiens; identical to SEQ ID NO: 2849

SEQ ID NO: 2867 - DNA, 201 bp, Homo sapiens; identical to SEQ ID NO: 2850

SEQ ID NO: 2868 - DNA, 201 bp, Homo sapiens; identical to SEQ ID NO: 2851

SEQ ID NO: 2869 - DNA, 114 bp, Homo sapiens
ggagaggatcccgragccggtgagaattctctgttttttctctaccatcctttccaggccttttcctcacctaatgagtcgtagagacgagggcccagagagtctgtaaagtgg

SEQ ID NO: 2870 - DNA, 201 bp, Homo sapiens; identical to SEQ ID NO: 2853

SEQ ID NO: 2871 - DNA, 201 bp, Homo sapiens; identical to SEQ ID NO: 2854

SEQ ID NO: 2872 - DNA, 201 bp, Homo sapiens; identical to SEQ ID NO: 2818

SEQ ID NO: 2873 - DNA, 100000 bp, Homo sapiens
  misc_feature 29312, 29313, 29314, 29315, 29316, 29317, 29318, 29319, 29320,29321, 29322, 29323, 29324, 29325, 29326, 29327, 29328,29329, 29330: n = A,T,C or G
tggtagtgatgacgataatgggttagacatcactttgcacctcttgacaactgagcatcggtctttcctgctttcactcttgcatctggtcactatcctctctatccagtttgttcttatacagcagccagagacatctgttaaaaacatactatagatccttgctcaccctcctccctccatggctttccttacacctaacatcagatctggagtcctttcagtggttccccctttttgaggtttcactttcactttccacaggtttagttacctgcagtcaatcgcaatctgaatattacatataataaggtattttgagaggaagatatatatatcatattcacataactttattataatatattgttatatgttatgaattattgttgttgttaatctcttactgtatcaatttataaattaaactatcataggtatgtatgtatgggaaaaaccagtatatacaggtcagtactatccatgatttcaggcatccactaagtgtcttggaacatatccccgtggatacgaagggctactgcatttgtcaggaccctgtgtgatctggtccttgcctagccctctcctcttctgcaactctttgcctggatccctctgcttagctacatcagccagttccttcttttgcctgctaggccttctgcctaaatgccctcccagctagatcttctcgtatgccacgcctcatctaatcatatctctgcctaagcacccctgtgaaagaactttgtcctctgccctctgaaaagtcaccactcttacttccagttacttctatcagtctggggtctctagaatacagactggaggcaaagtttataagctaacactttatcaaggagaaggaaaatcctagggaagaggtgcagggaaggggaaagctcaaatgctgagcaggccacagccttgtaacaagtgcactgtgtgtgtgctgggcctccacagtatcttcaaagaagacttggggcactgcatctcctagagaccatccagggaaacaagggggaatttgtctgctggcttcctcctgtgcccagttcccactggtcaaagtccagccctcagggcattaactgtgctgtattgagtagcctcttaggaggtctctggggaagccagagccccaggtcttgagtctgacaaatgcataggcatgaggccagtttctcgctatcatttggtgcctcaggcaggactttttttttttttttttttttttgagatggagtctcgctctattgctcaggctggagtgcagtggcacgacctcggctactgcaacctctgcctcccgggttcaagtgattctcctgcctcagcctcctgagtagctagactacaggcgcgtgccaccatgcccagctaatttttatatttttagtagaaacggagttcaccatgttggccgggatggtctcgaccccttgatctcatgatccgcctgcctcggctcccaaagagctgggattacaggcatgagccaacatgcccagccagacaggacttcttgtctgaagtagtggcagtaacagcagaggggaactggctctaagactgtggagatggcatgaacagttaatagggccactcttgctaggaagcaagacaagtaagtgtccaaagccctgtccaggttagggtcaaagaggtcagaatggctgctcagatctagggtggcctatcaactagtccagtaccatcttatacccctgaaggttggatagttgtcttcatagcccttgaggtacccatcataatactgcatattcatttgaaaggaacgtttatttagaagaatggaagctcagccagccaggtagctcatgcctgtaatcccagctctttgggaggccgaggtggggcaattacttgagcccaggagttcaagaccagcctgggcaacatagggagaccccgtctctaaaaaagtacaaaaattacctgggtatggtagtgcatgcctgtagtcccagctattgggagctaaggtgggaggatcacctgagcccagggaggttgaggctacagtgagctgtgatccaccactggactccagcctgggtgacagagtaagaccctgtctcaaaaagaaaagaagagaaaaaaaagaatggaagctccctaaggtagcagttcacctttaaaattagatagatagaagatagatagatagatagatagatagatagatagatttagattttcacattatttatgatctatactggtgagttggaaaacagggtcatgataaaaattatgttgtccctttcaaagaaggaaattggcccctcttttcactctcctcttaatatgttccctctttcatcccttttcctatactcagtagggtatgatagtttgtggctgtaggcctggccatctcatccccaatatcccttgtaaacaatacattcttaagagtagcagacttcagtttcctcctgttatcagacctttcttggtccccttgtgccatcaatccagcccctgtgagtttgctgggaatttgcttggtaacaatgccatggtgagggttttatgttcatctccctccatttttaccattcacattccctttccatcactgcatcttctcatttatcccaacttcttcattaaaattcctacctataccacttcttctttgtctcgaaaaatttccccaatcacagttgtcccttgaatgataccttatctccatgctagctacttttctccctgaaataaagttaaaaacaattatgtagtgtaatcttaagtctaggatcttgaacttactgcctacattcccttaatttctagatgttaatgaattatcatcttaaaaataagcattaatattagacttagaggaaaacttcaactcatagctctgtttagatcagaataactgaacttctataaatacaggcaaaataaaggctagacctttagaactgaaaatggccttagacatgtcgtttagtatgactgcctcccatgacccattcccaattcccacttaagagaaaacaagttctgggaaaggtgtgactctcccagctcactgagccctagaggctgaggcgggagagagaccccatccttgtgcctcccatccgggctctcctaagcacagggctggctcttcagtaaactgcatggtttggtttgaagattacaaaaacattttttgaacaggcagcagaacgttaaattatgcaagacaaggaagactcttcctgccttttcccaccttctcacatgacttcccagtctggcttctaatgggtatttcaggcactgtttgaccagcctagtggggactcccaagggtaagctgacccacagttagtgtgcagatacttttggttggatctggagaaagtgccttgcttcctcctgattcccatggcatgtgtcatctctgagtatcctgatatgcaggtgtaatctgaaatgtcctaagagacaccatcatttggcagtagtttttcattatattgttgtgtttttggtaaggattagaaatagaaaaagattttaaaccagcaacgtaaaaaaatatttgggttgcttaaactttttgatctgtaaaagtatattaataatgtttttatgtgtgtctctggctgaaccactcaccaaaaacgagtggggctggggggcagtaactggaatttatgtttccttttagctcccctattccaacttattgaattacatgaagttcaaaacttaaccattatttcccctaagaatcctagttgctattgagaatcagtatgcttgcaagttctgaaacagggtttcaggcaaattttgaaatctcagtgtgaaatctagcctattttccaatttggggtgtactattaaacaaaaaattacctgagaggtaaaagcacagagcaattcaaagaggtgtcaaggttactggcatctgatgcgcttccctggagccttgttttattttgtcattcacacttcacctttctcattccgaggtacttttaatttcactcttattttatgcacagtagttaaacagctcacttcagatgttagattctctctaaggaatattccatacatctggtttgcagcaactaccttcttctccttcttgggaagcgtgtagaagttcagtgcctgttcactgcattaaacagagctatttctgatctggtcaacctatagaccctgatttacatatgaccttgagttactaaaaaacaaaaaataacaaagtcctgctttgattatgtaataaggccactaggctgactcagggactttgtgatagagctgagaatagaaatctgcttttccaaatacctcatgtcttagaggagagccgaatcagcctctaagccatggtgtacgttcctgaccacagacttagaattacatttcagagggggcacagcacatttccaaacttccctgcttccttttatactcattttctcttttctgttcccaagatgaaaagtgccatcccttccccagtcctgccatggagaatctggcccctagcagccccagaagttcagtcatggtggccttggcaaagattcatagtcaaatctgagagagatcacactggctagggcccagggtcactgaggatgtagtagcctttatccttctgagtaaaatcatggtatccacatgggaagtcaaccaggttttgtccaacccctcattttacaagggggaaactgatacctacagtagagatacgattggctctgcattacatagcttggcagtatagagggagagctggaccccagaccaaaactgtgtgatgccaagaccgcgctggcccatcactgctgtatctctagcaactattaatagcacagtgcctgctgcattggaggggttcgcggcaggaaaatctgtggaaggaaaaaacaaacgtaatatctctttcttcaggtcagcttccattattcttccccttttccttatatttaactaacttcatcctcagaaaaatccccctgtcacctccccccggccaggagagattacagaggcatggacagaacactgttcacctagccaggaaggcccctggtgcccacgcagccagagcaggaggcaggccctcagaaagtccctggccatcagcctggcctgggtaggggctccctcctaagtttcctgccagactgaggtacgtatgaccatttatgggcccctagttgttacaaaggtgtttccagttcattcgggaggaagactgatctcaaaagctgctgatgttaaagagggattcagaaaagtttgggagcccaggcttggggatgggatcaggatggggaaatatcctgttctaagggagaagggacccttgggcccagctaggtcaggtaggcaaatgtcacttgggattgcccctgtatgccctgaagtcttaagattctgtagttggaagagggaagattcagaaaagagaaaacctttgctgttcccaggttgttgggtctcaacggcgggggatttcacccactttgtccccagggacagcttcctgctgtggtgtaccggcccgcctggactccacgagcaatggccgcggattcagagacccctgtgcgcctggagagcacagctttggggaacctggcccggaaaggagcctggagggagcagaggtgaagaggggctgtcacttgccgagctccacgctagccagaggcaggagcctacgctggccctcctccctccgggccctagatggccccagcgctcccgagtcatcgcgcccgcgtgcgcgcccgcctgctccgcgcacctgccgtggccgccgcgcgggtctgaccgctggcgggcgggcggcgcgcacaggtggcggcgattgggcaggcggggcccagagggtgcgtcacgggctccggtcccggcggcagaaatagggcagccgcggcggcggtggcacagcgcgggcagcggcggctcagggagctggagcctcaacagcctccagcgagcccgggacccccgacagcccgagaaaccagccgaaggacgcggggcggggtcgccgccgccgccacgggtgctccctccctcccgcccaagtccggccacctggtcttcccctcggccccggccgtctaggtacgcgggcgcagctcccagcgggcgcggggagggtgccatgtcgctggcgccgccccagccggtcccgctgcaccccactggggtcctggcgcccgcggccccgcatcttgctgagggcccggcgcgggcgcttgcttgtccttactgcccgcgccgggaaagccaagtttgccgcggggaagggaccgctgggccagggctcggcagggctaccccggccaaggccaggaccgaggagaggctgggacgccgaggctcgtggccggggtctacggtggggaccggagtgaccggttggcacgccgggcgccacgcagaagcgctcgggccgagcccgcagctcgcgcccgctccgaaatcctgcaggcgccgttcttgggttcaggaccccgagcggccccggcggagcaggcgagcgcggcccctcggcccgggcccggtgcccttggctccgggttggggcgccggcaggcattctcagcacctcctccccgcggctttgcggggaaacttgcgtctcctcgctcagcccaaagggcccgctgcgcttcgcctggccctggcttccccggggtccgccgcatggaggctggggaggaaggaatcagggcacgacccgactccaggcagcctgcggcgctgctgtgcgtagccggccgcggtccagagtgagcggcccggggtacccgcttgaacgtgtctaggagcagtgtgttgggggcgttcagcgttcgggctgggggcttggtcctaagagagcttcactgtggatgatctccgccctctttgcgcccgcaaaacaaagacgagttctgagtttcggagggacctggacgaggcaggcacagcactctgctttcggcgcctgtcgcctcgagttggggacgagctgacgctagtctttggggctccctgcagccgacaaagcggcgccaacccaggcctgccacctgaggactttgtgcccgcaactcttgcgggagcggaaagccgccgagcagtggggtttcttgttttccagagcgcggcgagcctccgcgcggcgcggcaagtgcacaggagtgcgcgggtcagcggggcgggcccggcgaggtcggtgtcgcggctcgagagcggtgccggggcgctgtccagcagccctcgctcgcggccgcgggccgccgacactgatgaatgcgcggccacagcccgccgctcccctctaggtgtcgcttccgccgagctttcctccagtaaaaacagcgccggcagcttggtctgttaccttcgtaaatttgttgcaagcctgtgcacaggaattgtactagatggggcccccgagatacaaacatccgtccaggttctctgggccaacgtaaacagaatttcaataggtggtgaagtaactgccagccaaaatgttcaccgggaagggcctgtgtcacaatctgtgaggggaaaagacggatcagtgagcgactaggactcttctgaaagtcctaagttattttcctactgccaaatttaggggaaaccagcgatgctttttatagtgtcttcttaatcctgggagccaggcgccagtttctgtgcctgcccctctggccccaggacagactctgggtctggttggcggggggtccacctgggaagggaatggtcggaggttgagtgatgcagcttctgagactccagagccacagcaactctcaggcaggagctcaagcggacatacgagcagatgccctacagggcacgtgtctgcttcccatcttagcgttgtgagaggaggcactgcagcatcactagaccatttctgccatactctgctaaatgttcgcttttccctcccatcctaggaaaaaaaggcaccaccctctccaaagacttcagactgagccaaattcacataagaaaatagtccactttgatgtaatgtatttaaattgctcgttagagttgtctagtgcttttttctctcttagacttttatgatcatcctcaatttttgttgattctaggaagctctttttcttctggaaaaggccagcttgtttttctgggtattaggagaacttttacctttcggctgtgccctggaggtgggtgagggaagaggaggttggatttttccaccatgccagtcagtcactgaggactttttttccttttactaagggccgtaggactttttaaatggaccttcacgttatgatcttttgtttgacttaacactatattcagagactagcattgaaagtcattgtttcataaaactaccttaactcctaccttgccttgtttgagtgtttctctgaaactcaaccttcttgagttgcttatgtgcggttagttgtgtgcttcctagcttaatgcattagatatttcaagagcacatctttctttacattttctgtctcaatgcataacataagcatggaatttccaataaaatagaactgcaatcaagagcatgtggttcttaagaggtatggctgaaggttgtaaggataaaggttattggaagtcacatgtgtgtctgtgttaaacgtcgagtaaataggaatagagatttatacatggcacatagaataatgtagccatctaatttacaagtgttggggaagaattaactaatgatatagagtagataattaataggaaatgcaattaacttcattagggcttgctgcaacgttagcttgctatatctccatgcctaatttccctggttggtgttttagggactgtcttaggaaatctgtaccactttctttttttctaaaacatcacatatcaaaactagggtcgtaagcctttgagaggttcccgtacagcctcctggtttacgctggggttgatgtggctttttttccccctttaaatttgagcagacatgcagaagagattccacgttgtattcagtcagtatttggaattccagaatcccagttgatttttatatgtgattgccaacatgccatgtatgaaatgctacacacctacagtgtgtgtagggcagacatttttcatttggaaaggttgagaatgcagatgcttcagggtcacaaatctgactgttctttcaaggctgggtggcattgcttggttctgccaaatcatctttgtaatttctggtcctgtgattacaaaaagaagccatttctgtatggctaatccttaatggctagtctggtaaagtaccaagttctgggagagaggctgagagagagaatggatgaacaatgccaccgaaactctagggccagaattcccattcttcccaacagggctgtttcctggaatagaaagagaagttttattaaacccattgccagtttaatgggattgcttctctctggcctatgaacttggtcaaaaagacagcttacatgcctgtgtgcgttctctgggtggggcagattttggtattttcattgaatacctatttctccctaacaatttgcattcctatttcatgctttttcagctttcttaaaaagcaagtcagtatttggaatgttacatcatactaacctgtaatacctctgtaatttaaatacagataaataatagcacagatattagcttattttagaacacctgaaaatcctgggttttcacaaggaggtagacaatctagtggaggtccttcagcattgagaaaagcaaaactgcctatctaaacaaagaatccaaactcccactctagatgtaagtgtgccataatataggaaccaaacagttgccctgggggcaggatgcctgggttccagtttaggcctagccactatttgtccttgaacctgggtggattcgtccaccttctggtcttctggtgtcctatctatcggcagccaggttagcaccaggttctcctgactgggggaatgtctgttgaagctctggtggaaaccacaggggaagcaatgaaacacctcccttccaaacaagatggttaaagcatcagtcagtgtactttatgacttgtttggaacaaaaggtagtctcagctctttatatggggaagtcctaggtagatttataattaatacttagggcttagcaaggattgaatgaaacttataatctaaattgatctcaaaaggagctctaggtttaaaaggggatttgtgaccttatggaggcaccttcccaattctataatggggagattcttgcatttgcctctatctgaaggccagaggactatttgaatttgaggagtaattaatttgttaacagatttacttctccagagtgatagccttatgatgctggtgctctccgtgagctgaggggcatcggcctgggattctgtgctctttttatggttcccctccctccctccctcccttctttccttctaccgtattttttctagcccataaatagagcagcagtgaggactgaggagagtctgcccaggggcccccatcccgggtagaatgtgggaattaagggtgagcagcttggctctctgcccttggttggagccataggaggagagtagctcgtggcagctttcagaggaaaggagagtctcggggccagggcctctatcttactgtctctagattttccccattatactaaaaacaactgtttatcaaaacaaacaggcaggacaaaacaaaacagacaggcggcagcaggtgggagttaagagaatagatgcgtgggtctacgtgcctgacttggaatttcagttttgccacttgtctgccacatggcctggcagagtccttaacctctctgtgaccccatctcctctttcatctgattgagggataatattgcccccatcatggagtagaaaaaggagggttatgagttaatacctgtgaagtgcttgaacagtgcctgacacatcgtaattgctatataagtgttaaccaaatagatagtctctattgattattagacagataatcaaaattgatttagacccaatattaattcctttttatgactgaactgtcataaaacttgagctgtaaatttccaggctgttggtgctgtagatataataattgtcaatcaccgttaagtataaaatgacatctaaaacacatccacagtgcaaatgaatcacagctagtggtagacagactgagctaaactttacaaacaagctgcccaggagtattcagtagttggcctggctcatgtgttttcctgtttccagagttttcctgtttccagataaatcttacaggaaatataaacacaaaccagataaaaccagtggcaactccaggccaagcccaggcttggatcttgggcctcctgaaacacaacccagaaaccagcagtcttggtgcatctcttatgaactgatttggcgcttgccaaaatcacagttgaaatgaatatattttatttaatgctacccattagtaccaaaacataaaacataattgatcttagattacaaagcagataaaagttaaataccagattttgtggcttatgtatttcataactccaagagttgacatcttacattaactagaatagatttggattatcttgctgtttttcgtttatgtgagctaggagcatggaaagggagaaaagtagaccttgctctgtgtgtttactctgtgagcaatgtttgaagtagataagtaggacaaaattaatgagaataagaagcaatgtctttctagttctagctaaatttctatggctggtttttaaaaattccaaaaatccactcgctgttttctgcagtcttggaaagtggctctgcattcagaagaggattacttatggagaatagggagttaccttgttatttttagaaaaatgggttgcagctcagctgggcatggtggctcattcctataataccgcactttgggaggccgaagcaggtggatcacctgaggttgggagttcgagaccagcctgccaacatggagaaaccctgtctctattaaaaatacaaaattagctgggcatggtggcgctgcctgtcatcccagctactcgggaggctgaggcaggagaatcacttgaacccaggaggggaggttgcagtgagccgagatcgcaccattgaactccagcgcaggctacaagagtgaactccatctcaagaaaacaataaaaacaggttgcagttaggggaagacatttttattcttgtcccgaatatgattttcttttcctgctccttctccctgtaagatttcacacaccctagtagatcactggatcaagagcgcagaagccattggggggcaggggagggagtgccgtgacgccgcagtcctcacagtcctctcccgggtggcagctgaagcggcattattccactcaacctgccttcttcagagtgtggggcaggtgctgatggtgagactgtgaccttcagattatattactgaccacccagactcttttcctggtagctcagctttgtcaacagatgtcaaagatagtgaccgaagaaacagatataagagtgggagcttatggactctttttaaaacaagcagcaccttctcttaaaagacagtcatgccttataaccttgccttttcataggccagtgccaaggcccacaattttgagtctgacttctcctccctgtgggcatttctgtctccagctggaacataaagcagatgtggagaggcagctctatttggatgtggatagcagccaaacaaaactggaatgtggcaggagtgtaattgtttgccagccctggactcagcactagtgactatgtacaacttccaccccattgtctaaagtagggatgctccaaagctgttgcctatggcagtggcagggatggactgccaggtccctcaagcacccacttctttctgaattggatgtctgtttggaccagccctaagccagttcatgctggatgctggcctccaaggagctccggtgtcttaactcaccagcctagatcaggatgcagtgtggaccatatgtgattaagcactaaattgttggtacaagcagaaatcaataacccctaaagtttccttgagtaggggttctaagtactaataatgagttgtatctggttatgtttcataatcagaatactgaaattatggttggactggttcacagtggaaaactttttccaaaaaagtacagcttattggacaagtaagatagtcttatcctcatttcctcagcacaatgcttagcacatgatttggacttgaatatttgttgtactgatccttagttttttcatccatgtgattatttgattaccttgaattgctcacttctttcttttaggactgtatacagtaatgttatcaagtgagcctcaggaaacacctcaaaggtattgaaattctgttatcattggatgcttggattctgccacaaaaaatggttggtcttgaactaagatattagaccttatgatgccattttgaagctcactgtcttataaactgaggtgcggctgcaaatgaggtgccagagatgtaacataattcttaatcatcatttctttttttggacaagagtctcactctgtcgcccaggttaaagtgcagaggtatgatctcggctcactgaacctccgcctcccgagttcaagcgattctcctgccccagcctcctgagtagctggaatacaggtgcctgctaccacgcccagctaatttttgtatgtttagtagagaccgggtttcacatgttggccagactggtctcaaactcctgacctcaagtgatccatctacctccgcctacaaagtgctgggattacaggttgtgagccactgcgcccagccataatcatagtttctcggcactaattgtgtgcctagccccaaatgctttctcaggaaactaaggcgtggctatatgcagcctaatagaggtgacccacctgcctcaccctggtttgttcttatagatgtaacggtggtggcatttcaaatgggtttccacgtaacagcatttatagagttcttactctatgcctacactaactccttcaatcctcacaaaagcctttcgaggtacatattattgccattttagaataagtaaactaaggctcagaagtaatataacctctccaaggtagaacagaagtttgggccaggatttaaacccaggcttatctgattctggggaacacatactaactcactgtgactattatatccatctcataatgttttattctcagcatttgtcatttcttcaacagactcacaaaatgaaaccaggaggcttttggctgcatctcacactgctcggagcctccctgccggtgcgctgggatggatggacccaggaaccagcagaggcccggatgtgggtgtgggggagtacaggcagaggtatagtcaaatccctgcggacataacatttcaaactgattgctttccgtgttacagtatctgatttcccctccacctttagtttagatcagttagatcacaaagtgattaaaattgcacttcctttttggtggggacagaagaaggcaacctgtgtggatacagacagaggttgataacacgacgtgagtaatggctctaaaacctctcagatgctgaaagtgtatccgaaaccaagcttgaattgcctggttagtctctacaaagaccctcaggagaatggccttctgtatatttaataaaactctgaaaatgcagagtaattggtggagcacacccatgtgattagtgaagtattttaattataaaatatatttgaaaagaaatggactacttttcaggttatagatagaaagcaccaggctgagaaagaactggcaagtggaggtcctaagggagagtctttaatgaacagataagaatgattaatggcatgttaggtatatataaatgcttctaaatgcttgaaaaacttgtcctcaaatacctccctggagagtctggatgttctgctaattgctagtgaaccctggtcttatgtagtaaagaggatccataaactgcaacctggccctctccaggtagtaggtcccatgaatttggggttcatgggcaaaatgtatttttctgcagaaaatctttgtgtgtgctgactcttaaggaatgacttcacccttccattaaaaccacctgggatttctctatgctgtgatgaatactaattcctaataggcagctttccagggcacttttcctccattgtcttccttgatgcctgccgttctctttttctttgtccctgtttcctgtcctgcgaatgagaaataaaaattacctcaaaaagtcaacattcccagagagtgaataaggttaccagtgtagggtaggattaatgcattatttgatcaaaagacatgatttctctttcattatacttaattgtaatgcaatcccaaacctaccagccttaatctttggggagcctcagaagtatttaatgtacacttttcctgcagaagttagtgtgccttccttttgtggtgagcagatgttaaacagaaacgctatctctgccgtctaaatccatgaaggacgcaatttaatgctctttgaaagagtctggaggctggcttgctggtgagaacagcatttcccttatgggaacagcttatcagtacactcatatccataccaagagaaaatgatcacttaaatcctacacatatatgttgaatatttaatagcaaagcaaacagacaaacacacaggtaagcttagtcttcttacattggggctcatcggcccactgttttaaaccacttatttcaaataaaagtatcaagtcattaaggtgggatttagctggaggtaaattgaaggtaagttaatatcaacccagggcctcttatcttagctgttaacaccctaattctttgtgtgccaacaagaaggagcagatgctggcattgggaggaagtaacgctttttgggggttgttatcttgctcccctgcaacccctgctcagggtagcttttgtcttccaagtccaggaatgttgctgcttcaggaaagggaggtgatactgtgtagattctgcaccacaagaactattgccctattgatcatatatatagttttttctatagcttttgtttttgcagtattataacttctaatcattgaaactgtttctatcagtattaaatgagatgataataatgggaatgggcctagggcttaggatggcctaggttaaagtttagctgcagagaacagaacacttccaggtacggtggctcacacctaataatccaagcgtttgagaggccgaggtgggcagatcacttgagcccaggagttcaagaccagcctgggcacatagcaaaaccctgtctccactaaaaatacaaaagtgagctgggtgtggtggtgcaccctgtagtcccagctactcgagaggctgaggtggcagtaccacctgagcctggggaagtaaggctgcaacaagccatgattgtgccactgctctctagcctgggtgacagagtgagacatgtctgagaaaaaaaaaaaagaaagaaagaaaaagaaaaaactcgaaggaaaaaaaagaaacagagagcagaacatttattttaatcggtttgtttgcagcccttgctcacactctgtcatccctccatgcacccccatgcccctgcccaccaggggcctcgtgcagagcgtgctgctctcctttctatgtctttgctttctacacctgactctcctcctccttcagggcccagcctggttcttactttttctttagaaccttctttgaccactcttggtcacacctggtctcttttctgaattcttagtccttcctttctctttttgttttcttactcttttatttttacgtagcatatggatggagcctgtcttatttatcttttcttccttacagtgcctaataatttttaagcaaaatagaggtttgatgcatttttaagccaatcgatatttatgtgacctttggtctggtcataaagtcactctggtgcttccaaaattcagaccagaccatcaggtatttcaggcagggcatacctccctgcacagcaggttcattcccagtggggacgtggatggttttcccagcaaatctgtgagcagcctgcaggccggacaggcttgcatcctaatatccaagatagccttgcgtgttatagtttctgggtagtttattatttgaactgtagctattaatgtatcgtaactcacagtccaaaccatattaaactcctctagcagtttctgcagacagtcttatttctggaagaatcaaaaccagcagagtttcctgagactctaaataagtgaaaaacctttttaggaaccagatattaaaatgtttctgcatttcttcccagtagtagtacttcacacaaatctcattgacttaagatttttaaagtacttagaaagcgttaataagatttgatttaccttaaagttattataccaattacttgattgacctaagggtaaataagaattaaatgaccaaccgtgtgtgtgcacatatttttaaagcaattatagcaagtgttaaattattgttttatgtcaaagactgcagtggaaatagtttcaaggagtttaccattttacagacatagataaaaaaaatacagctgggtggagtgcctctttcataagagtggagtggcagaacgtgccctagatactaatggaattctgaattcagaggaaacaattctgagaggtacaatttattgaaatatgaaatgttgttatatcccccccccctttatcctacacagatgcattttgacttatgacggattacatccaaataaacccactgtaagttgaaaatatcataggtcgaaaatgtatttatacacctatcctaccaaacatcgtagcctagtctgacctgccttcagcatgctcagaaactgacattagcctacacttagggcaaaatcatctaacacaaagcctattttataataaatattgaatatcttatgtaatttattgaatactgtactgaaagtgacaaacagaagggagtatgggcacttaaaagtacgatttctactgaatgtgtatcattttcatactatgctcagttgaaaaatcctaagtcaaaccaaacctaagtcagggactgtctgtacactggtcaagtaaatatagtagtaaaatcaatattgatagaattctgtatttgagggggaaccaaggaacaggaaggggtgagaagtgatatggtagcagcctccagagagcatacctgcttttgagaataggcatttgtgggagccccccacttttggggcctgggtgctgcagtggccgccccccacttttgcagcctgggtgctgtggcgggagcctccccttttggggctagggtgctgccatggagccaccccatttttggggcctgggtgctatggtgggagcctcccacttttggggctgggtgtcgtgttccagcaccagcatctcacccatttgctgggctctgagattgaatgggggcgttacatggtcttatacgtctttcatgcattttactgaactttttctaaacgactttacccatggcatatacatagtcacgtactacatacctgtacatgttaatattgattcttcttaaattgtcacctcatgtgcctcagtgcttatagaccagagataggttttgagctcgacaccatgggttttcagtatttgcaaattctctcaaagtaaagtctttgcagaagaaaatgtggagtggtgtcagctaacttaaacatgattccccgcctccctaacctcaggggtcgcctaagacagcattgatcctaccctgactgaccggccccttccccttgctacaagtgtgatggcaggcatgacactcctgtccccgcgaggcatggcaacctcaaattgcagagtccttagatgctccgtggcttcgttccgccttggctgggcattcagtagtacttgggctgctagactgagcactgatttttacaaaaacactttcactgttcttatgtattcattgtcttacgctagtgtccctcacccccaaccaccctttctgataaaattctccccaccacccataacctgactgtgctctttgactgattactggggaagaacagctggtcgtctgtagggcttggatctgcccgttggtgtttgtactcaccctggccctcagctggtttgtgggcataaataaaggaactccctcttcccggtgaaccaacgggggtccaagctggacgttcgcattttctaagcctcacctacagtacgtgtgcatctctcatggcttttctgccgcatcacccttgtgtactcaccattgcaaattctagtacttgacttgctttcaaagaagatgagaccctgggcaggtctctcagcaagaggcgagaatggtctccccagggccgtggacccctgggataaccaaccacgtactcctttcaaaaggatccagaacttcctctgcaggtgcggtgctggttgagtgggggccacttctctgggcccctaacacttagccagggctttctgctgattattctggtcagaggatgtggatattcgtttttcaggtacaactgggagggcacaacctcccaccttagacgttatcagtacatttataattttcaaggcaaatgatggtggcagaacctcccaagtctcaggggcattgggattaacccattcccaattgcagaatggggtgtgctgtaaccttgccagcacctcttgagatgcaatgtgcttgtgaacggtctgggatcttgttaaaatgcgattctaatgcagcaaatctgaggtgggtcccaagattctgagctccaggtgatgctgaacttcagatcctgggggacactgggaagaaaagccttagaggagccccctgcctcctccatgcacacacacaaggagaatcccagttggattgactctggcctttttttagttcttgcgacatgatgctgactgcagtcagggaaaggagagaaatgggcaggctgcagtcatgctgaaaatagcttgatgagactagcttagtgggcaggtaggtgatgggaaagatgaacttaacaaccttggttctagggtcatttgcacctgttttcaagcagctggacaggtaactctcatcttggaacccgtggctcctccctggcttgtctgtaggtggttttaaattctgaaagagtgattttaaatgctgaggcttagcccacaccccctgctccaaggaccaacagcgcactccttctcgcttaccaccgtggctccccttctggtgtcctatcccatctctgtccctaggccagccagcctgttttggggatgagcattgctgcattggtgagctgttttggagtcttgttttctctttatccttgaacagggaaagtcactgtctttgttctttgtgtcctctccactctcccagccagcccttccacactgtaccagttagtgcactgtgtgcctctttggtatttgagatcatagttgacaattttaattggccctgaaaagttctgtgacccaggaaaatgagatttatgagttcacagaaacccattatttttcttcctcttaatttagcatttacttgtcaactactttatttattcctctgttgctaaattatctatactcctgtaggaaacttcccaccttgtaatgaagacatcaggctgtgcattgtaaatggggctccaatttctatttttcgggagttggcagcacagatctgccaagtcccaatcatctgcttgatttatcccctacacctgtgggttgttgcttttgcttcccatttggatggaagtaaatgtcgtccttgtgtcaggaggctctaacaaggcccaatgagtgggctctactcttcaggcctgccaagccagagccatgtccttctgcctccatggctgtggtctctgccactggctcctgggctttgtcttgtcacagccacctgggaggtggagcatactggaactagacatggaggatgtgggaggatatggcccagtgctctgagcaggcgacaccgagaacactgtggtgggtgctggcacattggtgtggggggaggaagtgtggccaggtggctgagaagccatctgtccaccagcctcgcctctccttgatgggtagccatcctttggggcattcccttcagtcaggaaggtctggaacaagagaacccaatgtctttcctcctaataaaaatcagccttgttttactcctgccaggagtgtggctcttggcagaggtgaagaatgagtgtgagtggcctgcggggctgaggtcttccctcatcacagggtgagtttcagtttgatcttgcacaggggttggggttgggagagctggtgctgtgcttgctttggttaggagactctgagagcattgtcttcccttggtcggtgggaccggctaaggtagcccctgtctacctgcttgatgttgtgtctagacactgagcccttggctttcttcctttgttccaagagggccttgggtgcaaatcaaaacccttctggagggcttagctgagacggaagctgccattgttgcttttgttaaaatactttgaaggttaaggttttgtgtatttgggatctagattgaaaactgtgtgtatttttctttttaagagttgagaatggaagcatattctatttcttgcaaaagccctttccagagaatcagtgagaccaccagtgagtcttgatgcagctgacagaagcgcctccccacctgtgagggagttggcctagcctcagaggtacagacgcctccagcacaacccacgcttcagccccagccaggggcctgggcccctgaagatggcctgctttttcagaggacgtctcttccctgctcaggctgaaagtcctcagtgctttggtggcctgcttggctggtggcagggctagctgctggtataggcaggctgatgtgcacgctctctaggctcctgggagaaatggctgctgtcctcctcccccaccatagaaccctgtaactctcaccttgtgtgtttcatgttgccactttctcctccaggatgtttgttgttttaaaccccacaattggtttttcctgttggggctaaatcactttgcctcttgcctgtgctgcgcctaaggcatccccggccctgcctttgcttcaagtgcaccctcaactcagagggccccgaggctaaaatctgtttgttccctagccagctttggagctaagggaatcgccctctccacctttaggtttgccacgagtgaaatacaggcaatataacaataccattttcagggttgtatgagcactaagatggtacatgaggtgcccggcacagattgcctccacagaacacaacaacagagctgtggttttgtgtttgtcatcccagaacctcagtcagtggctgtcaagaagatgtgcgcccttcctgagccacagtctgatgtgtcaacttcagctgctgcagttcttgtcctgctggccatggccacatatcacgtagcaaggcagccctcagagtgggagggtcctcttccagtggagtggtaaatatcttgggactgggccccatatcctcagtgtccagaaagccggcacacagcaggatgttcagatatttgttgaataagtgaacgagtcagccatcttttatattccttttgtcatcgtatggggtttggacaaggtgtcttgagttttgggactccttaataagaaatcccaggagatagtcactggactcccttgggcttccacatctgatagaatccatcagtttcaaatcttcttaactttcttcttgaaccaggagaggcttcagagaatcgttgggatgtgtgtaggaacaggtgggaccctgactcagttgccatccccttcctagaatgctttgagggcctgcttggctctgactgtttcctctgcagaggccagcatcactggcaggagccagacccttgccaaaaccatgaatccagagagtgaaatgtaaagtcaaacaaatgcggatgctttgtttgtgcttagaattttcagggtcagtagaaatagtctgtggctccgggtaggtggttgccagccatcctcacagagggcagaaaggagcagaactactcttttaaaagtcattaagtaggtataagactcctgatggctttccttaatgccagtcttaggacaattaactgaaagcttgtttgagctctgctatcatttaaagcttgctctctaagtaaagagaaagaactctttttccatttatttctctttctggccttgcatttaaacgtccttgaaaacttggtctctatagaaaagatgtcaaatttctgttggttctgctgatgccacattttgaattccattccaggtaagtaggctttcatgtggggatgctgggaggtgtcaaacgggagaggctgccaggcagatactctaattagagtggctctaaaatatgccccatggtgcctcctctcttcctctgctattttctgtttggttgttactgctgttctcatattagcatttgaagaggaagagcaggcttctggccgggtgcagtagctcatgcctgtaatcccaacactttgggagccaaggcggtcagatcacctgaggtcaggagtccgagaccagcctggccaacatggcgaacccagtctctaccaaaaatacaaaaatattagctgggcatggtggcacacacctgtatcccagctacttgggaggctgaggcaggagaatcgcttaaacccaggaggcggaggttgagtgagccaagatcataccactgcactccagcctgggcaacagagtgagactgtctcaaaaaaacaaagtaggcttctctgcttcatgcttgagtgttcatgcctggcagtatggcttggatcatatctttgtgtcctgaagcagaaattcccatttgactttctcttatccctaccagagggtctctgagccctgggctggcttggccaatcgggacatctggttgacttaaatctagtaatcaacagacacccactgagcacctagctgtgtgcctggccctgtactaaggctgctaagtggttgaagagaaatgggatttgtgattctatccttgaggcttgagggccattgggtgggggtgggaggtaggagcaatcagctgcttcagaatggattccaagttagcagaggaatcacctacattagttaatgatctttttctagtctgtatataatgtcgaaattaagtctcaactttagcctaaagaaaagtgggcatatttattaagtaataaagaaggaagtactctttattagaaagaagtacatcttaataaagaaagaagtccatctgcctcccggattcccacgcctggtcccaggacacttgtgctcatagtccagacattccctgtccaggtgcattggctgatagcagatctggtatcacaggtttgtcctggcccctggctcagctgttctaagtccttaagagtgcgggttgggggctggaggaagccggaagtctctaggtgtcacctgctaggatggacatagtgctgaatgcagcagccctctggtgtccagaacctccaccagcccctcctttaccgtccttcaacactccctcccaaaacttatccaccagagcctgtactgcttgggacctctcccctgaagtggttccacctgatatggctgtgttcttgttggctcagtgcacctaagctctcctcagaggacttgggctggcagtgtagaggatgtgggtgctcattatagtggtggacaagtttcagggccaggggtggtgttgaaagagggtgaagaaaggggctttgaggttctggacacccacagggcagccacattcagcactgtgtctatcctatgtggggacacttagagactcccagcttcctctgtcgtccttcatcttgcttagggtactgcagctgtgacactaccaccccggtggccaaaactgtcctattggaggtcttattccttgctgtgagttgcaccttggtccaggtatccttcctggtccaattgattgtggccaattgtcttacccatttagtgttgctataaaggaatagctgagtctggtaatttataaagaaagtaagttatttgactcatggctctgcaggctgtacaagaagcatggccccagaatctgcttctgggagacctcaggaagcttccactcctggtagaaggtgaaagggaatgggtgtgtgtagagtcacacggtaacagagcaagcaaggtgagagtgagaggttccaggctctatttaaaagcagctctcttgggaactagtagggtaggactcactcattgctgcaaggatggcaccaagcactcctaagggatccaactccatgactcagacacctccattaggcctcacccccaacacgagggtcaaattttggcattaggtttggcgggggacaaacatccaaaccatagcaccagtgtccagtaattcttaggaacagaaacacttttatgaccatgctgactagaacaaaatttctgtgattcgttatccattccagatgagaatggtatatataatttaaatctgaatttatcaaaatgactgttcttgtgttacaagtaaagatgatcatgaactgcactgtacaagaattcttatctgatatctcaccgtgggattatgagaaagaagaaagaatcatcacaaacagtttaagaatgtggtgagcacaatggtgagcggcgaatgcagcacaaagcatatttagttgcagcacaggccaaaccgtgggtgacgtgagaatttagcacagaaatgcgctgggtggaggtgggattgggaaggacctcttggaggcagaggtacttggagaggaagaccaggatctggtgggcagagtattagagtatttaaggaggagtaaccctcagagtctaggtgtagggtgaatagggccatatctgtcaggaggggaaaacggaacagattggttaaggtgggtatctggtctgtgagccaggggattcatcagggacgctttggtggccaggagcagaatcgcctgtaacatgctcatgtacaaagaagggttgtcatgaggccccagaccttctcccaaagccatggcaggatgccttcatgggctcaggcttagaggcattggaagtctgtctcccaactccttctgagccacactgtctcccttctccatttctccctcctctgcttgttctctccagagctggtctttccagagagctctgagtgtagcccttgctgcagctctgggccccagactgttcatttgagttctgtctgtatcctcaggttctcaaggggcagagccttattggctcagctggggaaatatcttcccagatccatttgcctgtggccaggaggcaggtcccagtgggtgggggccctccaggggctctgaggggaggatgtgggtgcagcgctgggtggctcttgtgaggagtggcaggaggttattgtgggtggaggacagttggtgaggctgcagagccagcctcaacctctcagcaagcacacagagaaacgtgagccaagtttgtataaacatggggcatttatggagttgcatttttggatcttcagagcaggggttggccctggcagtaaggcctgcctgtgctgttaaatctttgctcccctgctttgtttgcctgccttcctctccctgtcttgtcgcaccctcgccataccctacctcaccaacccggcctgtctgtggctgggcagctcagaacccaacttatccattcctaggatgtccctgcagacaggctgtaaaacaggcttggcctcacaggccgacttgcattttgccagtcactaccctggtcctcccctccatcctggtgccatgcccttggctcctggggtactatggttggaatgtgttccccaaaaagcatgtgttggaacttaatccccagtgccacaagttgggtgatggtgcctaatgggggtgtttaggtcacgaggctccatgctccatcctcaggaatgccgattacagaagggcttgagactgggaattgatctcttgctctctgtctttgacctttcaccatgggagtatgcagcaaggaggcctttgaaaatgccagcccctcaatcttggacttcccagactccagaactgtgagccaatacattctgttcattataaagtacccagtctcaggtattctgttatagcagcagaaaatggactaggcagcctgtgtccccgcctgacccttcaaactcactaaaggggagcaggctttggtgccagttgtggccctgtgactccagagatacatatcctgtggctgtagggagctccttagtcagctgctttgaggtttagctggaatcattcttggaaagaaagaggggttacatgggagggagtcatggcttgaccagatgcctcttcttagaaggtccaccaccctgccaaatccagaagcaaaatagttgagctgctgtgggataatttggcctgtcatcatggaagacaagatggatagatgcactccccacctccccagttctgaatctcagctttgctcccagctagatacaagtcttattgcattaaaaatttggtttttgttgtgatatctctttctgtgtagccaaggttagagagggctagggaaccagggacatctctagggtgaggatgaaagggggcagtgtatctggagctctgggctggaagtctgaatggctcctcttatccttctcttataagaataagaggaagatcatgccactgcactctagcctggtgacagagcgacagagcaagactgtgctcaaataaataaataaataaataaataaagaggagattcccaataggaattctcattctaatatgaatttcttaattccatagctattgatatgatagaattaataaacagctttcatttgccaaagcactaagtagattaattcattgacttctcaaagagagtctatgaggtatattaatttgtttattttacacatgtagaaattgaggcttcaagataagtgagctgtttggatctcccatatagtaagtggtggagccagggtttgcatctggctttctgactatctagatgtattcctaaccacagtattgtgctcttatccccaaggacatatttttgaatctaggaaaggacatttgatgacattgagctttggaaggccaaagcagacaacgtcacatcagagaggcatcccctcctcctggagggcagcagagtttgaggtggtcttctggggctgggcgggggtggcctcttgaccttctgtggggagagatgagttctgcccctattccccctcctcccaacaatttctcttctttcaccatcaggcagccactgaacctctgagaattaacatattacattcctttggctatttccttgcacttcttccaggattccactggggacttggcagctctgccctcacatgggacagtgagggcagtgtctgtgggtggaggactaagtgtgtgatattggtggtctctgtttctgcttttaagaattggccttgggaagttcctaagggttgacccagcagtctccctttcagaagcaaggttctggggccttgatcttaaggaggaggtaagatcccagcattggcagccaagttggttactgtgataccaactgtggttactgtgaagggctttggagggtcaggaaacccagtgggaatgtgctggtgtttgctgactcttccactggcactggagacagcagcagggctgctgctgagatgaggccagaggcaagctcatgtacttcgctggaggtgctgccatggagggacagcctcctccttagaggtgggagtgtcaggcaccccaggcacactgagtactaaagattggttgagctgtggtggctccttcagagtatgccctttcatctaggtggatgagcacccctgcactatgggatggccatggctagtgagtggtcgagctgcccatgagtgaggagaggagggcatctcaaagggcaggacagggatagcccagcacatacagggcccaggacagatgaggtatctatacctgcagaagaccaagtggaaggctcctggcatttcaagtgggttggaacaaatgagccaatgggcagcccnnnnnnnnnnnnnnnnnnngcgctctgcgttttagggtttccagtttttctgttctgttttttccccatcttgtggttttatctacttttggtctttgatgatggtgatgtacagatgggttttcggtgtgatgtcctttctggttgttagttttccttctaacagacaggaccctcagctgcaggtctttggaataccctgccgtgtgaggtgtcagtgtgcctcccagttaggctgctcgggggtcggggtcagggacccacttgaggaggcagtctgcccgttctcagatctccagctgcgtgcgggagaaccactgctctcttcaaagctgtcagacacttaagtctgcagaggttactgcttctttttgtttgtctgtgccctgcccccagaggtggagcctacagaggcaggcaggcctcttgagctgtggtgggctccacccagttcgagcttcccggctgctttgtttacctaagcagcctgggcaatggcgggcgcccctcccccagcctcgttgccgccttgcagtttgatctagactgctgtgctagcaatcagcgagattccgtgggcgtaggaccctctgagccaggtggggatatagtctcgtggtgcgccgtttcttaagccggtctgaaaagcgcaatattcggggggagtgacccgattttccaggtgcgtccgtcacccctttctttgactcggaaagggaatccctggccccttgcgcttcccaggtgaggcaatgcctcgccctgcttcggctcgcgcaggtgcgcacacactggcctgcgcccactgtctggcactccctagtgagatgaacccggtcctcagatggaaatgcagaaatcacccgtcttctgcgtcgctcacgctgggagctgtagccggagctgttcctattcggccatcttggctcctcctggggccttgatcttaaggaggagtaagattcccagcattggcagccaagttggttactgtgataccaactgtggttactgtaagggcttttggagggtcaggaaacccagtgggaatgtgctggtgtttgctgactcttcactggccgctggagacagcagcagggctgctgctgagatgaggccagaggcaagctcattacttctgctggaggtgctgccatggagggacagcctcctccttagaggtggaagtgtcggcacccccaggcacactgagtactaaagattggttgagctgtggtggctccttcagagatgcccctttcatctaggtggatgagcacccctgcgctatgggatggccatggctagtggtggtcagagctgcccatgagtgaggagaggagggcatctcaaagggcaggacagggatgcccagggacatacagggcccaggacagatgaggtatctatacctgcagaagaccaagtgaaggcatcctggcattcaagtgggttggaacaaatgagccaatgggcagccccaaaggtgagagaaagtcatgggtaagagcctagcatggaaggaagaagaggtgtgagggagcaggttgacaggggttggccatggcccatgggttgacactgtaccaacagatgcctttccccaacctgtgtctcccagctgttgcctactgaccacagtagaactagtggacccctccccatccagagtctcagaaacaatgatgagcacttctttcaggctgggtgctatgctgattgcgggggcacaaccaggatgctgtttgtgggtggaaattggcaagtggacagcagctaccaatactgagtgctctttgccctcctctctcagctctcactgcagtctcatagacactacctacctcattttgcagatgaggaaactgaagctcctggaggttaatgccatgtatatggtacccagtgccgggggtctggggtgcaggtgagcccctttgtgtctcgtgcactgcaagccagtggccccattctccatgtcaccaggaggcttctcagtcctggctgcttgagcctaccttcccacctgcatccagtgagttctggatactgagctggcatcggtcctcatggaagggagtgtgggcctgcccaagccatcctctggctccactgacttgctgggaagagaaactgcaccactgtttacattagtttctgtgcctgtgacacccagctgataccctctgttacgagggacacccttccccatatgtgggagtaacagggcaccctcattggagaaccctgccagccactggcacctgcagaggtttgtctgaggcagctgggcaccatggtgcagagcactggcaggcccactggggcaagagtttgtaaggtgttaagatgcatgattaacccagtggttccaaacttgtccatacattagaaccactggggtggcttcaaaaaatgctgatgcctgtgtccacccccagagattgtgatttaattggtttagggtatggcctatactctggattatttaatgtccccatttgagaactgctgggttagtctatgagagaagtgtgggcaaaatgccccttctgtcctcattgtctttctcagcacctactcctcaagggaaataactgattcaggcgcaggggacaaagcttccctgtgcctttgcccaggcacaaggcccctcctgggaggtgtggtggctaaggctggcgtgattcctgatgtggcacgtgtggggcaggtatttctctactgaggagtgacattgcatgccgtctgcatgctccctcattcctttctcacgacaatcttaaggtagcacctttcaatctcctcttcagacgaggaaactgaagttcatggtgcatcctagtgaggaacagaaagaggacagggaataaaactggattttccttgggattctcagatggccaggtcctaagtaaacaccaatctagctctgctgaccactgggggcctttcttcctttgactctgttgtaaaagaaaattgaaaaacggtcttattgtgccttaaagcctttttaataaatataactcatttaatttaaactactttaagttccatttttaatataagtgttatagggtacaatgaaagtgccttctaatcaaagtgtgtatggggatttacctccctgtacaaaagcctgtgggagcccaaaccaatgatttattcagacagcaatccaaaatcaccagacccgagtgaggcacacatggtggaggttcatgagtgtgggtaggagtcggaagttcctctggggctgtgcagattgaaggaggcgggtgtggagagggcttagcatggagcctggcgtgggaattgcttagtaaatggaagctgctactgggatgctactgccatccctaggacctccgcgcttcccctgctagttcttactgctggtgccacagctacaaagtagggagatgacagtgagagagaggctcccctggtgggcaggagggattgaacagtcctgagcagacaaacgtgccagattgggtattgaagtagagacctactccagtgccagcccccaggaggggcacggccgaccgcctgatgtcacacagcaaatcctttcccctgtggcagtctatcccccttccttgttcattttgcaccgtggcacttcttagcatgaggtattctctacatttcctttgtttgttgtttgtttgttgcccgtttcttccagtgagatcctaagcttcataaggactggggctgggctgccttggcactgctacatctccaggacaataaatatctactgaatgagtgaacactgaacaaacgaagggatgatgaaatgaattgctcaggaggcccgtcaagagctctgctggagacctgggtgatggggctgagggtcttggggagggtcaaggaggtgggaattgcaagtaggacctgatgggaaggcatccacaaagctgagccacagaggctgtgagggatgggagggaagtgaagaggggccagaggagatgctcaggaggacagagggaacactagctagcagaagatccaaggggaggggacctattgctgtgtcagatgacagtttctggttggaagtctggattaagggatcttcaagtgtccctttggagaagagggtgtgcctgaccttaagcactgccactttgggtgttttcagcttatcccaatcagacgccacttgcacccagtcctgccccagccggccctttcccagcttgctcaccttctcagaggctccagcctgatcaatcaccgtggccccaccatgactctggcacattttgcatctttatgtcagaccgtctgtatctgtgctccctaattctgtgcaaaacaaagaatgaaaaatagactcagacatgaggactgtactgagggcacactttcttccttttttgtcttttaattttctaggcacaggttattctaaactcatcttgggcttgcagttggcagaaagaaaagtagcagattggaatatcatgttaaacggtggatgttaagttgtatcatttattggatggttcctggagggtgtaataaataatttaacatgaactccttccccctttcctctcaagagccacttgtccttgctgtcctctctcccccccagacacctacaagactgtcatgattttcttatggatcatggactgctggaatgagtcagtgcaggaaagaagcttgttcgatcgacagctggtagacatgaagcgtctcagaagaggaacgcatcacaggctgtccctgtgtttctgtagaaactttacctacaaaaggaaaatagagcacgtcaggcttcagtgacagtcagtatgttccgtgagccagctgggaaactgactcacctccatattcttaccaggagatcttgggataatctgatttcattctagcaataaatgtgtttagggcctacgctacgccaggcgctgtgctgcagtaagacatgaaggagactggaccctgggggagatggacacccctcttgtagttaaagtccagtatgaccattgctttggggttaagcagctctgcagataatgcctgtgttaggctgagccctgctagtgtcagtgaaatagcaatgacatgttaatgaggttgttcctcagggtgctgagttagagccccatgtgctaactgttgtgatggtcttggacgtggtgattgctcattctgagagatgtggattatttccaaatcaaaaagttaattagtttttaatttgttgggttgtctgagagatacaactgaaaattcccctcttgccttcttggtcccttaatctggctgtgtgcaggcgattatgttaacaaggagcagtgatcaatcagttattgacatttatttcatcaaatgtaactgaatgttactcatattggtggatttgctaccaaagactgtcttaaattcagggctaacttttcttttaaattgtaaatgaataacctttagcataaagctttaaatgatatctagaatttaaaacactaaatcctcatataatatttccaaatcatcttaatttctgaagatgggcacctatcttttgctttcttttctgtctagtgtctggtaatcaccattaattccatttctttttagatatcacagctttctccttcactgaccaccctttgcttcctgtcagaaagccctggacagactctctgtgggactctgcccatgtttctgagatatcgcctcaattgtcctggctgggcgtcgggtctgcccgttttacagatgggcaaactggagtgggaagtatccgggtggcttctcaggcctgcagctggtggagcagctactgaaacaatcaggtgattcagatctactggagctttgccctcatgggcataataaagttggtattcccaggtctgcccacaagaagctatgatgggtttatcatgttgattcttttttaaattagtaaagtaaaagagtaccttaatagaaagacatttccttggtatttttaaaaagtcatgtgacatgatctcttccttttgtcttataaacctccctttaaactctctggcttagttattttagacttcccagcctcatgtaatctggtttccttacattgatccatttattgtcatttattgtaagataggcaatagaggggcatcgagcttgcttgctgtgctatctctgtttcagccccaaagtgctggagacttgcacgttttgtttgtttgtttgtttgttttgagacagagtcttacgctatcacccaggttggatgcagtggcgctccattgcagcctctacctccctgggctcaggtgatcctcccacctcacctcacaagtatctgggactacaggtaggcaccaccatgcccagctaattttcatattttttgtagagaggggggtttcactatgttgcccaggctggtctcgaactcgtgggctcaaggagacttgcacattctttgcctatatggccatgcccagccctctccccttcacatctgtcttctgggaagatgagaaaggcaagctcagcctctgctgattgggcaactcctaggcaggctggctgaaaggtgcagggacccctggcctttatcaaactccctcagctatctaagccctaaaggtttagtgttggcagctgtgcctcccccacctttgactgttctttaaggcagaagcccatctaccagggctacacacacctctctctaaccccagagccatctgacactgtctctgtggtgcaggaggggaacactgacccctcgattaagtggcatttctcaagagccacaccccttcggtgtttttcatgagcacttgcagcaagctctgcataactggaggaagcaggggtgtttagaccctcccccagaatatcctgttctttgctggattattcagcttggcttcaaactagccccgggtttagggttaattctctcaccttctctggctttgaagacccagcatggtgtgctgagaaatccaacaactcaatagttttccttctgcctttaactcagccaataaatgagataaagtgtgcaaaactcttactgtgtgcacagtaagtgggagccagcagggaatacatgctacataaggcgccactttatttagctgtattttgtcagtccaagtgaaattttaattgcagaatagtgtcttgctagcaaaaatgaacctgcttagagtcaagttttaaaattcaagtgaataaatgaaaaattgtaagaaagattgttaaagaagcattcattttagaacatctcagatatgaaaaacttagaacttagatgtcagaatttcagtagcgatgaacccatggcaaagcttccatctcatctgtactaattggttcataaattggacacgtgggctccttttgtgtgtcttcaggaagttgaggcctgaggaactctgaagccaggagcttcctagcccctctgctgctggatggaggtgctgccagtcaggggcccatcttcaggacactggacagggacctcctcaggccgggccccttgtacagcggactcctttctgctttgtctatgagatctggccacgttgagctccactccattctgctttgtctacgaagatctggtcacatgagctccactccatttactttttcgttgcattctcttctcagtgtggttgcttttgatccccactttcgtaacccacatagccaatattttcccagtgaatcccataatattctgggtacagactgaggcttactccctaaccaaagacctctgagagcacagatggagaggcgtgatatgatctggggcagggcctcaccatccttttccagagcctcaccccctgtgcccaagaggacatgggatggacctaggggtagaatttgagagtgctcatttatactctttcagcagcttcaaactgttttttggtagctgagaatctgtaatcggcttttggattatgaaaaatatgctcagcactcatattatattgattcaaaaataaggattgtgtagtttaactgcatagaaaatacagctttatagaatggtaattttttatttaagttcttctacattatagtgagaataacggattcaggaagggcacaatgaggaataaagctgttgtattgtattggttaaatacattttaaatgatttggctgtcaaactcgtagaaaggttatgagcagtgaatgaaaaactaaaattaattccctgcttcaagaaagtgtgatttatactataataaaattagattttagttaaagaaatttagtcattaagtaatgcccatgcactaagtctcatttataaccatcggtttgaagcttctgcagaaaataatttcttccttagacaatgcatccagggccttggttcattatgtcaatgaatttcactccttacatttctgctacagcttttgaggggttgctttttaagcactggaaagatggattcttatttagcctcaataattgaggaagccgttgaaccatttacctcccaaaaataatctgatcgtctccctctcttagctcttttcatgaatggtatgttgttgatgatggtggcacatgttggaggactgcctgtgtgctggacaccatgctagcatgggacaagcttattattatttcatttgatcatcacaactactctatgtggaatgtctatttctgcctttacagatcaacaaacagagactaaggaaatgttaaataattcaacaaggtgacagaggcacagctggcccccactcttaatccctgtcatatttttcacgaatgttgttgagcatttccttggaggaagtagagtatagtggtaggacctcagaggtttgagtcagtcctgatgtggccacttctcatgtgaaattcagcaagttgcagtctttccctcagtaatctttcttcatctgtaaattaaaagtggggtttgttccctctatttaacaaacttctgttactcctgggtaatttgtcttattttaaaaatttttactggagcatatcaaatatatataaagacacatattctgagtgtagcacttggttaatattttgtaagtgaacatatctattgaccaccaccaagatgataatatagaacatttccagcatcccacaaaccattctgtgtccccggtcattatcctcgcaaaggttactactcatctgtcatcagagattggttttgctgtttctgagatttataaaaataaaatcttataaactgtactatttgtttctgctttcttccctcagcgctatgacaatgagattcagctacattatcacatgttgcagagttttttctttgcactgcagtgaagttttccattgtatggatatgccacagtttatctgttccaccatggtggacatttgcattacatatcatgctgcattcagccttcttatacatgcattttggtctcacatgaatgtacttctgttggacatttacttaggagttaaattgttgggtcaggaaatagatgtcacaatagttattttaacataatttaattacaggaaattggttaaacagatttaaaggattaagaaggtggaaaaggaaacactgcaatagttaagagcagtacctgcagaaggaatacctttatcactactgtctccaggggaggagcctctccatactgggactcagccaatgaggaaagttttgctggtgctggttcctctgagggtataaaaattatagttcctcatatccttgtaaacatttactattaacagttttttaatgtcatctattatatgtggttatagcagtatcccactgtggtttcaacttgtgaagtgcctattcaaatgttttactcatcttcaattaggttatttgtatttttcttattgatttgcaaaagtattttatatattctcataagtcattcgtaagatatatggattgcaaatatatttccttaatggcttcccttttcttgtcttgatcctatcttttaataaacagaagtcctaattttaataaagtctgagatatcttttggtttgcttttcacatcctctttaagaaattttcacctatgtatttaaagtcataagatactcttgatatcttatagagacttagttgcattacttttcacatgtagttctacatccatcaggaaatgatttttatgtatgttctaagatacgtccaacattttttccatgagttgccatgatgtgtttaaacttgcttatggctcagcatacggccaatttttataaatccgaatggacacttgaaatgaagtgctatttggtacagtgtttgatgtctgtcaattaggcaagttttaaaattatagtgttcaactcttctatatccttactgatgcttttttcctctcttgttctatcagttaaagacagagattttttaaattttccaaccattattgtgggttaaaaaattctcctcttagttctttgagttctggctttgcatatatttagactatgctactggtatgtacaagtttagaattgctatatatttctgttaagttgttccttttctaattataaccatccctttttatcactgataataattcttgcctactttatctatagccatgttttttggttgaagttaatatggtttatcatttaaattctttacattcagcctttttgtaaactatatttatgatatgtctcttgtaggcagcatatagttggatattgttttctctattatccaatccttgtgtgttttattttttatttattttttttgttttgttttgtttttgtttttttgagacagagccttactctgtctcccaggctggagtgcagtggcgcaatctgggcttctacaagctctgcctcccgggttcacgccattcttctgcctcagcctcccaagtagctagactgcaggtgcccaccaccatgcctgtctaattttttgtatttttagtagagatagggtacactgtgttagccaggatggtctcgatctcctgacctcgtgatccacctgcctcagctcccaaagtgctgggattacatgcatgagtcacctcgcccagcccaatccttgtgttttatgggattattcagccaatttatagttaaataggtttaaatataaacccatgttttctcgttctatattccttttctcttctgcctttcatgtcttcttttggatgagacagttttggtacttcattcctttggtgtcatagcactaattttgccatttttgggacagtactaggacttataacactttaatctcatttgacctcctgatcttttttaaaaaaatcatattactattattttagttctacaaatatttttatcttacagtgcattattgttgtgttaagtagccgaatgtatttttatggtttttttaatgctttttggtgctcattatttcttcttgcatagcatacattcatctgaataattttctgcgtttttgccttaaaagttcgctataaagtattgtcttagtgttaatttgttggcaatgtattctctcagggtttttttgtctaaatatctgtttttaccttcatttattttaccttatgaatacccatattttcattggattctaatgttttttcaaattttaaagatggtgggtactatgcttattacctgggtgagctttacaccaaaccccaagacatgcagtttacctgtatagcaaatgtgcacatatacccctgaacttcaaaaaaagttaaaaaaattaaaaactaaagatggcattccattgtcttctggttccattattcctactgaaaaatcagctatcccacttactgttgctcccttataggcaatgttctcccctctctaccacccaccctttggctgttttaaagattttctatttgtctttgaatattcaatattttactgagtacttaggtatggttgtgtttgtatttatcttgcttggggcttgtgggattcccaaatttctggcttgatgtctttcattagttttggaaaagtatcaacaagcgttctttcagtattgattctgcccattttctctgaattttcactctgaaaatttaattacagcttgttagaactcttcatgatgttacagtgtctcatactttttctgtatttttcattcttatcttttttcctttcagatcttctgtgtggttaatttttactgatctagcttccatctactattcctttcttcagttgtgtttaatctgttgttaaatccacctattgaatttttcgttatttcattttcagttatgaaatttttgtttgattattttttgtttatttttgtttcataggtttttggagaacaggtggtgtttggttacaggtttttagtggtgatttcggagatttggtgcatccatcacctgagcattttacagtgtacccaatgtgtagtcttttattcgttctagttttataatgaaattcagcatcttttctcctattttcctaaacatattagccaagttattctaaagcttgtgcctaagaattctaagatctggataacatgtggctctgttttgtggtctgttttcttggattttagccattcgatcccatttcgtgctatgcctggtaatttagactggatgctggagattatatatgaaaaattgtaaagcctgtggatcactttataatttccacagaggatttatttttccttgttagacagatagagtcctggaatatcatcttatctactcaagaataggaataatttgagaatatatggtcttagcagtaagtctgctgcattgtcagggcgactatttcttggaaagcctaatttttgtctctttagtaccatgtacttcaaaatctatacttagattttattatttgaggcttttttttttcttgttcaaggctacttttaacttgtttctcagccttttgccctttatgtgtgtagctcaggcataatcatataatcaaggggaagccgaaaatgttgagctcacttctttctggtttccttttccagggtttcgaccctcaatttctggcttctttggtagccttgcactctgatgtttatttcccatctcaagagacttctctaagttctagaatattatattctgtttggcttctatgcaaaacagcaatgtcgcaaaggggaaatgtggcagtgaatatggggctcatctcaatggacttttctctctaactttcctttaaattctggctgcttttgttgctgttggatgccttcaaaaactttttttaattccacttttataattgttgatagcagaaggattagtctcatacaagctactttttatggcacaaagaagaagtttatctcataaaattttcacaatgtccctaggaattaacttcatgactatttttaaagttggaatgctgtgtgcataggcattggaatcagactttgggtttaaatcttagctggccaccgaccaaaatatgagaccttggacaagtttaacctctccccctttcagtcagtctctgagaaatgaagtggaagaactgggaggctaaggcaggagaacacttgaacctgggaggcagaggttgcagtgagtcgagatcgtgccactgcactccagcggggccacagtgtgagactctgtctcaagaataaaaaaattttaaaataagataatccttttttatttaaattatttcagagtataataaaaggaaaacttccaaattcattacataagttggtttcattttaatttcttgttttttgttttttttttgagacggagtctcgctgtccccaggctggagtgcagtggcgcgatctcggctcactgcaagctccacctcccgggttcgtccattctccagcctcagactcccgagtagctgggactacaggcgcccaccaccacgccggctaattttttgtatttttagtagagatggggtttcaccgtgttagccaggatggtccaatctcctgacctcatgatccgcccgcctcagcctcccaaagtgctgggattacaggtagagccaccgcgcccgggcaatttctaaatctgataagaaaaatatgagattggtagacaatctcatttatgaatatcagtacaaaaaattatagaccaataaatgtaaaacatatttaaataataaacagaatccagcagcatatttttaaaagtatattatgactaagaaaagctgttttagaaatacaggggtagtggaatattatgagatctactatgtaagtcatcctattatagaactaaggagaaaaatcatatgattatctccttaaatgccagagaaaagtacttgtaaaatccaacacatttattttattttattttttattcaacaaatatgtattgagcatcgttctgctacagcactgatgatgcaagagtgaaaaagatactggcgccatcccaacccaattccactagagggaaacagtcaataaacaaatgagtaaaggaacaagctgtttttcaatagcacatacatttatttttaaaactcagtaaaatgtatattggtttcattaatataataacatatctcaggctaaaagccagcctgtcacttaatggggaaatgctaaaggttttctctgaaagcaaaagccaagacaagggtgcccagtatgaacacaacgcctaacatgggttggaattggttaaagctctaaggcaagagaaaacacctggaagtataggaattggaaagaaagataagataattgctgtttgcaaattacataaatactcaaatggaaaccccaaaagaacaatggaaaaactattacaaacagtaaaatttaaccaagaagctggttataaaataaattaaaaaatatttttaaattgccatcaaatatacaaacaaaaatcagctggaagaaataaaagagaacatcccatttatgataacaaaagacatacaaaaaagaaatattcaaaatacgacaaggaaaactataaaatactcttgaaagaagcaaaagtagactcaaacaattattaaatcctgtgttattagataagaacatgcaacattatatagatgtcagctttccctaaattatttataaattttatgtaaccacaacaaaaatttcatagtttttttctggagctgattagaatatctcctgttccatgaatactagttgtttcaagaaacagaggtgccaggccttgggcaggttactgaggaacagtttgggaggagctgggtttgttttgtgcaaaatacgctcttggcttatgtttcctgcatttaacctgtcatctctatgccgcctcctctgaacccttactgatgagtactccttcaggaaccagagtttggtttgtgtgatgggctgttggcatgtgaatggatcttccactgatctccaccagggctttttgctcagtagaaaggtagcagtcaggaatgtaatttgggtaggacaaccttcccagtgccctcttagtttcatctctaatattgctcccccttctgacaagaggatgctagacaagaatgctaaggtgtgaaagacaatgctataccttaaaaagcactgttgctgaattaccttcttggctgcggtgttgaggtggtagtccagtttggtgttttctcttctcttctttagttgctagtatggactttcagcttatttttaccttaggctttttatccaaaacatgtcgtttatgatgaattggagatactttatattagtatgaaactgcaatatgcatttctagtctttccccccattagttctcaccaggacttttattcttctagagctaccctgaattttcataccacccaacattttcctatgctattctctttcctggtccaccctccctcccccatttttgtctgaaaatctgcctgttcttcagtgctttttcaaaggttcttttaaaaacacttttccttatgtttccaactggaatgtgaaatgcggtatttacaagacaaatcaccctttcatttctcagtaatttgtgtttgttctgtggcccctaatcaactgtgaatatcaatgcaggtactcagttttacctgggtaacttctgaaacctttgcttattgccctgcgcatagtaagcatcaataaagataggattgaattaagaaaaccaagggcttaatttagtccagtggcatgaactggctatccaaattgttcataggatctaccctttggaaactataaattgtgtttaatctattatcaggtgatgtcagtgacatatcagtagcagtggtggtcttcaccatagcaccacaaaacagaacctgctgctggccagatattttagcccatctgcttatgttttcttcagtccctaaaagcacctacagttcaggcagaggtgggtcatcaacctggaagagggtcttccttaacacttggtaccagcccatactccaataaggaaggccctgagaatgagctgtgctcattaaaaactttgtgattaacaggatttttttgcctaagccctcaaagcaacaagttgtttacatttatagatgtacatgttgagagttagtagaccaacattgctcagtgtcatgttcttcgtagattgttcaccttttcataaagtgtgactaacaagagaggagatatttgcaagtatctgtacatatgaattattcttcagaaacacaaagtctttcttttcttgcaggagcccagaagctttgaagtcacaagaagagaggtaggaaaaatgcactcatacccattttattttcagtgttgacatttttgaagtagttgctgaaactaagatgaacttcagactgtgggcagctcattctttgaaatttcatgcggcttttctgggtgctgactgcttagcacttgtctgtagggactgcatggactgaaggccagtttgcttgtgaaaactatgacttctaccttcaagtaccagaggtgggatacttgaagaatggctcattcgcaatcatgtttttggtctcttaagagaagcctcattcttgagtgaagttggaataattattagttttacccagcaaagcaacgtgaacaacacaaaaaatggcctatgtttgtggtatttcaatatctgggaagagatgccactgtgaaaaatatttctgaatagattcttacagcttcagctaagctgaaatagaaataactaattaattttccttttgaaaacgttccatgatgttctgtttcccctgccagagttcctgtagcacatttgttttatggtcttgaggtaaacatatatgggtgttactttcagaaatcttttagtggaaattgaagtttccttattcattttcagtaatacctagtctctaataagggatgccttttgtatgatttgtggatcattaacaatcatctttttattacatggatagaatgatgagatcagaaacgaaaatggttcctggtctagaatgtggctttggttttacccttcaccacatccttctctgtggtacgtctccaaagagggagacaatctaaaagaaattagcaaattctatattgactactaaattaacattgctttgcctcctgattagttcttgtgttatgcaacacagcaaaagacatagatggctatgttatcaacatgctttgatacatggatattcatgcctgggaccttggtaacaaaacttttcacactatattgagtccagctggtagtgtgctgctgtccatggtgctggatcctagggtcataggatctggataatctgactctaagatgaactttctggcttacattccatttgccattatcttcggcttcggactcgatgtcctctgaactataggacaatatgtaagcaaactgcattgtttgaatatcaaaaccaaatggatgaaggttgatggagctgggaagaggtttcttatggaaagtagtgttcacaatgggtactgtgaccatgtaagttggaaagaatagccataaggagaggagaatttgacatgaactttggctttgaataatattctgtttagccagaatcccgactgtgaatgtttggaattgatttgcattgtaaaatcacatataaactaacctttttggaatcttactgtccttgtgttgaaaatgtctctaataaggctggggtttaaaagagccatgtatttctattcaaatgcatgaaaaaggtctgagtgaacttatgactcaaactcccagaagaatgagagtgtccagaggaggagtgaaggtgtagtcaggctgcacccattcatctgtaacctctccaccgctggaagtgtcagccttcgcaaatggttgacttagaacatacactgtgggtttgtactagcaaatttgttctaacatcacagaaacttttttctcctattgtgcactgatgtctttcttgcttgtttctgtcaaagttgaatgtttgagagtcctgaaatagcccagtgctgtaacgtcaatgcttacaacctggcaggaagaaaaggagtggaccttgccggctggttctaagtatttttaggtctgggaattcactgactcactgactgggttgtggggttgttaatcttctccagaacagtgtacaagtataaaaagaatagaagcctatggtgcttcagtaaactatttttctgtcaaagaaaagtaagatattgtctagcaataacacctgggttggttcccagctctgactcgaccccggactgaaagaggaacagatgagaatagctgatttttctgcacagcttacaaggcccaggagagtctagaaagtcttcaggttagagaggaagctcccagtcacagaacctgaggaggtttcctgttttggtttgccttattcaatactgtacctgactcaggagcatcccctccattgaaggtttagggccacaaatggtaaccaactgcaacttcacattatgtgacttttggaaactcttgactaagtatgtgtgtgagaagtgagaggggctaatgttagcagtggaaatcgagtccaagccaaatcatagtggaactagcgacagtaggggcaaagtgaatgcattgtgtgccttaaacctgtcctctgcccatttccccctcttcccctccagccgtagatgtcatgcagtctagctttcttgcctctggcttagactattcctgcatgccttgtccctcatccttgtcaaatccacctccccttcatctttccaactctctttcttgaagtgtttagcttaccctatctaattggagagggaagggccctatcaggttaatttcctgagatcagagaccctcctgccttcttcatccccacattcccacagctctagcccagggccagtagttaatcaacaattgtttcttaaagtaagtgcaagtacacatttgctttgtgggtgttgccttttcattctggcccttcccagtaatatacaaggaggcactgggccctttggttctggaaaggcacctttaaagaaatgttctatggctatcttagattttcctggctgatgcactgaagaaaattcaagtaagcttagtattatgggttgattttgttccccaaaaagacatgtcaaagtcctaaaccagaacctgtgaatggaacctttttggaaatagggttttggcagatataaagatgaagtcataatggattagggtgggcccaatccaatagtgaggtccttacaagaaaagggagaattggacacagacacacaaggagacatcgtgtgatgatggaagcagagaattgctggcaaacaccatgagctggcaagttgcagggaccctccatccctagaaccttcagagagagcatagccctgccagccccttaatttttactcccagcctccagaactgggagaaaatccatttctctggttttaagtcacttagttgtggtttattatggtggccctaggacagtaatacacttggaaaatgttggactcagtaactttagttttcattgttgttgatgatgatgatattttgactggagaatctctcatgattttcatagacaaaatgtcactctcaacagggaatgtaatatgcagcattttccaaacttgttttctgtgggatttaacaaaattaattgtgttgtttttaaccatctcagggcaggcatccatgcagtgccttttgcaaaccctgccctagagagcccaggaagaggcagagcttcctagagtgcccaggcaccagactgtgctccatgggctgtgcatgtacagaacagtgtgacacaataataagaatatcttcttggttgttctgatgttttcagagaatgttcacgttctttcctccctttcccttgagtaacctgtgacacagagcagatagcactgcacacatgagactcttccttttcatgttaatttttagtagggatgaggaatgcttctgggctggtgcctctcgatgccctgaacctctctttagtgggtggtggttgcttaagtgacttgatcttgcttcacacatccaagggtgtttgtaccttatgttggctgccaagcccagagagctgagagggactgctgggggtgctttgtttccaagttagatttgtgggacttgaaggtagacacagtagcaagattgtggcaggactacgagactgatagggtgtcctctgggaagggtgcatgcctcccaagggagacagagccattcctccttcaggacagttccgtatgaccctggatattcatgctgggacctccctatatgagctgcatgggaaagagtgatggctgcatctctctgtgcttccagtgcaggtatttttataactccctccagacatctaaaatttaatttcacccttttcgaagcttcagcaaaaggtgccacccttacctttctaagatactcccgtgtccactgtgaggccaatgctgattgcgactgccaaaattcatctactcaaaccggtacttttctctgacgttcccatcatgttgaattacagccatgagcgaacacttgagtaagctgagcaaatggcgggataattcagcccttgtcagccatctctgaggagcatagggcgatctgtaagctattcagatgtccgtgattgtgctgtgattaggggctgcgagtttggggatgagcaccaatgtatgttgcattgcccacctcccagcgctggctcccgcacatgttccagccctgtccagccggcctggcttctagcaaggctgtgagggaacccgggagaggagggctgctgctgtcttcgggaaaaggaaaaaagggggtgaccatcacatgcacactcagcatggctctggctccttgcagtgcagatctcctaagcaaacatgacctgccagtcccgagtgtgaaactagagcctactttctgaaaacccgtggaatcggtccctaattggcagctgcctccaatagccccttttagttctctgcatctgggtgaacttcagctatcaagaactgcattctgtttaccattaatttgattttgtgtagcagatgttttctggatctctcagttccctgcctaatctatcttgtataatgtgaagtggctgactgtcttcaatgaaacagattaataaactcctaggttatttggggtaacttctttaatagctgcagatgtagggaatttaaaagggagccatccagattgacagtgcctggagccgtgggtctttttcaattcaagactgccatctggggaaagagatgcttttccttcccccatgccaccctctctcacatgcagtgaggcactgagtgttcttctcagtcactgggctcaaagaagttgagagtgacatctatctcctgtctcccaacctcacaaaattggctctttctgggttgcgttgccttgtttcagctgctgggaaactatattgtgctagttgcctgaagttgaatgggaagtgcatggtgcacctagccgatgtgtcctgcttaatagtgatttggtgcccagttttgatcatgaccaattggtaggcagcttactcacagtgtacttcaggtaagttactcaaccttacctgaaaaaggatgcggatagtaatagtacaaacatcagtcccaattctgagttgtagaaacccaacttgtgctggctgaagcctgaaaggccatgaagctgcagaatctaagggtggatctggcttcaagaacagctgataaaaggattctacactcatcctgtccttccttctcctggcacattggcctcttccaggtagccttccaggtggccacaagcagctgcagctcagagtcctgcctgctcaccgtctcagagggtgaaactttcccccagaatgacaccagaaaaatcccctcagggtttgcaaaatcatcctcatccagccacaggcaatggtttggtcctcaaaggaagattctgtgcagggatgtgttcggtgtcccacagcctcgtggacatattgggaggggtgactgtgtgtgcagacgccttggcacaggaaggcaatgttggcagtgctcagtgcatgggtaatttttactagagctcttacaggcctgccatagacatagaggcctttctcaagtaagccagttcattcttctgtctccaagatgtgtcatgagactctggatgttgtggcctattgacttttccatgaagaattattattattatattattattattattattattattattattattattttgagtccgagtgtcactcagtccccaggctggagtgcagtggtgcgatctcggctcactgcaagctcagcctcacgggttccgccattctcctgcctcagcctcccgagtagctgggactacatgtgcccaccaccatgccggctaaagtttttgtatttttttagtagagacagggtttcactgtgttagccaggatgtctctatctcctgacctcgtgatctgcccgcctcagcctcccaaagtgctgggattacagtgtgagccaccactcctggccgaagaattatcttaaacttagcctattctggtcccttcctctgtcagagtctttctttaactttatgctctaattctctctttctacaatcagaagactaagcctttaagatggtgcctttaagaacttaaagacaaacgaccgggcacggtggccacgcctgtaatcccagcactttgggaggccgaggtggccagattgcaaggttaggagtcaagaccaacctggccagcatggtgaaaaccccgtctctactaaaaatacaaaaaattaccaagcatgttggtgcatgcctgtagtcccagctactcaggaggcaggagaatcacttgacccaggaggcagaggttgcagtgagccgagatcacaccactgcactccaacctgggagtagagtgagacttaaagacaaacataaacttctctcccaagatcaggggctttctgagcctggtgtcagaaatcatccttaagcattacagatataaaccatcccatcctctggctgactcagctctctccagggattggaggcagcaggaccttgtggtggatagctcagggctcagatggatctgccagtgatgctatccgaacctgaggtatgtaaatcctccccaagagccaagcgccactcacctggtacctgtagcctttgccctgggacagctctcatgctgctgtgcggcacaagttttggaaacgcaggggtcagatgtctgcctcccagggtcccctgtccctgcacagagtgggcactgaaaaagtgttagatgcctggcatgtcccagggctgacttggcttatgtcatctctccgtttctcacaaaggtcagatcacagatacagggccttccaggttgttgactgtgaaccccatagctccaggatacctggtcctatttgctgagcttgctcttccaccagtccctgggaatgctcactttccttaactaccatcctcagagagctcctctgcccttctaacaacttgtgggtccctctgctagaaggagcttaaactgtgttcatgcacatgactaaacctctgtggttatgacgggcaagctataggtcggtgtgggcaggataatgaaccctaatcactcgtgcttgcctagcggtctccttagaggttgcattgcaatatttgggcatggtcactatctggaatttgtggggaagagtcacattgtcgaagaggtcatgacccctaagggtatgaaccactgcacattcctaaggaccaaaagacaggatggtgtcagccagcctgagcacgctgatcctgcccctccaggacaagtggagagagatgatggtgctccctgtatactgctgaggtccccaccctacccaggagactcaccctcatctctcagatcccagcagaattaagcttgacatttgtcatcttcgttacttgaccagtccccaagccagaggcatttcttgcttttcaggaacccttgaaattatcttcttcatataaacactgaagcccttttcaaactcattaagctatttgccccagcatattaatgtgctatccaccagcctctggggttaatatctgtgagttaaaatcatttgtttctgtctcttttatctcattgctgcttggcaatcttctttattaggaaacgaagtacaggatgcaactgaccattatgttctaattctattctttcatcaaaatgagttcatcttttaaagctcttttgtaaaaaacaacaaacctgtcttttattattttaagattgtgttgtttttttaacaaatctttaatctctctgcttcagccggacagagccaggactggaaataatctgtaaggggagacctctcctctaaatcagcaagaccgccaacactctctctcctgattggcctcactcactctgcatttggcccatttctctccttggctgtggtgagggcttccaaggtgtacaagttgggcttggtgaataagccacagtgtttggcagatcaggcaaccagggttggaaaatcctgtgcattctaacgcaccccactggttctacatgctcttatttgggttatatttcttggccaaggttgccattgggttccaagaatgcgtcagggcctgcattaaaaagaaaaaaaaaaacaaaaaccttttcacaaaatgttgatgttgctttgaactctccaggaagtcagggagcgtgtgtcccagaaatgagcaggtagatgggcactggctccatggagacagtgacccacagccttccgggataagagtgcagccatagtggggagacctgggccggggtctgagcgcagtcagtgcagttggatggtgcacagactggttctcccatgtactgcaagccagtgattgcccctaccctgttcttcggggctccacttctcagctccattctctgcccctcaatggctctctcacctcatcagtgcctcaaaaaaatatctgggactctagtttgataactactacttgcattggagaaatgactcctctggaaggtgaatacgattctcagagtttgttgaggttttattggttgcttatagaagtttcctgggctgattggagtttggtgtgcagagatgacccggcatagtccctgcccttatagatggtcagttgagaagatgcccaagcgtcctgcagacagatgtctacctggtgtacctgcacatggccagccacctctcagttgggtccgcaacatagagagagcatttgttcagtgtaatgatgttggaatctgggagaacaactctctgaatgttctggtggaggtgaagtttcaggacttttttccaaagcatggctgtctcagcagagggtcccctttgacttttaagggcacacgtaccagtggtgacgtttttgttgcaaataacaaaccccaacccaactagctcaaacaaaagaggacttatggcttatgtaattggatagtccagtgagggtggaaggtgaggagtgcgggcttcagatatacttgatatggagtgtaaggacctggcttctccctccattttgccctctctgggggttccccttcatggtgagtgccagcctcccctcctcacagctccaggtccgtggaagacagatggcctctagtccagtgtatcccacaaaagtgctaaagctcactgggttggacagactcaggtcatgtgattcatgcacttaattaatgctgtgtgctgttgggttcctgaagtcaccagccataccgctggtcaggatatcatgaagtgagagtgggaggaaggggatccccaaatggcaattgggtctgaataagggacacagaagcaggaaggtaaaaggaattctctaagcatattaacgtctacttaatgatttcacatctgggtgtctctcactctcacccctaaaaggattctgagtgcctgaaaagcaggctaagaatcagcaaacattcacctgcgtttcaggggggaggtgctctcttctgtcttcagaaggaatccaaggctaagagattagcagttgacccaaggtcacagaagcttctaacagagtgtgagtttgaactcaagtcccgatgacaaataaagggcacttttttgttgtttcaaatcacagctgcctccagcgattggttctttcaccttgttcttttgccctgtcccctagggtagctgcaggaggtacctggggagtgcatcaagcattcaccagccgaaacttgagaggggttttaccccaaacatgacatccttctttagcactttagccaaagcacataaggatgaaaagcaaatgaacatcaaatgatgaatcacccaaaatagagagaaaagtgaatgagcaagcccctcacctggcagtggcttcatcctttccttgatgatgtttgtcagaagcttttattttccacttttcctaagagatcacttctttcttgggaaggggttggtggaggctcgctgggctggctgcttctaaatgggcatgggtggcagacaggaacacaggatgggggatggacctcacctataaccagggctgctgtcaggagccctgaactttttgcaacctctgcctcctgggttcaagcgattctctttcctcgcctccagagtaactgagattacaggcatgcaccaccacgcccagataatttttgtatttttggtagagacggggtttcaccaagttggccaggctggtctcgaactcctgacctctgtgatccacctgcctcagcctcccaaagtgttgggattacaggtatgagccaccgcacccgccaggagccactttttagtaagtaatttcctatgtgtccacacattcaagacaatttaaggcaaaagttttagtcctttactataaattctgtagattggaaatggaaacattttcaattcaacttcttatttaatcttcataaacaacctctgagataggcattgcaatcttatttgtaaatttaaaaaatgaggaccttttgtactctgtaggaaattgatcaaagaattaaatgggcttcactgaggtcattcaggaagatacattctgtgggaatctgataatgtttgtgaattctgattgaaatattcgtattcaaaaatgtggattcattgttctacagtcagcatgctgcagagtcagaggtcctgggacctcccccaacctcccatctcggggagctgtgtcttctgctgctaccaaaggggagtagagaaccccaacttcagaagaaataggcctgtaaaaacccacgggtctgggcaatgcgttgtggggggtaaaaatatatttcagtctattcgctttctaattttagcagttatttgctctccctttttgctggaagcaacattcccatccagctgttggctgcttcatttgaatttttatcatttgtgtgagcccctgcatgtttggacacaaatgggagtcctgtggctcagaggggacgttgatttgatagggtcagatctaatctcctgccagaaacttcagcggaaaataaaatgagttgaggtttctgttttgtgtgtgtgtgtttatttttaaaaacagtaggcctgtaaagctgtgctggcatattacttttttcccctttataggaatttaaaataataccttacattcaaatagtgtaaccggtgtgccttttgctctcaagagctttcccatttgtcctctcatttaatatgctcaagaaagcctgtgagttgggaagatgaagatatggtcattggtatttgacagaggaggagactgatactcagagatggcaaggacttgccccgggtcacacagctaattgaggcagagttggagattatagcgtccagttcttattactcccaccaaggcttcctctgaaaataagagtttatggcagaagttttcaaattagacccaatgggaaaacacagaattttcagtcctgttttggttcttttaaaaataaattttgtaaagatgacttctctcatctgtcaatgtaatgatcccatacctggggtattcaaatattcaaaatgtgtatggaggaaatggtaaaagttaatcattttcacagtacctgtctgggtgaggtttaattatcacttgacatatttcatggtttaaaatgatgacagtttaaaatgagccagagagagccagaaaaatccattcattatcatgtgtcaggtgctacattggaatacccccaaatacagatggtccctagacagatgattctgcagcattttctgatagctacaatgtccctgctactgaaacccagactgagaataccattctgaccctgccgtcaatatgcgagggtgcttgggtgaatctagcagcgcggtttgattctcgtaccgcatcgcagatgctaactcccccatgctctctccaatccaaacctctcactggtcttctgcagaatttctaataacaagataattcattgtgagtgtgctttgaatgaatgaatgaatgctatttaaactacaggtgacagatatttccatgtgcctcttaggaaattgcatgcctttccaagaagacaagttgaaaagcagcttgttgttgttgaataagctcagcactgtctgtctgtttaggaaaaataaataattgtttcttgcccacgagaattctggaagtggagctgtccagagctgacccgctgtccacatttcaaatttcactttggagagtcctgggagagggagcagatgaagccattcagaaatgtaaatgctgtttgacatctattagctcaatgctcatccattgctgacagcggatccattaggacgcgagtgtcatggatcagagacatttgaaatatagcgagaaacatctacccgcagcagaggcccatgtagatgacttgagagagcactagatgtgcccaccacttggtccaggcacctcccccccatctccccaggctctctgtctggatttcccaaaggtcactgcgtagccagtcttcacgactgcactctgtccaccaagcagcctgcctgaatgctggcatggcggtgaccattccctccttgcaaggtcgggcttgcttctagtctctaccattcaggaatcatccaaatgatccaactccagatcaaaggccccacagggtcaccccttatttgatagatgaggtaggcttgaacaggtacagtgacgtgcctgaggtcccagggggctagtggtagcagaggagggatttggggctctaagccagtgctcttagttctcagggctctctggttgtttttcttgcttcctttccttgcctcccacccctgagtccaggttctcccttctcttagggtggcacagtgtccaacatatcccagagacttagccgccatatcctagtgatggggtcctggctaactgagttttctagttaagttctatgttttgactttcgtttaagttattctaagtgttttgttttcctgccttaggggatcggagattatatgggagggggcacatgagacaactgttgttattaaagcctccaccatatgccatatgctatgctaagttcacttatttaacactcacaatagtccaatgtagccagatagtgtgatattctgttttagaaatgagagacacagctttgaaaggatttgtgatttggtttgctgggcgtttcagtaagttggtgattatttattgacctcactgtacctaaatattcattcctttgtggtgggatgtccctgtgcttgctactgtagctttgctaggacccttgtcctgaggactctcagctctaaggcaagttgcaaggtcacttctaaatggacagtccttgaaaagcttaggaagagcaggcgcatccaagctgtgcttgatgggaggggaacatgtggaggacagagggaaatggaaaagaaacgtcgagacaagacactgagaagatgctgccatgcctcggaaaagaggggaagatgctggtccggctattagtcttggacaagcctaggcttcctccctcttgatacagactgtgggttccggtaccgcgggactcaccctctctcccgcgccccctggaggtcagagggagagttacgtttccaggcccagagacctgatggcaagagactaagtagccgctgcagttggagcacagggaccgcaggaccaggagactttacccagaggtcgcttgccctgaaccctacagttgagaatctgtggctcttctaccatgtgcaagtgtccagaaaagacttgcacacatatatctctctatctgctgctaattcttagaacacccactgttagggcttcatcccctgtttctttatgatacccccaaagtcacgttgggtcctgaaagaacagctgaactttcgttgagccacatctctcctacctggaaactcaccaagcctgtctgcctcttcataagaaaagtaagacaggttctcctaagacccttgagcccgatttctgttccatatttgtttcatatgacaggtctcaactggtggctcgtgggccagattcagcctgcagccatattttgatttataccatcttggctgcagaggttttttgtaaacataaaaatatttcaatatgaatgagttgccatcgtttgaaataagggcattttaccaacagattcaaatatccaaatatacagatgatcttggaaagaaaatgctttgataaccctgggcccacatgacctcatggcagcaacaggcttgggtgaggcagccgtgtctctgaagggaatacatgctctcctgcttttccacagtcctcaccactcctagtgcattcctcatagcgagactaagtgtgttagatacagttctgtagaataaatataccaagtagaaattccagaagacccatgctccttaaattacttgtgtggcctccatagaatttgagttttcaatccctgttttgtactaaggtatagaacttgttaattatggaccagagagtcagatgtcagtaaggagatgggggagagaggaaagtggagggcaggagggaaggggggaaaattagagtaaaggctgaagcaaccctttacctcctcagccctccttgaatgttctaatgatgctggtgtctagaagtgggtccttgctttaggcagttaaatcttccatcatctatcttattttttgatatttgtgccttaatctataaatattcactctaggcagtacattacaagcaaggttcaagcttggtaattaatatttgtgcctctctatgtaagttatgtcttaaaatgaggcaattgctttaagcatttaagacattccacgtatattgcagagtaattctttccaaagatatttccaactgatattttgttacatctaaatatacatttacagtactagtagaccagaatagctctaatttatatatttggtccactgggttagaaaaagagacatttaaaagtatgtttttaatcagtgtgtttatcccaaagatactgttggctcctccagaacacacgattttataaaaaataataaatgtggtgtgttctctgagctgatttagactttatgagagatgacatctcagcggagcatgagcatggctaacttttaatccgggctccgaaggttctagagcttggaggaacttattaactcccttggtgtcattttcttaatgtacaaaatcagatgataaacagttactgcccttgtgcagtgagaattaatgctttctgagtcgcagattgttttgataaaatagtcttaattgtttgctttgtacattttctgctttattattttattatttctcttgcctctgtaattggtcgttattgggttcccattatttctttattagtattttataaaagctatcttgtgatttatcctccctcccacacttgctgttcccccaagttcgtaaacagaggcaagacccaggcaaacaaagctggtggtattgttggttgctttgagggctcgcccgttgtctttaggatggttcattcccaattgcttgactgctatgaaagaactatatgaatcccaggaggtttattagaaacatgttctaagtaatagtaagaaagttggataacagggtctgcatggaaactctaacctccctccctaaaggaggagaggagcaagatggtctttccagcttggggcaggcatcgtaagtgtacaatgaccacataatatggcacacttataaaaggacaagaaaatcatcgctcatacagtgaaaagaagccaaactccattctactaaaagttggctttctataacatttccagccaccattacattgggactttatcctactctattactcatatgatctcattgagttgagagttgtctccttctgtgttctctaactattagtgtagtttttcaaaattatacagccagacattctgagtatgatccaatgtactggtttattactttgaacaagttatttaaacttctgtgctttggttttctcacatctaaaatagggtgatagttctatctacctcctatggcagttgtatggattaaatgcatattaaaaagctagcatagcactggcccaccttctgagtaggctctatattagccatcattgttagctatattcacccacagttggggctggggttgcctggggttgtgacttctaattctaagtgggctgtagtatgggggactaggatgtctttggtgaatacttactgaaatgcattgggttagaagccttggatttaactggaccaatttattttctttcctcaaaactgagtaatcacattttccaccatttcagaaagagtagatactaataacatgaaaattttagaactatttatgcacttattgtttctggctatatgggaggctagataacttagctgactctcccacttaaaacattttaaataatggataaaacatttaagcaatcctttaaatacctcagtgagaaagcagaactaaagattcataagaggccaaaaactcagagaaagttgggttctaaagcagactttgctttgagagtatttgcccaatgcaggtgaccttgaactctgattgttacgacctcaaggatatggggacaggagtcaagcctagggcagatcagtctgttagaaaacctcctctacaaaaagctgagaccccaacagaccccagtaggctacctctctagtgtaaggatgaaataaaataaacatgccctgtcttctctcaaggatgtgtgaagaaaattgcctgccttaaacctgatgctgagtgggagccaaaatgtttcctctgagaacaggaaccacaagctaagctttcgtagaattcatataacagactagtctgagaaagcctcagccaagaattttgcttgaaacgtcctggttgatagtgttcctaggtacatggtagagcaaacacaaatcctatgtaaaagactcttcttcagtattggcctcaaataattttgacagttttccatccaaggaatatgagtcccagttaaaatttgtaaaaatgaaaggatgcaaaacaccaaaagaagagccagcagaaggaactatgaagaccagataatagaattaacatttaaaaaactgtgcatgctgtgttaaagcaataaaaagggagctgaaaatataaacaaagaataaacctatagaaactatcttgttatttgaaaaataaccaaatagaatttctagaaattaaaaaaggtaattgaaattttaaaatcaaaggatagacttcagagcaaacagggcataactgaagagaactggaagatacactgaaaatgtaaccagaatgcaaggaggagacaaagctatcaaggttaggaggcaaggaactaggataaggaggactcagtcatttgtaattggggttaaagagagaaaacaggaagataatattggaagggataatggttgaaaaaagtttgcaaaactaaaggaagacagctatctcagatacaggaagcccagtaaatcccaaataggataaacaaaaagaaacgtaaggctactacaacaaaaacttgcagaatactaaggacaaaatgataaccctcaaagtagctagaggaaaaaacagattacttatgagagacttatagtttatttcccagtagaaatcagaaagcttggaatatctttaatatgctaagagaaaacattggtcaatctagaattttagacctataaccatgttccacaacactcttactcttattttctgttttttcccttcttttttccccctcaagcttcaatctacctttgagttcattaaccttttcttcagagtttttttatgttaatctagccagtgaattcttaaaattcaatataatattttacagttctagatccttttgatctgtcttatgggttccagttctccgttgagctactctttcttttctttgccacacagatatagtaattttgaagtcctctgtctgctaatgccagtagtgttagtatctctaggtctactcaactgatgattttatctcatgattacaggttaccattttttgctgttcatgtttagctttgttaggagatttttttttggtttctccctcagttgtaatgtataggccttattccaggatatgattcttacccataggacaaagcctttttgtgtagtctgaatatcaactagttgctgcaattcatttctgccactaaccccctggagttagcagacaccctaagttaaggatcagtcctctataagactgctctcacttcaaacgctaaccataggttcagggttcccccagtcacctgcatttctgacctactgactataaattcttgactataaacactgaccataatcctttccatgacacccttaggtttgataattcatagagtgactcacagaactcagaaagttctatatttttgactaccattttattgtaaatgacacagatgaagccaaatgaagaatacatagagcaaggtctgggagggtcctaaatgcagagcttccatgcccacttcccatgaatcaggctacattgttctcctggcacatcagtgtgttcaccaaccaggaaactcttctagcttaggtgtccagggcttttattgggattttattttgtaggtattatcactttaatgttggccgggtaactttaatgattggccatgtaatccagcttcccctcttgtcttagttattttctggtgctataagggaatacctgagactggttaatttatttatttttttaaaaaagaggtttattttgggtcatgattccagaggctcaggttgccaaatctgatcatcttctgtgagggtctcatgcttcatcataacatgggggtgagctgagtgcttgccaaaagggcaatgcaaggacagcctcactttatagcaactcgcttttgtggtaattaatccagtcccatgaggggaggactcccacattcataagaattaacccagtcctgtaagagcagtgttaatcctcttaacaacccaatcacctcttaaagcccccatctcccaacaccaccacactggggacaaatttctaacacatgaattctgggggacacactgaaaccatagcatttcacacctgcccccagaatttcatgttcttctcacaatgcaaaatacaattattccattctaatagtcccaaggtcttaacttgttccagcacaaactcaaaaatccaaagtcttacctatgagcagctgtggaatcaaaatgagttatctacttccaagatacaatgaatggacaggtataagatagcatttcccttctaagagagagagagagacagacagacaggcaagaagaaaggagtatcagccccaagtaagtccaaagccctacagggaacaacattaagttttgaggctgcagaatatcttctttgactccatgtctcacacttcagctctcccagaatggtgttgcatgctgtagtccatggttctgaagtctttatggtgattccattcccatggctctactaggcattacttatgggggctctctgcagtggctcaatccttctgacaagtctcttcctgggcccccaggggttcacaatatcctttgaaatctggggggaggaagccatgcccccatatctcttgtattttcatgcctgcaaaattgatgccacttgaatgtcacaaaggtcaacttgtactttctaggcagtggcactagctatacctgaagctgtggctgggttggcagaggagtgctacgctggatgtggggaacagagacctcaggaggccctgggaagcaagcctgtggagggtgccctggctcatttcctgaaaccattctgctctcctatgcctgtgggtgtatgatgcaaggagcagcttgaagttctctgaaataccttcaagatctgtcttctattgtcttgcttatcccttcttctatactaatctccttaacaaaagattgctggaccacatctttggtttcctctcctgacacactttttcactctttttttttttttttttttgagacaaagtctcgctctgtcagccggctggagtgcagtggcatgatctgagctcactgcaacctccgtctcctgggctcaagcattctcctacctcagcctctcaagtagctgggattacaggcacgtgccaccacgcctggtaatttttgtatttttagtagagacggggtttcaccgtgtggccaggctggtctcgaaccctgacctgaggtaatccacccaccttggcctcccaaaatgttgggattacaggcatgaccactgcatccagccactttttcactctttatgtggccagcctgagaattttccaggtcttccactttgctacccttttgattatgagtttcatctgtaagtcactttttcctctctcctacttaatgtaagtggttaaaagtagccatataatagcctgaatactttgctgacactagatatttcttctaccatatattctaattcattgctcttaagttctacagtccatagagcctagggcatgaacacaatgtagccaagttctttacaactttatagtctttactccagttccaataccttgttcttcagttccatttgagaccttgtcagagtggcctttactgtccaatatctgtgaacattctggtcatgaccatttagataatctctgagaagttctagactatcctagttttctcttctgcaccttcaccagaattaccctaaatcctccattcatggcaattaggctttttctagcattcacttttttggaacaattttggaacaattcacaaaattgttcattgtctagttccaaaagctgcttcaacattttcaggtatttgtatagcagtagccccctttttgtgtcaattttctcttagtccattttctgttactataactaaatacctgataggggtaacgtataaagaaaagaggtttgttttggctcacaattctggaggttgagaagtcaagatcaggcagccacatctgggtgacttctggtgagggcttcatgctgcatcatgacaaatatagtagggaagtgggtgggtgtgaaaaggggaaaactcagggagaagccttgcttataataacacactcttgtaactaattcagtcctgtgagagcaaggactcactcacttcccgagaattaatccagtcctgcgagagtggcatgaatccctcttagtgacctaatcgcctttaaagactctacccccaacactgccacaccagggaccagatctcacgctggaatcttgggagcactctcaaaccatatatgggagctctttttgtccagaagtcaggctagctctaaacctaaccctctactcacatggttgatatttctggtgaccagcccctgtcctgagccattcatctcttaatgtaaactcaggtgtgatataagggtgtgatataaggtgtgataaatataaagatactcctattactccaaggattttctccctttcagaaaccagggacaaataccgtcaaattctttattataccactgggtctccactgcccaaaagctcagagtatttaccagctctctatactttgactgggccagaatttcacctactcagtgctatacaacctgtaaatctctgttgagctcttagctccccaaatatttccaggcccctgaaatcttgctgctgttctacagcttaggatttagtccgggaccaaagagaaaccctattcaggcttttggggctcttttctgtaagttgctcttatcctgagctcaattccagtctcagaaatctcagactttgcatctttttcttctgcctagtaagactgctgctctctacttgagctccatttccctgtgcaaggtttgggccgtgaacccattaaaaactaccctcaggaagaaaacgggggtgagtgggtgctcatctcgtgtgttttctttctttcaagaatagcagcacatgatgcctgcctccgggcctagaaagaattgttttactgttctagtccagctgtacagtgatttttaagtcaacaacagctattttattgaagccagaaccataagttgccaatgtttcctcagtatagaacttataccatcaaatatctttgaataaaattttaaaatggagacatttctgaaaaaaaaaaaaagatttttaacacaccttcatttgtggcaattttaatggatgttttccaacaggaaaatggaaagtctaagatataagaagcaataatgagtaaagaaagtggcaatatttgggtaatatttgggaattaatttaattttaattaattaattaaaagtgggaatatttgtgttatctaagtattaattgcttgaaataataatgtctcataactttaaaagtttggcagaaaaatgtgaaaatatagcagatcagtcaaaaaaggacaacttcaaatttttgtactgaaatcttgtatagttgagaaaaagaaaaaagatacctataaacttaattttgataagtatagaggtaaaaatgtctaaggaaaccactaacaaagcataactttcaagtttagtagtagacaaaaatgaagtgagaaaaatattcaaaaaatctaggaagaattcaagggagaaaatgaaaatagaaaaggcagaaaaaatagaaaatacaaaatattagctttaaattcaagtatattagaattacaataaatgtaaacaaaccaaatgttccaattgaaagataatagttatcagaatgaaaaaaaaggcccagctatttgacaaacaaacaaacatatctaaaatacaaggataaagctgaaaataaaagatgaaaaacaatattccagaaaaatagcagaaagagcctggtatagtataataaagtgaaacacaatataatagaggcataaagcataactagagagtaagaggccactaagtaataatagattaaattcaccaggaagataataactattccaagtatgtattaccgagtaagatcagattaacatgtaaagtaaaaattgacagacttataaggagaaatgataagctcatgatcacaatgggagctattacataatcttaaataattccattagaagaaagaaagaggctaggcatggtggctcatgcctgtaatcccaactctttgggaggctgagtgggatgattgcttgaggccaggagttggagacaagcctgagcaacacagtgggacccttctctacaaaaagataaaaaaattaaccaggcatgatagcacacacctgaagtcccagcactcaggaggctgaggtgggaggatcacttgagccaaggagtttgaagctgcagtgagcctgatggcaccactgcactccagcctggtggcagagcaaggaaaagaaaaaataagacagaccaaagttgatgagttaaacatctccacctcacaatgttaggaaaagagtagcagagaaacccaaataaagttgaaggaaggaagtaataaagaacaataataaaaaggaatggataaattgaaaaaaaaaaagtacaacagaaaggttcaacaaagccaaaggctgatttttgaagaaccaataaatctaacaaaactatgtcaagagtaataaaggaaagaggagagagggagaggagggaataaatacacatatcagaaatgaaaagaagatgtaataattaaagctgcaaaatcaaaacaataatagaatcttatttcaccaatatatttgaaagctctgctggtcaatttcctgaaaaaaaaatttgtccaaactcacttcagtagaaataaaaaacctaatcagtttagcatcattcaagaaatataatcagatttctaactggaaatcttcccacaaagaatagtcagatccagatattttaccagtgggtactaacaaattttccaacaacaacaattttctctcatatgaactactccagaatccagaaaaagtgggtatattgatgagaataacataacttgacaccaaaacctggtaagaatgtttttttaaatgccagtttgtacataaatacaaagtcctaagcaaaaattagcaaactatatttagcagtctattaataaaagataaaccatacaatttggatttatctcaaactatatttgtttgccactagaagtctcttgatgtatttaccacagaacaattttaagtggataagtcatataatcatctcaatagatataagaaaagattttaaaaatctaatatccattcatttattagtgtaagaaaaaattcttacactaggaaaccaaatagaagggaacttctttaacttcaaacaccattttttttaaaccagtagcaataataaatgtatttagtatataatgcgagcaaggtttttcactgttaggaaagggttttcagatatggaaagtgggaagtctagaatggtacatttgttttcagatgggagttggaagatcagttaagtattgcttaaagttaagagtgtgtgtgtgtgtgtgtgtgtgtctgtaacttctctagctctgtgtgctgagaaggcacagaagcagtgatactccagtagcaatgtaccccctagcagccaggttttccactgaagggaactaagcttccttgagaagtggggaaatgagcagaaaaagtatacaatgaatctggaaggttatttggtgtcagaaaaataaagcaggctcaaaacatcatggggacttgtcaaaacgatacaatagtcaacttaaaggactcatgtggccacatctggacaatttgagctttaaaaagaaaaaaacatgttaatggatttgtggatattgtatgtttcaaagctagccacaacagtatcttccatttcacatattcttcttacatgtgtctttgaccctcctcttgttgagaggcagggtctatgtcccctcgtcttgaaccggggacttttgtggaagtgatgctgtaggacttcgaggccaaatcgtagatgacagggtgcttccaccatgctggctggaacactcatgctggagcctaagccaccatgtcaactgtcaactgtcctgaggtccctgtgcaaactagtccatgtggaagaaccacatggaaagagccgagacagcctgaaaagagaagaatgccacatcagcccccaacagcttcagctaccatctacaacaactgtgtgagaggcttctgagctgaatccacctggctgaaccctccccagatactgacctacagaaatatcgagaaataatgcaacgcttgttgttgttttaagtcactacgtttgtggcaattctttgcatagcaataggtaatcataatagattggggacaaaaatatggatgacaccatgacaaaacctcaaaacacctgactttggttttggtggcaggaggcattagactgctggtgaaagcttgcaggggctgtgagagcgggctggcagagtcctgaggaggtctcagtgggcacttaaagtcaagggaggaaaatgttccaagaagttggatggaagaacctggatgtggggtagtgggtggtttaataatattgtcacctctggtaatgcagtaagatggaaatatgctaaataaacttgatgattccactaaagaggctatcagacagaacttagaagtaccaccagattagtttttttgtttgtttttttctttctttttttttttttttttttcctatgttaaaacatgagagggagaggtgagctggaggacaaactgttaaatataaagggccaagactcaccaggcttgaaagtcaaacttgttccatttccagcctctcaaaggtgggaaaagttgtcaaattaagaaaagatttcaggtcaaaaagaaaatccatgaggggtaccataaggttctttgttaaaaacctcagaaatattcaaggtatcatagactcttccatccagaaaaaaaggaggacttttacagatcttaaggtgtgccttgctgctgaacaacagggctctagcatcttaagagcattgtcccatagggagcccaggaaatggtagggtttatcttgagagatttgtgagtttggcttttcttggaaaaagtatgtattagggttctctgcagaaacgaatcaacagagagagagagagaatgaatgagtgcgtgtgtgtgtgtgtgtgtatgtgttgtttaaaaatgtgtttattttaaggaattatctcttgcaattgtggaggcttggcaaaccagaatctgatggggtaagctggcaggctggagacccagggaagggttgcagtttgaactaaaggccatgtctgctagcagaattccttcttgcttgggggaggtccatttttgttcattaaggccttcaactgattggatgagactcacccacactatggaagataatctgctttctcaaagtgtcgctattaaaatgtttacctcatcaaagaaaaaaaaaaaaccttcacagaacatccagtaaaatgtttgatgaaatatttgggctctatgacccagccaagatgacacctaatcaccacagagtacattgtaaactgatacactaaaagaatgcaagtttgttttttaaaaattatacaagcttaaactgtaagtgatagagacagtgcaaaatgaagaggtccctaatgtcctaacttctacaagaaggaagcaggctgagaaaactacttaacatgggttacttgtatggaaaggaagaaagactcaaaagggtggagccaagagccctggagaattattccggagtcgaccggagccctaatcaagggactagaaacaagtactggctaaattgcagaacgctatgcatcagcacctgatgtgtgcctcacattttctccctttttaaatgaaaatatcgtagaagttgtcctgtgccgccccactgttatgcatgggcctgtggagtgagtgtttacggtcttcagattcagaggaatggtgtgcgaggagctgaatcctaggaacctcacatgagagtcttgtctgaacctggacctgatttagataacagataacctgatttcgatcctggatttgtgctgctgcactaatagatttggggatattagagagaggattattgcatatgggaggatgtgaattgtggccagagggtggatcatagcagattgattttccaaagatggcagcacaatatctctcatcacgcatatccttataacatgaatttgacctttcttccatgtagagtgggatctatttcccctcttgaatctgggcaggttgtaactgtggcagatgtgattctaatgacttctaaagctttgtcatacaaatgacaaatcatcaccttgccggctagattgctacggtggatccccgaaccaccatataaacagtgccctgaggttaccatcttgtgaaggacccaagtgagccaacatgtagagaccacgtggagatgctctgaggccacacgaagagaagagagacgctcaacaagcccccagctggctagccccccgctctcccagctctggctgtttctgactctaaccacatgagggacccagagccagaatcacttagctgagtccatcccaattcccaacccacagaaaccatgaaagataataaaataagtgttgtgtcaaactcccaggttttgaatggttacacaacaaaacataactggaaaataattataacacactgaataaaaaggagtgcatgagtccctacatacataaatgaataaataagtagatggacataaaggaagctcttcctggtagaatgccagataagaaatatagaaggaaagatggagttaaaaaaaaaagtctcagcagatacggaaaaccaacagtcaaagtttgatgaggaacagaatatttactattctgcaagtgtttctccacacattactttttaattacaaaaggtggatataaccttaccaagcaattaaagctagcatcaccaatattgggatgaatcaacatcatatgcctcttatgtgatatactaagaaggacaaagtgtcaattctttggtattcctgtgaaaaatttatacttgaatcttaggaggaaacatcaaacaaatccatgttgagggacattctacaaaatacttgcctgtacccttcaaaaatattaaggtcaagagacagaaaggctgaggaactgttcagataaaatgagactaaagagacataacaactaaatgcaatctgtgatcctgggttcgacctggactaggaaaaaaaaatagatataaagacattattgggataattgacaaaaattgatatggactgtggattaggtaaaagcatcataacaatgctgatttctacagttatactgaggaggctgtgttgacctcaggaaatatacgctttaggattaaaggcacatggggctttgcttgttctcaaatggttccccccaaaatacatgtatgtactgtgtttatatatgtataatatatacatgtatgcctatatatttatatatatatgtgtgtacatatagatacacacaactatatatgtgtgtgtctctgtgtgtgtgtgtgtgtgtgtatatatatatatatgtgaagagaaatgataagcaaatggggcaaaatgctaaatctgagataaagtataggagatcctatactattcttgctatttttctgtgagtttgaaatgatatcaaaataaacatgagcagatgagagcacctgctatctcacttctatttaatattgcactggaggtcctagctagtgcgtaaggcaagagaaagaaataaacaatatgaaaatttgaaagagagaaacaaaactgtgttattcacaaatgatatggttgtgtagaaaagccaaatgctctgtgaatacattactagataactaatatcttttaataaggttgttaaatacaaaatcaacatgcaaaatgtaattgttatctgtataacagtaacaaagagaaaatgtaatttaaaattgataccactactggcacaaaaatataaagcaagaatgaatataactaaaatgtgtaaggtcctcatggagaaaaattatgaaactttgttgaaggggctaattaattaataagaaggtcagtattgtaaaggagttattctcccccaaaatgaacagtgtattaacttgttatagaaagtatatgaatgagtggtgtaatttgacaagcaggttctataatttatgtggaaaccaaaggaccagaaataatgtggccaccctaaagaaatagcacaagacactgctggtgagagcagaagcttgtgcaactttttgggaaacagtttggctttatttaatacagctgaaaatgccgtactctaggaaccaacaccccactcccaggagcaacctctcatagaatcttttccatatttgcactgggagactgaacaagaaagttctagcacctctgttcataatttaaaattataaacaattttaagattagcaacagaggaatgtataaattctaaattgtgatatagtctacagtgataaagaataagcaattatcctataataatatatagaatataaagagatagatctggaatactatacccgagtgaaaatgaatgaattacagttacatgtaataaaattgatgagtctcaggcacatatatttggcaaaaagaagcaatgacaaaaacaagtaaaattattatacataaattatacaggataatcactgtattgttattttatatgccacatatactttataactactttgcttctttcataagttaattttaaataattttaaagaaattttaaatatttattatggcattgatataataataaagtacctttaaatgtcccccaaaagtaattgactgaaataatgacaataaatcatgccatagcatactaaacaaatatttaaaacaatgttacacctttacaaatatttgttgaaatagaaagttgttcacaatatgctgttaagggaggaggaaagcaagttctaaaatagaatgtactgtaggtttccagtttctaatctgaataaataaataaatgagataaaatggaagaatatagactaaaaattgaggtttatttctgactagtcagttggaataattttctttccttcgttattatctgtattttctaatattttcccacaataaacagatactactttataatgggggtaaaatctgatgctaaccagagaccagtgcatgcctttccgtcatgtctcagttcattcattcattcacttgcttattcaccattccgtgtgtatttgcagaggattactgtgtgtgagaggccctctgcttggtgatagcgaaagaaagatgaacaaggcattgccctactctggagcagttcagtctctcagtctctgtgtaaataataacctagtgccatagcactattatgacacaaaacgacgacactcattagtatgagaatgtttacttcctcttccttccttcagtccaccaaagaaaatcccataatttctaacccaatttctatcccccttgcctaatctacttggactgctataacaaaatgtcatagactgggtggcttaagcaacagaatttgttctctgccgagaacagctcggtcggggagaccctaacctagcagcgctagaagattaaagacacacacacagaaatatagaggtgtgaagtgggaaatcaggggtctcacagcttcagagctgagagccctgaacagagatttacccacgtatttattaacagcaaaccagcattagcatggtttctatagatgttaaattaactaaaagtatcccttaagggaaacgaaggacgggcagaattaattgcagcaggaacatgcccttaagacacagatggctcaggctttgtttgtggcttaagaatgcctttaagcggttttccgccctgggcgggccaggtgttcctgccctcattcccttaaacccacaaccttccagcttgggcgttatggccattatggacagttacattgctgcagagatttttttaatggccagttttggggccagtttatggccagatttggggggcttgctcccaacagttctcacagttttgaaggctgcaaagtccaagatcagatgctgaccagcttgatttctggtgagggtgctctacctggcttgtagatagctgtctgttgctctgtcttcacatggtagagagagggagagagttctctgtgcctcttcttatgagccaaccatcctgtcagataacccccctccttacgaccacagttaaccttaattaccttctgaaagtcttaatgccaaatatagtcacattggggattagaatttcaacatacgaatttaggcggggcacaattcagttcatagcacccctttttccttcttttctcattaagaggcagttggctcacatattaaaaggatgaaaaggaggttgcatggaaaaaaggaagggagttgagagaagctgggagtgaagagattaagacaattttgggagagatgctggggacagctgggatgtgatgctggggacagctgggcgtgtgagggaactgggggagaaaagaagggatgtatcaaatgtctccatgaattaggtatttgtatcctagtaaccatttttgaaaaaagcaagaaagaatttgtgttgttaaaattatttttgaccttggggctatgttccttcaaccacatattcttctgaggctggaccttatgagttctgaatttaatggttccacaataatagtcacatgggcacatggagggcagagctatctgaaacttcatcactaggcataaaagtaacagaatagtgtgaagaaatacatcagaatataaggaattcattactgtagttaaatgtattaaaaagatccactttttatcctggaactcagtttgccccgtgcctggacttgtcccagagtagaaccaaattctagaaggcagagaaggcctcgactcactggaaaacagcagagggaattcttactgaccttttcttaaactcaagtgacagaaaaataatgtgcatctgatagtttggatgatttgttagctttaacatggagtctccactatttcataggagactcaatttactatttggttttttttttttacaatcaggttttttttaatacaaccagtttattttccagggatgggttctttgacttccttgagtccagaactataagccaataactttctgtttattaaaattagtctcagataattctgttatagtagcacaaaacagatgaagacaagtaggtgcgcaggagaatgttaggcccaatgtacagtattaggcctgaggtttcaggaggagatgtaatgaggagcactgcaggaggagcactgcagcaggagcaaggactcgggggagccagagcgtgggagcacctggagagagaagttggggcaggaaagggtgatggggcaggatgaagaccctcaggggcacttagatccaccacccactcttccttattgaggctcacagtccatctgtctggggtgggcactcagggtgactcatttccaatgtgggatgaggttgctgatgaagcaatgtttgttccgctcctcactaggttttgctgaaggtctgtcctgcccaaagcagggtgagataactgtgaacatggagagcctggcttagttttcctattgctgctgtaacaaattccacggactgggtggcttaagtataaacttactggccaggcatggtggctcacgcctgtatcccagcactttgggaggctgaggtgggcggattgcttgaggccaggagttcaagaccgcctggccaacatggcaaaaccctgcctctactaaaaatacaaaaaaatagctgggcatttgctacaagcctgtagtcctagctacttagaaggctgagatgggagaatcacctgattcagggagtttgaggctatagtgagcagagatcacatcactttactccagcccggacagcgagggaggccctgtctcaaacaagcaaacaaacaaaacccaacaaatacccagaaacttttatctcacttctggaagtcagaagttgagatcagtttcactaagctaaaatctacatctgtagattgtgaaagctacatcatgaccatgaggattatttttggtagctctaattccagataaagcccacaagtcccctctgtttcttgcataaactcgtagaatccacgaagtgcttttgttgctgagcaggaatccctggaactgtgccctagaagtttcacagctgagacaggtctctggggttcatttctggttggatgcttggggtttggagatcacctgccctggctgtttttgtcctctgaatggtttttctccaggtactcccttgaccaaaggggagactccaggcccttgaccaaaggggagactcaggattggtactctaggactctggctggccagcccattgtgaccggcctttctgagccaggatggccacaggtgacattgcccctactgatgttgtaaaggaggctctgaccttggttatcagagcaaatccagcgtatgtttaccgtgcaatgtcatttttgtcctgttgtgttcagagaatcagaagtccttatggggtagataaggcctggtctgacgcccagagtcctgtttatgagtggctcatgagaggggcctctgttctgtctagagggtcttccttgggagctcttaagtaaccagtgtcctgggttaaccggaatacctcccccctggccttgttctacaatagaggctttgccgtgtgcctacacaaccaaaaaggaagcgtttctattcccaatcagatctggagatgatattgaacataattctctatgttaggaattagaaaatacacagcatggaggggataatgtggggcattttgtggtgactgtagattccggaagttatttataatagttggcctatggggctgccaacaagtgcagaggcagttcttcttctacatgctctaagggagaatctatttccttgcactttctagtttctggaggctaccgccttcttggcttgtggccccacatcactctgacgtctacttgtctacttctgtcatcagtctccttctccgactgtgaccctcctgcctctcttttagaaggacctgtgattgtattagccctcctggatcttgcaggataatttttccatccaagatccttacctcactcacttcgtaaagtccgttttgcagtgtaagagaacatatgtataggtaccaggcctaggatgtggtatctgtggggccgttattccatctattgtgaggcatgccctgttccatccctgacctgagtgtacttggttttccttcccacagtaaaggcatgcagattattgaagggttgtgtccacggggatggatgccaggaatgagctcactggaatgctttcagtatggttcctttgagatatgactgtgagcgaggagtctgatgatttccgccctatcaccaaacctgtggtgctgtaactaaagcttgactggcaattggagaaggatcatctttccctttctactttctcatttacactgatttattgcaagttgtagctcacagtcttagcaaatgaaacaatttgttgctcctccatcgctgttcattccccagagctgagaggcctgcttagaaaaatgttcttttaggaacaaatgcagtgtggaggggcttggctgctgccagtgtggagggatccacactccacatcagctctggccctcagtctttccaggggatattccacggcagaagtaggacgcttaagcctcatgagtcatgggtaagaataatcctgaaactcatgatgtgggtccctctctgacaggtgaccacagagattagggccaaagtcagggccccagacatctcacttcctcccctttatgcctcactcataccactgggggacggggtcagcacattcttccaaagaggtgccttgaacaattgctttaaaggaacatgttgacaagaaggttgctaagatttcgatggaaagatttgaaagaaaccgtgtgaagagagcatcccatcaatgatcagccagtgagacacaaggagggtcagtccgtgtgtctgagcccatccttttctgcattcgctctcccggcaaagaagatatcggccctatccagggccgagcctcatcttcagtcccaccttctagatgtgagtctgcccatgtccagtctgggcacagcctactgtggtccaggcttgcgcagcatttggcactgggcaagatcccatatcagagtctgtgggtgttagagggaaagaccacggagagcccactagggcctgtgtgagtctgagtctctggcccagctcagcctgccaggtctctgcactgggtgtggggcctgggtatagcccttagttaggggtttcttggccctcctctgtcaatgtgcttgtttatcttggggctccatggtgaagggtccctgttgtcggggcagggtccctggcctaggtccacctaaaagtggcacagccacacagcaatttctagctggaggagatgaggtttctttctagctaaactcatatgttctccaggacacatgcaagatattatgcctgtgtctatcttcttcctcaccacaatctccttgaaggcagaaactagatttgcttcatttaagctatttacttgtctttgtcttcaaggcacctaggctagtgttgagcacacaatgcatgtcagtgactgaggattacacgtgggccctgagaactgctccattgtgaatgtccctgagcagcagcgaaggtgctgaggtgggcacctggagtccagcaaggtgtttttaacctgctgtaacttgaattccagcatgagtggggaggcatttctgcggctcctaacggtgctatccagggcgcagtgctcttggctcatgctgcagcttcagaagatgctgatttgctagttttccctgactgttttttcttctctctgagatcagtgattcccaccgtcggttttacagcaccccaggtgtctccagctgtctcaagggctggcacagaagtctcaaaaccatttgcttcaaacaaaaacaaatacacagaatacagcagttttagctgaatttggaggcaggaaagaaaaaaagctaacaaaatccaaacaagcaaattgggtgtcacactccaaaaagctggactcgctgcctagaaaagagaaatggttacacaaagtcacgtcttcatgtactggtttggatccgtgtttgaggactgctgcacaaatccaatcagacaggacgcttaaaaaaaaaaaaacccgaaacttttattgctttattttcctttcccatagaaaataaatattacacagatgaatagcaattacaaaaaaccattcaacagagttctgaaccagcaactctgaagggtgagtcttcaacgagcagaactttaccatttgctgagcctctgtttaggagagggtttagaaccagaaatgcctgtctgggttggggatcttttagctccttgatcaggcaccagggaggcagtgttgtctattatcctcatctataaaatggagatgataataatcatacctcataaagttaggagaatcaataaattaaaatttatgaaaatcttaaaacagaggttggtgcatagtaagcattatgcagtgtgtgctcaagaaagcattgggagcctgcaatgtaccaggcctggtgctagcttgtaggttcctgggctgactgtttgtgtctgggttggtttttgtctcatagggaagacagaaaggagacacctgaataaaataccttgtgatgaatgctagttccccacagagtcatgtgggattcttaattaaaacatggattctggtgctggcatttgttgttaatattttgggcaatcatttatcttttctgagcctttgggtattcacagggaatgctaggttccaataacaaaagtctccatgatttcagtggcttcacacaatggacatttacttcttgctccaggaacaatctgagcaggtgttcagattgtcaaggcagctgtcttccacatggccattcgtggatccggctgacaatggcttccaagattaccctggggatcagcatcccaggcagccggagcaaggcatggaggctcccccatgcctgtgggacgttctcatgggccagacctggaggtggcacgctcactgccatgcacattctcatggaggagacttaatcacatggccacatctaatggcagagaggctggagatagcgaacagctctgtgtccaaacaagaacaggttttactagacactcaatttgtttatttctaaaatatgaggtggtatccctgccatgctgacttacacgggtgttgggggaaccatgcactataatggatatcaagtcacctgggatggaaggagctgtgggacaagggagttgttggctgggaacagtggccttggcctgcagaagagtggggcagggttctgctggtgtctcagcagcacaactcaattcaaaaagtgttcacagaggagcgtgccggctctgccctgggtgctagggatgtagtcatcccatgacaagctcagggaggaggaatacagttcagcgtgacatgtagcatgagagcttgcatgtggtgtcgaatccagacgcggtgtcaggacatccttcccaaggacagggcatctaaccagagaacagaaggagatggcccatggggcagggtggggcaggggccaggtggagggagggtgtttaaagcagagaaaattcctgagagcaagagagcatggcttgagttaggaacaaaaactcaatatgagcagatgttaatggaggagaagaagccaagagttaccagaaaggttggcagagcttgtaggccatagtgagcctaatgggcagctcacctttctgtgggaaatcccccctttgttaaaggtgacttattcttagagccataatagtgtgtctttgaaattgttacggaaacagcaagaggggacatggattttacctgcaaccacattccacctgttccactgtgtacacctgaaccaaatccctgaatgataacacttatcaaggttattctgtggtgcttgggctaaccctgatgaccaggttcccctccttcccaacataggcatctggcttggaggagctaaattaataagatttgtgtctaataacttgcaggtgagtgcccagtgttccttgggggtgggaagccaagcaaggccaagctgccatgtggggtggctgacccctggatatcaggggggttacttggactcttttgtctggcccagaattgacatagctgtctgggccaggcaccctgctggttatcactccatagctagtctgtgtgtgatgtgtcttttgcaccttcaccttcatgtttccaaataaggaaaagtcaatggagagaaggggagaatatttctataatgtgaatgactcttgctactctgagttcctcagctgttcagtttataattcttataggatcagttcaggcctgcatttccagggatgtgcttggctgtttaacagcattttatgtctggaatgcttataacatcggtcagttatgcgtgaatgcacttatgggtgtgtgtgtgtgtgtgtgtgtgtgtgtgtacacgtgcacatccagagcaaaagagatcacaactgagaggctgagagaacagacactggctagccctgcctatttgggggtgaaccctggtcttcatgaggagtcagaagcagtttctagtgaaagtagctgtctctttgaggcataaagcttcaccagtcttcttggaaccttgactaatttttgatttctggttccatgagccaagcattatactaaaatatacccctcaatttgcagagaagtggaggtgttcaaacacagaatcaaaataaaggataattttccatcttctgctgaaacctctattttccagcaatgtagaaacaaaacaagagacgagaggacatgtggggactgagaatggtgcattagcagtcttttggagatacccacacagacctgatgagcttctcaggacagaggctgcactcaggattcatcctcatccacagtgattgtggctgtgtggacttacacaactgcagcttgctgccagttgccgctctgttgggtaggaaaaaggaggacttggaaactgccccggagagccttttggaggtgaaggaagttggctggcaactctgtccactcaagctcaaacttcagcccgttcaccagctcctgttggtccaagtctgaattgtccaggttggccgacagttctgctccttctcctgtttcgcattcatcccatctcctcctgctactcccatgtggcaaagtcctcatccccagctccctgcaaaggcctccccatgagcctccctgaccctgtcgcatagcgccacttcacaactcgtccgcaaatgttatcttctcaccactggccagctcattggggttggagtgtgtgtgataagctaatccacgtggagatctaaatggcctccagggtcattaggaaccctcactttttttctgcccaaatttcaagaccatccgtgggggatcctaccctacctctccaataggagtcgcaccctaacccagcaagtccccttcgttctggctgacatttgggctttccctatttgtgaatggattctcctcttcctccaagacccagctgagtctcatctctgcaaagacttctcagttccctcctgttcaccttctttccctcaacactcaaacccacccctcattgtccagtgcttgataatgaggctacccccttggtttcatgaatgcttcatctccccagctgtatagtgaagagaataaaaatagccacagtgtattgatcattaccgtaggcctcataaatatcatggcatttagtatgtccaataactgtgtgtgataagatcaatgtctcattgtagttagaaaatcacagtgctaggtatcaaagctgttcatctgtaaagtcgtgctttcctcagggccctcagtgtgtgtgtcccgtgagaggtgctcagtagaagttgagagaataacaagctgctccgtctcccccatgaccctagcacccagcacagtgcgagcatgtaatacatgctcaactaatatgtctttgacagacatatttgaaggcataaaggctaggagaatattgacagttcccactggctgatggagtaaaccagggcttcaggagtcgtctagaagtccagattctggtccgagtcctgcactggtcagctgagggacctcgggtctgctcaccccaagactcaatttcttcatttgcatgacaagggcttgtgcacaggttctggaactctggaattcttgatgcttttactcattccctgaagaggttaattaggacgaagtctctttaactggcaattacactgctgcgatatagcttgtttagtgaggccggcatcattccaaggccaggacggtttctgatgatcatttgccagtctcaggagaacagagaccgtgagagactgcttaagatgaataagaaactccccccactcaccatcaaatgagaaagctatgatccagagctggggaacaccactgggcaggatggtttcaatgcccctaatttagcttgcctaattctccctaagcagctctttctcagtgggaaacaaagaagctgcctttgagtgggactctgtgtatccttgtgaggtagaagtcaggcacaggctaaccagacatggacttgggagtgcagggggaaacaacccagccctcatcaagcatcacgcttggcttggccagctctgttggggtggaatgtgcgtgataagcgaattcacatggagatctaaatgactgccaagggcatttgcatttctaaccaaagggatacataattaatggtagctcttgagacatcaaactacatatcgactgtgggcctgttttgccagaacagcggaaaggctggggcacccgtctgcgggaagactccatgtaacagggttaaaaaggtaaagtttcagaggactttctgatccataagttagtggtgcatgtgtctgttcagggactcctcatctaaagcatttacagacatatagcaagattaggtgactccaaagggctgtgaggaggactgagtacagtgaggccaaattagtcctgaaacctaacatctgccagtgcatctgagtgggtgcccagtgggtggcctcaccactagctgggccaggcagcgggatggctgccttttgtgtgcagaggcccatgggggcttctgttggttgtgattttcctggctttagcgctatacgtttgaatcactgcagtattgtcaacccacccaggggcggggtggggggtgcatttctggagggccctctatgcacctgttgtattgcaagtacgggtccaaagagacgcagcttggaagaagcacacgttctgtggtgccctgtctacagcaggcttctctgcgcgaagttgttttagccctctgttctgcaagttacgcatcttgaatgaggcaaagtgacacacgggcaaatggtgtgtattccctacaaactcccagagttgacaccgctctcgcctttcttcttgcattgccagaggctgtgactctggctctcactcttcagtcatcacaaagccttttccctttatcatgtcagaccttggaaaacccaagtcatgaaaatgatttatcttcctaaattgtcagtgatctcccattaggcttaggataaatccaatttcttcccaggcctccaagggcttgtgtgatctcacctctgcctgcctgtcccgttcaagcccgtccatctctctctccagcttcccatgctccagacacgctgacctgtctccttctgcccctcaagcaggacacacctgctcccaccctgggcctgtgcacatgctggctgtcccctctccctgagcggctcccctcggatcttttgtgactgctgctgtctcatcggtgtctcccagatgttaacttcccagagagaccaccactgacgttcctgtcacaaggaacccgtcttccctgcccacctgtgactttgttttagcttcttcacagcaattgttattagggaaattgtcttatttattgtttaatgtctgtacagtggactaggatgtcggctctaaacaaaaatgtcctctcagacttggtattttaaaatgtgtttcaaatttacaattgtaataatgggtaacataataaataataaattgtatattaggtccctggactgctgttgaatgatgaatggcaacaatgataggagtagttgctgtttattgagtacctgttatgtgtcaggcccacatttaatcatcacaccaaacccaagtgaccagtgctgtcaacctcactttacataaaaaacatattaaaaaaaaccaagattcacaaatgttacatgattttcacttttgtaatggcgtaacagcctggattcaagcccaggtctgactggttcagaaacccatgccctttcttaaagaagaagtaggtaacttgctatgtcatccactatctggtggttttccctgctggcggttttccctttctctcccactctgcacccacgcagctccaggcatggatgccagtccatcagatttctcctatgtctgtcctgtgttagtctacttgggctgccatgacaaagtattcagactgggtggcttcaacaccggaagtttattttctcacggtcctggaggctggaagttgagccaaggtactgggaggattggtgaggcctctctcctgggcttgcacacagctacctcttgctgtgtcctcacatggcctttcctctgcacgcatgccgggagagagacggctgggtctcttcttataaggacaccagtcctatcagatttgagccctgccctcctgacctcatttacgttaattacctccttgagaattctaactccaaatatagtaacactggggttaggatttaacatgaatgtggggtaggggggactcgggggtggcaggggcacaattcagtccctacacattctgtggaaacactttttccgatgccttaattatacccaactgattaaaatacaaagtaatattaacagttcccaatcagtgcttgagggctagaaaacattgaaatatgtgtccctgcccccgaggcacttagcgtttcaaatctcggactcattgagttgtgtgctttataatgataattggggcttttagaatgaatgctggatgcccgtgttgaagcccctcagcctgaagggccactggggcagacacatgctaagaacgtgtcaattggataatcaattagctaatttaaaaagtggcagccactgagataggaaatgtgaaagatgctactgaaaattgttagtctgcaagtcacatcagagagatgtctgcatcagcattatatcatgatttggcctccgaatttaggcagaatgtgagaaagctggagaaggtccagaaataaacaacaggatgaataagggagagaaaataatgctatgagaaaaggtgataagagttgcattttttattttttaatcccaatgcccaagagattgtggcacataggtaattactatcttctagggtcgttaaagaagaatgctgaccaactgtttaatattttcttgggaaatttaataggagtcatgggctaagtccagcataagagaagtggagggggcaaagaagcaatcattttgatttttagtgtgttaaatgctgaattaattcccagcaagggaattgcactatcggtggtcctgtcttgacactatttgtctggaatggttcatgtgcatagactcaagcctctcccacctggtagaattctgctcctcatagataattttccccacagctatatgtcactgtggggaactctgagggccggggatctatacccttattctgctttgcacagtgtctcctgaagtttccacatctttggacttagagagctttacatcatctaattctgccttctggcatctcttctcaattgcatcaagtgctcttgggacaaccctgcagtttataaatccatctacctggaggcaggagatcaatcagatgacctgtgaagcccctttgtggtgaaaacatctagcggctttcttacttagaattaaagatgggtgcagtgtcatggctgctcactctgcctctccatgagaggaaactaaaaaaaattctcacaagacattaatagccaaataaagagttaatagggttcgtctctgggattaatttagaaagagttgataggataatgggcaataaaatagaaaaggaaataatgtttttgagaatcatttcttctgttaaaatgtattaggttcacaaaggagttgctattttggatcattcatttgatgattcctcaaagatttctgagagccaactagatgccaggcactctcccggtgctgaagatagggtggcaggcagtacaaagctcctgccttggtgagcttgcaagcctcatgaattaggatttccaactgcaagtgacaaaaatgcaacccaaagtgctttaagcaggagaaaaggatctgtaactgggaagactagtgatcactggttccatattattgctgattggattcagggctcagcagggaagcaagtgacagcctgcccgactgctcagctgaattctgaggtttcctcttgctggaccagcttgggtcctgggaccatccctgaacaccagtttatagagaaggaaagactgctgtacctaaggttaagtggagacatgttttccccctgctctggggatggggggtcagcttcaccctaagagtggggctggggtcattttgctaaagcagctcaggacatgcttgccctaggaaggaacagtgaatgcttgatgaaaaaaaaatttcttaaggtagttactttttaaagtttttaaacaaacttcagaaagtttaatccacacagggcttcgaacccacatctttccttacatggtgcttcttcaggaagcagcaggagaaatattgcctagtccccgctgccagaaccaccttcttcctccacatcagcttttccagtgattcaacccacccctccatcccatcagaacccatctagcccacacctccttctcagtgcctagcttgtgctgccccaaatgctacatcattctatattatgcacagtgagaaatatatgtatgagaatacacacacatacctgtgtctggatgatatatgtgacttttcataaaagcaacccgctcttaaaaaccccttctgtgaacactctccaccctcccctgccttctgacagatctcggcaaagattacacttgctgacagcaggaacccaccagccccctaatttcacacttagcccttgccattggaagaatgcaccattttttcttcctgaagtgctacactccagggcaggcctttgtgtcctatgaaagtgctgtccatcactggctgcttctcctctggcccctcccaccccaccccaacgccaaatatctctgggggcagccctggggttcccatcttggtgctcccacagccctccgtggtgtgctctggatggttgagtggaatggctttctcgagatgaagaaagaggcctgcagcatggaagggaaggagtgggcacagggccgtctctactgctcactgacctcctccagtgtcctgtgacaaattctgagagctctccacccatccactccacacctcttccccaaacctgtggttttaagtacataagcaatgcagccacattgcaaaacaagaaatgagggaaggagaagggagggtcctgagaaaggagaagaaaagaggaaaaaaagcagagaaaaattgagaaaagaaatacggaaacccacctgcaattgccacctgcaggttcttttatgtgcatctgttttatgttgttactctttcaatacagagttgcccacggtctactctactacttgtttatcccaagtaatttcatgtaaaaaatttaccctcaatcttctgtagctcccttgctagggtgacacctacatctcctgcctaagtattgtcattagacccaaaatgaatgcatgtgacttgcagggtcaaaggctcagtgcccttgctctccgattagaagatcttagatgacttattttgatttcttgttcctgattgtgcctcttagggcagaaatggttcttgtaaacaacaaaattctctataaaaggcatcttgctggggaaggagggataatacctggtggaaaagtacaggtagttattgcatgaaaaataccaaaggggcccaggcaccatcattatgctattgcccttctcggaaaggctgacgtgttgaaatcaactgtggccatcccggcttcctttatgttgctgctttggagcgagcagacagaaagaagcgtgcacgttggtgattggggcatgacagcctcaaggcactaacccagcacctgcttcctgaggccagctcagcacctacaaggtgccaggtgctgggataggaacagaagggacttggtccctgtctgagaggtgtcatctgggaggaagccagccatatgtgtgacttctagtgcccaattagtcagtgtacatcagaaagcaggggcgcattccagcttatagaagagaagccctggggtggaaatgtgttggtgtttttacaacagtcagaacaaatggtggcctttggaaagtaccatgagcaatgttaattataaggacaagcaatggaatgttaagggtcagaggcaggaggggaccccctccttgatggagcaccttgtactctgcctgacaagtgagcctcaaaacagagagcttggttttacaaagttttttcttcccttcaggtctcatacttttatttgtaaagtggtgctaataatagctttcttctttcactggattgatgaaagactcaagtactaaccacatacaaagattattttaatttaatgcattccatggggggtcagggaataaatatcctttgtaatttggttttagaacgattttaaatttttcccccaattacaaaatggataaatttgcattgtagccaattggaaatatagcaaagcacataaaaatatttttaaattatcatccagacattaaaaaccataccattggcatgtatctcccaaccaagctttttcctatgcacgggttaagaaaaacaacattcagcatctctgttcttatatccttgtccatatactcctaattttgtccttaacatgagtctagtagtaaaattgttggagtgtagagcagaatatatgcagagtttcagatcttagaactatagtgtcaaactgccattttgaaaggttattcaattcacatcccagaaattgagataatgctgcccccttccccacctgtcctttgctgggtgctaacatttctaaacatcttactaatttgatagtataaaaatggtacttcattgttttaattagcctttctttgattttggtgatgaacatttttttcatgtgtttattcaccagttgtattgatttctctgtagttgactactccttgtcttttttctattgatgtatttcttcttattattgatttgtaaaatacacttttatatattaaagacattgacttttcagcaaacattttgcaagtattttcccatttgtcgtttgtcttttgtttatggtaggcctgataaacagaaggtttgtaatgtttattagtcaaaaatgtttaacttttttcctttatggtatcagcattcgtttatatgcatataagtgctttccaatttggcatggttaattttgtatgtccacttggctaggccatagtgccaaatatttggtcagacattattctagatatttctgtgaagatacttttcagatgagattacgtttaaattactagactttgagtaaagcagattaccctccataatgtgggtggacctacccagtcagtggaaggtcttagtagaaaaaagacttagctcccgcaaagaagagataatctgccagtagactgctttggacttgaatggtaacatcagctcttttctgggacttcagctgccagcctaccctgcagattttggacttgagtggtaacatcaactcttttctgggacttagcctgccagcctaccctgcagattttggacttgccagcctctgtaatcacatgagcaattccttaaaaaagatctatttctccctctctctcaatcaccctacacacacacacaccacacacacacacaattagttctatttctctatagaactctaataatatacagccaaaattatgtaaatgtttatttatattttcttttagtattattatgctttcagtttgtgtgtggtgtgtgtgtgtgtgtgtgtgtgtgtgtggtgtgtgtgtgtgtgcatatatatatatattttttttttttttttttttttttttttgagatggagtctcactctgtcgcccaggctggatgcatgggtatgatctcggcttaatgcaacctccacctcccaggctcaagcaattctttgcctcagcctcctgagtagctgggaatataggcacctgccactatgctcagctaattttgtatttttagtagagaacaggtttcaccatgttggccaggctggtctcaaactcctgactcaggtgatccacccaccttggcctcccaaagtgctgggattacagacatgtgccactaccctggccagtttgtacattttttagtcggttgagagttcaatgtttgctataaggccatttttttttttttgagacagggtctcactctatctcccaggctggagtgcagtggtgcatcatggcttactgtagcctcgaattcctgggaccaaagatcctcttgcctcagtctccaaagtgctgggattataggagcccagcctcaaggcagagaggcagagatttgatttaatatcttccatgtggttaactaattgttccaacaccataaattaaatgacatatcctttcttttttccttgaaatgacaccctatttacatgtatcttcctagatttttagtctgttgtttgatctgcctgttcctgctgccataccccattgttttggtaaccttagttttacaatgcctttaatgttagagaagtcaacacctcagactgccttttctgaatctttttttagaaatttttccacatgagtgaatttgaataatttttgttatgttcccaaaagaaatcccattcaaatttattggaattgtgttactgttataggggaatatggagaaaatttaaatctttacatcctgaattttcctattcagggacacagagtctctccgtttactcaaccctcctattttctcaataaatttctgtcattttcttcataggtgttttgcacattttatagacattttattttttggttgcttttggattttttgtcattataattttctggttttgtgtatgtgtttgattaatttatattgtaaacagtgccttactaaatctcttacaaattctaatagtaatttgtgaactgtagatttttttccagaaaatatgataattttctcctcttcttttcaatgtttttgactattatcttgtattcttgtctaactgcagggtctagaccttccaggaaacaaatcttagtacatagtacgtgagcttctttgtcttaattctaaaagtaaaaggattgctccaagtggttcattaaaatgatattggtaaattatcactgaactcttagaataagtcctcctggtcatggcacgttagtctttcaaaaaaaaaatagcgctaggtttgatttggtattcttacttaaggtttttatttatttatttttgcattacttttcatgagctgtagattttagttttacatttcatttctcatatggtggctgatgcactttgaaaatgagttaagaaactcattttttcaatatacggaattgttgaatattgtttgccctcctaagtactttgatgttataccaaccttgcttttttgtcatttggtttttctgacattcactttgccaacaaatatttttgagtgcatactatgttctaaatactaatttttactggtttatcatttaatctatatttttgtatgttttgcttttttttaaaaaaaaaaagcaggtgatatttgttgagccaatctagaattatttatgttatcacaggaagatttaacctatttatagttattataatatgtgtatgatcagaattgcttcttgcagcttattttgttttctgaatttatgctttctttttcttgtttcctgtattgtactctataaactgttgttattttattatcatctctcagtgcctctatattccctaatcttaaatctcccataggttacctttaaaaattttggaagttttttttttttcctttccttttaagagatggggttctcactttgttgctcaggctggagtgcagtgtgtgatcatggctcattccagccctgacctcctgacctcaagtgatcctcccacctcacctcccaaagtgctggcattacaggtgtgagccaccatgcctagccctgtaccacttctagtttctattattattaggaatttggagccaaccaatgaaagactttttgttagtctttctttctaaaacatgctgacaatttattcagcttattaaccaacattatagcatttatttgatttatctgttatttatttggttgcatggcttatcggggattcttctatattatagttcagatgttaattttcttttcttaggttaattatattaatgttacattttcaagcgatgttttgaatgaagaatgcatgggtgttatattgtcttgaatactgcatgtccaagaatacaagtattacttttatatagtaaagacgagcttccttattatacttcctaaataaaagtacttcccttacaactatgtagacattggtccattatcttccagtattttgtattccagaataaagtctaagggaggcctggtttgtttcctttgtttaaaaaataaattgttttgtggtttctggctaaaatgctagaaccacttgtcctttgtcttcattatccaaatgtttatttggtaagtgtagtatcgatttcttaccattttttcttctggaacatgatgaatgcttttaattatgcttcagtctttaggaacatttcccacaactatgtctttgtcttgattatttgttcagccttgtcttctgaaattgtctgtgtgtagtggaaactctattgcctgccctgcacattgctccttttcttctctgcactctgggacagcttctaaagtttgtccaacatgtcattgctgagttttgtatcatttcagttctgctctttactggttcctatgtggatgctaattatcaaatgcattttccacctcttgcactcctttttctaagtcacctcacttctcatttcctatgtttttcctttatcctcttctctcgagcctttgattcaccctcttgtttcttcatctttcctcttctctagagattcctcctgttctccctgaaccaacggtttattattattattttattattattattattattattattattatcattgagacggagtcttgctctttagctaggctggaacgcagtggctcgatctcggctcattgcaagctccgcttcccggattcacgcattctcctgcctcagcctctcgagtagctgggactacaggcgcccaccactacgcctgctaatttttttgtatttttagtagagacggggtttcaccgtgttagccaggatggtctcatctcctgacctcgtgatccaccggccttggcctcccaaagttctgggattacaggcatagccaccgcgcccggccccgacagtttatttaattctcttgaggtgccgaagttctcttcgttttcttctgaattctaaagtagatcattctcagagaggacccttcaggataatgtttgtttgtcgcaatgtacagattctactcccacctctatccccactcctttgtaccaggctcatgttgggtttaaatctcgtgtacttaccactgaaaaagaagtgatccattcccagtactgctgaccaatagtcaggatgtttagaagcctttgtccttgccgtctgtccatgtggtggctgaagacaggtttaatagcatccaattccatagaattggaattggaagaattctaaggaagaatccacttcatgcagttcctcttccagccccactggctgctgctctgccctgtgaacacatggatgggcacaggacacactgcagttcatagtgtatactgctgctggggttctgctcttacccactgtgtcggtgtgaatttcatgtattcctgcttgtcctagtggtaccattcttctctgtgaccaaagaatacaattcaacgtttctcctcatatagcaattaatatatgcatatttgtaaaaagaaacaattctgccctattggaacatatatgatgtgaataaagtataccaagatattccatgcttatagtttggagttaggcgtcatcaaagcaaaatgctgttacagaagaggattagcaaaggcgcagctctctggaggaggtctgtgagatactaaaaatcttatccaggccgggcacagtggctcatgcctgtaatcccagcacattgggaggtgaggcgggctgatcatttgaggtcaggagttcacgaccagcctggccaacatggggaaccccatctctactaaaagtaatataaaaattagccaggcatggtagctcatgcctgtagcccagctactcaagaggctaaggcatgagaatcgcttgaacctggaaagtggaggttgcgtgagccaagatcacgccactgcactccagcctgggcgagagagagcaaaactgtctcaaaaaaaaaaggaagaaaatcttatccagtctctgggcatcacctttccacccagtcctactccctgttggcaactaaggctactgcagcatcatatgcataagccattgctcttcctttgagtgtacaggtatctgggtatatacatatgtgtgaaggtacacatttatcttattacgaatatactacataatttatgatgcagagtgaaaagagattgaaaaacacattcaagtgctaaaatactgcttgggatatgtagcagtataattgaaggacatgtactataaaagtctatgtgtaaaattctttaaagaattacccacattattctatgtcaaatctcttgttaaaaacaaactggaaaaattcactggacagtagctgattttcaactccaaatctccaatctattgagatccaagccctctaagtaagatcacagatcatagttgtttgctcactgtg

SEQ ID NO: 2874 - DNA, 17770 bp, Homo sapiens
aatgtctctgtaatattttatcttctttaaaaaaaagggggggaaataccaaagtgtgaatactgtgctaccttccagagttcccacatgggctgggatttttttttctttttctttttttttttttttttgagacagtcttgctccagcccaggctggagtgcagtggcatgatctggctcactgcatgctctgccacttgggttcaagcgattctcctgcctcagcctctcaagagcgggattacaggcgcccaccaccaaaaattagcccagctaatttttgtatttttagtgagatggggtttcaccatgttggtcaggctggtcttgaactcctgacctcctgatccaccacctcagcgtcccgaagtgctgggattacaggtgtgagccaccgcgcctggcctgggcgggaatctttgttgacttctttgggaacattatctctagagtctgcttttttgtgggccgtttgtagagatgtaacatgaagccattccagaaatggtaacttaaaaaaaaaaagactcatgtctaggaaactgttgagattcaaaggaatctcactgttcctaaataaatgtgtatgtgattatgaaaagtatcccactgttgataagaagaggtttagattcttgttctgtgccttttgttgttgtggggggcatgtgagtgcatataatgaaatgggatgacagaaaatgttcaaattgggacattaagtgtattactccccaaactgatgctaaagatgacatatgttatacagggccctgaagaattcagagttgttactctctgtaacataactaccttgagggcaggtaggccagagatattgtaagtgggaggatggtgaatgtttaaggtgaagtcatttgaacttaagaggtggggactgaggctaatgtctcatgtctcagataccctgaacggcagttatcattactcacaacataaagcaataaatagttaaggcagagggtaatttaataatcacaattagctgggcttggtggtgtatgcctgtagtcccagctactgaagagcctgagatgggggatctattaagcccaggaagtcaaggctgcagtgagcaatgatcatgccgctgcactcagcctgaacaacagagtgagaccctgtctcaaatatacatatttgtctcatgtatatattatatatatatatatatatatatatatatatatatggcttcagaatgcattgtgactttggttaggaggttgaaaggcagcaaacctattcttgtgttttttcttagattaatacaaattaaatagttaccgttggagcctgcagtgagccaagattgtgccactgcactccggcctggcgacagagcgagactccgtctcaaaaaataaaataagtaataaatagttaccattacgagataaacgctgacctgtgggaaagagaggcccttcaaaaatgtaatggctgatggggaaaactaaaattaggattaaacacttcttgcaaataataatatccacacaggaaacctaatattaataatgaagagttaaccgctccctgatgtttgaatggggctttaaaaattccttttcacgtcatgaagtgggagaaggcctaatggtaatgtttactttctcaagaaaatattagttaaaaggggccaggtatgtagcaaagagacagcaagaggagccttccgcagtacttaagtaactaaggggactgctccaccacccatgagcccatctgtgcatatccctgcacaatacacatgcatgcatgcattcctccctgtatgccgatggatgctagagctgaccctttctacagaagtcctggctaccttgacatcctactcaggtgagtgctgaaagctgatcctcgcattgtccaaaacttggattttcatccatttgcccgtgattttttatgaaagaaataacagaattgtagcctgttcagactccagtagctttccttgccaactaacttggacattgcgaacagaatcaagcctgaaagtgagcaaggtcacctttcatgtctgcatgattctgtaaatctgtaattccagggaagtttaactgaagcttgattcgccgcctcagcatctaactaggacaagagaatctgagggcaaccaccagtcattgccaagggaggaaaaaaaaaagattgtgttgctacatttcaaattgtatttttttttttttttgacatggtgtctcactctgtcaccaggctggagtgcagtggcacgatctcggctcactgcaatctccgccccccagattcagccattctcctgcctcagcctcctgagtagctgggactacaggcgcccgccaccacgccagctaattttttctatttttcagtagagacgggatttcaccatgttagccaggatggtccgatctcctgaccgcgtgatccgcctgccttggcctccgaaagtgctgggattacaggctgagccaccgcgcccaaccgaactgtatttcatactctgatgtttagttgactcaaaacggtgggcccagctctgccctcctaagacaaagtaagaacttttggtctgactcagagacgagtttattaaccctaggactcaaagcaggaaccctggccggagctcccaggttgccaggttcctcttgtgctctgtgtggccccaccatagctcacctgctgactcttctgcctcttcttctgtggggggaactccttgcagttgaggctttttttttttttttctgtatccctgtgctaacattgtgactagcacataacaggcagttatgttttttaaatataaaattcccttttttccctctaaatttttaatgcccttcactgagataggagttgtgaatacagcagaatcagtgcaaacctgcaggaatttttaggtaagtggaggcagcatatcacagtggttaaggcattgtcatgccagacccctattgacttcaggagggatagcaccagattcaagaggccaagaccaagagccaacaaatgcgacatagggtttgttgaggggaacttacataagagggaccggtggcaacaggctggacaggagaaccaccactgcctgcagaaagcacgcagtttactggcactctcatctaacaccctcccgctaacaacctccacctggcaaccttcatttacccaaaacaaagggcctcagccccctgtatggcccatgttccaagggctgggccaggggctagatgttcctcatacataaggaataatctctgggttggccacgcttggaacactagacaacattcaggtgtgtctgccacacagggtcattctcaggttatacttaagttaccgctgtaggtgcatctgccatacaggcatgatctccagagtcatattgcctgggtttgtaccctatctgcctcctactaaccgtgtcatcttgggaaagccttgactgctccatgactcagttttcacctgtaaaatggagataacaataggtcccatcccatagaattgtttgtgaggattggtgtgtgtatatatatatgtgtgtgtatgtgtatgcatatatatgtgtgtgtgtgtataatatatatgtatatgtgtatatatatgtgtgtgtgtgtgtgtatatatatatatatgtatgcttggaacaatgcctggtacattaataagggcagtataggtgttatttgttattatttgattattattctcattgctattaaattggtggagagcttcctgtcccctgctctccttacagcccagaatttctgggggatgctaccggtgacaaggatctgatttggtggaacaggattgtggccaaagatacatacatcaacaaaatttaatcctaggtcatgaagcttgaaccagaatcccagtcaccctaggataaaggcccaatattttaggaagaactggctccttccctttaccttaccccctcagcctttaggctcctgaaggctttagtaccctacttttgtgggaatgatggcagcaagaagaaagtccagattcagatactagaaaaaaaatactgcaacaaacaaatgggggaaagggtgagctctgcatactctccattcagtgaagtggagccttccagttttacttctccagactatcattacctgttatccggtctatcctaacacatgtgtaacggccttctgcaattcatcttacactgattttaattgagtattgctagagctggggttctaactttggttgcacattggaatcacccagggagcttttaaattgattgatatctacacaagattctgatttacttttttcggagtgtgccctgggtattaggattttaaatagctcccagtgatactaccatgctatcaagattaagaactacgacccaaatgtgtatacgaatcacggggaacttgttaaaatgcacattctagtttggtaggtccaggggtaggttctgagatttgagtctctaatgaactccaaggtgatgcagattttgctggtccatagaccacactttggtagcaagggcttggagagcatgataatatgattcccttgttcaataacatcatgagctccacataataagctctctcagcctggcatcttaggctggcatcagaggcatttaaggacctaacagcaatggttatcaaatgtgatcgtctgaatgactcctgggcaggttttaaaaatacagatccctggaccccataccagacctaataaatcataatattcaaggtacagcctgacagggtatttgaaaacacttcccaagtggcatagttgatcaacacactttaggaactggatatgcttccaagatagtttcccaggctcatttcacattaattcaacatacaaacattattgtacctgcctcatgctaggtactagggaaacaaagatgaaaccagtgccatccttactttgaagagttggtaagataaatgaccaaaactagaatatttactattccccaggcacgcctaaacactcacacctctgctaacggtcttctcctttgagaatgtctaggttcctcacacccgggattgcctgtcctgatcaatcaagacagacaccgtctttaccccattcgagctccattcttatcgctcaaacttactctgcttggtattaaaatagaaccagagaagaaaagatttacccaaagtgaaataaaacagttggtatttatgtagtgacttccatgtgccagtattgttcaaagcactttacacatgtaatattttaaaattctcaaaataaccatatgagaaggtgttattactatccccatcctcaggatcgaggaaagggaggcaacagaaaagtaactgcccaaagaggtaccaagcaaggttcactttcaagccttatgctttactgtcaagttgttacagggctgactggaatactgtaacttctaattctcaggcctgagcactttcctgctatcaattcctgtttcacgacttaaattcaagcacgagggcaagaacgatgtcttacatccccacaatgcctagtaagggtgcaagtacttagtaggtactcgataaattgattggatggctgtcccattgaggggaggggagaagtggataatgatttaaacaaacaacaacagctaacaagagcagcggcctccaggtctcacgtcaccgctagatccctcttgacccccccgccgagaaggaggaccctcccgcgccctttcggagcgtcggtggcccggctccggctctgcgtccatcctcccagccagcaggtgcccccagacccccggctcctcctccgccgccgtcacgcctcgtcctccgcctctggctcctccgcttcctgttgccgcgatccgggccgggagctcgggcgcccgggcgcccgaggcttcccggtgcgctccgccaggtaaccgctcggcgcgactgcccggccggggtgggcacggggcccgcgcggcccattggtggggaaggaggcggcaagggcccgggctcgcctccgaaggggagcgggcctcctcctgcctcggacgcccgaggcttcctgcgccaggctgcggcgccagcgggatgcggggataacggtgcctggctccggctttggtccgggcgtggccgagcgtcgcaggcaccgccgcgcggagatgcgatcgccgtcctgcgaggccccggggcccgcgctcgccgccagccacgcctgctccaaggctcctcctcgcagtctggccctggaacgggagaaaccaggagaggagccttggacctctgagccgcgatgccttccaaatgcccttccgttctttggcaaaaaccaagagcaaaaagccgaaacccaccagggagttcccaaggtcacagagttgtgtctgccatttacgaatgtctgttcttttattaagtgtttgtaaatgggctactgttttctctgttctgccaaggaattaggattcagagagaagactctaaaaatactaataggcatatccaaatgagctgatccgcattactggccatgaccctggcctttagaaggagataagggagggcagttctcttcacctgggatactttgatttctggcccttactctgagaattggccttgatgttttacaaagtttatctcagaactcatgtcagaactggaccggactgtagagttcttcagtcctagtctctttctttcctttccttcctccccttcctcttccttcttttcttttctttaatttcttctttttttttttaacgtggttctagaggttaaagtgatttgcccacactcttatggctagtctctctagggacaagacagaattggaacccaggtctattatggacacctacggttttcttgaatggaaatctatttcagatgaaagctgtacagaacttgaccttcatgaagccctctctggatagcattctgggaagtggcttgtgtattgacgtccacagataactatttcactggtcagaataaggtaagcaataagcatagccatgcagaaaatgtctgctgagatgaagtagatatctgatatgttttgactttttatttgtacgtttcaatggaggagctaatgaatactaactaataacaaatcttgctcatttagattttagtcctgtgtgactaaattgactcagttatagttgttctgtcctaacgtatttgtcaccagtaaaagttccaaggtacagctttctggcttcatttcattttaactgaataattgccttaaggatatttttagatctcaacaaaaactcccctcctctgaaccttagaatccttctgcttcactcttggcaaatctttgggtcggatttcagaactaataaagccaggatttccccccaacctccaagatgtctggactctttgtttagttctgttttaagtttatcccaagttttgtttttgactgatgaacctgtgacccaaatccaaacctagctgaatttagtatcagcttaaaaccacattaaactgccatgtgtcatgtgacctctacagaaaccaacgtggcagtgttctgttttttcatgagtgcgtttcattggggtttttgactgtgaagacattatttaatacatgtgctttattttctgtgtattattgcccaaggtcatcatcgctagagggttattattgacatttactcatcataaaatgtgatgtcagcctaccgctcggagtgcagttcctggtttccagtttacaacattgaccagttgctaacatgttattctgaggaacttggaatgataaatacagccatacttaaatagaagattcttggccgtgtgataaggaaaataagataaggcaatatttttgaactattctataatagaaatgaggataatacacaaaatgacccagtgctgttttcttagggtgcatcctttgtttttctggttttgtcttttcatcacaggatggcattagctctgtgtctgcaggtgctgtgcagcctgtgtggtggctctcgctctatatttctttctgccacctgaataagcaccgaagctatgagtggagtgccgcctggtcaccttcacccatggagtcctctctataggcctctccgcttatattggttcattgatggcccatggccttttacccacccaggtaggtaggggattttcccttagggtttatgatttgggggtagtcttagaagtatgggacttttaaacagaatttgtacaatacgaagactaattcccattataattttgtattggaatccttattcttcttcattgttaacttgatattgtttatgtcacctgttgtttctgcttttcataactctctacttttaaaacagttttaaattgcttgttacaatttaattggaaatacaaaaactataaagccagtatcaactcttccactaccacccccgaaaagacaaaaatagaactgtatcatacatatttttggcacttgcaacttttacttgactgtctattcaaaagacagcatctttccatgtctatgttaaaggatgagatgttccttatcctttttgttactagatgtacaagtgttactttcagaagttgcaatttttttttttttgagatggagtcttgctctgttgcccaggctggggtgcagtgctcaatctcagcaagctccgcctcccaggatcacgccattctcctgcctcagcctcccggtagctgggactacaggtgcccgccaccatgcccagctaattttttttgtatttttagtgagatggggtttcactgtgttagtcaggatggtctcgatctcctgacctcgtgatccaccgccttggcctcccaaagtgctgggattacaggtgtgagccaccacacccggccaagtagcaaaaattttacccccttgtattaattggttggggctgccataacacagtaccacagatgggtggcttaaccagatgttcattttcttaaaattctagaggctagaagtcggagttcagttgttagcaggtttggtttcttctgaggcctctgtccttggcttgcacatggccgcttcccactgtgtccttccatggtctcccctctgtgtgtgtgtgtgtgtatgtgtgtgtgttgtatatgtatgcatatctgtgtcctaatcccttctaaggataacagtcatattgtgtggtgtgtgtgtatgtgtatgtgtttgtatatgtatgcatatctgtgtcctaatcccttctaggataacagtcatagtgtgtgtgtgtgtgtgtgtgtgtgtgtgtgtgtgtatgtttattatgcatacctgtgtcctaatcccttgtaaggataacagtcattttgtgtgtgtgtgtggtgcgtgtatgtttgtatatgtatgcatatctgtgtcctaatcccttctaaggataacatcatagtgtgtgtgtgtgtgtgtgtgtgtgtgtgtgtgtgtatgtttatgtatgcatactgtgtcctaatcccttctaaggataacagtcattgtgtgtgtgtgtgtgtgtgtgtgtggtatgtttatgtatgcatacctgtgtcctaatcccttgtaaggataacagtcatattgttgtgtgtgtgtgtgtgcgcgtgtgcgcgtgtatgtttgtatatgtatgcatatctgtgtctaatcccttctaaggataacagtcatagtgtgtgtgtgtgtgtgtgtatgtttatgtagcatatctgtgtcctaatcccttctaaggataacagacatagtgtgtgtgtgtgtgtgttgtgtgtgtatgtttatgtatgcatatctgtgtcctaatcccttctaaggataacagtctagtgtgtgtgtgtgtgtgtgtgtgtgtgtgtgtgtatatgtatgcatatctgtgtcctatcccttctaaggataacagtcatagtgtgtgtgtgtgtgtgtgtgtgtgtgtgtatgttatgtatgcatacctgtgtcctaatcccttctaaggataacagtcatattgtgtgtgtggtgtgcgcgtgtatgtttgtatatgtatgcatatctgtgtcctaatcccttctaaggatacagtcatagtgtgtgtgtgtgtgtgtgtgtatgtttatgtatgcatatctgtgtcctatcccttctaaggataacagtcatagtgtgtgtgtgtgtgtgtgtgtgtgtgtttgtgtagtttatgtatgcatatctgtgtcctaatcccttctaaggataacagtcatagtgtgtgttgtgtgtatgtgtttgtatatgtatgcgtatctgtgtccttatcccttctaaggataacgtcatattgtgtgtgtgtgtgtgtgtgtgtgtgtgtgtatgtatgcatatctgtgtcctatcccttttaagtataacagtcatattggattactctaattaccccattttaacttgatacctctttaaagaccttattttcaaatacactcacattctgaggtactaccagttaaggctttaacgtgaatttggggagggaggacacaatgcagcccttaactcccctggaatatatttttaaaatatttctttagcttttcttactgaatttctgagtttccccccaaactgtcaactaatgaaaccaactgttacgctttgtgttttatgtgaagattctaaatggtttcaatatgtcaggtccttaaaacctatgttcctggacatgagcacacactaacttttggggcctctccagaatctactttcaggatgggttaagaccactgagtgttcaataacgtaacccataagctgagaaaaaaatctgacattcaggaaacaatgattcaagagtctggaaataaactttagcagagtaaaaaaaaaaaataaagtttaggattttaattgaaggaacaaaataatggattttatgctgttccgcggagaggatactgagattattgcctgtgttcattgaaggagcaaactcattgaagtctgattcatcagaacagcatttcctggggtctgaacatcgtttgtttgataaagacctagattttatattttagtctttctttggtcctcattaaaaagcattgcctgctattgtttttgtttctttagtgtctagtaaggtttgaaagacaacaacatagatccctgtgcaaggtaacacaattcccagtcactcaatttgcttctgtcttggtttgttcaggctcacccaatacacctctccaagttcatgtcctgtgtctcaccttgggctacttctcttcgacttgggctggtgcgtctactttcagtctgagggtgccttgatgctggctcatacacattgagtatcttgggcattatcatggcccttgtgcttggggagtctggcacagagtcaatgcagtcctctttggaagtgagcttaccaaccccttgctacagatgcgctggttttccgggaaacagggcactatcacagtttcactggagatgtagtggacttcctctttgtgctctgttcacaggagtgaggattggtgtgggagcttgcctccttttctgtgaaatggtccccccacgcctaagtggtttgtgaaggctgggggagtagcgatgtatgctgtgtcttgggtttcatgtttagcatctggcgctttgcatggaggaagagcatcaagaagtaccatgctggagaagcaggcggagtgaggaacggcagctgaaacacaacggacatctcaaaatacacagccaaggcttgctccagattatggattgggttaagtcagccatgggaaccaggttggaatatgactgttacataattacacttataacaaacttaggtttcaataaagggctaaatgattgatcaatttggtcagtcttcaagccgagcatataccagtattaaaacactaacttcacagtagcacagttgtagaaagtgagaatactccatggtagttgggaataagtgagaacgtgaagtgagtacaactggcatttgttttcatttgtggtgaccctgggtcctcctgtcctgggaggtttgatgttcaggcagtttagaaaggaactcgaaaaagattagtgctatttctgttcctttgagaagtaactctttcaataaacacttatttctgctttccatatagcaattatctaagtttaccccatttactataaagtgaggggcttacaggaagagacacgcctttacattctgaacattagatcggggaattgggtcgcttaaacagaggggcataggagggtggagtgaaactggcagtgagggggagggctacttactgaacctcctataccaactgtgccgaggtgcccaagaccactgccaggttctgtaattctctgggaagactcagtggactcagatatagtcttacttatagttttgatttattatagtgaaaagatacaaagaaaaatcggtaaaggaaaaggcacctgagacaaagtctagggtaaagcaagcacaagtttccagagtccctcccaatggaatcacacaggatgcacttaattcccctagcagtgatttgttacgacattgaatgagttgtctactggacaaggtcactacagactcagtgcccaaagtttttactgagacaggtcatctaggcaggctttccctggcagatagcaaaattcaagactctcaaaaggaagcaggtgttcagcataagccatattgtttgcacaagcagttcagacacagtaagccatcttatcagttaattgtgggagcccctccaaaatctaagttcccaaatgccggccagtgccaaccctgtaatcaggcctctccaaggatagcagtttaggcctgctatgttaactctttctgcacaaaacctatagagttagggctttggatctgagatgaatgaagtgtgggtagattactgagtcctgttatatgggttctgccctaccaggaaaactatgccagttctcagggttttgtgcattaatctcctaggcatttgaggctatgactaaattccatagggatttatctgtggattccactgtgcttgagatggcagtttagatttcagctctgctgtacatattgcaactagagccaaagactttaaagtgtgtactggcctcagggggatgaggttaattttttttttcattttagatactttcccttttagtactcctcctacttttcttatttttactaaaaggtaccactctatgaacaaactaataaaacaaggccagtcttggaaggaaaaaaataaaattcttagtgtgacagtctccaagagaagcaagaatataagcttagaacaaggggttagaatccagaattcctgggttcttttaactaattttgctactcacttgccactttggagactactcactcactttggataggttacttgtttcttctttgcctgagtttaaacctattggaatgaatgaaataccctgtagtatatttcataaatacattatgtggcattttattaatgaggtctttaatgtagggcttttatggaaatatgaagtatttatgtatttattgattattatttttaccatgttattgaagtcaatggtgtttgattagctcagtgggtgagcaagcaatggtgctactggagtcaaggctggtcagtaggaagcatcagtccattccatggccactgtaatctaacgtaatgaatggtgtcttttgttgttgttgttgttgttgttgttgtttgaacagagtcttgctctgtcgcccaggctggagtgcagtggtgtgatctcaactcactgcacctccgccttctgtgttcaagtgattctcctgcctcagcctcccgagtagctgggactaaggcgtgtgccaccatgcctggctactttttgtatttttagtagagacggggtttcacctgttggccaggctggtcttgaactcctgacttcatgacccacccgcctcggcctcccaagtgctgggattacaggtgtgagccaccgtgcccagccatgagcggtcttgaaaatgaaaatggtcttggccacagaaaccaggtatgagggagtggttggaatggtataaagtcatcatgttagggaaacagtaactttaaatgcatgttaacagtgggtctttaaaaatgaatgtctttggttaaagagttttgctgggcattgagataatctgacagcatctccacttcctgtttttttcttaatctccactttttttttttctatgatgagcgcccctaaaatgctggtaagttctttccaacaaaattgcggtcaaagtaggatgctggggaatgctgattttagcaaaacttgtagaaaagagtggcctggcacatgagcttaaaaaaaagaaaaaaagctggctcttaattttggcacagtgcaacctgttccataccagacaaatgaacaggcttaatctggtacaattctttttctctcttactcctcagaagtgaagggactgcagatcttgttgttttgggacactttcatggaactgtatgtaggtttttttgaatggtgagaaatctgaataattggtaggggaagggaatccctcatttcagcttttcttgatgttgttactaataactatgaaaaacttctgagagaacaatgtgaactgaagatgactcagcagttaagacaatgctaagttcgaaaccacaggtaaatgaagggctaattaatgtgtggtatacttggacaaaatgaagtatcatttgcactggattactgtgtaatgataacgaacactgttcaagaacgatttatattccataagatttgtactaaattttataaaagtaaaacaactttttataaacccagagtcttctttatatttatgtggtggttttgccaagaagttaaaaaaagccttttgacctgtagaatgttgacctgtattcatacttactagtgaatatctctaatctgctgttcattatccatattccccctatttttttttattttggggggtaacagttgacatacacaaaacagtttgcaaaagagagaggaagaaccttaatgtgtttcttgttctgccacctgtttggacacttgtttgaaaatgttgatgtcaagtgagttgacatcagagacatcatctgaagacagctggagccctgtcttgaggactgtactaccaatgcctaaaacagtctgggatgcatagtagatactagtaagcatgttgaaagaatggacaagaggatgagaatgtggtttagaatcatccccatggaaaacctcctcaaaggttttcccagtggattgggtcatcaatgtcatttttctaagaaagtactacggaccctgaggagtgtgttctacccagactggcttgactttctgaaggctcctatagttacagcctttagaacagttgagctatcggcagctttaaagaggctttcagttttttttttttttaaatcattaatgctttgtaggtgactatagagattttcatcatttaaaaaattagttctggaatgaataaccactggcttaattcaatcttttgcttaccatctctgaagctttcccacagcaaaatgccttctttgctcacagctagaaccgtgggtctgttaagtttggaaagatcttgaaagcagcttgccaagaggttttgtatgcaaggaagagaagtgaattaggaaactttcccagtttgttttattcctgaagcttaagtattgaggcttccccaagtattaagggaagagaggaactccaaaatgcatgatttgatgagtcattgggttcattaattttatacttacactgtaacattattaggataggggaaaataagatatttagtactttaagaaagatttattaagtttggggataaggtttgcattttggtcagtatatatatagtatatatgtgtgtatatatatgtgtatatatatgtatatatatgtgtatatatgtataatgtgtgtatatgtgtatatatgtgtgtgtgtgtgtatatatatatatatatatatatagaatgggattccttccggttgcatgtaaacactcaatttaagagtcttcagggtagaatgtcatgctagaatacaccagcaggtggcaatgtgtcctggtctcatcattagggaagtgcttggctaatctgcttctattctttccaaaaataaacattacaaaattagttggctgtgcttgaacctaaaaaatcgagcaataaagagtcgtctctggtctctgtttatcttttccttttttcccccccgttctaactaacgtcagcgtgagctcatgcctctattcggggataatatcctttcatgaactgttgcggaatgactttttgcaacagcattgttaagaggtaattgttcctctctccacatccactgtttattagatttgatttgctacttggattccacaaaatgctgaaatcccttgtcaccaacataggtttaagctcaaaagtctgaaaatagttggataagggaatagccactttggatgtttgcaggcagaactgaagaactgtattacatgtggtactaaattgccaaaatactgaattattcaatcataaaactagatgggtatctaaagctcttacccagtaggggaaaaaaccgaaaaaccgtttgggaatccttcagagagaaccgtaatctatttactggataaatatacttcattttcttctcccagttctttccacaacacgcttgtaagtcgccatggaaagcaccatgctttatcaatttggcaaataacacatttcattttgcaaggcagaaacagcctaaaagtaatatttataccgagaaaccctggctgcagtccccactgctctcccgcagccctgcgcctccggctcatgcagcgctctccccccggagccggcagtgcccaggtgagcggggcctgcggaggcagcgaggggcgccggccgggaaccggcagacgcgtgcagccagaagacaggagagataatacattcccttaagtaataaaagtttccagacaaggggggctggtaattttcaaagagcctcccggcacgatgtcctcgggatctgggggcgctctcgggcggtctctggtgaaagtcgacttagtacaaactggactcgaaggggcagtctcggcactcaggggcccaggcgccgcgggaggtgggtgggcctcccggggctgcacggtcccacctccctctgccccgtaggactactttgccgctctcccaaaccgggctccggggaggcgtccgttcaagggcgagagcgcggccctgagcggcggagggatcccgggtgagcggcttcccgaagtcagaggggagggggccataaagtcggcgggggacgggaagcgcgactcgcgccggacgcggccagggccgggaaaccagaaccggaaccggaacccgcgcgcgccccgcggttgcgcggcccccacggccgccggcctcctccgctgtctgcgcgcgcgcccggagggcctccagaacccggcgagccggccctgcgccgggagacgccgccgcctccgcctccggaccagggcttccaggccgggccggacgggcatctcccgcccctcgcggggagcgtggggaggagccgccgcctctggcgattgcggaagagtccgggcctcaaagggatggggacagtccgcggcgctgagagacccgggtccctgtcacctcgggccgcgggacctctccgcggcgccagcgg

SEQ ID NO: 2875 - DNA, 16433 bp, Homo sapiens
gtctgcttatcctcttgagttgtgaatttttctctcctttccttttcatccaagttgaaaaggacaccacctatgacttattcaaacgtacacttcatctgcacattataaaccaagcgctccacctagcacagttcacaatagggatctaggaagaaaaacacaaactaaggagagtagaaactgaagacaatgttgaatgcttttattttacggagttgcttcttgatcacatgggactagatgctgaaaaatagaatacaaatactgatatttacaacaccacccaataacaaaggaacttctctccattccaaatatgagtttattcttcattatttaattttaagtaattagagatataaattaaataaaagccaatgatgaaaagctgccaatattaattgtatttgtaaatgaaattattttagactgctaaagaactcaatatattagaggaagtgtacaacaagaacaaactcatgggaaaaaaagaactgtttcttggctgggtgccgtgatgcacgtctaaatcccagcactttgagaggccgaggcaggtgggtcgcttgagcccaggagttcgagacagcctggccaacgtggtgaaaccccgtctctactaaaaacagaaaaattagcctggcgtgtggcacacgcctgtaatctcagctactcatgaggctgaggcaggaaaatcgcttgaactgagaggcagaagttgcagtgagccgagatcgcatcactgcactccagcctgagcgacaagtgagactccgtctcaaaaaaggaaaaaaaagaaagaattttgtcttgccatatcaagtccctggaccccaaagagagggagccacaggagtgccagagctgaaggaatgaatcctggagctctaggaaggcagaacctctgtttatatttgcccctagatccacagcacagagcaagggcaagcattcttgttgagtggatgagtgggtaagtttgccgacctatcaagaggaagggagtaggaagcatgacccacaccagtaactttttccaaggtttttctttctgccctgtatcaacaaagcagcagaaaagtggagtaataatagtagtagagctctggggaaatggaaaacaatttcctacgtctccctgctccttgttagctgaggtaaccatgccccctcttcctgtttctatttctgctttgtatctaatcagtctgtccaaggagcagtgcagcacctgagcatttcttctctgtccagttactcccagagatggctgaaagaaagacccctcagacagggaatgcaggtaacaatgtgtctggctgcaagcttataaaactcacaggatgggtacacgggacatagagatggaaacaggctggtcatgatggctcacgcctgtaattctagcactttgaaaaccaaggtggaaagattgcttgaggtaaggagtgtggcaacagcctaggcaataagtgagaccctgtctctacaaaaataaataattagccaggtgtggtggcacacacctatatcccagctactctggaagctgagacgggaggattgcttgagcctagaagttccaggttgagtgagctatggtcacaccactcccctccagcatgggcaacagagtgagaccctccaaataaataaataagggaacaatagacaccggtgtctactagaagggagagagagggaggggacaatggctaataaactagttgttgggtactatgctcactaccacagtgatgggatcatcacaccccaaacctcaacatcacagcaatatgcctatgtaacaaacctgcacatgttcccttgaatctaatataaaagctgaaattattaaaaaatagatccacaggaacataagctttcttccatatcctttgtgctctgctatctcttctaacaatgcagtgcttacacccaggggagtgttattatctgaatgaatgccttttataggtttggtcaggtggccatgataagaattggcacactccaatttgtatgtctccagtactaatatgtttacatatccttgcaatgttacaaggtccattcttcataaggctatttacaacccatcatatattcctaaaactgaaaccaaatgtcaataaacttttattgtgacagtttcattacatctctagactctttcaagaacagaaattcttcagggattacaaataccaatactaagccaaattctcatcctatggaacaaagagtatcatcatgtcacaattatttagcattctaaagttttatttctgggtcatggataatacttaaaaagcgtatttcccttttatgaaacactttggaaccttttccacatttttttttttttttttttttttttttttgagacaggatctcactctgtcacccaggctgggttggaatgcagtggccggatctcggctcactgcaacctccacttcctggactcaagtgttctccagacttagccatccaaatagctggggctacaggtgtgagccatcatgctcagcaattttttttgtattttttgtagaaacgggtgttgccatgttgcccaggctgatcttgactcctgagctcaaagctatcctcctgcttcggcctcccaaagtgctgggactacaggcggagccactgtgcacggctgccactttctactgaacttcatggaaccttcccacaatttccagagaaagtctcatatagtccttatactcagaagtgaaagtctagcatattgatattttaaatttcactggtcttaagaatatgattacataagtttagacaaatatacacatctgatgaacaaggtcctaaaaattaagataaagagctttgctaacaacctagaaagttccctctgttcctttccagtttatcctcttaccccaggcaaccactgtgcagatttatacctccaatattagttttgcctattctggaacttttacataaaggaaatcatgacgtatgttctctttgtggttgcataagaggtttaaaattcatgaaaacggttgcaagattagtagtaggtcttttttgttgctgaataatattccattgtattaatttaccatggtgtatttatccattatgatatggaagcttctggttggatatatgaagatacttcatatatcaaggttggattactaaaatgtagcaattcctgttcactcaagtccacagtccacacttggctcttgctaatgctataaccagagctaagtctaattttttaatcctttagtcctcaaagggataaaaaagaagcacgggaaaaacagaaattacttgagagtctgaatccaagaagaaagtgtagggaacagagatcggatgtattaggagagatatattcaacatgaacccaaactactctgggtcctgttcttgtcaaagattgtgaaagactgaaataaatgcaggtctaacccctcactatgctttcctcctatctctcccagctttttaaaccaccggtttaaaatcctctttatagataatcatataaggcctttagttattcaagtaaaccttgcttgcttgaatgttctgagagacaatctagttccacttagtattgcagtgaaggcaatggtgtatgttaaaaagtattttgagtccttttcttggaccacgtgaagtacacatcaaaagagcaggaaggaaggttggagaaaagttgtagtttattatgatttctcatcatcatacatttactgtgtccacaaggaaataatctctgatagtctctacaaaagtttcttttagttatttgtgattcctccctcaaggtattataacctatttagagaaaacacagacaaatctatgggaggatcacttgagcccaggaataaagaccagcctgcgcaacatactgagatcctgtctctacaaaacattaaaaaaaaaaaaaatcagccaggcatggtggcacgtgcctgtggtcccagctacttgggaggcttggggcggaagatcacttgagcccaagaattcaaggctgcagtgagctatgattgtgccactgcaactagcctgggcaagaaggcaacacctcatttctgaaaaataaatagaacatttttaaacaattgaatgtttctccttctaaggagttgtaaaagcaagaataataatttgtcttataaacattttgatttgaatattctgtaaaattgtaatcacatttaatattgttggggataagtattatatgatgttacttcataactttcctgactattttgagtcaattgaactttttaaagaatatgtcaagtattgtccaggatctgtttcactcctcttgaaaaacactacaatttaaaatcaaagccttatatgtgtattttttagtacaaacatataattactaagattttttctcattcttacttctgagaatacactgaattaaaaccagatattcatgttgggagacaccaaggattccttcttcttatgtctttgcttcttggtctgatctggggctctaccacactgtgcccaggaaaaccacagtccatgactacccagctttcttggaatgaaatgcacagttggagtttccaggaagaaagtacatctaatcactggataatgtggtcacagggggaaaatgtcaccaaagagctccccatctcccaaagccagccaccttatcccatctttccccatacatgaatcactactgtgcttatgaagataagtcggagaatatgaacattttatcttccaagaaacacaaaatggacatacttttccattatgcttgactctgtaatgaaagtctaggagtgaatgtaacatgaaatcattccttccgccttagcagacagatggagagagacattccgtttgtttccagccttttgtctttggagcatttttggcatttccttcaggaaactggagttgtgacctaaggtttccttagtgaacacatttctgtttcccacagttaaccttacccaaaatgacatctactctattaggtgaggtttatcttcatgtcccaactgtgtcctgtgcaatacaatgacacttgaaagcacaaattctgaaagtagcgaaaagattagagagcccaactgccaaaacactttaatcccccaaaagatgacaataatcaaaaacaagaattaactattcaataagtctgtgatgcttgcaaagtgccttcattttgtagttggaaaaattaatgactagaatattaatgctttcagatactatgaattgaaggttttcagataaaagtgttatgctctcagcccacattttacagctagctgcttcactgatactgtatacttctatgtggttcaaagataggctgggagaagccaagacagtgtcctgaaaaaaaaaaaaaaaaaacacatgattaatacccatatccatatccccacttccccaacatgttggtgaaaggccaagaatgtagcttttttgatgggttttgaatgatgattgagtctcatcatttaaactagatttacaacacatttttgtgtataatttctttaaaagcccatatttgatgacagaattattgcatttatttatttggcttaaatgcagtttaaaactcaaacaattctacttactagccaatgtggtttcagaaggttggtggtttttatctcattctttactactcttcagtgttaacttattgagtttctcttcctgaaaaagatagagtggtttctaaacaaaccacacttttttcacacccagttaaggtaaaaatcctttaaagaataatagaaatttgtccttcactttgattccaaaagctacacaatccagtagatgactcaataattatttttaagaatgctcttcacaaagggtctttaaaaaaatcagtttattaatgtttaaaagttgataaagctatgtgcaaaatgatcacaaaagtcagaaacctattaaatactattctttttaaaaaaacaagacatctctcggttaattgcactgaaaaccatactaaagagacagtaatatatttttattctttgtaatattatacatatcttcaattactatctaatgaatagctggactgaaaagtttctggcgttcctaccagttaaagtaatgcttttaagggcacaagagggtggtattttcttaagaaatacaattcaatggtgttaacacgggttagaaaaatccaataaaatgacttctgctgaaacaaaacattcaaaaatcaagaaaagtacttttaacacaacaaaatacaaccatgttgttgcttaaatgaatcacacaacattctgaaataaacatcaacaaaagtgccaaagacagatgtcaatttgttagactcatttgctaagaaatctcccttggtttgcaaaagttaatccattcggtttcactttgttttgcttgtctgtttctcctaggacaccaaggatcctggctaatatcattagataaagtgggcttccttatgcagatttcggcttcaatggatatgaaatggtaacaatttcattgaaaagatgttttttaaagaaatcaaagtgacttcaaccaaattccaaaaacggatcccgcttacatggaaactttggcctcagcgaaggacattgttttacacctccaaccatcttcatcttcccacagcctacgtactcaacatagcctatttgctatagatgatcgtcattccacaaccccagctctgataactctcaggtagttaaagtataaagtaaaagaacttgaggaggggtatgaagggaagggagggtggggtgtgggatgtacagggcatccctaagaagcagaagtgcacacactcacttgggtttgaaactaaagtgaaggaaaacatctcctaaagctccagacaaagagacgctttcacatggggacattagtctttgaggaggggccaatgaaccctttaggagcttgacaatgctagacctttggctcagtgcaaaatcaaagctccggggggtagaaaatatattccaggccgggacctgatctccacccttcccagtgcattgtcacaggaactaactctacccaccaacacccgacaccaccaggctgttcgtattctccccttcctccctctggcttgcagcagctcctccctggcagcagtcgaagcccagagattttttccaaacactggggtggccagcgaccaagtaaagagcgcttccggtgggtggacagcttcagttctaggaagaagagttgacgtttccagaagacataatggtctctgggttgtcccctcgtctttctgggggtgggaggaattgtccgatttgctgcggctgaattccatgccggcatgatgggtcgcttgaatttgccagcagagtctccgctcgggcacttgcagcaggacatatccggatgaaggcccgacgcatctccttgttggtcagagtgtaaatgatggggttggtccggagttgagcacagctaacaccaggaagtactccgctctgaagaggatgtcacaggtttcaccttgcagcccacatccagcaggagcaggatgaagagcggtgcccagcaggcgataagacgctcaggacgataattacggtcttgagcagcgccagcgacttctcagagctgcgctggccttggaaatgttcttgcggaacgtcaggcggcggctccgagtcctgaccaaggatagattctgcagtacagaatgacgatggagagcagaagcagagtgaagaccgtggtgcaaagaggatatagtgcttgtggtagagcggcagcacggtggagcagctggacagcgcactatgcagttccagcccatgataggcaggccacccaggatgagggagatgacccagcaggcctgattagcaggaagaggcggaagttattgctcccgttgtggagtttcattttcagcatgtgatatagcgctcaatggcgatggcgaggagactgaacacggaggctgacagggccacaacatactcccttcccgcagaaaccactgggcgggagtgagcttgtaggtggtggccccgacaagagcaggttagctgtgtaggctactcctgccaacaggtctgagagggccagattccaataaaatagtacatgggtcggtggaatttcttggttttccaaatggtcagcaagacaagatgttctccaggatgataaagcagcagatgagaatgaacaccaccgaggtcagtttatgctgttctccttgtccgcgctgatattcagctttcccgtgtagttgtaatgccggacatgatatcatagttgacgtagtcagagaccgagctgcggtgggccttgaccagcgggacctggtgggccccatggtgccaaccctgtgtccccaggaagccggggtggcgctactccgacgaacgctagagggcgaggcgagagagccttcactggcttcaggggtggttcgatgaggatccaggctttttgtgtagcttttccttggctggagagggcctcggaaaccgcagcctaaacaagtcagaggagagagtcagggaaagagccacagcatactggcataattcattctgctaaggcactgctccaattgtgttgttgttgatttgttttaaagaaacttggggagagtcagggagagagattttttttaaaaatcaaattatcttttttcttccttttttttctttttcaaaaaaggaagagggggaagaaaaagagagggagaaactctatggccacattcactaaagggaaatgggaattacgatgttggctgtgggttgacaaaaaaaaaaagatgatgaaaggaaaacaaggagtgggaggaatgggaaacctagagaactacaccccattttaactccctcctgccctctcaccaccccacaccccctcacccccggatttccagccatgagattcttgaagcagtcaccagcttagctgcacgctcaataccagcccacgtctctcctcggaaaaactcaactgccagtctgagggcgaagacacacacctctgtcccccatgcccacccccagcccccagttcaaagatactagcaccacctcctaattgccatgtgccatgcaagaaatcaatttgcaggaaaatcatttgaaagcgtaagccatttgggggctctattaataactctctggagcaggtgtgcttagggtccgagggcgcagtgaggtgtgggcagccaggcccgccccccttgctgtaaacaggaaagcttagcgcctccgtgaagcgactgccttttctttcttctcttattctccccgcctccccccgcgcccccccaccccaccccccaccccaagccagggcagtaaatttaaaggtattcagttaaaaccattcataacagattgcagcaaatcccagaatttcgtacattagttgattgcataaatattttttgctttgtttagtttagccaaaacatcacaaaagagagaaatcaaactactcatgacagccataatacatgctaccacatttctatttcgattgcaaaactactcttcagaaactcacattaaactgctccctggtgcattgctaatttgcgtgggcagttttatttactgcagtcccccaacacgttgactcctctcctaggctagaaagttacaaagaaactttctaagacggcactggtcagcagaagtctacttctaattgcttaaatatttcaaggtaatgcagcaatgcaataaaatgaggtaatagagatgagacaatcccagcaactccgcgaacagcagaggctgctcaagccaagaagctccgcattttccccaactaatgttataccctgctcctgggcagtactaatttaagccattacccacgctcacaccacccaccatattctttgtctataggatttccaaaatttaacgccttccctcctatcctccgaccaactgcaattttcactgcccctacacccgtaggttccacagttgggaataaccttttttctgaactccataaatcacaagtgcccaagaacaatctgatcgagatgggtccttagtagcccagagatgcaaattttcagcgcccggagatgcatgttttctaagttttgtttgcctcgttcgacttaaaaattcgtttctgacacctaagccctaccacaaccgggtccccgcgcccgcgacccccgccattcgccgccccctacctcgctcaagcagggcgaagtgcgttcggagagcccgggatctgtacggctcgcttcgcatcttgctgctgcccccgacgactgcgtagtgctctcgcaaacttactcgagtcggggtcccctccctccgcagcggagactccaatggccagtcccgctcgccgcggccagttccctgcctgctacgcgaagtcaccagcgccgcgccaaggctgggtggtttcttcaggaagaggctgggaggggttaatgccttaccccccacgccctctgtcagctgggggcccccggatctgaactgctgagacgcactgtcaggaaagatctggggcagaagcaaaaaaaaaaaaaaaaaaaaaaaaaagaacccctccccccaaacaacaaatgaaagaaaaaaagagagagagagaaggggcggagcccggtaaccctggattctactgtataaatcactgccctcgcccagatagacgctgatccctggctgtgagaggattctcccgagcccctgaaaaaaaaaaaaggtggagagactttgaaaacttttcctcgaaaagtctgaggaggcagaggacggcccggagtctcgtagcgcaccgccctggtccacaccccccgcagccctaggaggatcggtgtgctgagcttgtggccaggagctccccggccactttcgcgcgagcagcagaaaacctgagccgcggcccggcgagtgtcggcggcgcctggggaggagaggctgggaaggggctgcgagaggtacggaggagacaagcagcccggggggagaatgaaccgggaggttcctgtactccccccgccaccccagatcctcgtgctactgcaactgcggtctgaggggcagtggctttcccagagtgcacagagaaatgaaccagcgcggttttggtgttgggcgaggggtttccctcagctgagcacaaagtcaggctgtgtgtccagattctggccaatggagaggtcgttgagggggtgggctgctgctgagtcctgagagatcaaaacgcctgggcagctcaggaatttccaaagggggagattctcggccaggagctgcgagcaactgcagctgcccagcaggagccggcacccttctctcacattctgcttgggagtcactcagaggcctcaaatctcattactagcactttgcccacccttttcttttgcttagatctacttaagaacgtgaggctgagaggcggacttggtcagatctgcctgcgtgacaagctaggacaggacgcttctgcccttgcattactgttgtaaaagtttccacccagtccctggtgcactgcgttcccatcccggcagatgtgaactcaaaaacttcctccgctgtgcagtttcattggcagacacaccctgtacctgaatgactcagaaggaggcagaatgaacaaacaacaacccctgacttctgggattttgtgagtttgccaaaaaaaaaaaaaaaagaagtgacagtaattcacagctgttttaaagcattcatcgacagcgacgcacccaatacatacccacagctcaacaacagtacagtgcatataatgtggaaaccaagataacggtcctctaagactccaagtagatcctaattggatttgaagacttatttcacttaaaggggaagaggtatattgtgctacccagcacaacaaaacgggggacttggcattcccccccttctcccgcctccacccaactaatttatgcattctttaaagccaaaggaatcaaagtgaaatttcacacctagtctgatcaagcatgtgctaggttaatttaaccttactgctctgtgaagtaagtaagcattgctgccattttattgttgagagaagtgtcattcagacaactaaggtgacttgtagatttcccgctagtgagtggcagagctgggttccaaaacctaaatattgcaaatgccttgccttgtgctcaaacgctatcagtcaataaatagttaaggaattgaaatatatgttcctagagggaacagacttctagatttaaagttttacatttgctgcatttctgactgtacaagtctacaaatgcatataaaagtatgctaatgaatgtccttttaaaaccactcattttctacgtaagcaacaaagtgtatacatatgcatattaatgaatgttttctgaaacttctcattgtctgccttgatatctcatgtaacattgtacttttagtatttgcacatagtgttacacatattaatcatttaatctgacaagttaggcactataattattctaattttacaaacaaggaaattgaccccagacatattaagcagcttgcttaatgtgggacaggctgcagactcttaaccactacccagaccaccatgataaacctcaaacaggttcaagaatttccttggggatatcagttgtttcttgtgaataccactggtttttaacattcaatattgataaagtgttttacagagtccaaaacctttcagattgttatttaataatattcatctttagtacacacctatgagatgtattgtagatgatcaacttaggtaaaattagatagtaggcaaatgtttccagcaatggcgtctggccaattccaagtctctagttcccatataagtctcttcccattgctctccaaggagccctaaaaattgcattctcaagctatctcctgactgccagtacaactccctgtctgctgtgcctagaagtcaagcccaacattcctaccttaagtttgctccatttccaatttttgattcaaagtggctttgttgttctttacacatgctttagtgtttctctttaaaagtttacagtaaaataccacacaatctttggagcatacactaaacaaaaatttgtcataaatgtgccatcaaatgtaactgtgtgagctatcttttttttttttttttttttttgagacagaatctcctctattgcccaggctggagtccagtggcgtgatctcagctcaccgcaacctccgcctccaggttcaagcaattctcctacctcagcctcctgaatagctgggattacaggcatgcacaccacacccagctagttttgtatttttagtagagatggggtttcaccatgttgtccaggtggtctcgaactcctgacttcaggcgatccacctgccttggcctcccaaggtgctgggatacaagcatgagccaccgagcccagccatgagctatattttttatctgctaaatattgcactctactcttttccctttcctttttttttttctttttttcaactgagacagggtctggtctgctctgtcatccaggctggagtgcagtggcgaaatcatagctcactgcagccttgactcccgccctcaaaggatccgcctacttcagcctcccaagcagctgggactacaggcacagtcaccatgtcctgataattattatttttattttttgtatagacaggagtctcactttttgcccagggtgatcttgaactcctgcgctcaagcagtcctcccaccttggactctcaagtgctgggattacaagcctgagccttactctctttcctaattgctccagtcactttccactcccttttctcccctcttccctcccctgacccagtcactggtaaaaatccaggctttccttacttgtctattcacaggagaataactagcctcttatttcaaggaggaaatagtatgccatctcaatttccctcctctccaagctccagcttaatagcaactttacccacccttactccttcccacctgtttcagaaataaaagcaactttactcctttccaaggcaaactcttgccaggtcagcatgctgcttcctccaaactttctgagacttggctcaattattcttattccccttgtactttcagttcttagcttctgaggactctttactttcaacttacataaatgttatgtgttttctctaccaaaaactctttcttcccttcatcctaggtcccaatatctctcctcctcgtttgccaacattcaaaattagtggaacatgactgagccttggaacagacactaggttcagccttgatattgccagttctaagctatgtgactttaggcaagttcttttaactccttgaacctcagtgtcctcatctgtaaaatgaaataatgatatttgcctctttcatttgaggattaaggagctacatacctgtgagaattccctacactacagagaaaatgcttcaccatccaccacctccatcttttattattattattattattattattattattttactttagttctggggcacatgtgcagaatgtgcaggtttgttacataggtatacacgtgccatgtggtttgctgcacccgtcaatccgtcacctacattaggtatttctcctaatgctatctccccctagccccccacccccaacaggctccagtgtgtgatgttcccctccctgtgtccattgttctcattgttcaatacccacttatgagtgagaacatgcagtgtttggttttctgttttgtgttagtttgctgagaatgatgatttccagcttcatccatgtccctgcaaaggacagaactcatcctttattatgcctgcatagtattccatggtgtatatgtgccacagtttcctttccagtccatcattggtggacatttgggttggttccaagtctttgctattgtgaatatgccacaataaacatatgtgtgcatgtgtctttatagtagaatgatttataatcctttggtatatacccagtaagggaattgctgggtcaaatggtatttctagttctagatccttgagaatcgccacactgtcttccacaatgttgaactaatttatactcccaccaacagtgtaaagcgttcctatttctccacatcctcttcagcatctgttgtttcctgactttttaatgataccattctaactggcatgagatggtatctcattgcggttttgatttgcatttctctaataccagtgattatgaggttttttcatatgtttgttggctgcatgaatgttgtcttttgagagtgtctgttcatatcctttgcccactttttgatagggttgtttggttttttcttgtaatttgtttaagttctttatagattctggatattaaccctttgtcagatgcatagattgcaaatttttctccccttatataggttgcctgttcactctgatgatagtttcttttgctatgagaagctctttagtttaattagatcccatttgtcaattttggcttttgttgccattgctttggtgttttagacatgaagcatttgcccatgactatgtcctgaatggtattgcctaggtttcttctaggatttttcttgttttaggtcttacgtttaggtctttaatccatcttgagtaatttttgtataaggtgtaaggaaggggtccagtttcagtgttctgcatatggctagcagttttcccagcaccatttattaaatagggaatcctttctccctttcttgtttttatcagtttgtcaaagatcagatggctgtagatgtgtggtgttatttctgaggcctctgttctgtgcgttggtctatatatctgttttggtaccagtactatactgttttggttactgtagcctgtagtatagtttgaagtcaggtagcatgatgcctccagctttgttctttttgcttaggttgtcttggctatgtgggctcttttttgattccatatgaaatttaaagtagtttttcgcattctgtgaagaaagtcaatgatagcttgatggggatagcattgaatctacaaattacttgggcagtatggctattttcatgatattgattcttcctatccatgagcatggaatgctttccatttgtttgtgtcttcttttatttccttgagcagtggtttgtagttctccttgaagggtccttcacatcccttgtaagctgtattcctatatattttattctctttgtagcaatttgaatgggagttcactcatgatttgtctctctgtctgttattggtgtataggaatgctttgatttttgcacattgattttgtatcctgagactttgctgaagttgcttatcagcttaagagattttgggctgagatggtgggattttct

SEQ ID NO: 2876 - DNA, 19188 bp, Homo sapiens
cacctgggagcctcatgcatctgggtttgggagtttggccctgctgatgatagtttgtttctcttcattccctgaattagtcatcagttctccgtggccatttggggattcatgcctgaactgcttcagtcgaattcttttttaaagatccagtttatgttttataataattttgatttatggctttcaacgtcaataggatcccctttaaaaataccctgctagtgttttgttttttttgtttttctgagacaaggtcttactctgttgctcaagctggagtggagtggcacgacatagctcactaacacctgggctcaagtgattctcccacctcagcctcccaagtagctggactacaggtgtatgctaccatgaccagctaatttttaaatatttttgtagagacaaggtcttaccatgttgcccaggctggtctcgaacttctgggctcaagcaattgtccctcctcgcctcccaaagtgctcggattacagacatgagccactgcacctggcctgaaacacattctagtcttttgatcctgacttcttatctgggctgctgtctctctttccttcaggtggaaagaccccttggtaccatctcaagcagtaggaaaggacctgctcttacatatattgatggtctcatgcaaaactctcaattcttaattagtcatgtctcagctcaaggatatcagacaggatgaaacacacttgaaaatgagattgacctggagattttttttccctaatctctcatacttaattggaaaaataatcaattaattctatgttaattaggatatacaaagttcaccctcttgaaagtgactagggcaagccctgaagatcttcctcacctccttttatttttctataacttgtctcctccagcaccacagggaagacaatcacagtgggtcaagagcgaccctctttacgtgggctctgccatgacctctgagacctgcttatgatcagtgcaatgaagttagaagaactgatgattgggagcctttgcagatagctgggcaaatgggtgatttacttatccccatctaaatggagtgagctctctttgaggctaagcaaggaggcgttgtatgctagtttctaactttgcctggagacccctttggaaatctgtcttctttttaaactcacttaatatgcctaatcatctgtgtgtaatggagtcatccgctcctcaatctaaccctcctcccctggggcttggctgtcctcaatgagagtttcatgcagaatggaaaatcctctatatgtacaatctcttccccctcatttctcttcctcctcacctccaccacccctttgcacatcagcattttaacgctgatcttttgagaagcctgtatctttttcctcttcagtagatacccttcttcatggtctttgcctaatcaaacagaggcctttggcctttgaaaatccatgacaaggcctcagaaacagtgttgtggaggattactccatgccaccggagaaactctggtgaaagagaaacctcgggtctttaggatgttgggattttgagtgaacctgacctgatagcctcaggattcagggaaggacaatcagatggcggtgttttccagggggacgcgccaaatcatgtggtttcagacattgtgtttgcctttgtgcctccctggaagggaggccaactaagggtatcaccaagaagcaaaagagaaataggcatgagcctgtggttttaaactttacaggctgggcaaaggatttaaaagacccttagcatgattttcctaaaagagaccttagctgctccaacctggtgctgatgctgctttgttgatctatgctttaaaatttttctttataatgcccccagatggctcctgaactagtcgtaattgcaaactgtaaaaatccctcctccccagtgtagatatttaaaccaagtaagtgatggggagacattctgtggtctctgaatgtgccttccccctcaccgtgtgtaaaacacaaaagccgaagttccatggcatcatgattccgaggggctggagggataggaccactccacatctaaaggggatctgctttgggctcggtcccattagcgagtgggggactctgctgtgtgctaagaggctgctaggactcacccagttggaattctgggtgggctcaggagtttagagccacgtaaaaagctggtaggcatgagtgtgccaggtctttgccagcctgcgctccttttgcaccccccaatccagagtttgctttcttttgactaaattggctcctgcaggggaagggcagaaagctaggccctctgctctggaaagtcggcctgaggtttccggcaagtaacccttaaaatggacacccctcagcccgccctcccctttggccttcccagaatctcctcagtggttgctctcacacctgtgccataacatcatcttccatgacttggacgggcactccttgacaattcctattggcatcacacgggctacaaattatgctgttttctaaagaattgaacttttttttttttcttttcttgagacacggtcttgctctgttggccaggctggaatcagtggcacaatcatagctcactccagcctccaactcctgggctcaagcaatcctctcactccacctccagagtagcctagatgacaggcgcacatcaccacgcccagctgatcttttaatctgttttgtagaaacaggatctcactatattgcccaagctggtcttaaacttggtccaagtgattctactgcctcagcctcccaaagtgctgggattacaggcctgagccaccatcccagctgaatttgagctttttaataatctcattccacatagccttatagatcctgtaatagggggggtcacaaaagtaatatattgtgttatggaagataattttgtactgtgctgttcctaaatcataccaatatcctaaagtcatgcacttcccagatgatcgtgatcctccaatgctttgtaagatggggcagggcgtggaaatatatatatatacacacacacacagagaccacacacacacaagtatagtatatattttcctaacctttcttctgggtccttcctcagactttgagtcacgatagaaaaggagctcgagttctttgtgtaggaaagttaagcttcctgctgcggtgttcttgcaattgccttaggaattcacaagctctaggagttctgaacggaagcagacgagaggcactttatccagtcccagaaagaatctctaaccgtgtgactgagaagtatctagaaaaacttatatttttaatgtaaaaacaaatggggcttaccagacctcacagatattggacgtctacaagtgcttttatattttgtaactgtaaagaagtttcatatgcacaaagagcagttggaaatctggtcgactgcaataaaacaagatgacctttgcatgtacaaaatgttgcattcagactatgaaaatagcaaataaagctttggtgcaagttgcattggagagtcggtgcgtccatgtgtgaatgaatagagtctcccgtgcatgcaggccctgactggggtggctgagtcagtctgtcctgtgctgagctgtgggccagccagcgagagggcagagctgggtcctgggagagggtgtccatgcagaatgggaggccatggaaacaaggcaggatttccttcagactgacaaggggttgagtcctcctcctgccaccctctggctgtgggatttctttaagcattggttctccttagctatacaatgggagtagtgatcaggacatttttgcaggtacagtttaaggtggtggttctcagctgggtggattgtgccctccagagcatgtctggtaagaaaggaggcattattggttatcacaagaaggagagaagatgctccaggaagtgagtagggccagggatgctgctcagcatcctgcagtgcacaggacagctcccaccccgaccccacacaaagaatgacccgaccccaaatggcagtagtgtcaaggttgaaaagtctagattgggagatgtggtacatcaaagtgctgagcgtgcagtaggtctgcaaggtcctcaaagatgtgtgggagggggagccacgccatccccacctctgccttcctccttctgtcccagctggtggaactacatcccaactcagggggtccaaaccgactgctttctgtgaccttcagcaggaagagccccttggcttgaactgtccagagtaggcaggatgctgggaataaaagtcaaaaatacagatactgtgcgcagtgctttgcttgcatgacctcccaaaatggcccaagtggagagaggttctccatttatggtgaggagacagtagctctgagaccttcaggaactcgtccaaggcacacacatctgcctgactcagagtccagctgtcatccacagcatctcaccaccatctcctctagggggtacagggtaactgtgtttttgtttgtttgtttgttttttgagacggagtttgctctgttgcccaggctggagtgcagtggtgcgatctcagctcactgcaagctctgctcctgggttcacaccattctcctgcctcagcctcccatgtagctgggactacaggcaccgccaccacacctggctaattttttgtgtttttagtagagacagggtttcaccgtgttagcaggatggtctcgagctcctgacttcgtgatccgcctgcctcggcctcccagagtgttggattacaggcgtgagccaccgcgcccggcctgtaactgggttttatgctgacttgaggatttagccaaaaacaaataccaacaacaacaaaagaaaaccttgttaactcactcctttgtccaatataattttattcataaaataatcacttattagatattgattacaggcaaaatttactttgttagacacttaaaaaattcctggaagctgggtgcagtggcacgtgcctgtagtccggttattcaggacactgaggagaaaggattgcttgagcccaggagtttgagtccagctgggcaatgtagcaacaacctatctctaaaaaataaaataaaaatacctggatctacctttttctttggtcataaataagttgactgtgatggtcacttttatttctattgaggctagatcccaggtcctggagcaggccagccccttctctctgctgtgtgattctgagtaaatggttcacctctctgaactcagtttctccatgtataaagtggaatcagaattcctcccctaggatggctggatgagaattccatacaatgcttgtgaagctggcacaatgccttgcgtgtgtaggtgttcaagaaatggtagctattattcgtgcgtgtcttctacatgaagaaagtcatctgtgagttctgtgacggcatcctatggaaacggttgggtggatttgcgcccaagttgagagtatggttagcgtgatctgacttaaaacttaggccacatggcacatggaaactggaagtgtctggggtccctcactttaagaactagaatttttccaaaggttgcgtgtgactcataggaaatggtgaccccaagaaaccaaagaaagggagttggtggttgtggggagacacggagagctgcacaccgtgccccttgcctggcgctgctgggcttcccacaaagccagtgagttcatctgtccccaggaagtcatcagagacggtggctgaggagacaggcactgggggccccgtggacccgctattggagtgaagtggcctggatggaattgggtggacagggtgctgctcagcaggctgggatgtgctgggctgtcagaaagtgctcataaatagcatgccccttgcaagacaggcgagtctgcagacggccgtggctcctctgttcttcccgaggctacagcaacggttcattctgggatgggttgggggtggggaggcaaaagccaccctggcaggcccggacttttgtagtttctgtgggacgcgcatggctgaccgcctgcaaagaaaaacagcgcctccttaagggtcaggtcccagtgagaggaccctgacagcccagctgggggtggaacgagggaccttgtctgcagtggccagggtccaagcccctggacatgtgcttagggcaggggaccttcaaaacagctcctctgagggaggggagtgggcacacatggtacctgccaagtcccccgaagtcccctgtgagctggaccaagccctgtttcctgctgaggctaggagagacagaaccgcagcccgcaggctgtgcatggttaggcccacatccagagtatgtgggctgtgcagctgtcatgctggggtggccgtgctgggagccgtgggtgggtaacagttggatgtggggtgtagtgtaggtgccttgtttaccactgtggatgtctgaaatgggcagggatgtgtgtgtgtgagagagagagagagagagagaaagaagctgtcctgtgagcccatgggtgaaatataactgtagtgaccatagaaacttttgcgagtgtgtgcacctatgtgtgtgtgctgacaaacagacagtcctgtgtgtgtccatgggtgcaacaatgatgagaatccttccatgtgactgcggcggggcctgtattgcgtgtcactgtccctgtagcaatgaagaactgtcggtgtctgggtctgaagtggctggtacacagtcgtgttcaataaatgcttaaggaatgagtaaccgaacgcgggaaactgacctggagcaggtgtccaacgacctggtcttacaagccttttctctagagtctgtctgtccacctcccgacatatggggtctcctgtccctcctggtcacccagcccaggcctggcactgtgtaggtgctcatggaatatttgttgaataaagtaaccagtgaacaaagagttcctggagtacggaggtgggagagacccctgtagaggaaactccctgaagcccacctttagccaggttctgggggtgggacatctgcagagagctctgagaaacctgggtttcgggagcatctggatcaggggaaaagggcacgggctttggagccaggcccgacccaggccattcctcactgtgtgcttgaggaagtggcctcactttgctgagcctcagagttcccctcttacaatggggctcctgatcccactgtctcagtccacgtggcccatggcaggtgctcaatgatgtttgctgaatgactgaatgtcgatcataagttacagccacgccccatgggcagcaggctctgtagctcatcctggactccagtcacatcaacacctggcttctcccgggtggatcagtgaaccattttcttttggtttgaagccagaggtgttcctggggagatggcggaacacacggagcacccgaacaggctgcagctggcaagagccatggagaccttgggggcagctaaaggtactgggcagggagggggtcagagggcccaggctactcctgggcctcagggtcatttcccagccaagcagcacctctgcaggaaggaagagccatccttccaaccacccaggccggacaaaacgctccgggtgggtcctctcactgccaccctcccgttagaaacttgcttcagactttgctgcatcttccctcgtctgcaaaacagaaatggtcacccacatcctgcctgcccaatggatcagagaggcccgggggtttctggaaacatggctctgagctctgactctccgtctgacctcagcctggtgtcttgcccactctggggaaaagggcacagggtttggaggcctctgggcctcaacagccccatgtttgaaatgaggatggtgcccagatattgtgcccaggttggtgtaaaggctgaaagacatgagtgaagccagctagcagagggaggcacactagaatctgagagaaggtttgaatgtgttggctctgccctttccaaaccatctccggggtcttttgggaaactattccagacagagtctaaggatgggtcgaatcccagtgcctcctcttaattgctgtgcagcccgaggcaagtatcttaccctttctgagcttctttgatcccttctgtaaatgacgagaacagatgttccctggggatcttctacaaagtcagtttgtgtttccagggggtgagagaggcaaaaccttggtctgcctttgcagcccttctcttcctaggcttggggaggcagaggtcttccccgagactgcaaacaggtgttttcatttttttaagggggaaattcctattaaggaaaatacagatttctgacctctcttgaaaaaattggaactgggacctcatccctcatcgccagaagcagcttcatttccccaccgacctctcgggttatttcagtccgtggactccccacctggctcctgctggacatcagagttgcaatcactagtttaattggtccattgaagttcctgaaggcgtttccctccatgaccattagagggcagtgcaggcccacccagtgccagctccaggctggagagatgcagaaagcagagggtacctccctctaatgcccaaggaggggcagaggctggagctgggagcctagcagaggtgggatgtttaggactctgccttctaggtgatcttgtacgaactagagaacttccaaggcaaacgctgcgagctctcggcgagtgccccagcctgaccgacagcctgctggagaaggtgggctccatccaagtggagtcgggccgtgagtacctagacccccagtccctcgccacagccctgagccttctgggagtgggaggccccagtctgagctctagatctgttgtggggcttttgacagctcccctgccttcctggcctcgttttccgcatctgtaaaatgagagttgaagaattctctagaatcctagattctgcagaaaatcccaggatacctgaggttggaagaacagcaaggtcaacctagcacctactcagtgactggaacatgggatttaatatttataattttaataataattgtaacacctaaatttaacatgcattatgtcattgaatcgtcatgaccctgtgacagaggtatcattctattcccactttatagatggggaaactgaggccaaagttggtaagtgtcccatccatgtcacaaggcaggcaggtctcccagctgggccctgaattcccgcctttggattgcaagtccagctctggcactaaccatctgggtgatcttcggcaagttgcttcacacaccaggcctctgtttctcatctgttgaatggggataacaatggtacgtacttcagagagagtttttatgaaatgaatggaatgatgcaaataaatacatattaataacaatacaatacaaagaagaggaaaggaagaggaagaagtcactgtcacctatggaatacttactgtgtaccgggcattgtgcaaagacttttctgggtaccttgcacagaggctagattctcaataacataccctaggatgttttctggcccagagtctcagacagttcccggtatgtcctagcagctcctttaattacagtccaggaattagcagtaggtttggagggagggtacaaggttcaaggtcagcagctcttgacacttctctcactaaacttgaatccttcctcagctgcagcaaaggtgacccagccaacctcttcctccctcaggtggctggcatttgagtccagggccttccgcggggagcagtttttctggagaagggggattatcctcgctgggatgcctggtccaacagccgtgatagtgacgccttctgtccctccggcctctgaatattgtgagtgtggttcctgctcacttctgggtgtcctggaagcagggtgcactgagagctggtcaggcagctcattgcacaagctgggctgaggtttggcccatatggacctggcctgggaagggccctcatgtttctgatttgaacaatttgtgggacaagaagtgggatattgaagggacattcggttggggattgagacaccaggaccacatcttgaattaaaccagcatagcactgggacttttctttgtaaccgtactaaaacgtgagccacatggcccagtctcaaatcagtattgttatcaaagaaatgcagtccaggaaaaacttcagaaagtagccaaaatactttaagttctccacttgtgtttttctagcacctgaagggacacagtccacagtgacactttttatttatttgtttatttatttatttttcgagaagactcctgctctgtcacccatgctggagtgcagtctttctctctctctctttttaaactttttatttatgtatttttatttcattttgagttgcagtctcgctctgtcacccaggctgagtgcagtggcatgatctctgctcactgcaacctctgcctcctgggttcaagtgattccctgcctcagcctcctgagtagctgggactgaaggcacatgccaccacgctgggctaattttgtatttttagtagaggtggcgttttgccatgttggcaaagctggtcttgaacttctgcctcaagtgatctgcctgcctcggcctcccaaagtactgggattacaggcctgagccacacgcccggcccacagtgacactttgaacaccacccttctccctcccctgcttcactcaaccccgcagctgctccagccctttctctttgtcacataactgagtcctccttagagggcgtggaagaggggaaactgggaagattaaaccggcatctggttaggaaagagggaaagctatatgttgatacttttgatctctgtccaccctctcctggcctcagtttctctatcatttaatgatgggattgaacaagatctggaaattccttttcagttttataatctacggctctagttcctaaatcaaccagctttggaggaatctccccgtccctcctacagtgaatttggggtggaggcatctcctgaggcccttccctcctgcagcaggtttgggggtgggtgttatttttggtgacctgttgattctttccggcatctggagcctccttgacctctgttctggatatggagcagccgctcaccccacgatattgccctcaggatagtccagatcacaagctgcatcttttgagaacccagctttcagtggccgcaagatggagatagtggatgatgacgtgcccagctgtgggctcatggcttccaggaccgtgtggcgagtgtccgtgccatcaacgggacgtagggacccaaccctcacccttgccccatcttctggtcagccatgcctctggctccaaacaaatcagtgcccatagtttcttattattttatttatttatttatttatttttgagacggatcttgctctgtcgcccaggctggagtgcagtggcgcgatctcagctcactgcaagctcccctcccgggttcatgccattctcctgcctcagcctcccgagtagctgggactacaggcgccacgaccacgcccggctaagtttttgtatttttagtagagacggggtttcaccgtgttgccaggatggtctcaatctcctgacctcatgatctgcccgcctcggcctcccaaagtgcgggattacaggtgtgagccacggcgcccggccatcggtgcctatagtttcttgcatgatcatgttccctgcactcctgtactgttgagatttctaggcagccttgacttaaaacaagtaaatctgttctctccacctgttcccatctgagtccttcctgcttttttaaacatccccaacccttgaactgattcttgaaatgttcttccccctcacaactcttgttcttcttaacaagggcccaggatgtatgcagttattgagatgtgacacaagttgtacagaggagagcaggctatcacctccctctttctaggcttaatatcaccgttgatgcagtcttaggatcacctgcttttgtaggtggttacatctcacttgtgggcttgtaatctggggttgggccttgagagggccacctatccctgataataatttattcaacaattttttactgaacatctactatatgcggtgtgctgatacagagaacaacaagaatggcacatcctctggccctcaaaaaatttgctagtctggggctcacgcctgtaatcccagcactttgggaggccgaagtgggcggatcactgaggtcaggagttcatgaccagcctgaccaccacggagaaaccccgtctctactaaaatacaaaattagccgggcatggtggcgcatgcctgtaatcccagctactcaagaggctgagcaggagaatcacttgaacctgggaggtggaggttgtagtgagccgagatcacgccactcactccagcctgagcaacaagagcgaaactccatctaaaaaaagaaaaattacatagttgatggagagacagacaaagtaacaggtattcacaacgtattgtgatcaggattgggactggatgcacaaggggctctgggagtcccagtgaggtactcgattcagcctgcaggagtctgagacatctaaattgagctgtaatggatgcaagtggaaaaaagggggaaggagagggataggtgagcaagagtgttccaggcagaaggaatcatgcatacaaaggccccccaacacagaggttccgggaaagtagaataagagaggccacggtgttgagtgtgaatgggatgttgaggataaggctagagatgctttgttaagggtcctgtgagcagggtaaagagtttggattcacccaagggctctggggagctaaagaggaatgtaggcaggcagagtgcatggtcagatgcggctggaggcagggtgactggaagcagaccgtccacatctcaaccttggtctcccggcagtgggttggctatgagttccccggctaccgtgggcgccagtacgtgtttgagcggggcggtaccgccactggaatgagtgggacgccagccagccgcagctgcagtctgtgcgccgcaccgtgaccagaagtggcacaagcggggccgcttccccagcagctgaaaggcacccagactcaaggacccagacccaccctggggggctgcaagggcaagaagaggaggctccagggttgggcgagggccgacctgtccacccttccctggaatctgctcaataaagcctggggttggcccccacccgccacgttcctcggcatcacttcctgagggagccaggcctggggcgggactgtgggagaggcgtgctgaaggaggctggggcttgagtgttctgagactcccaggaagggctgggaaatttgcccatatcctaggctctaatcctttcaggcagagccatgtgcccctctgccctgatcttgtgtttgtctgctgctgcatgtttccatctgaatgtctgtcagtctcccatccactcacccatccatccatcatccttccacccacccacccacccattcatccaccattcacccactcatgtgcccatccattcgtctactcacccatccatccatccatccaccacccattcatccacccattcacccacccatgtgcccatccattcatctactcacccaccatccatccacccacccacccatctacccattcattcatccatccaactacctaccaccattcatccatccatgcatccatccatccatccattcatccacccacttacccatccatcattcattcttccttccatcttcctatatttgttctttccattaattcatccatttttcttccactcacgcatctttctatctatccttttatccacttatccatcaatttttctttcatctacttgtccatcaatgtgtccatctgatcttccttccttccttcctttcttccctcttccttccattcatctatccattatttccccttccacctctctgtgggtcagtctctgtgtcattaatgtattcagcaaatgccatgccctgttcagtgtattcagcaaatgccatgcctgttcaaggcctaaggacagggcacaatgtcctgccctccaggttctcaccttctgtggagagacagaaagtaaataaacaggtcgatgagggctataatgttgggaggcggtaaatccaagaacaataaagctggataaaaatatggaagtgatgggggtggtggccaggaaacttgtgcaaaggagccgagtcctcagtgaaccaccagaacattccaggcagagaaataacagtgcaaaggccctaggcaggagtatgctggcctaatgggaaacagccaggggcccagcagtctggaatggagtaaaagactggggatagggttcagagggaacagggtcaggtcatttgggctttgcagaacctagtggactttgcttgttctctgagggaggtgggagccatggagatttgagcaaagtgagccgtggtctgcagtggggtttaataggatcactctggctaggggcaaatcatacacttagtggccaaggagggatgcagagagaccagttgggaggctactgagagagtctcgtgagctgtgtttgtgcggtccacctgagcctctctctctcatgcctcatatctctgtccccttgcccagaggccttctgcagcctcgcctggggtactgagtgcccacccacctccccccactgaccactgctctgggcccccgtggcttcatctgggcagtgggattgctgaagagctgaacagagacactggggcagtgccaggcataaatgaggcctttgttgtttgtttatttagagacagagtctcgctctgttgcccaggcagtggcgcaatctcggccactgcaacctccacctcctgggctcaagcaattctcctgcttcggcgtcccaagtagcaggactacaggtgcgcagcaccacgcccggctaatttttgtgtttttagaagagatgggtttcaccatattggtcaggctggtctcgaactcctgacctcaggtggcccacccacttcgccccacaaagttgctgggattacaggcatgagccaccatgctcggccataattgagtccttctgcccccaggtgggaagaggaggggcctcctctctgatagccagctgacaacggattcctgcaggcaggccccggcaccacccctcacccgtcccacctccatgagccaactctcatcatttccctgactttgttccccttttgtgcccagagcctgtctcagccacctgcagctcccattgggtgatgtagctggtgtgtgggaggcctatgggggcctcaggaaggggttaaaaggatacagtaattttcaattaatttaacctgcatattttacaaatgaggtgagaatcaccttgacttttccgagtgtatgggagacctgggctgggcatcaggatcagagggggaggggtggcccagccatgagacagatggaaggcaggggcttgacatccccagtgcggagtacagcacccctattgctcacccctttctccccgctggacccaccccttcctccctttccaaggagaggccttgtcatgctttattctttttatcttttgagatggggtcttgctttgcgtccaggctggagtgcagtggcgtgatcatagctcactgcagcctcgaactcctggtccaagcaatcctcttgcctcagcctcccaaagcactgggattgcaggcgcacaccaccatcccagctaatttttaaaatgtactttttgtagagatgagggtcttgctgtattgcccagcttgtctcaaactcctggcctcaagtgatcttcccgcctcagtctcccaaagtgttgggttataggcatgaacgaggtgccatccagtctgttgtgctttttttttttttgaagcagatctcactctgtcacccaggctggagtgcaatggctcgatctcggctcatggcaacctcccctcccaggttaaagcaattctcctgcctcagtctcctgagtagctggaattacaggcagtgccaccacaccaggataatctttgtatttttagtagagacagggttttaccatgttgccaggctggtctcaactgctgacctcgtgatccacccatctcagcctcccaaagtgctggattacaggcgtgagccaccgcgcccggcctgtcatgctttataaatcagtgcttacatatctcactgaaccctaagaatgtcattgggaggtaggtgtggttattaattctatttaaagatgaagaaacaggctcagggaggcaacatcaccttcctagagccacacagataagaatggtagaactgagacctgaatccattcctgagtgccatacactctgatgtatccatcaagaccgtaagtcaccagggagatatagatgaaaataacataagcagttgcagcagaaacacggtaataatagctgccactgtagagctgcggctaaaccccaagcacattattgagtgcctagagtttcatctcgactctacagacaggcaatagtgatcctcatatgcagggagagaactgaggcccagagagctgaagcaaattgccccaagtgccacagctcttaagtgatgggccaggactcatattcaggtctgtctccaaagcccgtttctctatattcatcagctgttgtgctgtgctcggccaacctaatgccactgctggtgtgggcagtgacttcatttattgagatgtactatagtctaggcaccaggccacaagctgtccatgcctgatctcagttaacaccacaggccccttgactggctcctgggtaacaggaaggattacagggaggctggctcaagttgagtcagtgtgcccactcaccatgcccactcccaggccaaacgcagccccaggatctgagttgggttgattccagaggtggggttcagctgcactgccagattcatggcagccccagcagtcactgatgtccaagtgactctttctgaagcctcacacccataataaccatttgtgcaggaagctcttgttatttgcaagtactcccatacattgtcttgttcagtcctcagctcaagaggctcagagcggggaagccaactgctgaggtcacacagccagcgaggggcagaacgggatttgaccgcaggcctaactccaaaaggctgctcttagccccaacctagactcaaaatttttttttttttgagatggagtcttgctctgtcacccaggctggagcacagtggtgcatctcggctcactgcaacctctgcctccatggttcaagcgattctcctgcctcagcctctgagtagatgggactacaggtgtgctccaccacaccctgctaattttttagtagagatgggtttcactatgttggccaagttggtctggaactcctgatctcatgatccacccacctcgcctcccaaattgctaggattacaggcatgagccactgcgcccagccctcaaattttgtttctatggggcagaacctgagagtgacagtgaagcaagaatatccctcagttataagcgatgaggtttagcgccaagagatcattttaccagcttaattgagaggcagtattgctcaggattgcaggcagtagagtcaagtgataggaggcagagtggctgagttaggctcttgattacaccacctggtttcctctcctagctctaccactcactgtttgcctttgggcaagtcactaacctctctgtgcttctgttgcctcatctgtaacatggagataataatgctacctatccataaggttgttgccggtagtaaccggagtttactttgcagaaagggcttagaacaatggtaaaaccaaggacgtgcaatatgagtgttcatcatcctcttctcttgatcattttttgcaagaaggagggcaacagacaggcttccagagctccgttccagacacaggatgctgaagcatgctccgtagttgtatggagcagagagactttgcagttcctcaataatgggggtttatctaaagacatctgtagaaacagggaaattagaaaactaggctacatggccacactcaggagtccaagtgaaagccctacaaagaggttcatggcaggggcagggggccaggacccagcagtgaacaggcatcatggagagagaaactggagcctgagagctcctgggagctggagactggctctgtggtcactgcccccaggaatccaccattagggggcctcagcaaatgcatcccaagtcttggctctcttgggaggaccttctggccatttcctgttgctagcttcctcttcccttgcctttccgccggacatctttgatctgctgtctggattgtaaaagatgctggcttgcttttcctactctgtagacgttacaatgttgctgtgtgagggccacttccaccagccgcatccacatgcctatgtgcctggaaactctctcctgtgcctggagaggtgggaggcagtataatcttggcggaatgaatacctactaggagcaaccttcatccaatgactaacaggacttgggtatcaattccccagctcccagtgctcaggtgagaactttaccaagcattctttccattttggaagttaatgtcacccatggcaatgctacatgagtgaatgaaaatgtctaagcatattaagtttaatattagcttcctgtctaagtgtatgcattgtaaataggaataatgcctaactgctttcttacatcatctgtttgaagcttttacataccaaaatacatattttatacattctatccttattatccttttataatacagttagagttaggacattttattattatttattttgaaagcatgcacgtagatgggttacattatcaattttatttcaagagagtaaagggctgttacaaaaaattgtcgtaagaagggagtgttgtttctgatagctatgagacaccttttgatgatctcagagcctccttccagctctgactcttttgtatctaaaagttaatattgtttgtccaaggggaacaccaagacctattctcctcgtgggagcaagaagatgagtggagaggaagg

SEQ ID NO: 2877 - DNA, 47460 bp, Homo sapiens
  misc_feature 4805, 4806, 4807, 4808, 4809, 4810, 4811, 4812, 4813, 4814,4815, 4816, 4817, 4818, 4819, 4820, 4821, 4822, 4823, 4824,4825, 4826, 4827, 4828, 4829, 4830, 4831, 4832, 4833, 4834,4835, 4836, 4837, 4838, 4839, 4840, 4841, 4842, 4843: n = A,T,C or G
  misc_feature 4844, 4845, 4846, 4847, 4848, 4849, 4850, 4851, 4852, 4853,4854, 4855, 4856, 4857, 4858, 4859, 4860, 4861, 4862, 4863,4864, 4865, 4866, 4867, 4868, 4869, 4870, 4871, 4872, 4873,4874, 4875, 4876, 4877, 4878, 4879, 4880, 4881, 4882: n = A,T,C or G
  misc_feature 4883, 4884, 4885, 4886, 4887, 4888, 4889, 4890, 4891, 4892,4893, 4894, 4895, 4896, 4897, 4898, 4899, 4900, 4901, 4902,4903, 4904, 4905, 4906, 4907, 4908, 4909, 4910, 4911, 4912,4913, 4914, 4915, 4916, 4917, 4918, 4919, 4920, 4921: n = A,T,C or G
  misc_feature 4922, 4923, 4924, 4925, 4926, 4927, 4928, 4929, 4930, 4931,4932, 4933, 4934, 4935, 4936, 4937, 4938, 4939, 4940, 4941,4942, 4943, 4944, 4945, 4946, 4947, 4948, 4949, 4950, 4951,4952, 4953, 4954, 4955, 4956, 4957, 4958, 4959, 4960: n = A,T,C or G
  misc_feature 4961, 4962, 4963, 4964, 4965, 4966, 4967, 4968, 4969, 4970,4971, 4972, 4973, 4974, 4975, 4976, 4977, 4978, 4979, 4980,4981, 4982, 4983, 4984, 4985, 4986, 4987, 4988, 4989, 4990,4991, 4992, 4993, 4994, 4995, 4996, 4997, 4998, 4999: n = A,T,C or G
  misc_feature 5000, 5001, 5002, 5003, 5004, 5005, 5006, 5007, 5008, 5009,5010, 5011, 5012, 5013, 5014, 5015, 5016, 5017, 5018, 5019,5020, 5021, 5022, 5023, 5024, 5025, 5026, 5027, 5028, 5029,5030, 5031, 5032, 5033, 5034, 5035, 5036, 5037, 5038: n = A,T,C or G
acaaacaataatttttttaccacttcttagtctatttctgcagttttaatttttgcaacgagaatgtattgtatttctttttttttttttttctcttttgagacagagttgtgctcttgtcacgcaggctgacaaagagtagtgcagtgatgccatctcagctcactgcaacctccgctcccaggttcaagctattctcctgcctcagcctcctgagtagctggcattacaggagttgccaccatgcccggctgagaatgtgtttcaatagatgtgtgtcttttttttttggagaagagtcttattctgtcacccaggccagagtgaagtggtgcaatcctggctcacagcaactctgcctcccaggttcaagcaatccacctgccccagcctccccaataactgggattacagcgtgcaccaccatgtgcagctagtttttgtatgttttagtagtatgtttttgtatgttcaccatattggccagggtggtctcgaactcctgacctcaagtgatctgcccaccttagctcccaaagtactgggattacaggtgtgagccaccgagtccagcctcaacagatgttttattgaatagatgttaaaataattattaatgttcatgatgatttaacttcaaggatattcctaaaacgtgaacagaaagaacctcctcatgattttaacagtttctgatatttgcttttttgagagtttactctcttattttccatctagttcctaactcatctggaatttctgttgcaaaggtatgaaacagaagctatctttccctgtgcactctccacggaggcgttcaggcactctggctgacgcgtgctgcctgcctccttcacggcctacatccctacacacacagatgcccttgtgggaccaggtgcagtgaggcctgctttctaacctggattccctcatccacaaggatggttacgaccagagcttcctcctgagagcgcagggagcttgtgacacctcccagaaagctcaggggacgctggccaccttgcagagaaacccctcctaacgggaagggaacatgggacgcgaggctccggtactgaccgcggctgggcgacagcaggctacttggataggggacgtcactctcctcagctcatccagcttctcctgtagcttccgcacctggctgtcggagcggtgaccctctgccgcaggctcttcagctcgccgttcttcttctccacctgctcccgcaggagcacacctggctcttgttctgccgggaggagaagcagtaggagtgcagtgagtcgatggcttgcaggcccctgacgccgacaggatgacctcgttgatggacatggggctggcgtcgtgtgctcgctctgcacggcttccgtggctggctttggggtgacgtcggcaggaggggcaaggggctctgggaaggcttctgcggtgtcgcggtaagtgatgagctgggagggctctggccaggcccttgtcgggtcccaggctgctcccactgcagcttggttccacatctttcttcgcctcttgcggtcaatgggctctcgggggacagatggcctttctcgggtgtgcttagagagaaactgtacgaatgaagtgagccgataaatttgcacgccccagatcctgggggcgtaagtcatccatagaaatgccactcttatctgtcacgcccccttcgatggaggaagtggcgtctcatcgccagcatctgtggcagacgcttctgcttttccctgactgcctgccaccatgtggccagtccatctcctggagtccgttccagagcttgctgggcctgctcctggctggcgcctcctgggccgccctgggtgtggcttcaccttgcagagcagcttgcttcaacctgcggactctggcttggccatcgggtttccactcgaggacggtgaccaacctgcagctcctctgcggtggcggcactcgagtgtcccctcacaccccctgtggccttgctggcatcttttctcgggtgcggccatggcctccagcccccctcttcttctcggtcaggtggaagatggatggccggccgtgggcttcagcaggcgatgctggtcctccagcctcttggagaagctgtctttgtgaaatgctcactacagagaaatgaatacttagtgggagtccagttatccctctgaacacttttaaccattggattagacgttttgagtcctttagggggaacctacaggacaaatgaaaaaagtaattagaaataattaaatgtctccccttaaaataatcaactgtaaaagcaaacaagtatttttgcacgcaccctaagccgtattgacttcatccacttaaaaaaatacttcaaaagatttaaagaacatcttctacctgcagttattactggagtagaaatctgaaagaccgttgtctacccatacagagcttatagtctgtagggcggatgggaaagaaggtaaccaatgctccccaggctgtggtaaatgcccaatggggacacaggatgctgacagacagtgccagatggcctcaggacagcaggaaatagctcctagaagctgactgctaaccaaccctcccacttgcctggaaggtaggactctgggtaccaaaaccagggccagcatccacagacactaggcgtgagaggtcaggactgcatggaggcagccctggctgtgcgcaagcagctgagaatcggagacctccagaagactccagagctacagttctgtgttcctgttgcatgcccacctccggagtaaaaatgctccttttaaaagtcaaccagcccagggacagggcacaatggtgctccctgcagttccagttacttgggagcctgaggcttgagggttctttgagcccagaaattcaagttacagtgagctaagactgcaccactgctccccatcctggggaacagagtgaaaccggtcttctcccctcaaaaaaaatcaaccaactcagatgatccttgaggacattatactgatgaaatagggcaggtgccaaaaaacaaacactgcatgataccactcacatgaggtactagagtaatcaaattcatagagacaggagaatgcgggttcccagagcctagggagaggagactggggtattaatgtttaatgagtccagagattccgctttacaaaataaaaataattcggaggtggatggtagtgacagctgcacaacaacgtgaatgtatttgttgccatgaattgacactgaaaaagcggtaggaaaggctgggagccgtggctcatgcctgtgatcccagctatctggaggctgagatgggaggaccacttgggtccaggaggctgaggctgcagtgagctaggtcataccattgcactccagcctgggtgacagagtgggactctgtctccaaaaaaagtaggatggtaaatttcatgttacatgtattataccataatttaaaaatggtgagaaaaaacaaccagcgcaggaagatactgaataggatgtttagtcatttctttattacctaataaaatccttcataaccatttcttcattaaggcaaactctgtgtttaagaacataggcctgggcgggcggggtggcttatgcctgtaatcccagcactttgggaggccgaggcgggtggatccttgaggtcaggactttgaggccagagttcgagaccagcctggccaatatggtgaaacctgtctctactaaaaatacaaaaaaattagacaggcgtggtggcgcttgcctgtaatcccgctacttgggaggctgaagcaggagaatagcttgaacccaggagcgggggttgcagtgaccgagatcgcaccaatgcactccagcctgggcgacagagggagactccttctcaaaaaaagagaaaaaaagaaaaaaaaaccaggccctaatgtgcacataagggacagggtggtcagtctaactgctatttgctccacctgaggccagtgtggaccaggacaaatcctaacaggatgactgggccgttctaagcaacaggaccttctaacctcctttctgaacactgtgaggccactgcaaaggtacccccccacccccaattccgatgtcctttcctcccataccatgttagacgttgcaacacgttgcctcgttttcaaaaaacaataacaaaacttctaggacacaagcttgaaggaaattgtcaagaaagtgcgctggctgacttgtgaaataatctaatgttactaatcttataatacattgtaatgatttaagacttacagcaaactactgtgaactttcaataacctataaataacacgtgccattcccgtctttaaaacttaaataacaccatgcaacataaacagaaacatctccaaagtggtttttaaagtctgttcgcggttctggtgcctcccgcgttaatccgcagaaatctcactgaaataggctgaactcacaaggccttagaggggtttgggcctgccgcgggggcccacgtgggaagcggccgagagccccgggccaggctctaagggaggcaggaggatgccgtccccagccggccgtcccgtagactctccgcgcgtacccgcgtccgggctcgggggcccagtcccggaaagccctctcgggggctgtcagctacggaggcgcagtcgcgtctgcccggtcgctcctgctcgcagacatccaggccgacggcccgcgcggtccgagagtcagcagtcgcggccgagcaggacaatcggcccaggacctgcgttaccagagcgtcggctttctgaagctaggcgccggcnnnnnnnnnnnnnnnnnnnnnnnnnnnnnnnnnnnnnnnnnnnnnnnnnnnnnnnnnnnnnnnnnnnnnnnnnnnnnnnnnnnnnnnnnnnnnnnnnnnnnnnnnnnnnnnnnnnnnnnnnnnnnnnnnnnnnnnnnnnnnnnnnnnnnnnnnnnnnnnnnnnnnnnnnnnnnnnnnnnnnnnnnnnnnnnnnnnnnnnnnnnnnnnnnnnnnnnnnnnnnnnnnnnnnnnnnnnnnnnnnnnnnnnnnnnnnnnnnnnnnnnnnnnnnnnnnnnnnnnnnnnnnnnnnnnnnnnnnnnnnnnnnnnnnnnnnnnnnnnnnnnnnnnnnnnnnnnnnnnnnnnnnnnnnnnnnnnnnnnnnnnnnnnnnnnnnnncccggggcccgcgacctgtggaaggagacggcgcgcttctcgccctttccctgccggttggagcagttcacgccgcacagcagatcaccatcgcgggccttggcccagccgcgcagccaggccccggccctgccgcccgcccgcccgcggaccgccccgagggagggagcgcggcggcgacacggctcggacgtgggccggcccgcggcgtccgcgccgtacggcaagatggaggcgcaggcgcccgcacgggcccgcccccgccccatcccccgcccgcgtcctcgccagccgcgggttcgggcgtctcggaccagcggggcgccgcaggcccctcgcagcgtccgtcggcaggcgggcagacggggggggagtcgccccggcggggcaagtccgtaccgcgacatgggcgcgccgagcacgtcctaccgcaagatggctgctcggacggggacagagctcgcctctgccgcctcgacaactgccctgggtcctctaagaggaggaagcgccacccatggcacacagtgtcccgtcggacagcgaaccagccgtcgtcccacgacacgaccccatgccgcccgcagggcgccccggggctcggtcggcccggccgtacgccaaaatggcggctcccgcgtatttccgctcgcgcgccgtatgtcttcgccgcctgcgccggcacacctattggcccccgcggcgtcccgtcgccgcgtcggttgctggcccgtcggagcgacgccgctcgggtcagtcggcggccggactgggaagatgacgcaggtgaggagttgccgggggtcggtctttccgcaggaggtgctcgccttatcattgcctcccctgctcgggtcgggctgccgcgactcgcctcggggcacgccggtgcgggccagctgggccggggcggcgggcgctgcgggagcgcggggcggtgttggtgggtggtgggcgtgggagcgggagggggacggcggcgcactgcgccgcggaacccgccgtcggttgcgctgagcttctgcttttccggtcccgtccggagcgctccggaggttgtggctgcacaggccctgcgccaggtcggccgtggagggcggcggagcctgccgggcggggagaggcgcggcggcgacggggcggccgcggtccgggccggggacgcgagcggcgggcgaaagcgtagcctttcccagctgagcgtgaagggatggaagctctttaacttttatgaagttattggtaggttggagagagaaacgtgacgtgttcatcacagtatacgtatcttttttgtttttgtcttcaattagtaaccagtagattctccaagctgcttttccgtgacgagaaagagaaacagtgaattttatcatcgggtcttagtttcttggggtcctaagagagagagaaagagaaggagtgtgtggtgtgtgtatagggagtgttggtttttttcctatcctttcatgcttccgctccatttttctagcaagattattttaagtcagcgccaaacccatcgctagcccagtagccctagaaattttttacacagaagttttagctcattcattctttgtaggaactgatttgccttttaccagtatcccccatctgtaaagaaagattttcatctggtttaattctgtcattctgaatgggttgtttttactttttatttttctggtagctacaacataaatttattaagatctgagttgaaaactgtaatgtgtattgccaatatctattaaaatgatttgtagcagctcaccacttaatgtggtaggtggctggaggaaacaggagccctgactccctaaggagcatgttgaccagtgtatatcttgtgaagtttgtcttttagaataaccgtcattcacggttgaactatttgcgctgtgtactatttgttgtttactattttacaactgttgtattatatctttttaggtgtattgtttgtgatgcaggatttttctcagccactctggcagccagagacctccggctggcaggcccctgcccaggccttgcttgggtccaggctcgccgcaggagataccccatctactggtccaccggtgggcacctggtttgcactatggcacggataccatggccaccatgactgatgctcagcccctggcgggagtgggtgtgtgggtgagtgagtgccgggtcccgccagcttttcaagcgcaggcagcagagtgggctctgcagagcttacagctagacatgtggcaagcactcccacggcggactccagcgtccagacaaagggacagtggattctggtgtccagacaggggaaggtagtggcgcccaagcaggggtgcttacaaccctgaagcccaagagggggtgtgcagagtgtcagcagccctgttactcccattgccctgctccaggctatagctctggggtggctccgtccccgctgcttccctttgctgcctcctgtcacgtggggtgtcacagtgggggctgccctttgccggcagagggcccagggccacagtgttacagccttctttgtacttgattcattgggtccctagttcttgtcccacgtccaagaagaatgagactacacttaacacgacaatcgaagggtgaggagggtggagaatagttttattgagtgatgaaacacccctcacagagaggggactcaagggtggtcttccacccaaagtcgggtggtctcccttggtgtggtgggtccagggcttttataggctcagaatggggagtgtgtgctgatttgtctgtgagtagcaaaaaaggttaaaacaaagtcactactcaaaggtgggcacaacagtgtaataaaccattagagaaaagtaggtatatgtaaaataggtgaagggtggggattaattagaggaaagccaccaaacaggaagagaggttcgcaatccagtctgtggatttatccgagactcgtcgctggctttcaggctttaaactgtggcttgaaggttgggtttcactggtgacccacccctcttgcctaggatttgtctgcctcctgcctctatcatttcgataccttgaggctggagtatctatgagagacttggctaaggtcaaaaacacggttcagtgtcgatcatatgacctaaaattgaaaatcatcatgttcaagttgggagaacagttatgttgttacatggcgatactttatttatcttttattttcccttgacaactgtgttgacatggtgatactttaataggacactgatgctgctgcatgtgggatcagagtagaaaaggtgtttgcatttaaaggtctctgtttagctgataaaaacgtatatgatgtttgtaggatatcatggggaattttccttctgacttgtgctgtatttcctttcagagatgattaatgatctgccctcctttgatctctagagttctgaagattctgccttccttgaccatgtgtaatacagtttctgttctgatagtcattaattaatacactgtttgttactgactgtcagatatgtgttaggcattgttctagacactaggatagagaagtaacaacatagatgaaaaccattgccctggggtagctaacgttctagacatagaccagcattagcagcgaagtgcgtggctcctgggggatggtgatttgggccaaggataggaggattggaattgtagccaggatggccaggaagggtctcactctgaaggtttaagtttgacgaagacttaaagcagtgtaggaggaagggcaggtagcaagagcctggtgtggctgggtgcagcgggtggcggtgggagaagcaggagctgaggatagaaaggtgacttaggctagtgtagtggggccttgccagctcatagtgaggactcggtgtttattctgaacaggatgcagctcatagtgaggactcagtgtttattctgaacaggatggcagccgtttggaaggttcattctagaggaggagtcacatgatagactgtgttcaacaggcttgctctggcatctctttgagaatgtactgcagaggggcaagggcagaggcaacgagaccagctaagagactgttaacaagccagcaaggagatgccagtggattagctcagggtgggtaagaggttgacttctcatgtgttttggaggttgagacaatagaatttgtttgtagattggaagttgggagagggtgggtagagaggggaggagttaaagatggccccatagtgtatggcctgagctaagcaaccagatggaggggggcggggcgtggtggctcacgcctgtaatcccagcactttgagaggctaggtgggcggatcacaaggtcaggagatcgagaccatcctggctaacacggtgaaacccgtcgctactaaaaatacaaaaaattagccgggcatagtggcgggcgcctgtgatcccactacgcaggaggctgaggcaggagaatggcgtgaacccgggaggcggagcttgcagtgaccaagactgcgccactgcactccagcctgggcgacagagcgagactctgtctcaaaaaaaaaaaaaaaagaaactcagatggggaagacttggggaggtcctgtctggtgggaagcttctgttgcgagtttggatttatgtgtgttgaatgtgaggtggatgttagacatccttgtaagcagtgtccagtgggcttttgggtctacaggtttggagctaaaagaataagcctgggcggagatagactggaggtcacatcagatgaggtcacccagggtgtgaatgtgggtgggaagaaaagaggccaaaggcctctgcgggtgtggagaggtccaggaggtggcaggcagaccaagtgtggctgtgttctccaccagtccctagcactgtccctaaaagcatgctccccattcgacgactggcaggtgccagcacttaaatagccacactgcccattccttgaggacagagcggtgtcttgtgcttgcatttctagtgcatcacttgtgtctggcatgtggttggtaataaaaaaaaacagaacttgaattaataataacctacacattcccctactatcaaagctttcatttgtagagtttaacataaatccagtatgttagcataacatgtaatgaatgcagaggctctggggagtggtttttttttttttcttgagacggagtcttgctctgtttcccaggctgggtgcggtgggcgcgatctaggggagtgggttttaatgtgcgcaatctgcccagtgtgtgactgaaacagtgttttctagctttctgatgtagctaaatttggagttcctttctctcttctctgttttcattcaggactgaactactagcattctcatgtaaactcttggagatttaaaaaaagtagtaatcatatgcaaactgttatcttaaacctaagagctttctaaaggaaaaaagaacctttgttgaatttataaaatataaatcttttggaaaataacttctaagtgtttaggaaggtttcttcgaaatgaagtggtttacagtaagctcttaaatttactcgtttttttttgtagtcctctctggttgaatgaagtgtaattggtactaaatggagagaagttggttaattcattgagtacaattccctacatttctgcctgtcagattagtagtactaagtcacagttttttctgatggaattactatattattaaaatgccatctgccctcttctgcttgtgacgcagaagtcccagggaagagggcgtggaaaatcaagtgtctgggatccagccgaccaatgggagaactgcttctaagggggactctttcttaaggtgtacagcacctctccgtcttttttttttttttttttttttttttttttttaagacggagtctcactgtcgcccaaactggtggagtgcagtggctctatctcagctcactgcagccttcgcctcctgggttcaagaaatctcctgcctcagcctcccgagtagctgggattacaggtgtgcaccaccatgcctggctacttttttatatttttagtagagatggagtttcaccatgttggccaggctgttnnnnnnnnnnnnnnnnnnnnnnnnnnnnnnnnnnnnnnnnnnnnnnnnnnnnnnnnnnnnnnnnnnnnnnnnnnnnnnnnnnnnnnnnnnnnnnnnnnnnnnnnnnnnnnnnnnnnnnnnnnnnnnnnnnnnnnnnnnnnnnnnnnnnnnnnnnnnnnnnnnnnnnnnnnnnnnnnnnnnnnnnnnnnnnnnnnnnnnnnnnnnnnnnnnnnnnnnnnnnnnnnnnnnnnnnnnnnnnnnnnnnnnnnnnnnnnnnnnnnnnnnnnnnnnnnnnnnnnnnnnnnnnnnnnnnnnnnnnnnnnnnnnnnnnnnnnnnnnnnnnnnnnnnnnnnnnnnnnnnnnnnnnnnnnnnnnnnnnnnnnnnnnnnnnnnnnnnnnnnnnnnnnnnnnnnnnnnnnnnnnnnnnnnnnnnnnnnnnnnttacctggaagtctagagatgggtctatatatttatttatgtatatatgtacatatataatataaacatatatatacgtatatatacacataaatatatacacatatatgtataaataatatatacgtgtgtgtgtgtgtgtgtgtatgtatatatttttccccccccccgtcgtccggctggagtgcagtggcgtgatcttggctcactgcaacggggttttgccatgttggccagctggtcttgaacccttgacctcaggtgatccacccaccttggcctcctaaagtgctggattacaggtgtgagccactgcacccggcgagtggatattttttccgaagtttgactcctttctatcaggagctacatgaattaccttataaatcacatgatgtggcacgggaagatgagaaattatgacaggggctatgaaataagacaagggaacctctccatggcgaattgctgagcagctggtgtcaggcctaagtggatctcatacatctgagagtcagtgaaggaacaagttggtggctcacacttgtagtcccagcactttgggaggctgaggtgggtggatcactggacccaagagtttgagaccagcctgcttaacatagggaaaccccacctctacaaaaaatacaaaattaggcatgacggtgcatgcctgtagtcccagctactcaggaggctgaggtgggagatcccttgaggccggaagggggaggttgcaatgagctgagatcacaccactgcactccccttgggtgacagagccagacccttgggtgacagagccagaaggaacgtttgggaatggatcatcgtgttggtcgatctgcagatgttagtgattgtgagcgttagttttgcacccatgtgggttctcaccccacttggaaaactggtggctgtgccccatttcatgggtgaggagatgaggctggaagaagtccaggcctgtgtctgtcctgtagctatcgaccaggctctcagatccagaaacaaacctcagtaggaatcagaagtgttggccgggcgcggtctgcctgtagcatcgagcaggctgtcagactccagaaccaaacctcagtagaaatcagaagtgtcggccgttgcggtggctcatgcctgtaatcccagcactttcggaagctgatgtgggcggatcatcgagatgaggagtttgagaccagcctgaccaacatgggagaaacccatctctactaaaaaacaaaattagccaggcgtggtggcacacacctgtaatcccagctactcgggaggctgagcaggagaatcgcttgaaaccgggaggcggaggttgcagtgagccgagatcgtgccattgactccagcctgggtgacgagcaaaactccatctcaaaaaaaaaaaaagaaagaaattagagtgttaattccaaaaaagttatcttcctccattataaagtaagatctggaaggtcaggaggtctttgtaccgttctgatgcctcagtccatggctcctcattgtgtcttcctcttcactggagctgcgagggtgtccaggaggggtgagttctgctcggagggcctgccgagggcatccttcctgtcctccagcatgagagggacagtgtggggcccctagagtacagggaagactcctcataactgaagagatgcgagtctgagagtctttattggctcttttgtaggaatcgtgcaggtctctttggtccttggagccagcccgtgaggccgggggcaggctcttgctctcaaatgcagtcactcttggaggaaaggacgttatgttggattcagtgttagtaaagagaccatgtttggttgggtctctgttgaccttgtactctgtgctgcacctctgcttacagaatcctcccatccatgccggttcgtgactgctcacccgtttcagtgatctgagagggctggcctgaaagagtggttactgctcccgtgcagtttagagcttttcctgcaccttgacttgtcgtttcacagtgaggacaccaagtcacaagaaggtcactagcctgtaaggttgcgtgactctcagtggtgggctcagacttctgactccacagctggcgctccagctgtcaggaacgtgtccaggtgtgacgtgtggacactccccacttgcagcgtcctccacagtaccgagaggaggtgcagtgtggtgggagaagcaagggatcatgttttcagagtgtccgccactagccctagggaatgtatgactcgctcccaacagagggcaggattctcggggagggccggagtgcgttctctggacggaggagcagagcagcttggggcacggtgtgggagccctccttagggacccatgggtcacgttcgccgtggctgcgccactcctgttcactgccaagcaccgtgattgcccttggatttgctcccctggggtttcctggtctccttgatggtttatacagtgagcaattgaggccacacacctgtaattttcacagttatagctggaggtgtggtggtgtatttgaattaatggaacacctcttattcccttcactctgaagttggcttccttgcctataaagtttgtgataaacctaagaaatacacctgctatgcattttactgcgtccgtgatgaaaatccccaacttcacagccgctcaggcctcgtgaccctgctttcagagggagcctttttccttttttccttatctatacttctctcattcctttaccatttatatttttaatatgggaaactagcatcctagaagtttctcagcttccagattctgttactgcagactgttactgattcaacatatggtccttttcctgatgacatacgccacattcttctgaagtacagatggtctccaaataccatggtttgacttacaattttttgactttacgatagtgtgaaagcagtatgcattcatggaaaccatacttgacgttttgaattttgatctttttctgggctagcagtatgcctcagatactctcgagatgccagatagctcctcgtcagccacatcatgagaagggggaatgaccctgctctacagggcactgtgttgccagctgagtttgcccaactgtaggctaatgtaatgttctgagcacatttaaggcaggctaggctaagctatgatgttaggtagattacgtgtttcaatgctttttttttttttttttgagacagagtttcactctcccacctgggctggaagcagtggcgcgatctcaggtcactgcagcctccgcctcctgggtttaagcaattctcctcctcagcctcccgagtagctgggattacaggcacctgccaccatgcccgagtaacttttgtgtttttaatagagatgggatttcaccatgttgaccaggctggtctccaactcctgactcaggtgatccacccgccttggcctccccaagtgctgggattacaggcatgagcccctggcctggcctcagtgcatttttgacctaagtattttcaatttacaatgggtttattggactaatcccatcctaattaaggaacatctgtagtctacaaagagatacttgccagtgttcattagctctgctgtactttaaataaaagatatgtgtatctttagttcaaagctggtgcctggaacggtgtcaaacatgagaagaatgttccaacagcaagatggaatcattgtcttgcatgttgaaattagaccggtggtggccaggcgcagtggctcacgcctgtaatcccagcacttgggaggccgaggcgggaggatcatgaggtcaggagattgagaccatcctggctaacacgtgaaaccccgtctctactaaaaaaaatacaaaaaattagccaggcatggtggcgggcgttgtagtcccagctactcaggaggctgaggcaggagaatggcatgagccgggaggcagacttgcagtgagccgagatcgcgctactgcactccagcctggtgggcgacagagtgagacccgtctcaaaaaaaaaaaaaagaaaagaaaagaaattagaccggtggtgttttcatccttttccttgagaataagttttctggattttagtctatatattgaataaagcctacaggtcaagaatagtagggacttctgaagattcaggagtggctttagagaggtagcagggacatctgatgtttttcagctctttaaaaagataggagtgggccggatgctgtggctcacgcctgaatcccagcactttgggaggccgaggtgggtggatcacttgaggtcaggagatcgagacagcctggctaacacagtgaaaccctgtctctactaaaaatacaaaaattagccgggcatgtggcagatgtctgtaatcccagctactcgggaggatgaggcaggagaatttcttgaaccggaaggtggaggttgcagggagccaagatcatgccactgcacttcagcctgggcaacaagtgagactccatcacaaaagaataaaaaaaaggcatggaccttaattcatcctaattcgtttttgtaatcatgtgcagaaacaagtaacatatatataaaaaggcaggagagaatgtaacttggactttatttattcacagtcaccaagcagtttggttgataatgtctctgaaagatggacaagtgaaatatgtaagagcagagctcttgggggccaggtgcagtggctcatgctgtaatcccagccttcgggaggctaaggcaggtggattgcttgagcctaggagtttgagccagcttgacaacatgattagacctcatctctacaaaaaatacaagaattagctgggtgggtggcacatgcctgtagtctcagctgctcaggaggctgagaccggagaattgattgagctgggagtttgaggctgcagtaagctgtgattacaccactgtactccagcctgggtgacaaatgagtcccggtctcaaaaaaaaaaaagaaaaaaaaacaggagcagagctcttggacaagccctgctgtggaaagcttgcttcatctggctgcagccgctccacaacgcccgtcatttgctcaggaagccacagcactactctaggaaaggggcagagaggggcctgggtctccccagctgagaatcctttaaacagtgcctgtagggccctctattgtggatttggtagttctcctgcaccgagggagatgctagcaggtgcttctgaaccctgtgtttgggaattagctgccatacaattaaggcttttgggtatagtaaaatttgtgtgcctttgaccctgtggttctggtcctcgatgttaatgacagagcggacattgcagcccttctgtctgccagccagcacctattggaagtgtttcattgaaacgtcacacccatatgctgaggctgtcctgttgttatccattttatggatgagggaacattcacacttagaagttaagtgagtggcccaggaaactacgtttaccagtacccaagctgggctttaaattctgactgccccctgcctccccaaggggatgtgcacagcacagaagttcacacacgatgctttttagtatcagcttaggtggagatcttgtttatgtagaatgctgaggaaaccacaggcatagtatgatttcacgtacgaacctgtcataaagacttctggaaagagtcattgctgggcaacgaggcttcacgtgatttgtgtattttgtagtcttcagaattttttatgattagcatatgtcattcttattgaagtgtggggtgttatcaaaaagtaaatttagatgtgggagaaattcatatgtgattgattttcaaaagatgctgtaaagttgctggtgaaggatgagtgatcagacaccatcagagctggagaggcagagatgggaattgtgtgttcccagttccctgaagagcagctggagagagatgcctctggtccgccccagaatacgcaatgggcatctcgccacatgggtgtttgggctggtgcattgctctggctggcgccttcttttcaggaacattgtgggacatgggtatcctcagccacagttcgtggacaggaagaccctgggcctctctagtttctttctttcttttttttctttttctttctttttcttttttttttttttttgagatggagtttcactcttgtcacccaggctggagtcagtggcacaatctcagctcactgcaacctccaccttctgggttcaagtgattctcttgctcagtctccctagtagctgggattacaggcgcccgccaccacgcctggctaattgttgacttttagtagagacggagtttcaccatgttgaccaggctggtctcaaactcctggcctaggtgatctgcccacctcggcctcccagagtgctgggatcacaggcatgagccactgtgctggcctagtttcttaattgaagtaaaacagagtaagatggcatgcagggctaatcattgcccagcaggtaagcaccatggctctgcagccagctgcctccttagaaagtggggtgttccccatggaagtggtggcatgctcttctggtagcattgttgaaatgaaaacaggttcagccttgatcactaggctttttgtacccgggtacctctggggacttggcagagagtttgattctcagtgtccaggggttaactttctacctgagagtagcaccccatgcttctccagcactgctcctaaccaggaaattggggtagaccagaaccccagtcttcccagcagctcagtgttcttgccctggagcatctgccttcatcacagtgactctgaacacgctgccatggtgacactggtaaaccttaggatggccatggaaaacgactctttgccctgtttcttcttggcttccttgcgtacaaggatgaaggaggtggtttaactttatttttgtcctttactttttaagttaaagtaagtgcttgaatcgggtgggttttcatttttttgctttctcacccctcaggttgcccctaacttggcctctcaccctcgtgtcagctgttagacactgactcagtggctcagatatgaaaggctcaggaagtagcatgctggccccacctccctgtccccataccttagcaagcagctgcccagcagggcctcctcctctttcctaagagtttactccatccatggtggggtcttggtaggcccgagatacgagagggagtgctgctgttacaagaatttacagttgtttcttcagcacagaaatgctgtaaatggcctctttcgatactagtttatgaaattataaggtctgatgattgtgcatctttggtttcaacagctactctgacctacgacactctccggttgctgagtttgaagattttcctgagacctcagagcccgtttggatactgggtagaaaatcagcattttcacaggtatcggccatgctggagcccaccctggtctgaccgcttggcctgagaagcattttgtgatcactgttctctgctaactctgccataacttgtgacttgcaaactaaggcgttgtgtgtgtgtgttttttttcttttaaacaacctctagaaaaggacgagatttgtctgatgtggcatctagactttggtttacatacaggaaaaactttccagccattggaagtactctgttttattacaacgcgggacaaaatatgtttttaggaaggaggaaaacttcgcttgtagatttgacttcaatatgccactgacttcatttgaatcttcacagcaatcctcttaactgaattggccgaggcctcacgtgtagtagtggcaaagctagaatccacggcgctgactctaggctagtgtgttttcaactgcaaatcccagcttattactggagctggaaatagtatcatgagttatgaccaacgttgttttaaatgtaggacagaatgtcatagaaagcgtgtgtgtccgccacgggcacgcagcatggcgcttcagggatcttcgttttcgtttgcattttgagtgtgtgttctgggtcacagctgtacaatgtgtttcttacttaggtccagaatgttggaagccattctctgtagccctcatcttttttagtattttccacacttaacctgtgggagatttgaagggccaggtgaatgtgacatgtttttatgtaacactaaggtgcattctgtaaaagccattcatcattgttgtataccctggagctggaaggagatggggactggttctagccttgcctctcaccggcggagaactgaggccggaggtgagggccgggctggcgtcatcttcctcagtgccaggtcagggtttggtccctcttctaggggtggtttcattctttatctgaagtgaggtggaagtcaaatagccacaacggctggacattggagaacactgacgcgtgggacatacgacagtgtctccttaggttgatatttaatgatacaccttgtgagatgtacctgggaatattgatatgtaatgatatattttaatgacataccttgtcagatgtgccctggaatagttgctcattccacagtttccgcttgtttcgcagctgcgctgaacctgctctctggccgccttggatgcaggtttgtccccagcctccatctccttcacagctaccctgccgctgctgggaaggagaacaggactggagcgaagcctttctggtttggcagaggccttgtggggaggtagaggctggggatgagcctgcacatgaagcagccctgtcgcagttctgaagggagtgtgctgtgtttccttcttagccccacggagataattttttaaaattattactttcattttttaatagatggggtttcgctatgttgcccaggctggacttgaactcctgggctcagcagttctccctcctcagcctcctgagtgtctgggactacaggtgcacaccaccacgccggctctgagatacgtttttatcagcagtagagcgatcagcagtggagcgagggtgaccagggcactgctgattgggttgttggtgggtgacggccaccactaccccaagacacagggttattgtccgtgccagtgcatggagaagctgccggaagcccagaggtgggcacagggcgaccttgtggtctgacccctgaatctctgcttctcaccctggtgtgcagccacctagcagctcttgtctgctgcacaggtggccctctctgttgtcacagctgtgcagtggccttccactgacccctgctatgggctggcagtgtttcccacgtgcctgtcacatgccgcgcagttccaggtgcatgttgtccatctttctgggccccagggagtggccgtgagggcagggcccaggccctgtgctggaagggctgagttgctgcccttgcggcccttcctgtgctctcagcagcacggatgtcatcaagcgtttgaatttctgcctttctgataattggaaaatgcgttgttttgttaactttgcattttctggatgacttacgggggtcagtgtcttcatatgtttgtcagacttccttttgctccgtgactgacttgttcatgtgttttgcccattttgaggaggttgtcggacatttcactctccagtaaatgtggcccttggcgttactgagtcctaagaggtgtgtgtgccccaggtggagctgatggaggagggagtcggtgcctgtggtgtgggactgaccggcgcctcctgccagtgggcttgtggcctgtggggccatctggccatgagcacttctctctcgtctgccacgacaggggggacaggccccacctcggacacaggctggggctgcatgctgcgtgtggacagatgatctttgcccaagccctggtgtgccggcacctaggccgaggtgagtacagccctggggagggcgcatggccacggtgttctcaggaagcaaaggggactgtggggcagggctctttagagcagaccacaggtaaaacagtaagtagaacttgggggtttcttgataatgagccacttgtttttcttgatttaaaaaactgactttaaagaatgctaataaatcgcatgggcaacatggcgagaccccgtctcacaaaaaatacaaaaattagccaggcgtggggctcctgcctgtagtcccagctacttcggagactgatgtggagaattgctagaacccagagatggaggctgcagtgagctgagatcgcaccactgcgctccagcctctgcaacagagtagaccctatctgaaaaaaaaaaaaaaaaaaaaagaagaagaagaatgctaataaatgtttaaattactgaaactgttttctgtacagatttgttttgataacttggcgtatatgtattgaaatcctggagaacatgggtttttacttttaaaagattctgggctgggtgtggtggccacgcctgtaatcccagcactttgggatgccgaggcgggtgggtcacgaggtcaggagacaagaccatcctggccagcatggtgaaaccccatctctactaaaaacacaaaaattagcaggcttggtgacatgtgcctgtagtcccagctactcgggaggctgaagcaggagaatcgttgaacccgggaggtggaggttgcagtgagccgagatcacgccattgcactccatcctggtgagagagcgagactctgtttaaaaaaaaaaaaaaaaaaaaagattctgaaaaaggttggatgccatctgtatctttagtgtgaaagtgaaaacttgtttctcatatttatggtagactgacctgtaattttttttccaatagattggaggtggacacaaaggaagaggcagccagcagctacttcagcgtcctcaacgcattcatcgacaggaaggacagttactactccattcccagataggtgggaggctgcagaatgtgccaggccccacccgggctgtctggagagggtgagtggtcggtttcccctcagagcttttctggtgtcgtgggatgtggagcaggaggctgaaacctgtaaacactgacctctgaccatctgtgcgctgctgtcacatcacccccgtgtctcccacatcacccccgtcccacccaggcccagaccctgggccttgcccttcctgctgtcatgcggcttgcagtgcctggtgctcggcacagtctggggaaattggcctcgccccatcatgaatctgaatgctcagattgaagtggagtgagtaaagaagagttggcctttcttgcaacaaggccggcttttgagcactgtgttttcacttatagaaggaagtggtcccttcatttccctccttttctaagttcatagtgaaggacagtccctgagaccttgtttgccccctcatgctcccccgatcttgttggggcatccttccgtctggaggctgggtcgggtgctgtccaggcttcctgtgacgtgtctcctggcaccatgtgccaccagaggtcagggctgggggcgggttgtgttgctaatgtgtatctgttccctgcagcgcaaatgggagttggcgaaggcaagtcataggccagtggtacgggcccaacactgtcgcccaggtcctgaagtatgtactgcgcttcactgctgagcatggggcagcagggatgttccctgggggttaaattctccttgagtcttatggctacaggaaataaggggtctctaattatttacttcatggccctcagaaggtttctagcgatgactgtgttgaggtcttgtgaataggaatttatgttttctaacaaaatgaacacgtagtccacatcctggctggcacattggacccttgttctttgctgcatggatccaccttaatggtggcttctgatggggtgggcagctgaagctagtctgcagccatctgtgcgggtccgggcccttccacctctgcaggcttgttggaggctgccctccgcgggccttgccacctcctttctcactctacccggagactccctgtagcctcgctcaccttcccatacacctcaggtctgaaagtgtgctctgcacctgctccgcaccgcttcctttcgcacctcactcagcccattgcgtgcccgccccccagattcctctgagatgaccttccctgcagttccagaaacttcctgtggtttcagcttcgtgtccactcttcactcctcttgacccatccagggtcatttgtctgattccatgtgtcctggcatcccagcatttttggggaggctctggccagatcccccggacttgtcccctcagggtctcctccccactggtctgagggccagcgtctccccagccttcttcagccacggcccccttgaagcctctccttctgcatctgcctgttctgtatcccaccaaggccctcaggcatcccacgttccacattcctgaaatggccctgtctcccctcaccccagcctgctcctcagcatggcagtcactgtctccacccagcttttctgtcaggttccctgggtcctgcacaagtccgtctctgccacatcccacgtcacccgcgtcccacgtcaccccgtcccacatccccagcctgctgctccctctgtctccagggcccgccctgtgtttggcgtgcacctgctcagtccctactgcatgcccttcagagtcctctgtccagcagctccccagccccaccacacccttccactcacacttctcttgctgctgcctggagtggccccaccaagtagcgccgtttctctggaagcaccaggccactcgccatgctcgctgtttctcctggtccctgcctgctccccaccagcccccgcccctgttgctggatgatcctccccaacctgcaagtctgtggcactcaggcacatggacggcttccagggctgatttgtccctggactccaagctaggtccagctgcttattctgcatttccacctgggtatctgtgtgcatggtgacctgacaccagagcccgtgctggccccagcctgcttctcctacagtggtccttcaggtgctcaaacaaaatctgggattgttctagacccctctttttgagacggagtctcgctctgtcgccaggtggagtgtagtggcatgatctctgctcagaatcccaagtgattctcctgcctcagcctccgaagtgctgggattacaggcgtgagccaccgtgcctggccaggactcctctctttttttttttttttgagacagtctagctcagtagcctgggctggagtgcagtggtgcaatcttggctcactgcttcctccgcctcctgggtcccggttcaagcagttctcctgcctcagcctcccagtacctggaattacaggcacccgccaccatgcccagctaattttttcaatttttagagagatggggtttcaccatgttggccaggctggtcttgaactcctgacctcgtgatccactgccttcgcctcccagagtgctgggattacaggcgtgagccaccgcgcctggccaggatcctctctttcttttttttttttttattttttttccgagacagagtctagctctgtagtcaggctggagtgcagtggtgcaatcttgggctcactgctacctccgcctcccgggtcccgttcaagcaattctcctgccttagcctcttcagtagctgggattataggcacatgccacatgcccaactaatttttgtatttttagtggagacaaggtttcaccatgttagccaggctgtcttgaactcctgacctcgtgatccacctgcctcatcctcccaaagtgctgggattacggcatgagccaccgctcctggccaattcctctttatttcagtgggcccattcaaaatataattcctctttctttcagtgggcccattcaaaatatgtccagactctgaccagtgttcacctttcactccctgtgctggtcccagccccatcttcttctttcttgttgatcttccttcctctttgtcatcctagagtctctttagcaaataacagcagagccatctgcataaaacatttggccactgctctgccttgaaccgccctggctcttcactgctgactcaggcggggctcacccgacctccctggcatgacaccttgtgctcctgggacacaccagcctcagggcctttcatgtgtggtgcctggcacttggaccctgttcccccgacacctgcctgggttgcgcccctgtctgcccaggtaccctttggcaccaaggtcttccctgtggctacgttagtagtgccatccccgttcctgcgttactgttctctgcagtgttgaccaccggcccacgtggctgctgctccttgtttgccctccgccaggtcagctttgccagtgctgctgtgtcccttgtgtgtggtgcgtcttcggcactgcatctgggctagaggtgggaggaggaaggtggtgtgggagtgggcggggaagcaggctgtcctcccatcttcagcactgcagctgggctggagatgggaggagaaggtggtggggcaggggggcagtggggggcaggctgtcctcccagtgtcccccctggcttgtgcattgggaggggctctgtgtggtcaccccagtcccctgctccacccccacccactcccctccacaggtcttgcattctgtccccgggagcaccaggtctttgctgcctcaggccttttctattgttttaccttttgttgaggtcctctgaccccacctccgccagacctgaatgagatcagagtcgtgttagacttttggctgcagaatctgcccttccctcagaaggggaatccaaggccatggttcctcctcactggcgtgcacagtcgtgcttcccactaagctgcgatttctctataaggactcagattccttggttgtcagctcagcgtgtttggtggagggggagcagagcagagcgtgaaggtgctgggaggcctgcctcaaagttggcaaaacccacaggtctcagagctgcgttcatgttctagttcctgcctctgtgccagtgagaccagaaaaccggccactcaaaagcctcttgcgtgtgctctctatgaatggaggctggggcaagggcaggcccctgggcctcaggcgagaagaagcagatttaccctcagctttcttcctgtctgtggcttggctgtgccccggattttaggagccttggcccttctcatccgagaagcacctctaaccgaaccctccttcgcgcagctatagctgcaaagatgaaccgtctttgaattgtacaaaacttatggtcattctcctactctctgtaggaagcttgctgtcttcgatacgtggagctcctggcggtccacattgcaatggacaacactgttgtgatggaggaaatcagtaagtggctcgagtttccatggacaagaaagttgaaatcacgggcaacatacacacttcctcgcctgagccccacgggagcctcggcgagtgttgtcagtcgccccatgccgtgcaggtgctccgtgggcctgtgcgccaagccagatgcacggtggcctcgctctcctatcccggcggtcataccagagaggagagcccaggctgtctggaggccgcgacttggtatctcacgtcgtgttttgtgcttggttacaaatcgtttatgaaggccctgctgtgcttaggcgccctcgtgtgggaatttggtgaagttattttgcgtgccttgatgtgcgacagagagatgtagcaaccatctctagtgcaccatctcgagcaaaggcacgtcgtgaaggcagagctcttttcagctttctggaagaaggtctgctgcaaccctgaaggaacctgggcgtggcaacatttacatctaggaggaaactgtggctcagttttaacaaatgggctcattgagtgagttccaaattcatgtttcacctccatgatgtagccaagctgagaactcttaaaaatgcctcaccgcctttttcactcagggcacctttttcccaaggaacttctcaaaactccctcaattccaattttattgaagttctaatgtaggctattgccttgaatccaattttccataagaaagagctcatttaggccgggcgggtggctcatgcctgtaatcccagcaccttgggaggccgaggtgggtggatcatgaggtaggagttcaagaccagcctggccaacatggtgaaaccccgtctctactaaaaatacagaactagctgggcatggtggcacgcgcctatagtcccagctactcgggaggctgaggcagagaatcgcttgaacctgggaggcggaggttgcagtgagccttgatcacgccactgcactcagcctggccacagagcgagaatccgtcccccgccccccaaaaaaaagacctcattcagaccacagccgtaactgcgcacagattcacagtgggagtgggtcctgccctgtgactgtggtgtgccaggtcaccacacaggtgtgtgctgggtcacagacacgccccttccctgcctctcattctgtttcttcgtcgtctggccatcctcgggggcattgtgacacagcggagggagtaggcaggactttataagggagagtgaggctggcttctgcagcattgagagctttgccacgcaggctctccttccaggattctgttcctcagagacttgaacttgggatcataaccaaaggtgtttgtttcttccatctgcctttttcctccattctgtttcttgaaatttttataaacattggaaacacaggaagagtacaaagaaagagaaaaattattgattttaccactcagaataactcatatgagcattttgacattcttactctcagtatttctcctgtgcttttcaaaacttacatagtttcctaagtattttctcctggccatgagtgacagcattgtaattattactggctacacaatatactattataccttagttccctgttcactgccccatcctccctccgtgtttggggaaatcacttaccccctcgttccgcacgcgtgctcaggatctcaccaagtacacctcagtccctggcctcggattagggaggctgttgctgggtgcagtggccaggaagcgcaagggtcagggcttcctagaacctccgtccctctgggtgcaggtagcactggtggggtgttgggggcagcttgtctgtgtggactccagctccgtcccttcgggagtctcagggcgcccaaagcagtgctgctgaaacgtggcttgtcagagtgagagtggagtcaggtcctggagagcttgaatctgcatttcccagcccctggggatggtggctcccgggaggatgtggagctgcctggtctgactggcttcgtctcactgcgtcagctgcctgaaaggacactgttcctacaggagcatgtggaaggtgcctgatgcccccatttaggaagaaaggcatccacatccaccagcaaaggcactggcattgatgcacaaggcttgggtttctgggttcctgagtgtggctggtgttgtgaggaggacatcggggtcgttctgaatgacccctaccaaaagccccaggaggagtagtggggggagggcaggaagcaggctgcttttttcagtcgtgctgctaagagtggcaagggaggacgtctgaggaagaagtccgcaaagccgaagctagagaaacagacgtgtcttggctaagcaaggacttttcttctagtttctcggaactgcttgtggaaggagcagttgataggagaagactgatgccattcagaaattccactaaagcttcttcctgcagcgaaaggctgcctgacggtgttcccactcagattttaggtgaagcctgtggggtaaggggagacctactgcctacagtgtccccatccaccaacccatcccccccgcaactcatccttctgtcccccccagtcaaaggccagccaggacatccttagcatgctcttcttgtccttaacgttgagggcttagacctttctaacgacagtagacagaatgtcactgaatgtagggaggaaatacgattggaaaacgtgtcagtctggcagtgaggacaaatgactccaatgaaagaaaagtaataccagagcaagcacagtcagaaacagagtggggaggagaatcacaatagctggaactcactctctgagaggcagtgcagccaaatagaggcagctgagagcagagtatgtggattagacttttcgggagagttggccactgaaggagtaggagaaaattcccctgagttggtgagattgagtctttagagctaaagacccccaaatttttttatcagaagtacttaaacatacatttcctgataatatttccaaattgcagaagtaaagggaaacttctctaaacatccaaatatagtatcactactaagctgctttgaagaaaggcagtctcaactggcctgggcatctcattttgtgccataccaaatgctactggaaaatgtttagaattctgagaaaagacctggcttatgaggtgagagtaggtatgtgtactgtgtagttgtcattgatagagaaatataaatttaaatgtgttcaaaatataaagagaacacgagaaaatttcaggtggtggcaggaataggcaaagcccgttgcaccctgttgacagcagggtgtttgtgacgtggtaggtcacacactcatgctgggctctggaggcacagaagcaaccggcccagctacgcatcagcccttgagccgatcatgtgttcgatcatattcctgagacagtagggtctgtgcaggtaacaaagcaccagtagcaggaaactcaccaccgggaagcctttctatcaaaacataacttcaaaatcagtaaatgggccgggcatggtggctcatgcctataatcccaacttcaaaatcaataaagcgggccggcgcggtggctcacgcctataatcccaacttcaaaaccaataaagtgggccgggcgcgtggctcacgcctataatcccaacttcaaaatcaataaagcgggccgggcatggtggctccgcctataatcccaacttcaaaaccaataaagcgggccgggcgcggtggctcacgcctaaatcccagcacttcgggaggccaaggtgggtagatcacatgaggtcaggagttaaagacagcctggtcaacatcgtaaaaccccatgtctactaaaaaaaaagttagctgggcatggtgcacgccctcgtaatcccagctgctcgggaagctgaggcacgagaattgcttgaacctggaggcagaggctacagtgagctgagatcatgccactgcactccagcctgtgtgacacagaagactgtgtctcaaaaaaccaaaacaacaaaaaataataaaaatatatagaaaacagataattaacagattagctatggaaagatcaaagctacaggggacccagataacacaacagcagagtttagtagatacgtgtcaaaccctagattgtgacagcagagtgtgcctgggaattctatgaaactaatgcggaataaaatgaaaaaaggacaaaaccctgctgcctggaaatggaaacctcaaaaaagtcaagtgtagagaccgtaactatgtatctgaacctgatgtgtacgaactcagaagaaaacctgtgtatcttcagtactagtatatgggttctttacaaagtgaaattaatgaaataagcatacaactcaagaattcggaaaaagcaaaattaactgaagaaacaaagaataatattaaagacaaatacagaaattaatgatttaaaggaagaaatgtattagccaggtgtagtggctcatgtttgtaatcccagcactttgtgaggctgaggcaggaggatgcttaaagccaggaattcaagaccagcctgggcaacatagccagacgtctatttttttttttttttggaacagttctgctctgtnnnnnnnnnnnnnnnnnnnnnnnnnnnnnnnnnnnnnnnnnnnnnnnnnnnnnnnnnnnnnnnnnnnnnnnnnnnnnnnnnnnnnnnnnnnnnnnnnnnnnnnnnnnnnnnnnnnnnnnnnnnnnnnnnnnnnnnnnnnnnnnnnnnnnnnnnnnnnnnnnnnnnnnnnnnnnnnnnnnnnnnnnnnnnnnnnnnnnnnnnnnnnnnnnnnnnnnnnnnnnnnnnnnnnnnnnnnnnnnnnnnnnnnnnnnnnnnnnnnnnnnnnnnnnnnnnnnnnnnnnnnnnnnnnnnnnnnnnnnnnnnnnnnnnnnnnnnnnnnnnnnnnnnnnnnnntgcctggacctcattctataaaatattttaaaaataaattttaaaattaaatttttagaactaacacatactagaactggctctttgaagcaataacatatatgttttaaaaaatcaaagttaaaatccctcccttggctaagcgctgtggctcccgcctgtaatcctagcatttgggaggtggaggcaggcagattgcttgagtccaggagtttgagaccagccgcctagtaacatggtaaaacctcatctctacaaaaaaacaaaacaaaaaaactagccggacatggggcatgtacctgtagtcccacctactcgggagtctgaggtgggaggatcccatgagcctggaggttgaggctgcagtgagacatgattgcaccacttcactccagcctgggtgacacataagaccctgtctcaaaaaccaaacagaaacccaaacaactcccttaaggctgggcgtgtagctcctacccataatcgcacctctcagggaggctgagttggaggattgcttgagaccacctggacaactccctctctataagaaatagaaaaatgaggccaggcacatggctcatgctgtaatctcagcacttcgggaggctgaggtgagcagatcacttgaggtcaggagttcggaccagcccggccaatgtggcaaaaccccgtctctactaaaaatacaaaaattagctggcgtggtgacacacacctgtaatcccagctactggggaggctgaggcaggagaattgcttagcccagaaggcggaggttgcagtgaaccgagattatgccactgcactccagcctggacacagagaatcggcttcaaaaaagaaaagtcagggggcacagtggcccacacctgttgttcagctactcgggaggctgaggcgggaggattgcttaagtgcaggtgtttgaggctgcaggagctgtggttgcaccactgcactgcagcctgggtgacagagtgagaccccgtctctaaagaaatttaaaaagttctgtctcagaatccttgttttccagctgtctgttttgagaaattgagtcctacaaaaaagttcagtgagtcatggccacaaaccctccacctagatccaccattgtgttttgacacgcttggtttttatgagcaagcctcctacgaatgagagtgttcctggagccacacagcctcatcaccacaaaagaggtgacgccacgactcaccagggtccgtctggccccttgctgtccagggaacaacccgtgccgctgatttgtgttcctggttgagggtcggtgctgtgtgtatatagttgtgatgtctttctagtctttaattgagaaggttctgccttttgttgtggttgttgctgctttgtggcatttttgacgagttcaggtcagctgaccatccacacgctggatttgtctgcttcctcacagttgggcttgggttgagcctgtggctgagatagcctctgggtggcagtgtcctctgctctcccatccggggcctgcagtgggacactattcagatccccggagatggtgtcttttttcctttgtaattaatgaataatccagtggtgaactgagcatgtcctggtgagctgtgtgactcctgcctgataatggtggtttttctagccgtcctttcctttcacgtttattggttggcgttctgagaagagccgccttttctcccatccttagtgtgcagtgtgctacctgtcacctgtctgtcacctgtcagtcactgtcacctgtactgtcactgtcacctgtcactgtccatctttttgatgcttgacggttccacctttggcggtggccacctcagtctggtggtgtcttttgccgtgttctggcgtttttcgtttatgtttgagccctcccttatgttctgggttaagcagatgctgcaggcacctctgaacattccctcctggccctggaatcagcctggctcctctgagtggggagtggtgttgagaaacctcgattagacgccgggcatgctccatgctcccggagtgtcttctcccatcaccgcaccctccggtgatgtgtcctccggaccattgactcacgggtgtgtgtaggcagaaggggtggaagcgagaaaggcgttgctgaggaggcccggagggagcgggttctggctgtgctggcactagccagctggcaggctgcgtgggtacttctgtgattttcctctcaagtgcacgtggctttttctgcactgtttcgtgtgtgtgctttatttcacaataaaactcttgaattaagtatgcatagaactatttcttttttctctgggtggcaagattatgaaaaaattttcttacgcttttctaattttccaagtttgaatttcactgtaagcacctggctttgtaccgccctttttctgttaacagtcatcatttgcttgcttgttgtgggagcacttttgcacaggtctgcttggttagtaaagcatgtctccctttctaggaaggttgtgcaggaccagcgttccctgtgcaggcgccctgcgtttcctgcagattccgaccggcactgcaacggattccctgccggagctgaggtcccaacaggccgtcgccatggagacccctggtacttctcattcccctgcgcctggggctccggacatcaacgaggcctacgtggagacgctgaaggtgggtcctgccgtgcggcgcttgcctgagtccccgtccccttctcccagttcttagtcactttcagcgcatcgtcgtcacgtgccatttgtgcagccggctctcgggggaggggtaaacaaccctggtttacaccgttgccaaggggtgagtgggcgtgaggcacgtccatcagtaggcacgtgctgctttcgttctgcagtgtcaaggcgagtgtcgaggatgaaagcatgaggcgcttgcagggggtcctcggaaccggtgccactcctcggcctgacggggagccccgccccctcccgggtctccactgtgccccggcatgcccaccccactcccccacagccctcttggcctgaggtcccttcggagggtgggtggcctgtgaggaagggacgtgtgggcagggcctggggatgggcagggctgtgtgaggactccagccacaggctcccccatgtcatgaaagcaaaagggggcggggagcggtggctcagactgtaatcccagcactttgggagggcaaagcgggcagatcacgaggtcaggagtctggaccagcctggccaacatggtgaaaccccgtctctactaaaaatataaaaattagccggcatggtggtgcgcgcctgtagtcccagctacacaggaggctgaggcaggagaatctcttaacccaggaggcggagcttgcagtgacccgagatcatgccattgcactccatcctgggtacagagtgagactccatctcaaattaaaaaaaaaaaaaagcaagcagaagggaaaaccacctttcttcaggtaactcaaattttagaccaaggagtcacatttgtatggaactgaaattggcttcctgttaaaattattcagttgtctgaacttggcccctccgtccagccttctgccatcctgtggggtctcagctgcccccacacataggccccgtctccatcgcttctgcccttcaggtcaaagcactcagcagggccacctcccgcacccctgctcacatctcctgccaggcccctcactcccggcctccccaaagcccacctctgacatgaagcttccctgagctgagctgcagattgggtttcttgtgcctgtgggatgtcctgtggtctttcctggacagtaagcttttggtaccatgtcccctcctgtcccctcttgtgtcacccagttgggcctcagcaggccttgggccccctatggcagtgggtggggggaccgtctgctcccacctgggacctgtgctcgtcccccgcccctccacagcactgcttcatgatgccccagtccctgggcgtcatcggaggaagcccaacagcgcccactacttcatcggctacgttggtgagtccagggttcccaccggtccctgtgggcctgggccttttaagggcattccatgagcaggtaccacaccccaggtgccacttgaggccactggtggaaaagcagcatgccctggggttcattttcagcctggtcggggcggcctcctgtgtgcccctttccctgatggtctggtgccctcggctccctccccactcctgcccactgcttctcagtgtgatgtgggtgcagtgggtctgaaatgcggcctcctcgtccctttcctctgccggctcggccacccacctgcccacctgcctcatcctcccaggtgggagctcatctacctggacccccacaccacgcagccagccgtggagcccactgatggctcttcatcccggacgagagcttccactgccagcacccgccgtgccgcatgagcatcgcgggcttgacccgtccatcgctgtggtacgtggcggccacctgagcacacaggcatttggtgtgaatgctgtttgggaatgacgaggaaaactttcggatttttgcgttttttttttcagctgttgggataagtactgtgttcacgtggttgggaatctgaagggtataagagccggaacgtgtccttgcaccctcacgtccctcccccaggcaccacctcctgtgcagccttcatggcttcgagtggcccagagagcgtgtgtctggatgtgagcgtgtgtgggcgcgtgctgagtggcatggatgagtgtgagccatggtgagtgtgtccccctcacacctacatttaaacacatggcggcccctccacccacccctgcaccaccttcgtcacacccacatttaaacacgggcgcccctccacccacccactcctgcaccaccttttgttttccggaggctctgacttgaccttctgggggatttcctaagaaggagcttccctgtttttccattttgattacctagttgtgtttttggtgtgtgatttatgcagacctgcctgccctcaaatatatttgatggggaaagagccaaaaaacccccctagaaatcatgaatgacggtgacatgctcagggaagcagttaacgaatcgggggctctgttgtggatgctccgccccatttaggaggaagaaggcagatctggcctgaaatgggacggtctctgagctgtggcgcagccccagagtgcacaccacgctccatcacctcctgggcagggtggcagtagtggggaacatgggctggagctctgtggctcacacttttgtttgtttgtttgtttttgagacggagtctcactctgtcgcccaggctggagtgcgtggcgcgatctcggctcactgcaagctccgcctcccaggttcacgccattctcctgcccagcctctggattagctgggactacaggcacccgccaccacgcctggctaattttctgttttttaatagagacgggttttcactgtgttagccaggatggtcttgatctcctgacctctgatccacccacctcggcctcccaaagtgctgggattacaggcgtgagccactgcgcgcgcctggcgcacacttcttaccagaacctagtcacgaattcctcgtcgaactagaattagtatgtttgttactgtaaacgcagcttggtggcttacagtgattggcactctaacagtcagtcaggctagagagccagccaccgcagacagaggagtggacgcgtgaacgttgagttgaaccaaaggggccacctggtgggataactgtcctcacccgtgaggaggaggaatgtccccgtccccgggggagagtgctcctacaccagcgccgaggcggcagaatggtgtcttcagggaagagagtgcccagtttgagcttctccccccatttcgtttctttttgtgttaacatctggcatctggcagcgttgagaattcctagtgactgtcattacaggcggcagctttaaggattgattgccggtgacccttggccggtcccctgtctcctggctcctcagcaggaggctcccgtgtcacggtgtccttgggcagttctcggtggcctttgccgccaagcttccagggagctctgggcgaaggctgagacccagcggccctgcctcacagtcacagagagaagagctcccccttggccctaactcataacctgccccaatcccggaacactcggtgaggtttgagagatgacaccacgtaacatctcgtgggcgaatcaaggcacagcaacgcagtggagcctgagggggccgggcactggtgcaggggaccatgcacagggcaccctcggagctccgttcctggccaaggagccaaggcaggctggaatgtccagcacctgcatgctgggggcctctgctgcgccatggcagtgggaatggaagcccccacctcttagccgactgcagatgggggtgtcgtgttcgctcatcgtcatttcgttttaggggtttttctgtaagactgaagatgacttcaatgattgtgccagcaagtcaaaaaggtttgtagccgccccacacccacagccgagctgagccaccagggagacaggcagtggggcgtgcaggggtcgaaggcctgcgtccaggtctcaggcagctcactgggccgtggggagctttgtcccgcctggcacagctatgtagctgagcagggtgggcgtcctggattgcccatctggcaacacagttaacaaccctggggacggatgttgcgtgtgactttagaatgggatttccagtgtcctcatccgtctcctgttgagatgggggtggtgtggggtgctgagctacgccggccgagtgcgtgtggcccacccccctctgccgtggtggtagactgtgctgtgtgttgatcaccacactgggttctcgtgtagcctttagtgtggagctcctctgttttctcatcagtgagatgggatgacaggtttgtccgctggctgtggccggctgcccctttctcttggccgcagcaagcactggggtgaggctgcacctaacggccatgtctactaacagctgtctctgcttggaggtgccctgcccatgtttgagctggtggagcagcagcttcacatctggcctgccccgacgtcctgaacctgtccctaggtgagagctgccaagtcaggtggggtccctcggaggtacgatctgtgcccttgcttccccagtcctggcccccttgttttgaccattaaggtgtgtgtgagcctgagccgtgagcacttggcagtggttcgcctggagaccaggtatggagtggagcgtcccctcctccaagcttgcgcccagcagcccaggaccacctcgtcttccccaccagcgctgcctgcccgggcgctgtggagctgggcgtgctacctggagtcctcaggggtctggagcagacagaacatgcaggctctgtggtgacgcagtcctggtgggggactggttcacttgggcaccactggccatgggtggcgtagacccctcggacctggccagcgtgccgcaggagccggcctgggctcgtgcagtgaagtgagtggccgtgagccgtcctcctcatctctgtctccctgtgggaaactctacaaacaaggcaatggcaatggaccactcctgatgaccacgagggtcagacgcgggacagaggcccctcaggcctgagattggccggccgccccctgccctcctcaccctgccctgctcctcttctctgctccctcccccctattcgcaggtctgcacaacccccggacctgttcacacccgcatggggacagctgtctggggctgcagagcaggcactgctcagtctgccccacgccaagggcccttgactcacacccggtggcccacccaagatgcctgatgcgctatgtcctgttccttctagattcttctgatgagagcgactggaaagattcttcgactcagaagatgaagactttgaaatcctgtccctttaaaatcctggggtcgggggtggcacctgtgagagcctggggctcctggtgccgctgcgttcatccatcccgcccgctcgcctgccgagggctgcgccccgtgctgcctccccccagaggccacccgctgtgctcgtggactgaggctgcgctgcccgggaggccttactgcttggtgcagactgcccagctcagagtgcccgtcagggcctgtgcatccgcacgcggagccgtctgtaggagcttccagagcgttctctcgacactgccagccccgtgttagcacctgggcctcatcccacttgctcccaggcgccggttctgtggttggtttggaattaaagtcctgtttgaattgtcagacacagacatgaatttctggggcgctccctgagtcagagtctcagaagaccttgcaggctggcgtgagaggagcggcagccacactgcggccccacgcccaaggactgggcgctctcgaggggggcgcgcccaccgctgtgtcctctctgcccagcctggcttaccaaggctacctcagtgggagatgaggttggaggaacgaaggcgaggttcctccttgctttgggggaaaagtattcaggaagtgggtgtgtgggaaacctgaagatggcgtgcacaggacacaggtgggcggcctgggcagaagggcggctggctgtcctggagctgctgctggagcctgccccagagtgtccctttccagtgctgtggcattctgtggcagcttccccaggtgtggtgacgggggggcggggcctccacctgtgacagtcaggcttgagggtggacggcgtgcctctcccggagccttccccatgtccttgccttgctgagaattgccctcccatgccgctgaggtgttggtggtttagggccaaaaggggaaaaccacttgagtcttgtggtgtgtggtgggcagacccacagggtggcatcacctggtggcatttccagaacctcagccccgattccagcacccacaccgcctgaccctgtgtaacctgctgtcccgggtcccagagtgcactctgccccactgtctgctgcctgtcctgggaaagtagctttgccccactaggaaatgtaaacaggagggctggggagcgtgggcacttttctcatgagcagctactgcggcgttggcaggactcgctgctctgctgctgcttgtgtaggtcggggagccggagatccccgaggacgcgcgccggacagtggcactgaccggcccacctggtagcagaggacacccccagccccccaagcattgaagactagtgtatttcctcgtatcctttctcccttgggtgtagttggggtggggaagcagggaagctggtgcgatctccattccttgggctccgcgtccgagttcatggtgcgccgctgtgctggagctgcagtgggaatgtgtgggacaccttgaccaaaggggagctttgtctcgtgtgtttgaaaaaggcttaatgaagagaatgttgttcattcttagtagtatagtttgcaattctaatggcaaataataagtttcagtagaaaacaaaccttgtgtctattttttccttaagtttaattgaatgtgagttccagaaaaaaaataagtgaatgtttcagcccgttcacacgtaaggatgtggctgcctgcgtggcgggctgtggggccctgagcaggtgtgtccccagccctgcagggggcctgtcctgcctgcagcctggctctctaccagccgtggcatcagccacctcaacaaccctagaaggaaaaagtgcaaggaaaataggattttaggaaagtaaaatggcggtcccatcttcagcaggaggaagtcacaggaagtgcctggagttgcagggtttgcctcgattgaatcatagcaaagccttccccaagtgcgcagtgactgtcctggcctgtgggaggccagcctggggcacagcagggggcttggtgaggacattgctcactctggccagtgcatcccttgggcagccctggtataggtgtgaagggcccaaagccagaccggagggggccctgctggtccccggtgaggtggctgaggacttgtggcctctccgatgctcgtattcgcttcttgtgctgctctaaaagatgatcacattcagtgcctggaacagcacagcctcttccagacccgggggcagacagccatgtcgtgctgtgggctctaggggagaacgttgctgtgcctttctagttctggatgccagaaactgcttggctcatggctctttcctccaaccacacagccagcaaatggcatctctccagcttttgctgttggcatctcatttcctgactcggaccgcctgcctcctgttatgcggacccgtgatgggccaggcatggtggcgccagcctgtaatcccagcacttgggaggctaaggtggatcacttgagcccaggaaagagaggctgcagtgagtcaagatgcaccactgcactccagcctggatgacagagtgagacccagtcttaagacaacaaaaaaggcccctgtgatgacactgggcccacctggatagtccaggaaagtctcatctgaaggttctcacccaggcccatcccacagcccctggcaatgcttacccaagagtgaaatccttttgtttgcctgggtttgtctcttggccacagaagggtgctgagacccacagctgctgccccccagatgggggaccctgcctgccttctactccagcacactgtatgctgctgtctatgcgggtgtgctctgtgggacagattctgccaggagtgtcaaatcattccttctaagtgtcactaaaaggggatgcaatgggctcggcatggtggctcatgcctgtactcccagcactttgggaggccaaggcaggtagatcacttgagcccaggagtttaagacaagcctggctggcaacaagcgaaatcctgtctccacaaaaaaattacccaggcacagtgaaggcctgtaggcctagtactcaggaggctgaagtaggaggatcacctgagcccaggaggtcaaggctgcagtgagcacgatcgtgccactgcactccagcctgggcgacagtgagaccctgtttccaaaaaaataaaaataaaggataggatgagaagttaagctccagggttgcaatgaaaatagcagagttacttaggtgagttcaggacgtaagctgtgatgacactcggatatagcctggctggacccgcgagcccagggcatggctgcaactgttcagacccacagtgggactccctcaactaggcggaaccagggtccaggaaggccctactgggcccaatgaaggctcttctctcctgggatgaggttcccattcaaagccagctccgtcctcagtctaagaaaagtgaagcgttccacaaaaattttcaggtctttttttactagtgtctggaagacatttaggagaattccaactgattccatttacagtgatcacaatgaaactgctcagagttatcactgaacttcagtaagaaaaacaacagagtgccatcaggacaggggagagggcaggagactgctccatcgctctgctcagtccacactgccaaggtccccaccacgggggtccccagtgcaccccagctccggggcagagaggcagcctgcagatctctgctgccgggaaagagctcctgaagttgtggggtctggatccgctggggacggggccttccgcgagtctcccacctctcgggggactgcagggagagggtctccagtgggcagccttgggtcacttccatagctcccccagcggcttctctgtggcatgcggatggcgtcctcagagagcacgcggatgtcctcatggacagcttcgatgcttttgaagcatccaccatctgttcccaccggggtttcaggagaaaaagaggctcatcagcacgtccaggctggtcacgggagcccacgcctgtaatcccagcactttgggaggcccacgagggggactgcttgtacccaggagttcaagaccagcctgggctacacagggacaccccgtctcacaaaaaatgtggcaccactctactccagcctgggtgacacagtaacaccctgtttcaaacaacaccatgtttcgttctgtcctctgtgctcgtggggatttcacacaggccgggctcggaaggccaacctgaacctcctggcacactgtggtgacctccgggataccccacaccttctctgaacctcaaccttgacaagtgtctacggtagtcacccggcattcctgccacagcctgatgcaggagaaacatgatgtgccaactgcccactcctgctttaagccgacctcagcccgtgaccccaaccccgctgagtgcccacttgcaggagtgaggcacagcccacagcacagcaggcccacccagcccaccaggtcgaggtgactgtccctccagctcgcaagcggcgagtggaagcacagagggcagaccctgccctgcccacgctcctgtggctcctgggccctgcctgaaggtgaggaagttccgcagcagaagccagacagcaggaccagtgcaacactgggcctactcgtccttgcggggaagatgaatttggtcctaacagctgtgctgcacaatggcgtgacggtgcgaggagcgtggggagggcataagcccgcaggacagccttctctccaccagaagcaggcagtgagagggactcagaagcgctggcatctcagcggcatcccggcttctgctgtgggtggcaccggacccttctcaagcttctgggacagcaaattctagaaaatctgccagggcgtagaaggcacttggaagaatctaaccatttcatgaggtgtgaccgtgacggaaggaagtgactccctacacaagggccaccttcccagatgcctctcactggccactgtgcagcccacagctgtcgcccagaaccgcccaagatgagcctctccgggcggaatgactgccagaggaatgccgcactgccagaaaagggcactgctatcccacctgcgttccgggaaacgaaaactgcgtgaccagcatcatctgcaggcacagccagtcgggctggggcgagaccctcggcctgctctggaggaggagctcaagggactgaagctccgcgggccgtggccacaagcgacaggctggcgcccgacgtgccagaagccctggctgccgcctggaaagaggccacgtgggcagggtgggcacgggcgactggagtctgggagagaggtaggggctgcggtcgggaggagcagggcggccagcctgcgagtccactgggaggggagagtccagcgtcctgggagcagagccaacctgggactgctgagactgaaggaggcaggactgaagggagaggcagcacacagcacctcctgaacttagatggccaggtgctgctgcagggcccatgcccagcgagaggccgcaccgaggacacagtggcaggaacaggctggcgctcgtgtctgaagaggggctgaggatgtggggattgcgcagactctcacctgacccaccagacaaagcgccaaatgtcaacatttagcaaactcatcgggttagaatttgctggcactggccgggcgcgatggctcatgcctataatccagcactttgggaggccgaggtgggcagatcacctgaggtcaggagttggagaccagccgaccaacgtggagaaaccccatctctacaaaaaaaattagccaggcatgatggcacgtgctgtaatcccagctactcgggaggctgaggcaggagaatcacttgaacccaagaagcggggttgcagtgagctgagatcgtgccattgcactccagcctgggttggcacccagagcaaattctgtctcaaaaaaaaaagaatttgctggcaccgagaacccctgaacgactactcccgggctccacatctgggaggaccagacggaaacggcagcagctttgctgacacgactgtgcagccaccacggtgtcatcctgagccacttctccacgcttcctagtgtgcaattctgggttctcaccttccagttcaaagtcgtgtctttcatgagctggtggaaacaccggagcgccgctcctggaaagccccgttctcatagcgctcatggccaaacgctccccgcttggcagcaccgccagctgtaactggaggaacaggaccaggtcgggtttgggaaggcccacgtctggcgtttacaccagtctagggaaaaattctgccaagaaagaacccaacagttaaagcttagttagtctaggtttttgtttcgaaagtcgtaaaaacaggaaaaaatgaggggacatttggtaggtaccaagatgtgagactgtttatattgtggctcgtttaatttttagaacctcaaactgtcggtttctccagtgtcacctttgtttttcctttgtaaacagacaagtggacagaaagtaggtagatagaacggctgccagtccccgccacccacagcccaggccccatggaggcctcccagcgcagctacaggcctgctggccaggagcaaacagtctatgtacagaacccctgagacccccggcctagaacgcctgcagcacagagcagctgggtccggacacaggcacgagtccttggcagtgtcttttctgccacacacacgccagggtctcctctcccgtggaagagcggaagaagacaggcactcctagagcctgttatgtgccagcctagtctcatccactggccttcttgccagggctgtgccagcaccctctctccctcccttactcatcccatctccctccaatgctgtcctgtttccggaggaaaggtaggaccagaaaggctgtgactgcaggccacaatcacacaacagcacaatgagctgagggaaggcgtccacgagaacctcccacagagcctcggctctgtcagctgatccgcacagcaggaagaagcaaaggaatcatgagtcttgtcctcttattatacaacgtaatacttcagaggggaaggactcaagctaacacatgaagaaatgcagaattaaaaagtgagggcgtggccgggcacggtggctcgcgcctgtaatcccagcacttgggaggctgaagcgggaggatcacttgggcccaagagttgttatagcgagctttgctgttccactgtactccagcctgggcaacagagggagacgccctctttcaaaaaacgggggaaaaagtactacaaatgaaccatctttgaaaatgcatctggaggctgggtgcagtggctatgcctgtaatcctagcactttgggaggctgagatgagtggatcacttgaggtcaggagttgagaccagcctggccaacatggtaaaaccccgtctctactaaaagtatgaaaattagtgggcacggtggtgcatgcctata

SEQ ID NO: 2878 - DNA, 19675 bp, Homo sapiens
ctgggattacaggtgtgggccaccacaccgggctaatttttgtacttttagaagagacaggtttcaccacgttggccaggctggtctcaaactcctgacctcaagtgatccacccacctggcctcccaaagtgctgggattacaagtgtgaaccaccaagctcagcactcaaccaggtttgagccaaggttcaaatacaggcatgctggctatagtctgtgcccttagcctccacacaccctggctttcttgagtacaaatgtctagtgcccctgcgtgtcctattcccaggtgacatgcccacctctaaccctcaccagctctggtctctgctctctcctgtccctccaacactgaaccacagtgtgaaaagctgagctcatcactttctgtccctaatataccctcccacccatcagtgcccacgccctcactcacccaggtgctccgcactctcaagaagtcacctgcctctcttaaggcagttgctctgcatctatcaccacggcatggcccaggctgcccctcatctctcccctctggaattctggcagcagcctcttgggtggtcctcctgccagcccaccctaaagcctctggtttccaggattgacatttcatacactcctgtcttcctgtcacaaccctcagccagccacatctgacccctcagtccccttttcagccttctttgctcttttggagaaatagatgtgatttcaggacctgggtgaggatggggttggggatgcttgtgaggccctgactgtttcttacgggcagcttcctttttcctgatgtcatgctctgggctattctcccagcccctgcctaccaggcaggacatagctactccaagaagcctcccctaagcccttccgaattccctggtttccaccccttccctgtcagggtcaggctgcagctttctcctgctgctcaggtctgggcgcatccctccaccccaaaatgaccaaaggctccagggcttaatgcatgaacttgagcactgcatgtcttaccagctgacagacatgttccaaggcatatcagaagatgtgttgcacatctgtatgtgaatggctgggagcagaacaggtgtccagccattatgaacatggtgtcctggttgtccatggctgacatctctgattggttagtgcctgcttgtaccagctgtaaatgttttgcatcttccatagacatcagctttgtgagcctgcagcctcatgtctatgctgcgtacatgggtttctgatgacattgcacctgataattgctcccatcttctattagctttgctttcagacccctgagtctccattattctccattagtggtttctaacagggagctgttgtccctttttcatatattttcaatatattctttttcaataatagccatgacgggaggagcaatgcagtgactcccagctggtgaccaagtgagggaatcaaattcattcattcattattcaacagctctgagaccatgaaagcaggagaagtcatgacagtttagacctgaaagacatcccttccccagggcaggaggatggccaaggtgacttttcaaggtcacagaggatggtttcaatgagactttctctaccaatgaacacagattactcagttaaagcctcctgctacctgagtttggaacctagagagaatggttagaaaaatcagaaaatgggaaggtcagaggcgagggagaggcataggaagaagctgcaggaaagggtggatgaggtcccaggacacagtgacagacactgattgccttgttcttttgcattcagtgatcccatttgacacttactaagcgcctctctgtgccaagcgtttaccacatacagggatagaggaagacaccagcctgccttgaggacttctcagtccagcagataggtctgccattgcagagccttgtaggtttcattaatcccaggtggagagaagattccagtagcaattgggttttgtgctcacttcaactaatgaccaagatacagtgagtttgggaacttaagcaagattttgggtgtccacttaaaatcttatccaagtcactgtgcagaggccatgaccctgacagagaaaaagaaatattgcagtttttggcctcagatgcttcaactcaacaggcatcagcaagagctatgagagccacttgagggcctgagttgctcttcataaccaaagtctgagactcaggtggttagttaagcaagcacttattagccgagagagagccagtggttgccctcagctgggtgtagcggccaagtgtcagagaatggtcagctcttggctatcagaagtccagctcccccaggcttgccttggccagtcaaagagggtaagtagtgtctgtccccctgctggtcatggacaactctgtctttatgccaggtgctatttgccacacggtagggaaggcagagagcaaagtccagggatacagtttctctgacttttccctgctgcactcccaaattttattttattttttattggggtaagattcacatacataaaattaactatttaaagtgaacaattcagtggcatttagtatgttcacaatgttggcaaccataacctcaatctagttctaaaacattgtcattaccccgaaagaaagccctgtcctactagcagtcacccccatttccccttccccaactcctgcaaccaccaatttgctttcatctgtatgaatttacctattctagacctttcatataaatgaaattatataatgtgtgctttttttgtttggcttctttctcttagcataatgtttttgagattcatccacattgtacacatatcactgagtcattcctttttatggctgaatgatattccactgaaagtatatacacagttttttttgttttttttttttcattcattgatggacatttgagctgtttccaccttggctatggtgaatagtgctgctgtgaatatgcatgtacatgtgtttgtttgagaaaccggttttaatttttttttttttttaatgagacagggtcttgttctgccacccaggctgaatgcagtggcacaatcactgctcactgcagccttgaactcccgggcccaagtggtcctccagctcagcctcccaagtagctggcaccacaggcatgcatcaccatacctagcttttttttctttaagagacagggtctccctatctcccttgccctgggttgcccaaggacaacctccttgcccaggttggtctcaaactcctgggttcaagccgccccccagcctttgcctccaaagtgctgggattacagggatgagccactgggctcagccatgttttcaattattttggcttctatctaggagtggaattgctgggtcatatggcaaatctgtttaactccttgaggaattccaaacttttccacagtggctgaaccagtttacatttccaacagtaatgtatgaatgttaaatttctccataatctcaccacattcattattttctgttatttttattataaatcatctagtgagtataaactggtgcctagttatgattttggtttacatttccctgatgaataatatgttgagcatcttttcctgtgcttcttggccattgtgtatcttctaaagaaagtttataaaattacttgctcattttttaactgagttgtttgttttttttattgttgagttgcaaggtactttatatattctggatactagacccttatcagctctatgattttccaatattttcttcatttggcaggttgtcttttcactttcttgataatgtcccttactgtaaagaagtttttaactttgaggaagtccaatttatctagtttctcttgtgttgcttatgcttttgatgtatatctaagaattcattgccaaatcaaggtcacaaagatttccctctacattttttctagagttttatggttttagctcttatatttaggttgttgattcattttgattaatttttgttatgatgtaaaatagagattcaacctcattctctggcatgtggatacctcgctgtctcacaccatttgttgaagaagctattctttcccttattgaatggtcttggtacccgtgtcaaatggccataactgtaaataattgaaattaacaatcacctctggtcctgccttcatgattctcctcttgggcttcaggggactctgagtccaaaagcaagagcacagtcactcctgtgccctctcagcatcttcataatcccagatggcagagaatctctccatttctcaggtggatagctgcagccagagaggctgctccttctgcccacctcagcactctagtagaggacacacttatcacatctgcttagcccttcatccctgcatccagagccacgtttgcgtgcagccatccagcccaacagcaccagctcaggtgtgcccagttgtcaggggcatgctgcacagcagcctgaaagaagtgatttcacggaggctcatgtattaatacttctccaaatgctatttcaggtgtgggtctcattccctctctcacctcaggccctcttactgggtccctcactgggaatgggtcttttgggaaagacagagcatcaatgctaggaagggccttaagggtatctggtgcaaggctcttaaccggtggttcatgacccagggaatccatggatgggctgtggggatctgtaacctctggacatgcagtagaccctgtccacatttcaggggaaagatccatggctttcacagctctcaaaatgttcatgacttacaaggttaagaaccactgtgtgtaacaggtgactgttagtggtagagctagaatggagcctcccactcccagggcactagttcagtatccacatggcagcagtggtgacatcagagggagacatttgggcagaaagcccaacacactcttggctcttgtgtttcccacggtttactgcaccctggcacacacagaagaggacctccttaatcatgaaagccacagggaggtgaatggaggccactacttaggccagagtccccatcctccaaggcctgtccccattatcttgaggcctgtagaggtgaacatctttgggcacacccatgcacaagacaaatttgaaagctgcttagacagctagactctgccggccacagctgagggattagaaatccacccagccccactgcagattaagcatctctaatccaaaagtctgaaatcaaagtgctccaaaacttttggagcattttatttaaaatttgtacaaaattatctttagctacgcagaaggtatatatgaaacataaatgaagttcatgttttgatttgggttccatcccgaagtatctcattatgcacatgcaaacatttcaaaatccaaagtcaggaatgtttctgtcccaagaattttggataaggtatacccaatctgtattgactttggaaaatctgagatccccaccccctactaaataagcacatgaaagcctgtgtccaaactactatgttgctgtgattaaattccctctccaggagcccatgtgtccatctttctggttatttaattaaactctctcctcttccaggaagccttccttgcttagcctctctattccagtcccttactagcattgtgccttaggctgcccttccctgatttacatgagtgtgtatctgtctcttccagcagcctagattgcctccagagcagcctcatctgagttggcctgcagcttcccagcaagagtcctgacgcttgctggggagaaatggagggtggcacatcatcactagagggtggaacatttggaagattaacagactgacagaagcatacctctgacaccactcaaggacaacttaatgaataacagcagaaattcagagtctttaattcaaacaaaagaggaaatagatgctgccattcttggaatatttacaccctgagccacgacatctggactaggcagtaccactcagcgacagaaagccagctccactcactgagctcagctcatggcaccaaaaattgagagtcagaagctattaggacacagccccagagagactgtggaagacaaatcacatacccacagtcctgacaaaggcaatgtaattacgctgccctcatcaaaaagaatggtgactttgacagcccttttgttaaaaggcagtgacacaccacagaaaaagcatagatccttgtgtcggccaggcctgactcggcacataggtgggtgactggggccagttcagcagcctcttgggatcaggctcccagtcgttccaaggatgctcattgcatcttctttgcaggaatggatgagaacaggaggcaatattgtagggtgtctggcatctagtaggtgcttgacaaatgatggtagctattgctgataataaggaggtgggtgggtgacacaggctggcagagaatccccaatacaccttcacttggcttgtggagatgggtgcagctggtggtctacagatgtacacgtggtgtcctaaatattggctcatcctgcaaagttgtttctgatggagcaagtaaaggctgtctaacttctcaccacctcttacaggtctcgtgtcaccccaccatgctggcaggggatgtaaaacctctcagacagtgctaacttggcctaagcacagaacaaaccagcccctcccctgtcgtctcctgctccttcctctttctagggatgatcacagcttccttagggccaagaaggttataatggcttgtgccccaaagcctcctgccagccaaaggcagcgaggaaaatgagaagtcgttagtccacatggacctaaggaaacagggaaggtgactgtgtcaatcagagcttgaaagtaaaagctaaacccgatgcagacagttgagtgtactacagacagttttaaaactcagggcctgggaacttggtgtggcagacacctttgggggtggcaaagtcacctcttcttccaagtgctgaggtgggtaggccatgggtctagcgggtggctttccttgctgggatgctggctggggtgctcttgcctgggtgtccttgaggtctccccctcgcgcctctgtggtcttggtctgcccgctctgggtctgccagagctgcctgccacagcgctggccccaaggtcaacacccgcagagctggggtgtggtagctgtagctgctactgctgatgacagctgaggaggaggggccaagagcaggggaaggagcagtgtcaatcagcagataacagctatggtaacggctgtccccaagggcttctcacaacaacacctcatttaatccgcagaaccaccctcagtagtcaagaagcactacagagtgaactgagagcctattacgggccggacttcgtgtgaggtgaagaccccataggatagaacagtccctgccctcctggaaatgctaggaaaatccatgtccaccaaccctttctccaatgacaacgtcccaggggagaaacaggaagggaaaagggtgggcatgacctcagtcaccattcacaggatgaaaagggagaacatttcctttgaagcccagaaaccttcccaagacagtacagaagcttcttgggaggtgagacagtaaatggaggtgacatcactttgtcccagggtcctggctttcccaacccaaggcatctctcaagaatactcacagatgctcacagaggatgattctcaccagacatcctgtgagacagaaagttagagaaagataaaaactcagtgtcgaattccactaaacatcaatgggctcctgcttttatacgtgcatcatttaaactcatcctttaacaacttacgaaactgacactatcgccttcatcttacagatgagaaaacaagagtccggagatactagatgatttaccgagaccacaccactagcataggataaagccaataattacccctgctgaagagccagtcattagccccaggtctgtctgagcccccggttctcatcacgcagcacacggccatctacgcttcatggctcatgtccaacaaccccttgcaggaagctgctctgagttcacgaaatcaccacatctcttgcttgtattggcactaaccatgttgttctcaggtggcccctcagccagacaggagccacaccccagtcccttctcacactttcccctcaccccacctacctgcactcctcgccctccagcagcttgcggtaggtggcaatctccatgccagggccagtttcaggctcatgagctcctggtactcgcgcagcatccgcgccagctccccttggcctggtgcagggcgccctccagctcatccagcttggcctgggcatccttcaggcattgtctccccgctgctcagcgtcagcgatggccgtctccaggctggcacgctgaaggcaaagaacagagagaccatcagaacagaaaattacatttagctcataccagttaagtagacaatgccctcattttgcagatggggccctaggtgacaaggagtaaaagctgcaaagccacaccagaactttgtctcttctattttctattgcagaggagtattcaaagctgttatcaatgaagctgtggaagcagttgcatttcaggaggtcaggaagaaatgtcgatgtttgcaagttagatagtgcctgagaccggaggccaccagtatctacagattcaaaatactacaggtcaggaaaatcatgcccgatcccctagcaaggccagccctgaggatgagacagtatgccaggtcccactgtgatcagattcctgctgcaggacctctccccattggggatccttctgattgttagcatccagatgagtgtttctggactccagcactctggggagagtctgtgtgaagctcccacatctggccttcccttagagcaggaggataaggccctaaattataggcacaactcagaagctggactctgatgaacatctggggggcattgcgatgcctgttgctaacagaggggaggaactatgctcatggaatttgtgaatcggccaaatgtagagtcgtagagttgtcctgtgtttgcctgcagagcatggagggttgtgggggcaccagaaggagaacaggctcagtctttccgctgggcaattctatcactagcagagcagacctggttctcagagaggtcacagaaggatcctccagcctccaatatcatctccccactgacgcagtgtttaaaatttgctgtgtcaggtaagacaggccccccacccccacccccccgcccactaacatggaagtagtacatggcacagggcaagggaacccaggagggcttcatcgacagctgtgtccctcagtcaacgaccatgccccactccgagagcaggaacctggtgtggccaacagaggcgcctgatgcatccctctgcaccccacacatgttccatgtccagtgggaggaggagacagagggtctgccccagagggggcacccaaaggggacatggggcaggttcattggacacagaaaaaatctgcaaaggggaacctgggttctaatcctagctccattcattaccagctgggggctctgggaaatcccttccccttcccagcccagttgctttatctgcaaaatgaggagtcagagaaataggttgaggctcctcccagttctgggcggggtaccagctctgatggtagggtaccgaggcaggtgggaaagggagactgtgggtggccgagggacccctaagcccagcaggggatatttgctgttcccaaagggcaggccccatttcctcatcccagagcctgctgtggagaccgggagtctttgtggggctgctgcccacctgcttcttcacattcccgatctcacaccggatcctctgatgagccggttcagctccaccatctcgctcctggtgtgtttcaggtcgtcaccatgccactggctgccagctgcagctcctggatctggtttcccagagataggaagttggtgatgaacaagggcactggggaagggtcctgtaaataagccacccctgccaccctggctgtcggtggatttaacggaactgaagaggagtgctgggacagggtcctgggggcccaggtaaggggtttctccctgacagccccaaagcatagttccattactcagtttacccaaagcatagttcattactcagagcactcctcgccttccatttccttttgaaagtcttcccgtggggatcagaaagagctacaggcttctccttctctcactcgccccccaccaaattcacccatggctacctcccgcaagtctgtgattctccctctgccctgtggcaacatgcccccattcctataaggtgtttgttttaccacctcacttctttcacctgcaacagagaggaacaggcagttcgtgatggaggaaagaagtgagggatcctctctgttgcatatattcaatccataccagtttcagatttatctttgataacaagctctgctaagaattccttttttccttgaagccttggttgaacctttctttcattcagcatgcccacaaaagtattcctcacattcactgtgcaggtgaccctcccaggaagcgaggggctgctgtgggaggagacccattcggtgaccaccttggtcggtacagggcctcggcctcggccttgctcttcagggcgatctcctcataatgcatgcggcctcagcgatgatgctgtcaaggtccaggtcccggttgttgtccatggacaggatgacaaggtctcactggcgtgagtctggatctgagcgatctcctgcattgagagaggaagacagttcagcaaccccctggcttccctcttctgccccatcagtcttctgggcccatggtccctgcccaataggctgctagaatccacggggacaaagtagggggaagaagtgccctctgggagtgtctgcagagctgagggagagcagctaacagcagcaggaacccctgcatatggcagagcccgctggcacatgcagacgggtgaataatgcattttccacaatttcacagaatccaagctctgtgctttgtaagacctcactgggttatcttttcctgcctgtgggcaaggccactttgtatcaagatcaatttcctcctgtatgtatggcctccaaggaccagcatcctgcactccatggtctcctggtgcagggttttgtacctttctaccaaaacatctttcattttgttgtcctaaatctctccttttggtatctccctggaagagtcgggaaggaggcagggtgagggggggggacaggagtgtccttactgcatcatacagacacttgaggaacttgatgtctttgccagtgagtccactttggcctgaagctccaccttgactgcgtaggctgcatctgcatccgccaagaggccccagagtcattgggggatgcaaccctcatcccacagctgccctgcccactcctgcctcaaagccacctgattttctattttctacccacaaaggaaagctcactcaaatcaatttcttctcaggctgcctgaagctttgggaatagggaaaggaggatggggcagcctgttatgcctggagaaaacaaagcccagagaggtagtaggtttcctcaggtcacacagaaggttgagctggacccgagtttcacagttcccagaccagaattctgtctgtctctgtcatttcctgagtgtgtgtctttcctctccaactcactggaggccaggactatgactccacctcaccaggcaccagccccctcaccaggcaccagccccctccccagcctcctgggctgagtcctgagcagagttgttaagatgggggtgcgagagaccctaataaggaggctcctccccccttaccttcttaagcaccacaaactcattctctgctgttgtgcgccggttaatctcccctcatatctgccagcagggagagtagatggccttagcccccttagccaaggaactttccttcctgctggccaggcaaatgtttgggatacagggtccctgcagggtctctggggtgacagtaagaggctagtgacaggagtaagatatccctgagttgcttcacttgtctcctagttttgcatgttaggaaaacacccaggtgcctattgggctcccgacaccagcaactgaacattcagtgggtcaaggagcacaggaactgcttcctatcaactaggcaggaagttatcatcaagaggataggcccttccccctagccagagaaagggatgtgagctcctgaccctggagctactcccccatctcctaaaaaataatggcacagagatcaggtgagcccagaggcacgggaacatggtctgtgaccctcgggtggagcctgctcacctcttcttatagtcctccaccagtccctcatgcttctcagctccgagtccagcctcaccctgtccccagacagtgtctccagtgcttccgcaggttgctgatgtagccctcaaggatgggctccaggttcttcttgcagttttcaggtccagctgctgcagcagctcccacttggtttctagaacctggttctgctgctcaggaagcgtacctggaacccaaatcaacagacacctggaaccacaatgggtgcagtcatccccctggacacacaccattgactccccaggtttgccatagattgttgtagtcatttttctcatgtcttgactctccacccttgccattccacacaaactagatcctttacaagtgctatttcctagccttctggacaaggcatcactgagaactcactcaaggagtttccacagcttcttctattgctcggccctggtcccaggagatgtccttccttatgtctcaactaagtgttcttcctgtaccatgagcccttccctctgaacactgctggattctattagcctttcatgtcttggaagatccagctgtcctcaagaaactcatcacttttttgtcaaggaagggctgcctttacccagcttcccatccttccctgcaaaatcgccaaagaagccgatatattcatgtttcctttgtcctccgtggctcacagacctactctccttccctaatggtgaggaagccctcctgaggcccagctgcacctttccagccacagtgtgcagtccattcccaggcagcaggaaactgctcaggcctcagggtgcggcctcatcctcctcctatgagacccaccttgtcaataaggaggcgaacttgtcgttcagcaccttgatctgttcccgctcctgggcgcgcacctttggatctcagggtccagctccacgttgaggggggccaagaggctcttgttgacagtgactggtggatgcccccaggtgggcacacagacaaacatgcaggccccagggccacactgccaacatactgccagcaaagccactggcccggccccctccatacccagagccaggcctgaaccgtaacctccagcccgaacgccgccaccagccacattgaaagaaatacgccgattcccccaaggctatagaggctccgactgccaaagccagcgccagcccctctgccagctgcacataagaagccaggctacccacagccttccttggcaccactgccgaatgcacactgaagttcccttgtcaccactggacttgatgttcagttgccgactcatggtgggaaaggttgagttacagagctggagaaaagcagtctccaaggggtagagaacacactgatggggcacccagatgctgcctccttttatccctgttgagcccaggacaccggaaaagggcgtctctccactactcctttcccctgctgatgggccaggggccatgggcaatttgtagaacagagatctccagccctttgcagcaacaaagctcttctgatagcaagtggaatatgctgcccttgcagagtgagtggtctaatttggagtttatctgtgctccctaattagggacctgaagagttatccctgaagagatctcctagctttatttttccagtgctacctccttcttgcttaaccatcagcaggagcaggggaaatgcctggctttccccagagtagactcacctgaaaaaccccaggttcttcccaaaagaaaccatctctctattatagggtcttgtgtggaagctggaatttttactcagggaaaagaagacatggaaagatgattcttcttggaaagatgtcctcaaagatctgatctgggtaagaagctccagggtccgtccttgggccatgctaaggaccacagctgtctacagtgaagtggaccccaggaaggaagaggaatgactctgcagcatctgcatgcccccctgcagggatattgtctagggccttctgtgttgggcagggcctgggtggtggtgaccttgaattgccttacaaccatgagaacctttccagtcagctgcatttcctccagttggattttcctcctggataagattatttgtcctactctaggaagtcaggcaggagctgggatattagccctgcactccctggggaaacaccctatggctgaagtcaccaaggaacaggaccccctgatttcactcccaggttcagggtgggctgttctgccagtttcctggcaacttcagggagcatcaattttcaaacaggaagtatcactgctttatagctcaggtagtgtgggtacagtgcatgttaaaaaattatttcagggctgggcatggtggctcacacctgtaatcccagcactttggaggccaaggagggcagattgcctgaggtcaggagtttgagtccagcctggctaacatgtgaaaccccgcctctactaaaaatataaaaatcagccgagcgcagtggtgcatgcctgagtcgcagctactcaaaagactgaagtagaagaatcacttgaacctgggaggcagaggtgcagtgagcctagattgtgccactgcactccagcctgggcaacagagcaagactctgtcccaaaaaacaaaaaaaattatttcaaagctaggtatctggcagctgccctcatgcaagatctgaccacttcctataactaaactgagaacacttggcttgtttggatccagccgagggagaagacaactgctcccactgctggggagggaaaaggagaagctgacctgggcagggaggtggagcttaggcctggaagctgccccggaagaatttccccttcacagggtgttttccttcagcccctgaggtaacggtggaaggtccttccccagggaccctgtctcggggggctttccggcagggcctagccctacagcacaggagcatgtaatcgaaggggttgcttgtggtttctaagtcaggttgcaagggcagcagcaggggtgccgccagatgctgggtttgccgccctctgtgctggagtgtgcaagacaaaaaatggcgtgagttccttaacctgggggtgactgtctagggccccagccaccaagaagcctgcagaccaatgagaggaatctacacaaagaactaaagtagagccaaagctctggaatgacagaaaagcattatgaaccacgaatcagaggtgactgaggaatggctcatcttgattagggtttttggggatctccagaagccaggcttatatcccaacaacgcccactacaggtgctggctcagagtagtggctcagaggtagtggggctgaagtattccttatggtagtagtagcaatagtggtagtaacatcattgtataatagtgaggtagtaacagaaagtgttaacacttattcttcacttcacatgtgccaggcatgggatgctacatgggatgtctcacttaaccctctttaactaacttcatttacagttgaagaaacaaggaacttacccatctcactcaactagtaagtcagagctgggccggaattcaagtgcgttggtttcaaagtgcatgttcctgaccatcgtgttatgtgatagagatggaagttagtggaaagatgcaaagacattgtggtacatgtggcaggcatggcagctgtgggctggggacctgtgcttgtgtttctgttgtttttgattcaagtgtgacatgaggagaaggggaggttgttctgaactaggggcttgcaaagggtagctgctcaagataagacatcactctaggttcagaagaaaatcagccacagcaaggatgggcagggggaaggaagagacttgctttcatgagcgctgttttattctagaatcaccagcagctggcccttcattgcccggctccgaggggaaatatcatagttctggctagctgagtctttgcgccaccactgcctggctgactatgagccccatctgataggaacttcaacgaaaaggcatttacaaagcagaaaaggcatgaggctagattttgaggctggagaagacttagggtaaacaaaaggcagatatccaggtgcccagggaaagcagcagaatgaatggggtccatccacactcagaagtgatgggctggggagggccaggataaggctaggggtcctggcaccctttgtattcattacaaagggtgcccctgtgggctggccctgtgctggaggctggccagtaagggttgctgacagcggtggtaatgatggtggcaggtggctgtgacggagaaggaaaaggtagaggcagagtagaatttcctgacaacagtgtttgattgtggccacacagaagcaatcctcctaattggttcctagggagcttaattgcagggaattgcctttggcctatgcagtcagatccctagagttccagccttcactgtttcggatccctttaattagtaatcacacaccacgccctggtctttgagttcattggactaatgagttcccaagtcctgaagagattatttcattaaatgcatataaaactgggcatctactgtgtttcagctctatgctagacagggggagatgtctgagacactctctttctcttttaggaagtaattgaactggaggacaaacaatataaacatacaaaagttgttttgctgttgttattgtgtagttttaattctacatgcctatattggattatgtgcttgaacaagtaactcagacagctgttcattgaaattctgatctaaaaaaaaaagaatttaaaaagtacatgaaaatctatttttgcttaccctaaatcttctccatccttgaattaaaaagaaatggaaaaatagaataaagagaggttgggctctctgaggtaggggttgctaactggaaggtcggccagattgggaggtgcatggggcatccctgagacaccgagaggcccaggcggattataaaggaaggctcacttgggaagcagagatggaggcagagatggcggcgcaggcctagacagttcccttctcctgtagacagtgtggcatcatgcgagggtcctgaggggaagcagtttcacagggccagtctttccgttaaggaataggctctgtgttgcaagaggagggctgtggaagacacaggtacccagggaacccaagggagctgagtcaattgggccataatctctcatcatcttcctggagataagaatccccttctgcagagcacctcaccagagggaaataaaaagcagccccgtgaaaatcccaatggccgtaaccatcatgtctgtagtttgaagatgaatagtgaatgtcattttctctagccctttggcctttgactgctcctgggcacagaacaacagttgaaggacccaattctgtagatcaaggtcattaaagaaaagagaaagaaggccaggcatggtggctcacactgtaatcccagcactttgggtggccgaggtgggcagatcacttgaggccaggaattccaaccagcctggccaacatggtgaaaccccgtctctaataaaaatacaaaaattagctggggtggtggcactgcctgtaatcccagctacttgggaggctgaggcaggagaatcgtgtgacccaggaggcagcggttgcagtgagctgaggttgtgccattgcactccagcctggggcaaagagcgaagctccatctcaaaaaaaaaaaaaaaaaaaaaaagagagagaaagaaaaaagaagcttgaaggattcttgagctaactttgtggggacaagacctggggacaaaccacagaccttagcactggaaaggacctgaaactgagttctctgatttccctttgaaaataagctagtgcagaaacctaataccctctgcctgtctgaaccggtttgaaaggagcctgtttttcatgctagtccaaagttagctagcccagacaatagagttcatctgctttttccccatgtgctcccaaaacccttcactttcctgacattaaattttctgtgccaggagtccgatgacagtgggatatgcaccagagacatgggcagaacccactgctgcaatcccaggctgtagacatgcttggggcctagttggagtgggtgtggagagtgaagcagaaagctctgtgttggtgaggggggaagaggaaactctaggcacagaggaataggaaaagcgccccaggcaagatgataggattatctagatactattttgtagagtactcaactatcccagttttcctagggctgagggttttccagaatgtccgactttcagtgctacagaagttctggaaagttctgcactgtttggaaaaaactggacccttgaaaaccagaacgtcattcaccatattggagagctctgagacccgactctccagtggaccctaaggatcactgaagtcacgtctaccaagcttgtaaaattaaacactcaagcaatccctggtctgtctccatccctactagacccccttttcccctccacacactcttgttaaatgaattcctcagattatgagaagaaagcaggtggctggatggatcaatttttttttaattccaatccctctcactcaatgcctattctgctacaggcactggctgagtgaaatcccagacaggcagtcagcatggtcaaaattcccatttcttggtgtcaattagtgtagagcatattgtgcagtaagcctctatttattaaacacttagcagaggatgttagtgacctgaaacctggcagtttccttatcactgctagtcttatggaactttctaccgcacctctcggggtaaacgtgggggagctgcatctctgcagacacccttctctgagtctggaccttccccacgtcttcccagcatgggtgtctccctcctctctgctgcagcccagctaggaggggcatgctccacccttcccacctggagagagaaacatcagagcagtttaaccagtggttgcagggccatatggtgcctttatgccaatcagaaaaaggcaccccttcctctggcagacgcagccctttcccagggtgcatggctggatttcagcctctacttcccccgcacgagacttagtgctcagcacaacctgcacgcccctccagggctgccctggtagcttgcctagtcttggggatgggctcacgttccacagatgagttggagcctctggtcagagctgtcccctgcacaaagggtcatgggagcctcct

SEQ ID NO: 2879 - DNA, 13742 bp, Homo sapiens
catgtaaatctttctatccttctatgacaattttaattatattaatatactaaaggtggatctgtctatatgtctgtatacaacctttagtatacaggcatgtacaatctttagtatatattgctgtgttttattgtaaactaaattttatcgtgttgtatttgtcatcccacaactgcctttcttacttaacaaagtatttttagatggttctaagttaatatatatctagttgatgcttttatctgctgcatagtattcccttttatgaatgacctcatttttgaattcatttaaaacgaatggtcttatagattttcctcatttttgtcataaaaataaatgcttcagttatagccttgggcgtgtctccttgtgtacatacgaatgcaataatttctagagggtagatactagcagttggattgctagttcatggtgtacatgccttttcagttttaattaatacttcaaatcacctttttgtagtacttattatcaatttattcactctggatgtggcaaggggagtttttcttattttcctagtgtgtaggtcagtataccatgcattgatgctcagaagaccagtgtttgcagtttcaaagcccttatctttaaatcccttctctctaccagagtatttaaatctactttaaaaagcaaaaaatgaggaaacactggtttctttctccctgtgtttctaaataacaacacaaccctgagaacacaaaaagttagcattgggagaagggaggcaagatcccgttaatacttcagagtattagcctacaacaccacaatgcttcttatcttctccataatcacagatcaggcgatagtattctagttttatagatgaagaaaggtcgtctcaaaatagtcagtaatttggtaagtttatacatctcctgggccaacccagaactcagacccaaatcagcaaactccaaagaaagaccacagcttttcaactctgctctattgctttctaataaaaaaattaatgacgatgagaacatcatctttattaatagagtggtattaatgtatctcatcacacagaaccccaaatgagtacccacgacttcctaaacatttctgtcttcgtagctagaagtacagtgggttttagtagtgtgctttgcttaaaatttctgcttcccattcaaaaggctttttttcctcaaagttatgttcatataccacattcccttcttttctcgttgctttaatatcgaggttcttagaaggaaacccaagggtagcattaggactgccatggttattgactattactcgttaacttattaactcttgtcctttggatgttgtatcacatgggtaagcaaatgccataagtcatttccctctaatggttcttgtctacctttaaaatttttgctcatctcatacgcacatctattgcatgacagaaaaggactggaacatttttaaataaggaaaagcacatcctgagaatttcagaaacgtattagatattgaatgaatgtcaaagtgtaagaagaatgatgccaatggtagatatgacaaagagtacaggtcaaagataaacaggtatttaattaacctatatagagagctaaactcacctatagctgactttcctcaattctggcttctttcatttttgtattcaaacaaagcataattggactagaatactattcatttgggggggctcttcagatcacaggatgaaatgaactaaaagaaaacaactgaccttaggctaatttcgaaaattttacttatattcttcaacaatataggtcaactgagcaaattaaattgctgttgaatgtataaaacataatgtgattatccacagagagtaatttgatattgcctaaataactttgtgttttaaaaatcttttatttgtattccatctcttacctgggggtgagtttatgaaatgcagagctgtggaatccctgaattccacagcaccagtcaccataatctaaagctagcagtggttaatgagcttgtgctgatattgacaaagacagaacaccttttagttgcaggtgacagaaagatctctggtagcccaggcaacaaaggaaaggcaaggtcaaggaggtggtgttcacctcagagtggctaaattcaggtttcaaaggacatcatcatcatgctgtctctgtttcccatacccctcccatctctctccttccttcatgcctttcctctatgtttgcttactctagatttccatgtggtggcaaatagggtgatcagcacctagtaattccaaatataagagaatcactgctcattccaacatccacatcaaatctccaaatcaaccctcctgcctgggtcttcttcatttcattgttgtggtagaggagcgaggaccatctgattgatgcctgtcccaaactacatatgtgggtgacaggctatttccaaaaagacagctgaaagaaagacaaatagtagatacccctgcatggctttaaccaacaaagatgaaagaagaaagaagtatcatcagcacaaatatgatatagcatcgggatgattgggcattacattatttataataaaaccagcatggcataagcctgaaaatggggctacaggacatgattacctcccatgggacatgaaagcagagacctaatagtagaaatgaggaaacgtagctgctgtgttcaggaatctcaggagtgaaggagattcagaaagagaaaggcccttcagagtacatgagaaataaacacaggcccggtgctggaaaccaaactggatgaataaagatgataatctaaagaggaccaaatgccacttatcggcgtaggggccgagagcatttaagaggcaccccagactccccagtagaccaatagtaatagtagtattaacctcagagacagggtgttgacctgattaaaggcacatctgtccttgtgaatatcatagtcacaggtgcaatggagagataacaaggcaaacacctttagaactgcagtaaacggtatctggatggggggagagcagcagacagatcttctgtacatgcatcttggaagaaacctgaatgtaattgtgggctacaaacagtgtgtaacacttcccaaacccagacatcactagtgagggagaatgagagttaagtgtaagttgacacctaataaaacccaaatatttaaaaaagtaaaagagaatagtcttgtcaatttcctataattgaaaatcagtgcaatgtcagaatttcagctatgggaaaataatattagattatacagaatattttgtgttattcctctcttaattgagttttatattagaatatttagactatttcaaattttgtattatttcaaagagactaaggtgaacatgtgtacatgtatttatatgtgcatatgtgagtgtatttatgtctacattataggtattatgtgtatacatagagtcagacagctcctgagatcatggattttggatttttgacaaactgcaaaattgtctttcaaatgaccaatttatactgcaaccccaagacatgaaaattgattatttttgtcatactactgtgaatgctgaatgtatcaaatcgtttgatctttgccattgtttcaggtgataaagagtatctcattaattttaacatgcacatcaatccaccttaaggaggcgtgtgatgatttttaaccagctaggaggtgctagttgtataggcacctggaaggagctggtggagaggcagcacagcctcacagttacacatggaggctgtggttcagattgtctggatggaactctttaggtcctcccagacatcaccttgttagctaaatccctgcacagattatttaaatgtgtcttcctttctgtaaagtgaggttatttaaggataaatgagataatacactgggcatggtagctcatgcctataatcccagcacttttggaggcaagatgagcagataactagatgccggggttttgagactagcctggtcaacatggtgaaccccatctctactaaaaatacaaaaattagccaggcaaggtgacacatgtctgtaatcaagctactcaggaggctgaagcatgagaatcacttgaacctgggaggcagaggctgcagtagccaagatcacacccctgcactccagtctgggcaagactctgtctcaaaaaatataattaataaataagataatgcatatgatgcatttgcacaacacgtaccacacagtaaatgtcaataaataatttctactaacatttattattgcactaaatttagctctgagcatcctggcgccaaagcaaagagagctcattgttcaataaaaagaataagataataatcacagatactatatagcatttactgtatcagctcctgttctaagtactttatatatgttaaaacattttatgagaaacgaagcttctttggccacttattgaattctggaaagaattgatcaacaattattctgttatacagaaaattatcattcccatttttcaatgagaaaacttggactcaaagagttaaatatctaagttctcacctccagtaagtagtcaaacagatttgaacctaggcctttgaccccatagtcttcctgctatgccagaaagcctttccagaagtctctgtgtgaatcgactactgctttgagagacactctgagaaaactctggcattcaataccttaaggcttgatcaggactcttgcaatgcacttgcatatgtatgtttatctgtaagagtttattgttgaaattttttttaaccaagagcataaatgtagtagcagggtacacaatagatttttgctgggtgatcaaactttgaactcatagaatgacactgattgaggaatgatttgcttatctagtgacggtggctggcggtgtgtgaattcctgagccagtggtgtcccagaagtacagccctggggctctgagagaatggtacaggtcacaaccgaggccaacagtgacaccaaggaggtctactgtggcaccttaattgtaatgcttcttagttgttcatatactctggcaacaagtgtgtaaagcactagttgcagttttgcagtttttatatgcaaatgtgtgtgggtgtgtccatttttcacatatgtgtgacacgctaaaatacattttcatgcttggatctaaaatatctaaatctagaaatatttaaagctggtttggtccattcaaaacgttctgctaaaagttcatctgctgttatcaagtagaagatagctttccaggagatagtcgtgttaccagtccttacaaggacggatgtcttacttttttgatcctgtctcaaagaggcaatatagtgtgaattgatttacttggttttatcccttctccaggttggcattgctcattttagtaagacttaaatggctggatcaccttaaagttgcgtatttctgaagcctcagatgggtaaatgcccagatagataaatgcaaatcaagtcaagttatcaatttagcatgaagataaagctgtttggataattgtaaagaaatgtctgatatttttcacctttacaaaataagagaagtaagggcgattttgtctataacagaattacatggaatatatttagaaatgagaaaaatgtgggaaaaaagcacaatgtcagtgcatgccaccaattatataatactatctcaaacaaatcgatgtctgtctgccctgactccacttatttaaaataagagaatgaacttgatgtttggcttcatagagattcagcccctgtaataggccttccatgtcttttaacgtatgtaatgcaaagaacaaacaaataaagcagaaatttttctaactctgtctcttctctctttcccccagactatgtcagagagtcaaatgaccttgcacaataacagtacaacctcgcctttgtttccaaacatcagctcctcctgatacacagcccctccgatgcagggctgcccccgggaaccgtcactcatttcggcagctcaatgtttctcgagcagctggcaatttctcctctccagacggtaccaccgatgaccctcgggaggtcataccgtctggcaagtggtcttcatcgctttcttaacgggcatcctggcctggtgaccatcatcggcaacatcctggtaattgtgtcatttaaggtcaacaagcagctgagacggtcaacaactacttcctcttaagcctggcctgtgccgatctgattatcggggtcattcaatgaatctgtttacgacctacatcatcatgaatcgatgggccttagggaacttggctgtgacctctggcttgccattgactacgtagccagcaatgcctctgttatgaatcttcggtcatcagctttgacagatacttttccatcacgaggccgctcacgtaccgagccaaacaacaacaaagagagccggtgtgatgatcggtctggcttgggtcatctcctttgtcctttggctcctgccatcttgttctggcaatactttgttggaaagagaactgtgcctccgggaggtgcttcattcagttcctcagtgagcccaccattacttttggcacagccatcgctgcttttatatgcctgtcaccattatgactattttatactggaggatctataaggaaactgaaagcgtaccaaagagcttgctggcctgcaagcctctgggacagaggcagagacagaaaacttgtccaccccacgggcagttctcgaagctgcagcagttacgaacttcaacagcaaagcagaaacgctccaacaggaggaagtatggccgctgccacttctggttcacaaccaagagctgaaacccagctccgagcagatggaccaagaccacagcagcagtgacagttggaacaacatgatgctgctgcctccctggagaactccgcctcctccgacgaggaggacattggctccggacgagagccatctactccatcgtgctcaagcttccgggtcacagcaccatcctcaactcaccaagttaccctcatcggacaacctgcaggtgcctgaggaggagctggggatggtggcttggagaggaaagccgacaagctgcaggcccagaagagcgtggacgatggaggcagtttccaaaaagcttctccaagcttcccatccagctagagtcagccgtggacacagctaagattctgacgtcaactcctcagtgggtaagagcacggccactctacctctgtccttcaaggagccactctggccaagaggtttgctctgaagaccagaagtcagatcactaagcggaaaagatgtccctggtcaaggagaagaaagcggcccagaccctcagtgcgatcttgcttgcctcatcatcacttggaccccatacaacatcatggttctggtgaacaccttttgtgacagctcatacccaaaaccttttggaatctgggctactggctgtgctacatcaacagcaccgtgaccccgtgtgctatgctctgtgcaacaaaacattcagaaccactttcaagatgctgctgcgtgccagtgtgacaaaaaaaagaggcgcaagcagcagtaccagcagagacagtcggtcattttcacaagcgcgcacccgagcaggccttgtagaatgaggttgtatcaatagcagtgaaaaacgcacacatcaacccacagaccttaggaggaggaaggcgagggcggggtgacttcggtgatgataaaaatggttttatcacccagatgtgaaagaagctgcctgtttactgatcattgaataaacccattttaatagaaaaagtcaataccaattcagcaaaaagaaaaaaaaacatactactgaatataaagaaatttattctgaaatagactttacgtgtttttttcttaagaggagaaaaatattgcttgacggcaattatatacccaaagtgatttgcctgggtccttaattcccattagctttggaatctcagatgagcatagctgacccagttcccacattcttccaaggatcccaaaagtgggaatccagaccccaagtggaacactgcaggcttacgaatcgtggttccaaaattatttcatacgttgcaaagctgaatcttcttgtcccaatagagcttctgtcttttctttggtgtgttgttaaactctatttgtggacttgattcttgattcttgcaagtactgttttgtgcagttcaagtttcgtacaaataaaaatacttaagtatatatatagtgtgagttctgcacgcacacacatagtgtatataatatcatgggaaacactgaactggaaattattcctgcaatatacgctttcagtactttggtaactgaagttctctaggatcctatgcaacattaacgtgaaataagcccagtgtaatgtttttgaaaccagggctgttttcccagagagcagccaggccttcccagcaggtctgtgcagagcggacaggctcgtgagtcagtgagcgccgtggcttcgccagacttggtgttaagcaacctcctttgttgatgtctcaacgagctaaatcggggcccctctgagctcaaagaatgaaccacatccacacgtttgaatttatcatctaaatctgaatgtttcagaacaaaatttctgctatctaaactgcttgaaactcataatagtgtcacgtttgaatgtcatacacagcaatatatatatatgtgtatatatataatatggcaaagcaaaaaaaaaaacatggtaagagagaatgaaggagaacattgtgtttgttcttgctgaatggcaccttctcaaagaaaatagggcttgcacctttgttaatcagctgggccagtgctttctggtgttcattgtgtaaccttcacccaggaataggtgaggttttagaagttacatgtcctctgaagaaagaattacactctgaaaagtaatgcttcaaattgattccttaccttttgggaaaaaaaaaaaattgtttttttgcattctcccttgaattgaccaaatgttaactgtttcatttggggaggggatggggtgctgccatcattgtcgttgttgttgtgctgtagctgttggggtttcttttcctgttgccggggctgtttggggagagggagggggggaggtgggagggccgcggagatatcttccctttgtacagggcattcgtgttgtgaaccagagctgggtagaagctgcttttgtattcagtgtgaggtggtgtttacagacgactttacaacagtagaagtgtactcagtggtgtctgtgtatctgaactatttaatttcgtgttagtttatatgcagaaatatttatggatactacaccaagtgtttatttaatgttgataaattgactcttcagtcgtcagccatggtgtcctttcaaagtgattctttaaggtccacttgacaatgaatagagtatattggagctttcctgtggctaagaagaagaaacatgtcatcctgtggcatcaccaagcacctaactctttctaggtaataaaaagtcaacggtcacttcaacgaaatgtttaaaaccactctttagttaaatctgatgggaactgaacaaagctccaccatttgtctgaaatcattttacacagggaaaaaaaaaaacaatcagcataattgtaagaatgattttttgggcccacattcaaccaaagaacaagaaagaaacagacgattttctaatatgtcacagcaaactacagaatgtcatattatccacctgtgaaacatctagtaagcaattgcactatattttatttctcaagttggcctggcactaataaatatgtgaaagcttattcaagttcccagtacttcagcacttcccatccttttggaaactcctatcttgcctccctcccaaagggctgtttcttttattaaaaaaaaaaaagaaatagaattaaatttgagaaaaggagaaccctgaaatttaacagaactttgagagtcacttccaatctccttaaacatgattatctcttatccttgtccttttgtgatgctaataatagcagaaaaggaacaaatccaagactctagtctcccttttttgttttactggttttattatagaattgtttttaagcctcttatggataaagctgcatttaaatactatctactgattttatagaaaggtatgtccatttcttgggtactttcagagaaagaaaacaagcaaaataggttcttttgaatatgaataatttaaaagctaattgaagatgtagtgagtatttataattggaccttagttacacgtgcatttctcaaaggcttgtcattacaggagatattcagcacttacctaagatcaaaatgtcttcatcccaattgggaatcgaattatttcatgccatatgcatgaggtttgcagacatttcaagattagcactttgcttgaaagaagaaaatgatcaaacctaaaataaactacacatggagaatctcttctctctctctgcctctctctctctctttctccctcttcttccttctctctctctcacagcacacacacacacactcaatctccattctccaggcattgccagatggttaggagaagtagctctctctggtcccctagatccctcggctctgctctcctttgcccatcagctccctgggcctctatgctagtcctccctattctcctagtcaccctttgcctcttaagcccagcctgactctctacatatttttcatttctctttaccctttagtgtacaatagttgtagactctacggaatgaaaacaaacaagaagcctaagcgttagaccctgctgtggctaaagatctagaggcatatcagttttctctgtcaggcttcctacgttgccctcgtgcagggctcattgcttgcagagcgctggaagccccttcatgtatcgagagagaagctggagcacagagctctgagcacagttggctgtttcagctctgactcagggaggaaagaaggatgccaaggctctgtccagcggagaagtctaataccagagtggcacagagaaggattccagggatcagtcagggttcctgtacctatctgagtagagatgattcaaggatggggacatattccaggaaattgcaaatcttcccctggcagcttcagaggacgagtgaaaatagtgcagtatagtcaaagaagcatgaatttaggatgaggaacctgaagtttctggaccagtttggtcactgcttagttacagtccttaggaatgcttgtcacttaacctaaactttctgggttttatcctcattgctcaactaagcaacaacaccgaagcttctctaatttgccttctgatgccaaatcggtcaaaactaggtcagcagctaccatgacgaaagtaaaatggtatattgggtgaatgtttgaaaatttagattttatattctgtaaagttatttacttactctatttcaacaccacaaaatcttgaatttggaaggtaaccaaggaagctttgaaatttgttggcaaacccggagtagtatggtttaaataccactccaacccagcacctgaggtcgggcaaactcacaaaatagagtttctaggagcaggtgtttgctttggttttgcaatagcatttctcataacagaactgaaactgtataattacaacactccaaagttatttttttttaacctaaagaaccctacttctagcacctccctgaaagaatattttgctccaataccacgtgcaacaaacttatttagacagtatcaacttagcccttaataggttcaaggacaagtttactgcttcctttctacacgcttaagttacatctcttctcctgttctgatgactctaaatcttcagcctctcccagcattaatgtgtgagcaacattgcagacctgagaaaggtttctagaatggtaacccaatgttctttagaactgggaattccattttccttttctggctttagtgttaatgtctgggaagggaggctcatgatagaaaataaaaatgagaaaagaagatctagttcataaaatgactataccccacgtaagttgtaactgcacagtgttttgttgtacggctcagaaatgagcaagtgttagtattattaggacacatcacgttcacagcttcgcgcagagacggatagtgtatttggatatatggaagtctccaaatgcgttgctagaatatcaggcctatgtttgttctggtagaaccacagagactccacaaagttctgaccctaccactctggtctgggctgagaccaccccaaaaaatcatctaagaatcaaaggggctcacatctcagttgcattctatttaaaagataaaggggccatacttccactgcaaagaagcattagtaaaacttcccgcacccaaattataatccggcaaccctgcttcagctaaaaagattatccccagaatctaaaagcttactattgttctttcttggagccaaaatgcttagcagttctgcagttcacatacaaaactcaaaactctttttatcctgtttctgtgagttccttgatgatagtaattgggtcttattcatcactctgtatcctgtggccacacagaatctggcaaattgcatatattcaataaatgttgaatatctaataacctcctattaatataacaaatattatcaacattctgtgcacatcaatgtcccatgctgctactgtgtcaggagttatttggctgggaagtggaaagtgttcacaaacatgatgcttatctaataaatatcactgagcaataaggagaaatattttaaatagatttgaagttgtgaacaaataattagagtccaaagaggaaaaagaaaattaactctgttttttatccctagaactcagaaatttactggattggtcaacaaagacaaactttttattgtataaaacagtagaattcatggagggataattcttttggaacaggcttctcggttacttgccttagtaaaagaagtatctgagggcctggagagttcataaacatagttttctgtgcaagtgaagatctgtagtttggctaaaaatccttgcatgtagttttgcttggcgtggaaagttattaggagacaatcctttatctgttctgcaagcaatcaaacacatgatctcccttctagccattcctcatccagtacatggcatttccagcctcctacatgtaacacttcaaacttcctctgggcgtctgcttagagcatgtgatggccacagtttgggcaaagcccttctttcttttaaatataggaactgttaccagtttggtgcaggcttgaggaataattacataaaaatgggcttccacgatggtgaatcacatgctgatttctcttggcaggaagctctcagggaaatgtctgtgaatcatttaaagatctctctggtggatagagaaaccgcagtccaaaaacagatgggtgtatatttgctttgtagcaaagggcatgtatcatactcgcatctaaaacagtgtccacatctttgccaaaggcacgaattttacctttttttattacctcgtggccagcacttcctcagtaggcatttcaggtggtcacaaaccatgttcatttttaatcttgaaaaagtcaatcgtctgtagtctgtactataaatgatgcctgcaactttgtggtgaatattatccccaagttaacagtgaaata

SEQ ID NO: 2880 - DNA, 37823 bp, Homo sapiens
acaacagttttattctcttttcaagcctctcaacctccagctctgatatatgccattgagacacctattgcacctgacacgtgaggcatcaatgtggactggactctgtccttgcgggagagggcctgcaagttgggcccacccttttatttccacccggggaatttcctggctgtcctgcctgctcctctccccttgaacccaggcgtgcctctacctggtagttgaggtctctgcctccagggtgttgggctggccactgtaggtgaagtacaggctgttgtcactttcagagagaacaatctatcctggaggccctgtgggagacaggagagatgaggggctcctttagaactgctgagaacataggagaagacaagaaggaaaccaacaggtgagagcaacttcttagaccgacgtggttaaatctcaaattggcaacagatgggattgcacaggtggaacctcagggtttgggaaaataggagtgctgacaagggcccatctcctcttcccttcagagagaggtttgggcttctcccggggcaccttcccagagaacctcaacctcaggctggtggagcctgaagcaagcagcttctggtaaagagacccagactctggaccggagagagttctataaaaaaactctgtgctctgagaagacctgactggagtgggcaaactctttgcctttaactttctcttcctgcagctggcttaatatctcctgaggccaaacagacatgacacttgcagcatgtgaggggaagcagctgttgagagttaatgcccaatattcatgaagataccaccctgagaaaaatctaaccaacatcttagtcctcactaacatctggcatacttctcctcatatctgattttatgaagagttcatgcaacaaagtgatggaaaatgctgctgggagctttgagaggaagtcctctcatcatcatcatcatgttgttgttattgtcgaagtggtggtatatttgaatgtacttaaaaaatcaatgtttcatggtgtcggctgatacctttgaatggtattaaccatctgcgatctcaattcctcctattttgacaattcaatcatttaaaccattgaggcccaaacaaaaagcaacaggaagtcccccatcatttctttttctttggattgggtctcgctctatcaccaggatggagtgcagtgacatgatcacagctcactgcatcctcaacctctcaggctcaagaatcctcccacctcagcctccccaccacacccagctaatttttgtattttttgtagagaagggtttcaccatgttggtctcaaactcctgggctcaagtgatccacccacctcagcatccaaagtgctgtgattacaagggtgaaccacctcgtctgacctccattttttactgcatcaatttttcttacatttctgtcaggcaggaacaagtacactttcattaacaagttcccaagactttcctcctcaagctaccattctcacactatacattccttcaatcaaccatgcaccaacaaacacttatggggagcccagaacacccttcaggcttggaatttgggatgtgacatgaaaaggccgttgaaaagcttagattttggcagatgagacaggtgattacgatggagcagacagaccaggcagagagggaggctgacctcaagcatctgaccagggtttattttcacatgtacacaatgcacgcacatgctgtaggtgaaactaacatgacttatgccttacgtgaaataacaaataacatacagcagtcttcttgtcaaagtacccctgcaatgatgggggccaaagttctcggaaagaacattccaggtcagtggaggtggagggaaagaaattcggtgacatatgccgcaggcgtgctgtggggaacccttagagttctgggagagtatgaaaaacagcaacgaaagtgacttccattgcttaatgtttgaattatcaccataaagacccaaaattataagaaaaaaaatgggaaagataaacacctaattcaggagaggggttatctctggggagcgggagagatgaaaggagaaaggggacacagtaggagtgcggggatcaagcttcaaagctttggtaattggtggtgtgtacatgagagttctttaagctgatttgtgtacgatatttcacatatgttgtcaaattgagagagcaagccagtgagtagaactccagatttccattcccactcaaccccagttgccaaagcccccaagcaggagggaggttgagggagaggaggtaagaagtctgtgccccaagctcctgaggagattgaaagcagctcggacagatgctggactcctgcagatcagcccttcggccttgcccctcactcgccctctccgctgtcactgtgcacattgttcattgtcccatttttgttgttgttgttgaatcatcaaaaaatcttagccattgccagtgtgcgcagtggctcatgcctgtaatcccagcactttgggaagctgaggagggcagatccctgaggccaggagttcaagaccagcttggccaaaacagtgaaaccctgtctctactaaaatacaaaaaaaaattgccgggcatggtggcacacccctatagtcccagctaccctactaagaggttgaggcaggagaatcacttgaaccggcaggtggaggtgcagggagccgagatgtgcctctgcactccagcctgggccacagcgtgagactctgtcaaaaaaaaaaaaatctatccatttctaagagactcatgtgggctaacatgcatcttgctgttgttgtttttaaaaaaatatctgcaggagggatattagacaatgtaaatgagctgagaaattacttctgctggcaaaacatccccaggtcggatttaggcatggaggaggcgctgaggaaggaaggtcagactttggagtctggagcaatgtgtggaggtaacctgcagcccaactgggttccactgtgtgtgctttgagaaggggagggagctggcagacagaggaggcagagcagaaactgggtaagagaaggggagaggtgcctggttgcttgttccaaggctcaccccaagccccttcactgtggctgggaaggcaggtgtgggccagccctgactccaaccaccattgagggattgtgccttcaggagttgcacaggcagctcatctttcggaggaagaaaattcgtgcctgggttggggacacctctgttccattttaaaatattttccttggctcccaggaaggatttgttagactcttctgaggttttgacaaactctctgtatttttcaaatacttaagtatctattcggctgacacttaatcagtacgactgtcagaacatcacttgaatttctgacaggtgacacccaaaaaacaaaagcaggtttatttgtaggtaaccagctctgctcatgctgggctacattgtaattttcctcgtattaacttctgatcaaattcctgagtcagatgcctaggcaagaaggaaactccagagcacatgtttctagttctgagatgaggagcctatgccccggggggagtgatgtgcgacactcacggctggagggttggcaagaggacacgcaggacttgttcctggctgaagaattttatcgaaacattcagcctaggtcacacacagctctgcctgctgccagggtttctctgtccttctctgttgctgctcctgcccatggcatgaggagtttgtgggttaagggcacttccactccaggtgcccaagatgccagatattctctgtgcaaatggccccaagtccatcccagggtctgtacacctcttcccaggcccaacctcctgaggacttttaggccagagaagtaatgtctgtgcagggcagggctgcaatgcaggtaggcaggagggtgaccatccagggtgtgagggccccatggagtgggatggagctgagggggccagaaaagggggacaggttgtggccgggctggaagtggctcccccgtaccagcgcattctagccaagttgccttagaatttctaatttacacatggcctttcaggttgtgaggaagatatgtcaagataagaggatagaaacattttatttaactgttcttatagcttgactgatgacttttatatatctagacataggaatgtgaccctcatcctcttgttccaagacccacaggtgttacgggcagaccgtcactcagacctggagtgacaggatcggacagaagggaagcagaaatggcagggcctgcgtgcattttggtgtggtcctagcatttctttgcctctcaagctgtggtggctgaatcgtcagccctccaggcaggaagtgttcccaaagtcccgctgactttctattctattcaggctttaaacattcccgaagtggtgggccccacagggtattcagagagcagagctggtcagatgtggtggtgcagaactgactagaaatggtgggctccttgggtctggccgagtcaagtcctggaaactaaggccagtccaggttgttttccccattgggtgtggaatcctcgatcatgcttgtcttttctcctccctcctacccacaacaggcaaagatggaaaggtaggatggggtgaggtggtggagtggggatctgcttctcgcttgtcttccagtttagcctcctgcttcaaatcctgccaatcccgaattcagtcaaaggctatttcttgagtaaacacttctcaggtaaaatgaggaagaaacatacctccacctcctgccacctggctgcttctactccttccagctttctcgcagacttacgattgcctgttagagccacacatgctgatgttcccacaaaagccgtctgtcacctgtctcacccatcacttcattactgagaccaacctgacagccacatggatggaggagaaccagtggagtccctggcatgtgtgagcacatttctatgatggagtctcatttggaaaagcgaaactggccaggcacggtggctcatgcctgtaatcccagcactttgggaggccgagagggtgggtaacctgaggtcaggagtttgagcctgaccaacatggtgaaacactgtctcactaaaaaatacaaaatttgccaggtgtggtggcaggtgcctgtaatctcagctacttggaggctgaggcaggagaatcacttgaacctaggaggcagagcttgcagtgagccgagatacgccactgcactccagcctgggcaacagagcgagactccgtctcaaaaaaaaaaaaaaaaaaaaaaaaaaaaaaaaagagaagaaaagaaaaaagaaaaagtgaaattgtcccacatacacaaaagaacatcatttccctaaaagagcatttcttagggcaggaagtgacctcagagcctctgggaccctgaatctgttcccctccgccctttgacatgcaggaaacagtcctgcgccatgtcctcacactgcttgatgtccgggtggtgctaggacagaaggctcctgagggagagagaaaggtttgatttctcctacccgcccaccaggcctgggccgacttcccattgctactcaccgaggtatcctggggagtggcccctttcggcagccctctctcctctgccgcctcccggccatggggcccacaggtctgtgaccctgggctgcagctctcttagacccagctgtgcctgccagggccagtgtcttcactctgtttcctggagcagggacacctcggcctcctccctgggcccgtctctcccagcattccttgctggcaagcccacctacaaacgtgtgtgtctgcccactgtcaagataaggacgcgctggctaaaggtacatcagataatggtctccgtgccaagtcccagtcctgctgtcccaagggactccggggtcaggtggagcaggcagggcatctgccacgggctccccaactgaagccactctggggagggtccggccaccagaaaatttcccagctttgctgcctgttggccatgggtgacctctcatctttgacccccggagggtcctgggtctccaagtaaacagaggctcccagagctccctggagggggctcctgccaccgcccggagcctcacagcctgggcatcctccatgcctcctacagcgtcaggtaaggcagagccttgctgctgctgctcccccaggagtgcggggcccggcgctcacccctctgctgcctttctcactctttaagtgccagtctgggcacttcgggctccctctttagtggatcgggtggaggaggagagggagaagggctgtgctgggaaacatggagcgacagtgaatggcccctcccctgcccagggaagggcctgggcataaacaaagtggcagcagtgccctgccaacccagtgttacggcctgccctctgtggatgggaatgggggtactgcgaatgcaaggagtcttgaaactggtgaaagaatgcagggacagccacctcgcagccaaacggacaggacattcagagcaatccagcacaggccccctccctacgtggcagacagcctcagtcgctatctgccaggttctcagaggagggcgcagagactgaaacacgttaggagcctgtccggagactactggggtgggcacaggtaggatcaatgctggggacctgggtgtggccccttccagggccccaagctgctttgccttcctggggtttcctttaaagccaccgcgtgaggccctggtgggacatcacatttgccggcagcagtggaccaggcagatcctcaaagatgtctccttgtacgtggagagcggcagatcatgtgcatcctaggaagctcaggtaagcttgggaaggaggattctaaaaaggtttggcttgagttaaactccacattgaagaaacagattaagttgtaacaagaaagccacggtttgatattagaatgaattctattgatatctgactgtgaatggaactgctaccaatggaaatctttagaaagatccttgaaagagtataaaattctgcctaacatgtacgtgaattatatttcaaaatataaaaagcccccacagttccatggcatataaaagtactcaggaaaccaatttcccctatctgtacactgcctagagacaggaaaaggattaaataagcacaaaaagcccattaagcccctatctttgattccagtggtgcttttttatgatggtatattttggaatacaatcaagaatagagaataggctggtcacagtggcttatgactgtaatcccagcagttgagaggctgaggtgagaggattgcttgagcccaggagttcgagagcaacctaagcaaatagtgggaccccatctctacaaaaacatacaaaagttagccaggcatggtggtgcatgctgcggtcccagctacttgggaggctgaggtgggaggattgcttgagcccgggagattagacttcagtgagctgagatagtgccactgcactctagcctgggcaacagagcaagacccgtctcaaaaaaaaaaaaaaaagactggagaataatatttaaaagttcatgtattaacatgggccttatcagatcttatctggtcgtttttcttttctttttttttcttttttgagacaagtctcactctgtcacttaggctggagtgcagtggtgcgatcttggctcactgcatcctaacctcctgagctcaagtgatcctcccacctcagctgggactacaggtgcacaccaccagtccggctaatttatttttatttttatctttttttgtagagacagcgttcttgctatgttcccagactctttttcttttttaaggaattaaacattacaaattgcactgaggtcatccctgcccgttctccacatcatccttctcctcctctttcccagggtagctgcatttgagccacagtcggtgtttgtgcccctgcatcagccagtcattgccccagagagtctagcctttgtgagacagctccttgtggccgagggcaattccctgggagggtccctgtggtgaatcttcgcagctgacgttctcagcagctgggggatggctgcattggccctgaagaggggttctgttggcacaccacagtgtctgctacactggattaccatctacattttaaggttaaaagctttgacaaattggctccacagaagcctcttgattgagctattgcttgcaaattgttgacatcactgccactctctacttgtgttattctcttcaatggagatggggactccattgaagtcatgaccaaatgtaggcatggtcagcctccttagactcagggaattgaatccatggctatcacctgctacagcaggtgcacaaccagatgccaacagtagtgttgttaagaggaattccaggccgggcacggtggctcatgcttgtaatcccagcactttgggaggcagaggcgggcgatcacttgaggtcaggaattcgagaccagcctggctaacatggcaaaacccgtctctacaaaaatgcaaaaaaaaaattagccaggcctggtggcaggtgcctgtaatcccagctactgggaggctgaggcaggagaatcccttgaacctgggaggtggaggttgtagtgagccaagttgtgccactgcactctagcctgggcagcagtgagactccatcttaaaaaaaaaaaagagaggaattcccagactgtctcagtccactcaggctgctacaacaaaataccatagactggtggcttataaaaagcagaaatttttttctcacagttctaggggctgggaagtccgagacaagggggtcaacagattcagtgtctggtgagggagacttcctcctagacagccatttttcaccctaaccttgcatggcagaagtggggaggggtctctgaggcattcatctgaattgaagagctctccataacctaatcatctcccaatatcacctccttgcatgccccacctcgtatatcataatcttgggtgtgaagatttcaacatatgaattttagggagacataaacattagactatagcactgactaaagctgttacacttttcaaagactttgtcagttcttatttcatttttaaccaacatctagctatacacatgtaccgtaacatccagggtcattctcagctccttttgataaatacagtgtgcttctttaaaaagaaaaaaaactgcctcttctcctttacaaattttcacctgttgcagtccttataaagaagtaaacaaggtggcatttagcaccctctcagaagtgtgtcccacttctaagaacaacaagaaatggaaccccccatctcagaagtcaccccaaaggccaatgctcagaagtgcaccccaaaggccaatgttgtgtttcatgcactacagcaggacagcaggaggggctcttgattggggtgggggagtgggctgatttctgatagatgcctaattacggctttgggacaatgcctacactttatactgaaatgaatccacaggggctgcaagttctacaagggcagggactgtattctactgtatccttatcacctagaacgggtcggtcacgtagtgggtgcttaataaatatttgttgaataaaggagtaaaataatttatgaattactccatagtattgcataaaatgacaatttcattggtgtcttatctcaagcgtattatctatcaaatcttcattagcgaggcaaaagatgatgacatatacgttcaaagttcactagagtatagtctaaagcaagcctgcacagagccatccaactccaggggaactccacttatttgaattgttatttgctgttgaggagggcgtagactctgggttagatgcttcttgcagattatttagttgcaaatgtcatagttttatcgccctttagggcattaaccttatatccatccgccttggcctcccaaagtgctgggattacaggcatgagccaccacgcccagctctcatatcctcttttgaatgagctttgtcatcttgctggttccctcattaatgagttacaaatacttgacacatttttttaaaaaactaaattcattattataaaaaaaaaagtatccaaaatttagtggcttaaaacaacaccattcatgatctctcagaatgtctatggatcaaactctggaagtgacttggttgggtagtcctgtcttgggatccctcccagagaagtataactggatttggcaacaataaagtggctttaatatccctggggaggccagttttgatgaatggtggggctgggacccaggctgcaggatatttgcagcttctgccagagttcagattggtccaaaaaatgtaaagccaggatggctctggttagaagaaccacacgactgggaaattaagggcacattttgaaagacaatcccaatgaagtcacattttgtttctttataatgggtttcctctctttccccactctgtccacctcctgaacacgcaggggctatttctgagttttgcaatgatgcattagaaaagaagacaactgctaagggagttgattcatctttgtacctctacagcaacaagcaagtttctttaaaatatttcaacaagggccaggtgcggtcgctcacactgtaatcccagcaccttgggaggccgaggcgggcggatcacctgtggtcaggagttcagaccagcctggccaacgtggtgaaaccccgtctctacaaaaatacaaaaattagccagggtggtggcacacgcctgtaattccagctattcgggagactgaggcaagataattgtttgacctgggagacagcggttgcagtgagctgagatcttgccactgtactccagcctgggcatagagtgagactccatctcaataaataaataaataaagggctgggcccggtggctcacgctgtaatcccagcactttgggaggttgaggcgggcagatcacgaggtcaggagattgtgccatcctggctaatgcagtgaaaccccatctctactaaaaatacaaaaaaaattagttggcatggtggccggcgcctgcagtcccagctactcaggaagctgaggcaggataatggcagaacctgggaggtggaggttgcagtgagccgagactgcgccactgcactccagcctgggaacagagcgatacttcgtctcaataataataataataataataataataataatatttcacaaaagatctctttggctctgcacaagccatctcatcagtagatttctcttgctatctcccagatagttcagaacttcctgcctatttctctgttatgagtcccaacttctcagcctcttggataggaaaggcctgggaggtctattctgtctccatgaactctgggcctatggtaacttgtgtccaatatgactgaggggccatcaggttcttgtcctaaaggcatcacctaactttaaccttagaaaaaagcagtggctcacgcctgtaatcccagcactttgggaggctgagcgggaggatcacctgaggtcaggaggtcgagaccagcctggccaacatggtgaaacctatctctactaaaaatacgaaaattagccgggtgtagtggtgcatgcctgtaatcccagcactcaggaggctgaggcaggagaatggcttgaacctgagaggcggaggttgcagtgtgcgagattgtgccactgcactccagcctgggtgacagagtgacactcagtctcactcaagaaaaagcaaaccaagggaagcatcatcccccagtcacctccagcaggcagttagttcacccaacccctctgtgggaacttcctagtgacatccagctaggctatgccccaggctctagtcaggctgtggccaacttggtcttaccaaaggacttaccaagccagtgcttctcaaactcactgaagcagagctgactcagcaggtcttgggtgcggcttgaggctctgcatttctggcagctctcaggggttgctgatgctgcttgctttgtgagcaaggctctagacaatgtcaccacatccaggtacaaccagaccaccccaggggggcacaaaaagaaatccgtcctaggatcaaacgtttccaagagtcttggctttcctcttattctgatacctataagtattttgttttcaatccaaaacagttttaaagacaaataaacaagcagagaaagcacgttcggtcttgaccagatgagagaaatggcatgtcccctctcactcaggggacaatccagagactcacttgccgtgagactgctgcacgcacagtgcgcgttccatagggcagggcctgtatcctgctgtgccttaacacctagaacagggtccgtcatgtagcactcatggcccgcggggtcatgcctgacagagggtctcgggaagctcctccaaggccggcacagagtggttcctctagggccttcgttgtcgccccgcaggctccgggaaaaccacgctgctggacgccatgtccgggaggctgggcgcgcggggaccttcctgggggaggtgtatgtgaacggccgggcgctgcgccgggagagttccaggactgcttctcctacgtcctgcaggtgggcgcgtcccccacacccctggccccccgcccgccccgggggcttaggctacactgacgcccgagtctcctgcagagcgacacctgctgagcagcctcaccgtgcgcgagacgctgcactacaccgcgctgctggccatccgcgcggcaatcccggctccttccagaagaaggtgggtgcagccccccgctcacagagggcaactgagtacctttgcaccccccgctgccctcctctcttcgcctacgcttgcccattcctccctttgctcgtcactccttcactctagagcgcgccctgcgtcctgcaccgtgcacccgtgctgcccctagtcacatgtgcctttggagacttgaaatgtcactagtccagactgaacgtgctctgagcgcaaaatacacatcaaatttcagactcttagtctgaggaaaacagaagtgaaaaagcccattaagaatttttaggtcgggcagggtggctcatacctgtaatcccacactttggaaggccaagatgggaggattgcttgagtctagaagtttgagaccagcctggcaacatagcgagactcagtctctataaaaaatacaaaaattagttggacgtggtgatgtcgcctgcactcccagctgctaaggaggctgaggcaggaggatctcttgaacccaggaggcgaggctgcagcgagccatgattgcaccattgcactccagcctgaaggacaaaaagagatctgtctctcccaaccaaataaataaataaatttcaaaaagtattgattacaggttgaatggtatttttggctgtaaataatatgttattaaaattaatttcacctgtttctttttactttcaaaatttggctactaaaatttcacttctgtctgtggcttgcattacccttctctggaccatgctgttctacaagttccctgtttgaacagacatagttatttttgccactgattttctcagcttgcttggaggcatcttgaatgtgcctcatccaaactggactgagttaatgaggaagaaatgattgaattgtcaactccttctaggttccaatctctttcttaattgtctcagtttggaagtagccacaggtaaacccaccggggaccttacctggaaactgcttcattctctctagactgggaaggcccacaagcacccagggaaccaatgacaggtggacatgcctcttcaaggggcacagctccctgggagcaggagaactcccgatagcagagttctctccaatgagagtcatttctgagcaaatccagcccacagcgtgtaaaatcctgataagtaattcatgggaaggaagtgctgatgataataaaggagatagcatggcagatctgcttctgtccttgaagaacctggaaataaagcaaggccaatgtgagcaggctatgtctgcggggctgttggtaaggctcaggcttcctggaccacttcagagagcccagagagtcctctcaatcctggcctgccatttgctaatggcattatcttgggcaagttatggaactttgttttctcctctataaaaatacaataagaatgcatttctcctgggtttgatgtgaagaatacatcagattacgtaaagcacagagcatggagggttggacttgctcatcccaatagtccttccagggactctgattccatttccaaaatttgtttccaaaatgtgggagagcattcctgctggggtgtgaaactctgagacaaattaagtaaatgtcttctctgtccatctcttccaagccaggaggggcagcttactccttatgatgttacagagatgagaaggaggctcgggaatctaccctggctggcagcacagaaatctcactgtgtcaagcaaagcttaattctaggatccttctaccctgatgcaagagaagagctttcttttgttccagaatatatctatatctagtttatttatgcattttaccttctcattattcctttgtacctatttcagatatgtccattctttgggtgggtcaagctacatctatgccgtcaaccccactccctgactcctcttgaatgttggtccacaagtattccctcttcttctgcaatctagcttattgttttttaatgcaatggttttgtttccatttcataacacggccttattaggggtgtctggaaacaaaacttattaccatatgagtatctctgtctctttctgctttccccctggggtttctgcagttagaggtaatcagtacaggggacagaaacagatttgtgaacaggtctctggagaggagataagctgaggaaggaaagacatgagggaggaaaaaagccaagcttcttgattagaaattcggtaaagaattttttttagtgttattgttttgggagagttgagaatgaggaggaaaaacggtttcagggagttacaggcttaagtagagcgaagagaattggaagaaagggaattttaaatgtggctgggggttataattgggtccccattaaagtccttaaagaaattcaagtaaagattggaattatttttaattcttctgaaggctggattatatgtctttgatgtgaactcacactgagattgtaccacatggaccccagcacttatttgggttatacagtgggaaacaggtttagttcaaatcaggttggtttttgtaaacacataaagcatttatgataataaaatttcaaaacccaaacacttatgaagtaagcgatattgtaatcatgaatttgggggatttttctgtatgggctgcagtgactaggctcctgcaaataggagtttaatgaagtatctgttgtttcctggttaattttcctgaacaagtgtaagcagtttgtgttctagggaatcttattttattttatttgtttatttatttttattattttttttgaatcggagtctcgctctgtcacccaggttggagtgcagtggtgcatcttgcctcactgcaaccttggcctcccgggttcaagcaattctcctgccttagcctcgagtagctgggattaccagtgcctgccaccactcccagctcatttctgtatttttagaaagacagggtttcaccgtgttggctaggctagtctcgaactcctgacctcaagtgatccaccacctcgacctcccaaagtgctgggattacaggcataagccgccatgccaggcccatttattttattttattttagagacagggtcttgctctgtcacctaggctggagtgcagtgggccatcatggctaactgtggtctcaacgtcctgggatcaagcgatcctcctgcctaagctcctgagtagctgggactacaggcacgtgccagcatacccggctaatttattgttttttctttctttttttttttttttttttttgtagagacagggtctctctttgttgcccaagctgtctcaaactcctggcctcaagcaattctccctcctcagccttccaaagtattgggattcaggcatgagccactgcacccagcctctggggacgttttaaaaaattcatattatttattaaatctgacacatgtattacgatttaagccgaattggatcatattattatcaaagacagctttccccagggtgtggtgagtctggaagtggcccttggattcttgggcggtgtgctgctctttcatgtcctccccagcccatgaattgaaatagcagccacagagactcccagcctcctgtaatttgtgtctcctgcaggtggaggccgtcatggcagagctgagtctgagccattggcagaccgactgattggcaactacagcttggggggcatttccacgggtgagcggcgcgggtctccatcgcagcccagctgctccaggatcctagtaagtggcacccagaactgttatagctgctgtctgggcatcttctgtgtgtgtgcagatactttgggccctttcttcacggcctcatttggaaaggggtttgtgtacaactgaaatcacaggtttttcaaactgaggaccagtttttttggaaatgctgtacagttcatttcctgatgcgattccatcatccaaacaaacagctcctggacccggaagcgttgcattggtgttgaagtgttccattggggttttccttaatatggagccttgccctgccaatcatttcttctcaccagggcaataccactgtgtgggtggggaaagccaatgagttttgatatgaccacaggtgttcatgaaatggcaggaattaaataggaatttgaatgataaactcaaaagtgtatatgttgtggggaagggagtatcaaaaagagtagtcagtcctctgccaggtttggtcattttccccatcacctggggaaacctcgcactcatgcagctggagaggacaaactgcatctggatcctttctttgcactgtggtagacaggacggcctgttcttcaaatggtgcttggtcactagaaggcaaataagagagatgttttaacagctcttgtcactttttttttttttttttgagacagagtttcgctcttgttgcccggctggagtgcagtggtgcgatcttggctcactgcaacctccacctcccaggttgaagcattctcctgcctcagcctcctgagtagctgggattacaggcgcctgccaccacacccggtaatttttgttcttttagtagagacagggtttcaccatgttggccagggtggtctcgaatcctgacctcaggtgatctgcctgccttgacctcccaaagtgttggcattacaggcgtggccaccgcgcccggcccccttgtcactttttaggaagaaataagttactttaaaccctcaaagaacccaaatgtctgccacacttcaggccttgttttattcgtcagatttttttctttctgtgcaaagaccctgctggtgttggaaagtgttacagacatgaaatggggttgtcttttgaccagccttctctcagtcttgttttaaaacaacttgatgccagcctgccagcccttttccctgacagggtgccctgagcagagcccagatggcccgtaagaggcctgatctccttctccctgtgccctggaggatttgagcccacatgtgctccagagctgggaactaggccctccacatcaggtcctttctcctgagctcaggctgaaagccagtttacatgtttacttcccccgcacactgtttgaatggggtacaaactcaataaggaacagttcagaactctgagtttaagcacagagcctgggctctgcactaccttagaagtctggcccttctttgctggcagagtcatgctgtttgatgagccaaccacaggcctggactgcatgactgctaatcagattgtctcctcctggtggaactggctcgcaggaaccgaattgtggttctcaccattcaccagcccgttctgagctttttcaggtaagaggttcaactcgtaaaggccgggtctatggtgtgttggctgggaatcacaggggcaggggcaagatttgtaccagtggccaggcacagtggctcaccttgtaattccagcactttgggaggctgaggcaggaggagcacttgaggccaggagtttagtccatcctgagcaataaagtgagactccccatctctaaaaaaaaaaaaaagaaagaagaaagaaaaagaaaaattagccaggcatggtggtgcatatctgtggtcccagctacttgaaggctgaggtgagaggatcgcttgagcccagtaggtcaaggctgcagggagtcgtgatatgccattgcactctagcctgggtgacagaggaagacctcatctcaaacaaacaaacaaaaacggttagtgctagagaattggagccaacagctcctgagaggggaagagcaaaggataaaactcacttctttcagcacctaccatgttccaaatactttctgtacatagctcatttatctgcacaacactcctatgaggtgtgtttcagtgtattcaccttacagaggaaaagaggaaacttagcaatgattcaaaattgatagttgggcgtggtggtgtgcgcctgtaatcccgctattcgggaagctgaggcaggagaatcgcttgaacccaggaggttgcagagagctggattgtgccactgcactccagcctgggtgacagagtgagattcggtctcagaaacaacaaaacaacaacaataacaacaaaacaacaacaaattaagccaagatcacacagttgttaatgtaaaaagctagcattagcctttcacagccaagttggcttcaaaggctgtgtttttccagaaatcatactgatttccttccaaaaaaactcactttctccgcccagtatccctttagtagctattatttgctttttacagaggaggagctgagatttaaaatgaaaacaaaaaaacaactaagacccacccctgctcgcccgaggtcactcacttggcttggctgggacttacgccaggtccagtcatgcttgtctatcccagatatgaagctgggcgtcaggatgggaggcagctgacccacagtggtagcctaggctcacaagggtagggatgcatttcgaatgtctccaagatactgatgcagggccaaggtcatcgaaggactgactgcttatgggaaatgcatttccctaaggacttggtgaccataaggaatacctgaccttggccctgcatcagtgttcccagagcattcaaagtgcatcgctacccttgtgatcacacactaactacgtctgttgtctggtcactctttgacaaaattgccatcctgagcttcggagagctgattttctgtggcacgccagcgaaatgcttgatttcttcaatgactgcggttacccttgtcctgaacattcaaaccctttgacttctatagtaagtttttctttcacattccccatcatgaatgttttttaaactttctatctcagacttctgcctggatgacaccagtctagtggatttgatttttgcttttgttttgtgttttatactcttcaaggaatcaatttggccgggtcaatgaacttgccagagatgacatcagaatgaggtcagggatctctctcaaacaaactggcgcactgctactactttatcaagcataattagctgagcttctgaattctcccagacaatcccaatgggatcctcaaggcctgctgggatgctttaaagtattctgattttataggtgggcattaaccacaaattttatctgatgggatgaggtattatggccagtactcctgtaccaattgtatatccatgtacatactgcatttaaaaacacatgggtgacatcttttgggaaaaacttttagtggacctgacgtcgtggatacccaaagcaaggaacgggaaatagaaacctccaagagagtccagatgatagatctgcctacaagaaatcagcaatttgtcataaaactttgaagaatattgaaagaatgaacacctgaaaacgttaccaatggttcctttcaaaaccaaagattctcctggagttttctcaaactgggtgttctcctgaggtaagaggctcacaaatgtgagaaatgcctgttagaggttttagccatcccccaataacaattctgaaaaggaattaaaacagggttgtttgttttcagagagtgacaagaaacttggtgagaaataagctggcagtgattacgcgtctccttcagatctgatcatgggtttgttcctccttttcttcgttctgcgggtccgaagcaatgtgctaagggtgctatccaggaccgcgtaggtctcctttaccagtttgtgggcgccaccccgtacaaggcatgctgaacgctgtgaatctgtgtaagtgcccacgtgctggaggtgcacctcttttccctaaatacctcccttctccagctgtaaccttacaaaagtctaccattataagggttttctctgagctaaacccagccctctccaggttccctctctggggaaaggcaactattgattaccaacacgttaatatgaatgagctcaccaggtggatctctctgagggctaaggatcagggaaacatgaagtgacaatgtactggtggggagagtttgaggagtttttcaaaagatattcctcctatctcatcttggccatctcagatgcacagcccatggggtgctcagcgaccggccaactttgtaccgttagcttctctttggagctgattttaggacagccagcacctaatttcaaattcagtggaattccagagacaaaacctggttgcctaacgttgcaggaagcagtgttagagggattccccaaaggcaacactgttagggaataagagggaaggacttcgctatgtgaagttgctctagagcttgacatgaggggcaatgctaagtgtctgcatctgtggggttgcctggccttccgagagcaagtctaaaatgcaggctgctggtggtgggggcggggtgggtggggggaatcctgcacagaaagaagacaaagtgcttcaaatcacttattcatgcccttttgcatgtacttttcgtgaattggtgacaactccccactttagagagaaggaaataatgacatcttttgcaattgtattgcaattctggtagagtgtagatttccggggtggggattattgtcctgtggatggcaggtcccctccttctatgactagggaacccccctagctggtctcaccatccagccctgacagacctcacattcagcttgggctagccctccctttttcagtgggtggtgactgactgttctgaaacctgccttccatccccagttcccgtgctgcgagcgtcagcgaccaggagagtcaggacggcctctaccagaagtggcagatgatgctggcctagcactgcacgtcctccccttcagcgttgttgccaccatgattttcagcagtgtgtgctatggtgaggggttgttcagttcacccagggccgggctcccatggagtcatggagctagtggactcgtgcagggagagctccagggtgaagttctctgctctggaggatctacactttgccatcagtgtctagtgcaatgtcgtatcttccaggacattaattttattgtaaatagcccactgtgggttgcaggagacctgagaacaaaccaacaagatgacatgtgcctgggaatgactgtcccacattcacggcagggcctgggccagagaagagaggactctgaagtagctaggcccaggtgcatggggggggggctgggggaggggagaaagcagcctgaatgtaaaaccttaaacagacacattcagagggtgggaagaggacagcaaccaacagaggaggcagagggtgtcagggaggtagaaagagaagcaggattgggcagcatcagagaggatgaggaaggagaggtttcaaggaagtgtcataaacacttcaatattgcaggggttaaaggaggtgaagcataagggagaaggccattgcaatttcccaaaaaagagcttcggtagagtcatgggggtgcaatcaggtttacaagaagggaaggtgtaagatggaggaagcagattctgttttgagaaactggtgttacagggtaggatgaagaggggcagttacttaaatgatgatcaagttcaaaaaaggttattttaggatgtggtaaataagaccatcaaaaaacatcagattgagagtagatgaaatgcagccaaaatttggataagtcaaagaggaagtttccagagtagaccaaggtagggtaggggaatcagaataacatgggatcaaggatgcaagcagctagggtcacactttcaaaatggggtgcgggaagagagggggagagagagagaatgaaaaatagagatgatgaagatacaagaaattcataaaatgggaggtgaattcagctgctgagcactggggagagagattgaattgggaagggggaaattttaaagtagaggtttatatcagtcatcatgggacatgctatagaattcaagacacaacaaggaaatcttaggggtccaggggccagctgaggcaaagtggagaggggatccagttagtgcggcaataggcattgtccagcacaccttccattgcttaaggagaatagggtccccagatgtgggaactgataaggcaaagaatggcagaaggggtccagatctgcggcagtgagggcactggggaagtgagaggcaggaggctgtgctcagagagggttcctcagactctgaaatcctgggagcgaaaccattttgagtaatatttaagtccaagactggtgagtgatgcagattaggtagctggagccattggaattgagattcgctaattaggaccactgatgtggatggctcatcaagaaggttaaagagcttgaggaaaatgataggggagggagcaaaaagaatgactctggtccagatgctataaaatcatcaaaggcaagaggatgtttaaacatcacagaagacaacaatgaggaacggcattgatagcataagcaaacttcatgtttgtacagaggaaaagtagatggccttgaagagtaagtggtaaggaggggcgagtatagacatgccaacattttttgcttactctacaaatgggataaagagcagccatgcctaatgtcattgaagatacgctatcaccagggaaatgtaatttggagaaaggaatataagaggaaggtgcatggatatagggtggtttgtttacaagaaaatgaaggtcaggccaggcatggtactcatgcctgtaatcctagcactttgggaggctgagatgggcagatcacttgaggccagagttcaagaccagcctggccaatatggcaaaaccccatctctactaaatacaaaaaaatagctgggtgtggtggtgcgcacctgtaatcccagctacttgggaggctgaggcaggagatcactggaacctgggaagcagaggttgcaatgagccaagatcacgccactgcactccagctgatcaacagagtgcaactccgtctcaaaaaagaaaacgaaggtcaaatcagtggaagggttggtagaataaaagacaagaatggaatggagtagggctggggagggctaacctgatgaggacaaaagaagtgagggattttcacgtaggcaataatcccatataacagagatgagttcagggaagggggtgctgggaagcgggttgggtgagccctttaacattaggtaggtgtgtgttggctaggcagaacatggttatttatgaagatgcctgtagagttcaacaagcctgttactgcggttagttgtgaccattgtctaagtaatttaatgttttcctatgagagctgaggagccgtgaaagggaaaaggtggctcccaatgagttgcagccaatgggaacaatttgaataataaatagtctcatgttgactcctttccaaaacggcctttcaaaggggagtgtggctgccctgcaaacttctcccacccactcaccacaaaggatttattcacagaggcaagtgcgtatttttcttaaatgatagcccttggagaggaaactaaagagcttatgcttttctaggcgctgggcttacatcctgaggttgcccgatttggatatttttctgctgctctcttggcccccacttaattggtgaatttctaactcttgtgctacttggtatcgtccaaaatccaaattagtcaacagtgtagtggctctgctgtccattgcgggggtgcttgttggatctggattctcaggtaagatatcataattcaaaaaatttagattgggataatctgttattaatgatcactaataatgactgaagtaaaggaataccagagaactgatagtggttatggatattacctatagtctagagcatttatactgctcgttaatcattgccttagaccttgaactgttcattgttcaataaaatgtcttttttatcgggaatcaggaactaacaagtttatgttatgatatattcacatgtaataaaccattataccaagagaagaaaaccagcccggatgttccaggaaaactcacagcccacatgataggctaaataaattgcatgcattagttcatttctgacctgtactgttgagtgtgaactgcagttctcaattcccagttattcttaggaattaagactagcagacaaaaaaaaaaaagcctgcaggataaaagactgctccaaagagtatcaaggcttaaggatatgcaccaaatgatagcagtaattatctctatctctaaaatcaatatcaatagtatattgattttaatttttttcttcatatttctgtattttatcaatgttctgtaatggacagtatcattttataaccaggaaaaaatgtatccacacacatttttaaaaagcagcagcaaaagggcagaaaattttaaaaggctaaaaatgatcccaggcaggtggtgtgagtgggattagtaagtaatctctgggtccccaaggaaacatgaaggctgtttctttgacttaaaaattaaaaatcaagtcaaaaagcaaaagcattactgagcatctactatataaaagtatatgttgtgtttaattatttaactctcagagcaatccattttcagataagaaaatgaagctcagcttgactttgctcaagtcacaccactatgaaggctgtgacgcacgtgacttcgtggagaaggctgacctatgagtcagaaacttcctctaccacttgccagtctcttttctatctaaatagtttcctcatttataaaaaagagatcactatttcagccccacctgcctcaagggatctgagaaggaacggaaataatcaatatgaaaacacattataaattgcagtgagttatacgagtgagatattataaagcaaagtgaattaggctttgataaatcaaggaggatattttttacacgaagaccatgatattgtatttgtccgtgttgcttaagtggattgttaatatttataaaaatgcagaaatcaaatcacaccaagagtacagaatcaagccagcaatgtacagagcaaccttgggcagcatttcctcttttatattatttgaatcattgtttcagttaatctggtccatttcatgtacagatgatccccgacttatgattttttgagaaagtgatactcgttcttagaaaccgtattttgtttttgtttttgtttttttgaaacacagtttcactctgccgccaggctgaagtgcaatggcgcgatctcagctcactgcaacctctgcctcctgggttcaaggattcttgtgcctcagtctcctgaatagctgggattacaggtgtgcgccaccatgctcgctaatttttgtatttttagtagagatggggtttcgccatgttggccaggctagtctcgactcaagtgattcgcccacctcggcctcccaaagtgctaggattacaggtgtgagccacccagccaacctagaaactgtattttgagtagccatacaatcatcctgttttttactttcaaacaggattcaataaattacattaaatattcaacaaattacattaaatattcaacaattattataaaataggctttgtgttagatgatttttcccaactgtaggttaacgttaagcttctgagcacatttaaggtagaccaggctaagctgtaatgtttggtgggctaggtgtcttaatgtgtttttttgtttgtttgtttgttttgagagggaatcgcgctctgtcacccaggctgaatgcagtggcgcgatctcggctcactgtaacctccgcctcccatgttcaagcgatttcctgcctcagcctcccgagtagctgggattacaggtgcctgccattacacctggctaattttgtatttttagtagagacgtggtttcaccattttggccaggttggtctcaaactcctacctcaggtgatctgcctgccttggcctcccaaagtgctgggattatagacgtgagccacgcgtctggccttaaatgcatttttaacttagaatattttcaacttatgatgggtttattggaagtaaccccatcataagaagcatttgtattagggttttaggaaaaggaggttagtgctctttatttttatttttgtttgtttcttgacgcagagtctcactcactctgtcacccggctggaatgcaatggcacgatctcggctcactgcaacctccgtctctcaggttcaagcattctcctgccttagcctcctgaatagctgggattacaggtgcgcaccaccacgcccagtaatttttgtatttttggtagagatgaggtttcaccaagttggtcaggctggtctcaaatcctgacttcaagtgatttccctgcctcggcctcccaaggtgctgggattacaggcgtggccactatacctggtggttaattgctcttaaaaggtaggcagttgcaaagaatactaaagttctcagattagttgcaaaatcttaacaacccaaggcttcatatgaattccacttccacgctgaaaattaaaactccactcttaaaggccacatcaacctgctagtcattccatttaccatttttctccccagtcatcatctttctgggtgaactgcctaaggcatttgtgctgttgctcccttctcttttaaacacaaaggaaattagctttgctgtgttttctgcttacaaaacatgcaagttcttgggggaagaagtgctcacaatataaatgtggatgtggaagaaagtaaagttacctgaagtatcagagcctagagttaaattttgttgtagttcttgctagaatttatataatttttaacaaagatgaaatcatcctgttgtataagatataaaatatgcatacttttttcccatttaacaacataatatgaattaggtgggtgtggtgtcacgtgcctgtaattcagctactcaggaggctgaggcaggagaatcacctgaacctgggaggcggaggctgcatgagccaaaatcatgccactgcactccagcctaggtgacagaacaagactccgttcaaaaataaaaaagacaaagcacaaaccaacctaatgtggacaatgtcatgtcaatacatccaatctatggttcctcccgctgcttctccttctgtctgtgcctttcactgatccatttctcctctccgccacctgcacaaagtctgttggttgttcccaaggctagaggcgcactctcttgaaggccccttttgttttctctctcagcctatcacacactacttcctgtcacggtcttctttgctgtaatagattatccaccccttgaaggcagcagctgtgtctcattcatcattttgaccctctcagcagccagcccaattaggccttggaccaattaggcctgcaaacattattgttgagtgaataagtaaatgactctgtctttgaactgtatacacactgcatcactcaccaatcatgttggttttcttttctgatatcaaaccataggtgcatgtggaacattttgtgttgactctgtgtggtacagggagaaacaaaggttcacagttcctacctcagaaagatagcccctagccactaggcagccaccatctcatggccatcatcctactccaggcctttgtcattcatagttgaactttttttgtagtctggtcctttttttttttttttttcttttcctgttttactctgccctcattctagccatccttcttgctggagtcacgttaattttctcagaatctgatttcaacgtgacctgtctcattcatggtcattcaacctcaactcacagcaaggcctgaaatggctgttgctggctattgttccgagctcccctcccactgttccttcacatccttcttccagtgtttctggtccagtcagtcccatatgcagcccttggcatacctgtactcaaccatttctgccttcctagaatttccatcctcttcccctaattccttcccagagtcccagtatccttttcaattagcaacctctcaatgtggttaattcaatgttgtgccttaggaaatgaaaggttgaggacaccttgcaaataggtgaaaccataaatactaaatacaagaacatatggatgtgtggtacacatttttttatactttcttggcacaaatagttcactactgtattttttatagttttaaggatatattctatatctccaactacattatgagttctttagggaaggatacatcttttgaagttctcaagctcctagaactagtgccttgcaaacagaaagaatttataccttttgattgacagaaaatatacagtggactaagaagaccacagtgtcagcaacagtttcacctgaaatagattggagaggagacatatttcattttcacaatgaatgttgttcggtctctccttcctttttcctttgtattctaggttagttctaactttctacgttggaccttcaactttctgtttaatcacaaatctcctcctccaattggtatgtgttaggtctgattttcttgtacgtttatatcagtagtgcttaccaaaataagtagacagtaatcgtctattgagagaactgttaaattaaggtcttcactataacaggccaccaagctgtgcctaaaatgacaaagtgctatgcttactgacttggaaggatgtctgagacatatgtttggcagaaaagagtaagttaggaaagagcatgaagagtttaattccatttatataaaacttttaaacaacatgttatatatattaccaaaatgttaacaatagttatttctaggcaacggtatttcttatattgttcaatgttgtttgaaggtttttttatagtgagcatcatttttataataagggatagaaaactatattcctgttggaaaatataaggattgcctttcttttcatttggtagactattgccagagcctactgaatttcatttttgttttctttttcttaagaaacatacaaaaatgcccattccttttaaaatcatcagttattttacattccaaaaatattgcagtgagttcttgtagtcaatgagttctacggactgaatttcacttgtggtaagtattctatttgggatattatttttgcatgttactctgaggaagcaatttcttggaggaaatgtatttttgaataaaaactgtgttttataataattcaatttaaaactctgttttgaaatacagtccaacttttctctgatttttaagatgaaagaaaataagcagtagtcaagttagtctcctgtcaaggtcaacaggtaagggacacttggatgttgttagaaaatgacagaccttatgtacactgggtaaactccagaatattctggatagactcagttcctgtatctactgaacacattcaagaggctgaagtggcttcttgttccccaaaatgtacatcgtacatagctaaataaagctactttggcaaaagtctattcctcaatcccaccagatggaagtagaaccaagacaaggacctatggccattagaaatctcagggtggccgggcacagtggctcacgcctgtaatcccagcatttgggagtcggaggttggatcacttgaggtcaagagttcgagaccagcctggccgacgggcaaaaacctgtctctactaaaaatacaaaaattagccaggcgtggtggtgcgtgccttaaatcccagctacacaggaggctgaagcatgagaatcacttgaatctgggaggctgagttgcagtgagcccagatcgagccactgcactccagcctgggcggcagagtgaaactgtgctcaaaaaaaaaaaaaaaaaaaaaaaaaacgaaaaaaaaaaccccaaaaaaaacaaaaaaaaacaaccaaaaaaatctcagggccactccaaagacaaccaaagaatatggctgaattagtagtgttttaaataattttaagtgataatgtcagtaactttaggatagtctgtgctagggatcatgatttttatcacaaatatggtaatgaatctatacccaaaatagaaacaaaacatgtccatcttcaaatgaagccaaaggccagaactgctcactcttgcttcatcaaatttaaactctgggcttgctaaagtgtcctgtatttttcattaagggtacttagcaagcgctggtaaatacttgttgattaaattacctgagataaaccacacctgacactgtcaatctttccttgacaggcagctcaaatgtttctgtgacaactaatccaatgtgtgccttcactcaagaattcaattcattgagaaaacctgcccaggtgcaacatctagattcacaatgaacttttgattttgtattcatttattccagctcttgtcatcctaggaatagttgttttcaaaatagggatcatctcattagcaggtagtgaaagccatggctgggaaaatggaagtgaagctgcgactgtgcatgactgctctgaacgtctgaaatgagagtgccatgtatttctttcttgacggacatctcaagtcttttaaccattaagactccatttgtgcctcttggatccaagcaggcttgaatgcaatggaagtggtttatagtcccttgctcttacaacttgcagggacatgtgttatttggaaattgtgactgagcggacccaagaatgtaaataatattcataaacctatggagactcgtgtgactattttttttccttgttctaggcacagaaaaaaataggtcagcttaaaatatgtttacattggataaaggattaggcaaaaataaaatgtttcaaggattcctgccataagtgacagagaaagagagttgtgggtttagatgaagcaaggttatcatgcagaatgggtaagaatgcttctgttcctggaagacccagagttaaatgcagatgtccacacgagggtcggagttacctgatcacatcgagagagtgctgggcagatggatggtgagcaccactctacagagcacccagtgattttactgaggattaaaataaaaaaccgtaggaatgggctcacagtgaacaaagcacaccagacaaacctctggttatgtttttaaagattcgtttgctattttcactttcagctgagtttacttataggcacattgtgcacatgtaccctaaaacttaagtataaaaaaaaaaaaacctaccgaaaaaaaaaaaaaagaattacaagtaaactttacaaagtatatgcactgagaaataaccccattaaggctggagatcagctgttatttaaagtcatatagaaaaaaatgctgacatagctagacatggtgtctcacatctgtaatcccagctctcaggaggctgatgtggaaggatcgcttaaacctaggaggcaggggctgcagtgagcttgatggaaccactgcactccagcctgggcaacagagacagagcaagaccctgtctctaaaaagaaagaaaaaaagtgctgacatattgtttacaaagaacagggtacatactagaaatcacattcttgaactgtaaagggtgctgatatgtataaatacagacacctgtattacatatttcaaggataaaataatgtaaataggttattaaaaatgggttctggccaggcgcggtgctcatgcctgtaatcccagcactttgggaggccgaggcgggtggatcacgaggtcaagaattgagaccatcctggccaacatggtgaaaccccgtctctactaaaaaatacaaaaattgctgggcatggtggcaggcgcctgtagtcccagctacttgggaggctgaggcaggagaacgcttgaacctgggaggtggaggttgcagtgagccgagaatgcaccactgcactccagctggcgacagagcaagactctgtctcaaaaaaaaaaaaaggttctgtattaaaattactgttctctttctgattgatcttcaagtaattccatgtacaaacctgaaatgaaactgtctcgtgttactatggtaactttgggtgagaatatggtagagagcgcatgaacttgttcactgctgtgacctaacttgtgaagaaagataaattatagcatttgaaatgtctcacactgaaaaggaaagatcatttcattaaggaaaccacagtaaaattctatttcttagaacagtatttaggatgtggaggcattggtaaattatcagactagtattgtcaatttttataaaaggtcttgacatggatgattatggtgtaatagttacacaatgtcttacagattatatatgtcacacagttatagacaattctggagatgataatctattaaagtagttcaaagagagtcccacagaacctcttttgaaatcactgatttcaacttactaaagatatgggtgtacaacataagtgaaacattttctactattcatatgcagatgaatttcattctagctcagaaacatttggaaactgacatcacacgtgacttcaagctattaaatgttagtgatagcaccttagaaaaaccaatggctttcaacatgtgacagtttgtgtctcaagtcaaaaatggacagtgatgtgtagaaaatcaaattacataataacaattcctattactcttgtggaataggctgtttcttccaccaagtcagtgatgtttctgagatcataatgttcactgtaaatttaaagggatttcttttccatagcactcagcaagaaacgtgtgctaaagactgaggttccttggaaacatgctgaaattctgttctcaagggtgtcagaaccatacgtactgcaaataatttatgaagtcctattcattgcaataagcagatggcttgctatctgctcagacagtactcccttggggtagtaatgtgcttatctgaagctgggagtcaatatattttgtatgtggacatggaagaacatagataaatcatttttaatcatagcaattatacttactcaaaatgaacttggctagcaggtaacacatctacagattggaatggcttcttaaaggctatcccaccttggaaataatcctggtatccgcaacacatgatgttttgtcctgcttcttgataggatatctccttagatgtgccgttcttcaaaaagtggtatttaaaataaatgtgtcagtctcacagcagggtgaaattgggctgattaaaaatgccccattccagaccactgatggcgacactctaggtgtggggacctggaatgtgcatctcctatttcaggtgcttcttgcgcctcactgttaagagtaaaattttacatctgtgaacccaattccggtttcctcccagctacagctgagaatgccttttagaaaaatgtgtctaacgtgggcacttaaccttgcatttaaaactgtaaccaaatactcttactttatattcctaaaaacatataagcagaaacttatacatgctgaattgagtatataccactaaacatgttagaggtaggtagtagaagattcttttattttaaaaaaaattacacgtggtctacaataatttttccttttaaaaagcttcaagatatacagggagatgcactagtccagaaatccagcttgtcctttaacaaattatacagtttaactttcttcacatattgccacatagttaattcacagtataatcttatttgtatttggaaaagaagaaataaatatacaatattgaaataggttcaagaatcaagctcgatttgtttccaagacttggaagaacttctttttactgttccagttcctaaaacaaaaatatgtatcactttaagaaaaatcaactttactattcaaggaggcaccttaaaactgccttctcattttttagatatatcaatgaatccttagagcattatcattctaaatatttcttgccaattattttgtaaatgattatgcttaggactattttctagaaatactgtcttcagagtttctgtgtggctaagcagcactcagagatgaattattaaactttcagacaaaattatgtacataaactacataatacatatgaattgtcttcaactaatgaactagacatctgtcatccttcaagtattcaaaagtgatcttattttaatgtttgctgttcagctctaatcaaaaacttggttgaagttagcaaaatatttaaaaaataatacccaggctgggtgcggtggctcattcctatagtcccagcactttgggaggctggggaggagaattgcttgagcccaggaatttgagaccagcctgggcaacatagggagaccgtgctctacaaaaactgagaaaaataattatccaggcatggtggtgtgcgctgtggtcccagtacttgggagtctgaggtgggaggatcgcttgaacctgggaggccaaggctgcagtaaatgtgattgcgccactgcactccagcctgggtgacagagtgagatcctgtcacaaaaaaggtgtgtgtgtgtgtgtgtgtgtgtgtgtgtgtgtatcctttgtcccagtgattttactttagaaatttatcatccataacaatagagcaatgcacaaggatgtaaaagaaggaaacccttgctctgtctcagcacaactggaaacaactttgatgtcccccagtaaggactgattaataattagcgttcattcacaggtggcttccaaggcagccagcaaaaataacagtggccactgaaaacataatgtgtgccacatgaaaaaagcacacagatagggagagggcaggatactccattttctattttatatacatctatctatagctcttgaattttttcacaaggagtatacttacctttacaattcataaataaattttagtggaggtggctatcctgcacaaggcaacgacatgtaaaagggaccatctaaggggatgcctcttggcctcctacatgttgttcaatgctaaataactgtacaaaggttgtcactacttcaaataaaacgtggttactctgcaagataggcaatcaatgccctttggctaacataactgaagttcacagttgctatgaaaagaaaaccattctaattttcagaaaaattgcagagcgtacctttcatacctataccctaagttacaaaatttaaatgttaaatgtttcaaaatggtatatagacttaggaagaatttttccttggtgtttttttttttcctttaacttcctcattggattctaggaagaattttcatggtaatatcatatgtagtctttacagcttgttttatttttttctaataaagctaattcagttcacagttatctaccacttgcggttttaaagattaactcataaagaataaacaaattgtttacgcaaactttgtctttaactggaagttaaattatttttaccaatgacaaaggtgaaaatgtgttttgagattctttgctggtagtatctcccttttgcagacagcagactgtgagaaaatagggctatcacacaggccatgccagagggagaaaaaggaataaccaatatgagacaaaaccaccaagtccactagatcttcaacatgacaatgatacggcctcaaaataatgcattgtgttttaaagggatagcaagtaaagttttccgaagataactgtggttggccaagaagacttaaaaataaatgttaactgtaaccttttttttttttttttttttttttttttttgcttaacaaaaataatagaaaagaagctgggcacagtggctcatgcctgtaatcccagcacttgggaggccaactcaggaggattgctttaggcgaggagttgaagaccagcctgggcaacaaaaacaaaaaaattacccgggcatggtgatgtgtgcctgtagtcccagctacttgagagctgagatgggaggatcccttgagccctggagttcaaggttgcagtgagccatgatctcccattgcactccagcctggatgccagagcaagacacagtatcaaagaaaaagaaaaaaaccaaaagaggtagaagggctcagcaagtgctttccacattcgcattcccttaaaatcgggatgctctaaagctagaggacttttaaaaaacagaaaatactacttaagtattttctggtcccatgtgaagtctggcaaaagacagaactttaaataattaaagagggctaatcacgaagaccctaagtctgcaggaaagatgaaaggggtcttcctaccaatcctcagatccttgagactgacttcacagcacacaattggaaacaacttaaggtctcacaactactcatgaaatatatgaaataatattcaaattaaaaattttatatagtagaatgtcaaaatttagattcggttatcaatgaaataacagcaacaacactggtaattgttagggtatctttacagctaaagataaaattatgttaaggtcctgtgtgtgcaatctggaatcaattcgtctaaaaccacacaataaaagtggtttagaggcaaacttaggacagcataacttttcaggtaggttaaaaaaaatctcgaaccaagagatgacaggaattggtgatctgctggcagtgagatacaagagataatgaagggtgatatgggtactgtggggctgccttccttttccacacaaaattcttatgttttaagtcatttagagaagacagatttgaatgtgaaaactcatgatgctcacaaatacctaatcctttaataatactgatgtatatgaacttaataaaagtgatcattatacaatataacagatattcttatcaacaacaacagttaatcattgactcctagataaatattaatcaggatgacttccaactaatccttatagccaggctgcaaacataataagggttacataaggcattttcctgtttctacaacatgcctctcactttgctacagctataaaacctctaaatatcatggcatatttttcaaaagtcttctggaccgtttacataaaatgttttgcttacttcccaacagcccccgaaggtgaatactgagaaaaaaaccctggctcctactcccagctgacgctg

SEQ ID NO: 2881 - DNA, 100000 bp, Homo sapiens
cctgttttccaactctaaattttaccattttgcattctctccactataccatgctgtgtagatgaagtgaagtgagtggtctttctgacacataccgtttctacctgccttccaactcggccctttctaaaacataccatcctcagcatgcactgcggtggtagctaccagtagagaacacagtgggcagctgcttatcctgtttcctttgccaatcaacaataaggaaattgtcataggaaaaataaattagacagctgtgggctttcgtttttgttttcaatatcaatttgctaggcagcttttggttttctattgtttgcatatctgaaggcatggagtgatatatatatatatatatatatataacataataatgttagaaaagggctgctttaattttgctttcaatttacattggtagcataatcaaaacaatacatttgcttccccaatttagtcccctgaatgatgtctttatggagtggcacttttacatctgtttcctcagagccaacataagaaacatactgtggtgaatatctttgcattttaaaatattgttatgtagggtatcatctagtacttacgatgtttttttgaaaagcaaattctgctcacactataaacccagaaaaccattgcgttttgatgaatatatatcctttcttttagataataagagctttgaaatctttgggttttcatttgctttgggggtgctaaaaatacagcactaagtttcacagaactatagctgctctcaacaatatgtaaagttttcatatcttattttccccttttttactaattggtgcttgtctttattctgtattaatattattggttacgttagttatttagttaagtttttcattaaaaatggtacctattgtgtggcaggcactgtgcaggtactaggaaaacaaaaataaacaaaatagtaagattttcctctaaaatatgataaagatttttttgttgttgttaattagagacgggacttgctatgttgcccaggctggcccctaaagcttagcctcaagctatcctcctctctcacctcctgaatagttgggactacagacctgtggctttatagattattttggagttgaaggggtgtgtccgaaaagatgaaattaatggaatatctgatatatagagaatggattagagcgggcaagagtggaagcaggtaatcaggaggatattgtggtggaattagagggtggtagtatataaaagtaggccgggtgtggtggctcacgcctgtaatcccagcactttgagagtccaggtgggtggatcatgaggtcaggagattgagaccatcctcaccaacatggtgaaacccgtctctactaaaaatacaaaaaatcagccagatatggtggcacgtgcctatagtcccagtactcaggaggctgaggcaggataattgcttcaacccaggaggcggaggttgcagtgagcgagagcatgccactgcactccagcctaagcgacagagtgagactccgtctcaaaaaaaaaaaaagtggtggtagctgtggtgcagaagagcttgaagatatatttggaggtatacccttaaacactgatgatggattaggtatcagggataaaggagaggttggaacaaaggatgatctggctttttgcttgagcacttgaatgatggtgaccttttctgagatggacaagggaaaaatgcttaggtgggaaaaatatgagtgtcatataggatactaaatttgagatggatacaaatttgatcagaaattcaggtagaattttgagtaaggtataataatgtgaatctctaggagagataatttaaaagatatgggcatcagcattagatagtatataacagatgagatcacaaagaagggtgtttacagaggcaagaagatgctctagggcttcctggaggctccagagcttgaggcacttccatattagatgctgggtaaaggaggaaaagtcaacaaaattccaaaacaacactgaggaaaccaagagtgcagagtgtttcatgggggaagggataagctctgcatgctgttaaaatgtcagggaagatgaagaaagataagtgtccattagatttggcaagacaagattattgattaccttgaaaagtgcagcttcatggagcagtaaggactgagaaaaacgaaatagtataaagtctgaagtaaactttcagttacagagaaaagattgaacatttgcatctctaacgcctcattaaaagaacagtaacattttgtttgtttttttaatatcataaaatgaaagccaacttcaacttgttgaaggagaggagataaaggcaccggaattttagaagcggaaagcagaaggataaatgctaaatgacttagcagaatacagaaagccaagtcctaagttaattttaggagagaccacaggcaaccccatttgtgtgcagaaatatagaaagtctcagatatggaaatactagtcacctctgcaagtggggtgaaagtggcactgaaaataggaagttagtttaaaatctttttaagaagcagttaggcccctggattccattaaaattctgagcactgggctattgcctatctcccactctagcagaggggaagagggtaactacagatggtaatgaatgggttctaagaacagtggacccaacgcacactgacagagaagtacattctagaaaaaagggaattgtgtaaaagcctaaatcagcactgctcaatagaaatataaagtgagcacaaatgtgagccacatgtgcaattctaaattttatagtagccacattttaaaaagtaaaagaaacaagtaaaataaatgttaatgatatattatatttaacctgatagataaaaattttatcatttcaacatataaacaatgtaaaagtaatcaatgccacctttttaaagtcttgaaattgagtgtgtaatagcacttatatagtgtatagcacagttattgcacatctcaattggtctagattcatttcaagtattcagaagttacatgtgactagtggctaccacactggaaatgcagatctagataataaatgtcagaagcttaatacccttccctcattacctagctccaaaacactgacaggaaggcttatgtctttcagacagaaaattagactttttttttttctggagaatttaaatggcccaagaaaacagaactgacataccaacaatggtgagtctccttggaaatctcccagtcaaatcacccaacaatgaactcagttattgacaaccccccacccacctcatatagcacttcctatcatatttttattgtttcattattaatatgagcaaagagacaatattatatattaccctccaatgtgaaaaatgaagacgaaacaaaaaagacaaaaatgagaaaagaaacttggaggaaaaagagataattcatggagaagacaacttcagaggacttaatatcctcatagagataagagaaggtattatatcagaaatgcagtggctcacaccttaatgccggcactttgggaggccaaggcgggtggatcacctgaggtcaggaggtcaagacagcctggccaacatggtgaaaccccatctctactataaatacaaacatcagccaggtgggtggcaagtgcctgtaatcccagctacttgggaggttgaggcaggagaatcacttgaactggaaggcagaggttgcagtgagccaagatcatgccactccaggctgggcgacacagcagacatcatctcaaaaaaaagaaaaagtgaaatgattctttaaaaaggtaatttgaaatataaatataactttaggaaatcagaatgataataacaggaataaagggctcaatataagaatgaatggaaattgagcaaagccaaaagataaattgatggaaactaaaagaaaaaagaagggaaattgcaggttcagtctagcaggtccaacaccagagtaataagatttccagaaaaaaaggacagagaaaatggagaggagagattatcaaagaaatgattatagaaaatttccaaaatataaatacaggaatttctggattgcaccggcttgccagaacaatacatagaaacgaaccacacaaaggcatatcaacaggaaatcaagagcattggaacaaagagaagatcttaaatcttccagggagaggatcacaacatactcaaacaactgattaggaatcagaattgttttatttatttttctaaggacaatctgggaagtcagaacactgtcaaaaactgtctttaagtattgagaaaaaatgctttttaatttagcatttactataaagcccaactgtcagtcatataaagatagaattaagctgttttcaaatattgaatgcctcaaaaatttacttcccgttatcttaattaaggaagctactggaagagatgattctctacaaaaaagagagtaaccgggagggaacacatgggatgaaggcaacaggtatctaactggaaaggaagggaatgggtgtgcccggatgacggtaaagggaggcccaggaccacagctgtgcagcaagcttagggaatagggagagatatcactaatacaataaaactaatagaatatctgttatgtttgaatgtattagtgacttactcagtagtagagaatttggggataagttaataataaatacatagtaaacaaacaaatagaaaaagaggcaattattaactgcagagaaaataaaaatggtacccatacggaaatgtaattatagaataccacacagttcagctgtgaatagcacttacataactgaataaagtgagttctgaatacttatctaaccaaaaattacgatattgttaacagtatcagaaatggagaagtgctaatgtgaatgtgggggtgggtgagcctgtacctgtacatgcacattgtgttggatgggggtgggcaaagctgtgttctcaagagcgaatcaattggtaatgatgcacaaaactaaaactaaacaaaatatacttgctatttagagatcaccgagtaaagtaacaaagaaaggggtaaatgcactgaagatttttgcctctgagaactgcggcttggtggagtgggtggggatgggggaaggaggctgctatttttcatagtaagactttgtagaactttctgcttaaaaaacgttgtaaaactttgataaaaataaaaatcaaattaaaaagacaaaaccaaagaggacaagtttttgtgtaaaagctaaacacaacaaaaggatttaggtttgggattcttgttattttgctgagtggttaagagtacaagttccagggccagatttcctgggtttaatctagcttctcacttagctgccatgttaccttggacaaaagtcactactggtcaaggtcctcagtttcttactgcttacatagtttctacttcacagggttattgtgaggattaaatagctaataatacatattaatcagtgcctggcacatggtaagtgctcaatgaatgttggcaccacagattccattgaactgttaatcaaaacagaaaatactgtgaaatgtggtgaaatgagtagaatggataaacaatatggaaaaaaataaggtttttcccaataaaaccttacttgtttttagaaaatacatgcagcagcaaaaaaatatatatatgcagcagtcttgtatattctttttttcttaaaatattttataaaagcattctttcataaagtatattttaaactatttagagagtcgctgggaatgcatagctcaagctgggagtaaatttattttatagctgaagaaaggagactattgatctgaactagatctgagagaatgacctggaggtgaactgttctaatcacagcagactctccagacctatctgaccgtctcctagagaatcacagtccataaatcctgaagcagtactttcggtttaaaatgttcagtaaaactccagtccattagactgcgcgctgtgttttctttatgtcctctaaatctgcttccaccatcatcttcttgggtttctaaatatcataggaacacaatttcagctttaatttgtttaagtccaaatggagccctcttggctccgtcaactaaccagtatgtactccatctaattggggaaatctgcatatgtataaatcatatggcaacattttaggagagctgctgccaaaaagagtatgcctttgactttttttttatgggcaacataatctaaatatttttattgttaggttatactcttctgagtcctgttacaattacaggcaggttttctgaactctcttcaagacaacgttagctctacagggctgtaggtgagcaggtgtttgtgaggttgccaagccacactgtctagagaggagcaaggagctggaagttatgcgcaagccgcctagcaatattaactcctttctgtccagttggagctgctcggggatgtccgaatagttcctcttttctagcctcagtattctccttctaagtatcttctttttctttttcagtgtttcttactccaagtcatggtttttctcagatcatcttgtcatcacattttcagaaaaataattccttaccttttcatgagaatcagcctttgtgactgcatctctttgatctcattgtttgtggtctgctctgcaaatcaaagacaccaacatccagttgtttctggctttgttcttgccctgctggttaatgctgtgcttttttgttgcccatatgatcatgtttctgtgctgaaaaggcaatgcctgaaaggcatgttttgtgcctccagaaaggtgttgtgtccataattctaaatctgtgcctacctagaaaaattatactaagctctttgaaagaacctagcttcttgtgtgatatatcttaaatcataccagatattctgctttcagactgatcattcacttctaacaatatacctttatctttaaaagttgtaattatttactgattaatcaacttcttagtacacatgatttgtcttcttgtgctggtgactatcacaaagccttttaaatttctgtggatcttatcttgtggatgacagactagggtgggggcaggccatgcgtgaaagaggcactggcagataagtgcacttcctattggaaaatgatacgctttcaccattcgcagagcttcccttccattcattaatcatttattaacttaaaaattatttaatgagcattgctaatttacaaatgaagcttaacaaaagttaaataaataaatgaagcggtacctggatccatggaccaatacgagtcatgcacactatggaccaatatgagtcatgcacactagcttcctagtaatgacagagtatacttatatgatgattgggatggtgatatcatccttggcttgaagcaaacagccatgtgaatgaacagggaaggaacacattcatattgttgatttctgatcaccagaagaaagagttccatgataaataagtttaacatagatcaacgaacatctcatatgaatgtcttagaatttgtaatttgctcttgttattgtgaatctctaattgagaaatgataatgtatatagcattttgcaaatttgatcacagaaatagagtatgtgtgtgtgggagtggattttgtgggaatatactttgatgctgctgaacaactgaacagccctgacttctttcactcttagaataaatgaagattatgtctgacaaagttgtacaggaaatggctctggctaactctttaagcacaactctttgactctcccttgctcattctactccagatacactggctgcttgctgtgtcttgagggtcttgcactttctttctctctggtatgctttgcccttactgttcacctttttcagaccctgacttcattcatattggtcgagtatcaccttctcaaggtcttctgcctcatcctctgctttgtttgttttttttatcatagcatgtatctatgcctatgctacttacttgtttatggtctgtctctccacctcatatgtaaattcctggagaataaaacttcatcttattattattattatttttaactgtactctgagcacccagcatctggcggaactcagtaaatatttccttttgattgaatgagaagaatctacatcatatattaaactggaaattaacctagagccatatagagaaattagaaatgtgggaaaaaacctacaacaagccttattctgtggcaagcataagacaactttttattctgtggcaaagagtaccatattgggcttctagagggagaagctgattgtgcctatgaaggacaggccagtgtttttctttcttcaggagcacagctacttacatttttgctactagttccatcttgccttgggctggtgaggtgacagcatgaacgttccattttgatttaggggaaaaccatacagccaattcagttcgcatttatataaatacatccactgaagagaaaactcaggccaactataactctaaatagccatgatgtctcatgtgtccttgaagcaattgatatgaaatctgtggataaaaattatttattctgtggtctgccagatttccgggagatttgatattccctcctatgtttaaggatcagcagaaaaagtctccagtttagaaaatatgttctaaaaattatgcatcagttattttgcaaaggaaagaacattctaaaagtaatctgaattatttatttaatagtagagtaaaaatatttttttttctttttctgatttttgctttcaaccacataatcctttgacagtgtgattagtagtttttgacacatctggaaatggatgctttctcatccctttgaaaaacagctttctaatctgttttactttagagataacaagatccctctgcaaagcagttactttattaaaaaacacccaacaagcataaagggcacatctaaacctcgcggttatcaactctcaggttttcataaatatccactaggccctgtcaagttcaaaaatagtctcagatggaaatccagtattggttaagaaaagcacaaatattcagccctttatgtccaggaaaaggcttttatatgtattgatgctaaaatggttgtgcaggaaatacatgaatgatttttgccttgtttaaagagattaaagttggcggctttgaagtaagtatgattcagagttagggaaagaaatgtaaaatcacaacatcaacaacaacaaagtcccatactcacaacagctacaatgtgacaccaagcccgatgccctccccctttcaaatggaatggctcctggaagtaggtcaaaatgcaccacggaaaacacttatggccctgagatccaccctccagattgcgtggcctctaggatacactgtcactatagcattttcaaccctgagaatttaggaagttactattcatataataatctacttattccagaatccagcacaccaatttatgtagtttgaccaccaggtggcaaaagttgcctaggaaaactatccagctgctttaaagaaaaaaaaatgaaacaaaacaaagaaaacacctgggccttacacctctcctggcttattctgactctatattaacccagagtgacttccctgcattcatttgtagtcccataggatacactatcgccataagaactcaggttaatttattgcttaaattttttgagaggtaggctaataggtaagggtacttaggacaaagaaatagggatctaccctagttagaaggaaggaaatcccaaaggcaacaaaatcagcataaaaatcacctgaatgagactaggagcatggctaaatcattagctgcatcaccaggaatttctggaactaggaagctgcaagacacagtggaggaagcactggtttgaagttagccctctgttcaaatctgacttcctacttgtatgtagttgaacaaattatttaaactttctaagtcttggtttctcatctgtagaattgggatattgggataatagtatctttgtcataggctgatgtttatgaagtattagttaatgtacttgagatatagcagagcaatattaaataaatgttattttctccctcttccattcactccaattgcctcctctaccaatcctattccattgattacttcctttcgacccacctctagattaatgaaaagggtaagatgaccattagtcaatactaacttacacttattctctcatgttatcactttcttaaaatttattttttctttttttatccaatttggcccataaccacttattttttaaatgtttttaaaattatgaaatataacacacaaagaaagtgcatgaaacacaaatgtttaatacaatgaataattataacagtaaagtctcagcctccagacatcttatgtgtatcatttaacaagcacagcctccttattaaactttcatataattctaatttttttgtgtattgttctgagttttctacatacacagtatttacaaataagatggttttatttcttccttttcaaaccttatgcttttatctaaaagagaaaaagtcttcttgttggcatacacctctgatgcaatattgaatacaagtgtttatagtggatattctctgatctcaaagggaattatttcaacttttcaccttgatatataaggtttgttgtagtaaatgaaaaataacatttatatgattgagtagtgtttcttctcttgctagtttaataagattgtttcataaattgctacagagttatacatgctatttctgctctattgagattatatgattttctcactaatgtgttaattgatgttatattgattttacaatgtatatattttcctttatccctgttataaatgcaacctgtttgtgatatatgattatcatttagtatatgttagtcagttttcctatgttttatttagaatttttgcatctatgttcgtgaatgagtttaattaatgaattactttaactttcagttgtaccactatccttgtcagtattcttataaagttttgctagcttcataaaatgaatagaggaggatatgctacttttctattttctggaataattttgttaagattagaattatttctttcttagtgtttggtatcagttaccaatgagatcatcaggctaagtgtgccctatttgggaagatttttgattactgatataattaattggataaagactactcaggttttctatttcttcttgggtcattattggtaagttattcttttccataacagcccattttactttcacatttagtcaaagttgtttatattatcttgcaatctttaaatttctgtagaatctgagggaagtctctgtttctttattccttatatgatttttattctgatatagttttattctcgatagagttattcatgggtttttatgattaaccttatataaagatttatcaatattgttagtctattcaaagaaccaagtttttgcatttttgttcttctatgtttctatgttttctatttcattgacgtaattttcatctatgttttctatttccttatttaatattttttgttgttttccttcttccactttattttgatttattttgtttgtcttatctaacttaaggttgatgtttagttaattaatctttagcttcttttagaaaaatattatttaaagctataaacttcttttggagtacctcttgcattagctgcattctatagttttatactcagtttttcattatcatttggtttgaaatatttcccaatttctattgtaattttccttgacctaggtgttaaatttggtgttgtttaatatgttaaatttggtgttgtttaattttgacctaggtgttaaatttaggtgttgtttaatatgttaaaataaacctataatcacaagacgctatggtataatggaggccttaatataggcatatacataattataaaattgaagaaaataactaatgccataacgagagtgtagattaatttttttatttttctttatagagtgaggtcttgctattttgcccaggctggtcttgaactcctggcctcaagcaatcctcctccttggcctcccaaagtgctgggtttataggagtgagccacagcacttcaccagaagtgagcttaattatgaccctggaatgctaagagaggcatttccatatggacacatccaataaacttcatggaggtgccactgaatcctagtcatagtcaaaaagagaactcagggtggaggtatattgtgagggaaaggtaccacagagattgaaaagagcaggctgtgcagagtaaatagcctaattctgttgggctagaacacagagtgtgtgagcaacagcaaaaagatggaaaaagttttgggaaaagtaatttgatactactggagaagtaggccaaggaattgtgttctatttgcagatagtaggaagcctttgaaagctgtaagtagagaaacaaaatagctatattttaacagattaatctgacagtgatgtgtaaggtagctcagtataaatttagaccaatatcctcttttgcacctcctcatatagcactaatatagcactgtttttaatgctagtctacaatgcagtaatagcctgagccataagtgggagaggaggggaaatgatgttcactgagcattgatttgaaccaagctctgtactggacatttcattctgttttgcagatgaatgtttataattttagcacacaatcacaataactgtgtaacactaatgatgaaagttttaatgatgtttgcgtgctaaatttactaaggttaagtgtggactaagaggaattaagatatttttaaaaacagggttgaaataaagagaacttatggaacaacaatactcagtaagaaagtttaattaaccaataacttaaattcaaataatgcatcttaaacattttttgatttatgtgtactataatatgtcttacacacacacacacacacacacacacacacacactttaacttacccagagactatgttggggctgagccttcatgatgctctcctgctctaacagctgtctattatcagggatgagagtttgagattattcaagtcagaatgcttcatattgttagcatcacactgactagatctgaaggttctcggttgctttcattatcttgcacagacattgacaaattctgatccaaaatagtgttctgtctttgattttaatatctattcagtgtaaggaacatccatgagataaatatgagaaaaattgacgatcataaaatacaagaatgctttccattccctccatgcaggtacctgctttctgcttggcctcttgagtattcattttcatgacatattgctgccttattgtttagcaaatctggcagggttgtcccacggtatgttgaacatttcagaatctgaccccacatcatcccagaaggtttcagtttccctttttcatcaacctcagagagcttcaggcttcaaaagtaaacaccttgaaggctcgttctacttcattccagctcaagacatctgtaagaagcagaaccagtgctgctggaaatgttcttattagcacatggtacagggttgacagaggataaccagggagtctgtctaccagaaagacaagagagtcacgccacaatggctgttgactgattttaaacattggctccccagtctgccgcaaatatcaaaggtacctgaggataagaaacaacacagtaaagataaaatttagcaaattataatgctcccaaactgcttcatagccaatcaatattaggtgtccagattcatttgcatggactttccagggtaccatattggttaatatgcttacacaacttattatttttgagtgaaagcacccttttctcctgttgtaattaaaacagagaaattatttacttatgcctaatataggctattatattgactgagtttttcattgatttgggctcaggaaaggcttcctcctgtgcacataaactgctgcagtattttcctaattgcacttcaaagtttatcagctttcagcaggctttataattgtgtatttaccttttacagcatttattcacttgctcactctttcattggttattattttctacgtattaggcttgtcacaggtgcctgggatttgaaagaatcaagatttggctcttacactttagaagttcaaggtagaggaaggagaagtagaattaacaaataaacatggaattcaatcagaaaaaaaaaaatgatgcagatcaataattcagaagtaacctccattttctctccagcaaagatgagaaagcagcaggtcctttgggaaaaaacagggagattcagaagagagacaaggaagaggtaaagagttacagaaggaaggagagattgctcatttgttcatttctcaaatattttttgacccctattaggcatcattaactataatgaaagctgggaacacaatggtgaacaaaataggagctccctgctctcatggaatatccattctagtcgttggaaacagataaatgtaagagtaaaagagatgacaaaaagaataaagccagctgaggggacaaaaagtgataatagtcaggaggggcttctagtttatataaagcagtcatggaaaagtcctctgaacaattaagcaaaatgtgaaggaagtaggggagcaagctgtatggatatctgggggaaagtgactgaggaaggaaaacagcaaatgcaacgatcctgaggcaggggtgtgacttacatgttcaaggaatcaagtgaggccagtgtagatgagggagaatggaacatgacagcttgataggtgatggctcaaaagtaggtggcagacagtttaggttcttattgttgctttttgttttgttttgttttttagacaggttcacccaggctggagtgcaggtgattctcccacctcagcttcccaagtagcgggtctgcaggcacgtgccaccacacccggctaattttgtattttttgtagagatgggtttgccatgtcggccaggctggtctcaaactcctgagctcaagtgatccacccgtctcggctcccagagtgctggaattatagtcatgagccaagcacctggcccagtttaggatttatctgggtgactgctgcagagttttcagttacaaaggcacatgatccaaccaacattttagagggccattcaggtggttgtgtggaaaaaagactgttggtaaaaaattgaaagcctgtaaccagctggaaagctattggaatagtccacttgaggggtggtgggggactgggctgggaggtagtgaggagtatggtgggattgattgcagtgtgtgagaaaacagagacagcggtgggcgcggtggctcgctcctgtaatcccagcactttgggaaaccgaggtgggtatatcacgggtcaggagttcgagaccagcctgaccaacatggtgaaagcccatctctactaaaaataaaaaattagctgcgcatgatggcgtgcgcctgtaatcccagctacttaggaagctgagggggagaatcgcttgaacccaggaggtggaggttatattgagctgagatcacaccactgcctccagcctggcgacagagtgagactctgtctcaaaaaaacaaaaacaaaaacagagacgcagggatgactccaaggttttcgatagaaagtagttgtcattcattgaaataagggagtggtgaagggacaaatttagggatgaggaatcaagagcttggttttggacttgttaagctgatgtggcaaaagggaaaagaggaagaggggaggagcaccaagggtccaggatggggctgtaagcagcatatgtgtgaggtttcaatggtggcagcaggaacaaaaatgctgtgctggtagagagctgagctgaagggagaatggagtcacatcttaagccagaaggagaagtggaggtggcaggacacagaaaaaggacagaagttcaccccctactcaggaagggggtagttagtgcacaacagaaatgacataccaggccctcgaggctataccctgcatgtccaggagtcatggtaggactcagaagttcctggctttttctattactaagcctacttaaaagtggaaaagaaatcaagataaaaatattttttagttcggttaggcttacaaaggaaatggtaaggagaatatgcacatgctcttttcttttctaggtcaaatgcttccttgtcaagtaaagatgttgtggaagttaatgtcctttcttataggtagtatctacatattcccttaagtgggaatggaatttgctttgggaaatgactgcctatatcacaaaatcccagtgaactcagatgagactgattctagatattgtatcttaatgacccctcttcccactgtcttcaaagagcataaaaggctcttcctgctgtgagaagctgttagcttgagtcaactcctgctcagcaacatgctgcagtgggctctctattcatctgtgtatctctaggtgcagagcgggtgcttaaaattgcaattgtaccatcagacttctgaggtggctttcttcctgactcctgctcagtaatgtaaggaattgtgttctactgggtatccagagaccagaatgttttctttttttttccaccactgtataatcctaaaacaaataatttaaccctgctaggatctcagctttcttatctgaaaataatttcgattagattaattccaaggtttctttcagttaggaaattttatggttctatgatcatctttctagatacaaatttaatttctggttataaatagtgtgctcagaattttctctaagataggattaaatatgagcttccagtagcactggttacaagatatctacatctgcctccaagtcacactctttcttagttccttcctgtcctcatgtgcagagatggtccacggtatgctcacattagttttaccctggtgaacattcctgccaaattcagattatctcgatcctttctttttttttcttctctaattaaaaaaagaaagaactgtgaaaggacagaatggaaaagacagaagaaaaattcttctggaacctgtgttttattgattgtgggtggctgcaacaaaggatataagatgaaaattcaaagacaggtatcgctgaattggagcaaagttgcatggtcaggttgctcttccctctttccagataatgtctctgcaatgttactgtaatttttacatatttgcaatgatgataaaagagtgcagtggtcaggcagaagacagaaggacagcattgtctggaaattatatgcgtgcatgcgtgcgtgcatacgcgtgcgcgcgcgcacacacacaccacacacacagccctttacttctctgtaagtaggatgggattaccacatcatctccaatacgtcaatgggagtatttgggacagagatgggggaaaacgaggaaaaaagggaattatttggttaagaaaacacaacgggaaaaaaaccccagtgtatcaaattgaagagtgttatgcttatagctatgataacattgctaatgacattattcaaacaagaaagttgtagtcaatcaaatacccaccttagcctctgaaaggtctttcaataatgaaaatactttttgtaaataaggtgtaattttaagaggcatatatgaccattaattaaattgagtttaagctaagacaaagaatggactcaccactcgtacaaaagtgcataagctcatgaattgtagctagacgtttaggttgttccatggtgggggtagagggaattgaagaaattcccacagtggcaacttggactcatctcctgctcaatttgaactggatcaaaattcttttggtcctgatgaaaaagagcaaatgacagaagacattagagtaagctgttaagtgccttatgcatatggagaaggctaaactgataccttcaccctcattatttgggaacaggggaaatcaatggtaattgggaaagacaacttttgggattttgctgaaggtcaaaaagctagttcctatgttgccaggatttcctgggcacaaaaatgactgattcttcattcacagtgacaaactgccaaagtctcatatatattatctctctcttttgagatccttttctggcttctactagtttttcatagcagcagatattgaagcaaataattataaggttttaatgaaaatttagtggtggtaacaattaattgaattttaattagacctcaataatcaggcaaatttcctcggctgacatcatttttccctgtatcaggtccattttccaggtcctactttgtatgcaagtatctattttgtacattacattttattagtgttgatgaagttatctaattagcttctttcaactgaatagttataaacacacttcccacatcggttttccttgggctaacctgattattattacctgtagtgcgtacttcttggggcgtgtgcatcatgatagttcagtaggagggggcctttgggcactgctttgctttcatttcttcttcagataaaaatatgtcatgaagattctatgcaaattgaaacaatattgattaaagagaggatctatacttttccaaagcatgaagactctgctatctcaggctatctgactttttctccctctctgagagacagagtgagggcagaagggacacaatgtgagctgcgatctgtggtctagcccgtctgctctgggggatggctcccgcagactgggtgggacgagatttcttcagttgcaacaacctgttgaaatcaacaatgagaggaattggtgtaagggtccgtctttagtgatactcactgctcattgctgcattcccactgcttagtaagaaccagtccattctgggacccaagtaccactgatgacacaaaatggcaggaaactatcagtgatcaccagtaaaaggaaaagtgttcgcaatccatgcattaaggtagatataaatttaatatttctataaaatagataacatgaaaatggtaacaataagtttttgataaaaatatttcatgaagatctagtcaaatagaataataacattttttcttaatatttactctatcttaaagcagtggaagagtgctcatataactttggattcattaaatatttattaagtgtctatcacaagccagtactatgtaacacatcttcacatgtgatcatttaagcctcacagcaatcttgtggggaagatattattttccattgtatagaggagaaaactagggtgactggccaaagctcaaggaattgagtggaagaaactggggttcaggcccaatcctcattctttcttcaaaaatagaaagttattagattatgagatcagtaaatgtaatagtgtctcctttaagtggggaaagtgagtctagaaagattaagtgccttgttcaatttttcatggtaaacaagtaaaagaggttgaacataatcaagttaggcacctaatttacagcttttccctttaccctatatcctataatcacctctatgatttcctatccctctacaagtttcctcagccttggcattaatgacattttgcctagataattacttgttgtggggggttgtcctgtgcactataggatgtttagcaatgtcctggtgtctacccattttatgcaagtagcacccttccagttgtgacaaccaaaaatattccagacatagccaaatgtcctctgggaacaaaatcacttcctgttgagaaccactgcttagaataacaaaattgcatcctattctttaccttgtagaaacaccctactgtcagaagatcactcactgtttccactttctatcctctgatcatttctttgacccacttcaatcataaagatcactcaaatctgtttcttctctgaaatgtccaattctaacatcccatcctataaatatcatcccatcactcctatatttcagttttttcatccccttattattattaagccttcttcattcaacatggatctactggttgacttctatttgttaggcgccgagctcattaacttcttctttggtacctggaacatagtagatggttaataaatgtttgttgctttaagtttataaaataaaacaagaaaggataagataaataaaataatgatactgcaagttctagagagttttgtacttttatcatttattgatataataaaactattgatcttctaaaaacttcatgagcaattaaaggcaaatattagtgtgattatctaattggttagaaaactaagacaatcaaaaccagaaaaatgtatatgggaggtatcagagatgatagagtctgaaaaggactttaaataaaccttttatgtattaacagaaaaaatgtgtcacatccatgcactaaaaacaagaaaggcaattgtaaaaaaaaagtagagaatttacaaattaaaaacattactgccaaaacaaacttcaatagcagactggactccctgaagaaagcattagtaggaagttaagctggaattccaaagggataaaattgaaagaaaacttaaaagacaaagagaaaaaccctgaaactccacacccattcaataataattaaggtaaatcgataggaaaaatgatatttgaagatagaagctttcttagaatcttctgaatttaacaaatatgtatttagtgtctactatgggttaggttggttattgtgtgctgagcatacagcaacgaacaagactacattgttactgcttgcatgagtttatattctagtaggaggacggggaagggaagaaaaaaatagctgatcaatatattcaaaaagaaaagctgttgataagaaaataaaacaaggtgatgtggtagagagtgctgtggttgtgtggggagagggttctttagatcaggtggtcagagaaggcctctctaaggattgcacttctactggagaccctccagaaagagagaaagctttctaggcagagaaggtagagtaaaggttaagatagaattaagcaacatatttgaggaaaaaccagaaggcctatgtagatacgtgtgtgtgtgtgtgtgtgtgtggtggcaggtaggaggtgagatgacaggtacatctagaaccctatttttagggcctttatgggacagtgtaaggaatttttatttcacacagaagtgactggaaatcagatgataattcccttacaccataaggacaagtatgataaaatcatcctagacatagtcttgtgttatcaattataaagagaaaaccctaacagctgctagaaagaaagtaaagattatcttcaaagaaaaaagtatcagattgacatcagacttcttaacagcacattaaaaggaagacgacaatgcagaaatggcatccaaatacttttctgtgcagattcctaggttttaagtcatttctgctacttattacttgaacaaacttgaaaaactttttgtgctcagtttccttatctgtaagatgggtgatacggtttggctctgtatctccacctaaattcatctcaaactgtaatccccacgtgtcgagggagggaggtgacgggagaatgagggtgtttcccccatgctgttcttatgataatgatggaattctcatgagacttgatggttttaaagtggtagtttgttcctgctgtcttgtgaagaaggtgcctgctttcccttctactatgatgtaagtttcctgaggtctctccagccatgcggaactgtgagtcaattaaacctccttttttataaattacccagtctggggtagtatctttacagcagtgtgaaaatggactaatacatgggggataaaaacagttcctacttcataggattgttctgaagattacatgagttaactattgaaagcatttagaacagtgcctggcgcctgtaagtgctacatatgtgctactagttgaatcacaaactctttcagatacacatagaaccttcacaatgaccatgttacatcaggcacacaggaagcctcaggaaatttgaatttgctaacttgcagaaaatgcctactgattaaatgttaaaaaattagaaatcatcagtaaataatggaaatcaaaataattcatgggttaacatgtaaataaataaaagatttagaattgaatacactgaaagcatcaggatgcaaacaagaaacactcgaaaagaaatgtatagccttaaataaagcaaaaagactaaaaataaatgagtaagctttcaattaaaatgaaatacaaaataaatccaaagaaagtagaaagatggaatgacagagatgagccagacacggtggttcatgattataatcccagtgctttaggaggctaggtgggaggttggcttggggccacgagttaaagaccatactgggcaacatagcaaggcttgtctctccaaaaaaattattttaaattcgctgggcatggtggtgcatgcttgtagtttagatactcaggaggctgaagtgggaggaacactgagcccatgagtttgagattgtgaatatgattgtgctactgcactccagcctaggggacagagagagaccctgtcttaaaaatattaaataaataacaaatatataaataaatagatgaagaaattaatgaagagattaataaataaaaagtaaaaaggtgttgatcaatgaaaccaaatcctggttctttgaaaagaccaaacaatagctatgcccttaacaatcatgatcaagaaaaggaaagcacaaataaataacatagtcatgaggaaaggtacatgaccagatacagaggaaattttaaaacatatttaagtgatagtgtaaagcacattgtatcagatttaaaactccagtaaaatacttattaagacatatcattaagaaaaaagctgatgacaaaaattggcctcagaaatacaaaaatctagttaaattacaagcatgaaagaaattttaaagataaagactattaacaacctcacccacttgtccagttctcttccttttcctcttccattaaaatgacaccagacacagagtattgaggatatgtctaccaaaacttcagggaatgttacataaatggcttcagagcatagcaaaagaaaagaaattgaagctgaagatttaagcagactttagtttcatctgaactattctaatctttataaggagaatgcacttaggtattatgagtataattttaaaatagtgtaaaaataacagaagcaggaaagatgaaacgacttactcaagtatacaacctgggaaaaagcctccccacctgtccagcatacaatgcagtatcaggggcacagaaatgaattcctctcgaattggattcagcaataattgtaatatctcatgtctacttcagttgtgatgactgaagtcactgtaaaatatgaaaataccattgcccaattaagttgtgttctccattatttccatcaaaatttcatgcaaatttcaaactatgactatgcactaataaatgcaggagctgtaggtgaagggaggctgaagtaatatggagggcagtcattatctcttaaagtgccagctcatggtgttgatcctccacagccgatttcatacatgcctggtggtggagcttgcggttcttcatactgtgctttctttttccaggagctggtacagcaggttgtggagcctagaaaaagaataattaaaaagaaacactgagatacccagctgagagatgccctcatcaaatgctggtatgatgagatccaacagatactcaggttgtataattatgttcacaccacaaaatcatctgctaatattagaaccaaggaaaagagttttgcttgatgaaggaaagaaggtaatggtatagacattattcagttttcctaccagaacccactgagcaattgtggagaaagtgatggggtgatggggcactgagcacaaacaggtttttcttttttcccctgggtgactcagagtcatcccattctccctctcccatccttcagcagttctccattgcctacatgatataaaccagactctcaacttagcaccaaggagattcatgacctggctcctgcctctccaggtttagtttctgttgttgttcttcacttgcacatgcagcctgggatcactgaactaccctgtgctcctggcttgtgccataatacgcttttccttgacctccatatctttgtacatctttgcccctgtcttgagaatatcattaatccctttcccctatcatgctttccattaggcacttcatactcatctttccccacatcgtaatcctggttcagttttcctgacttccctctctttgctctactcctgtttagatcagggaccaagtttatttcttctactgcaagctgagatgactgctctcagcattcatcatgctcgttgaaatcattgttgacttgactgccatcctctttaaaagttaacctcaatgaggagacagggaatgagttttcattattgtattgccagcatcttgcacagctctagcacatagcaggtgctaaataaatactgcaattactttgtcaatatctttcctgtcacagatgttattattgtaccaagtgctgacaagaaggttccatccttgcctttgtaaatgtctggtagttgggagcttcacaaagcccccatcatgtagctatcttttatgccagtaggcagtatgacctaatgtaagtatttatgtaactttttcttcatatgccttataaatatgaaaataaagttgtcagtgaatcattcatcccactaaagacattgagcccatgcctacctctgaagttggcaggcttctaatacaggtttctcattaaccacttgtggaacattaataagctgcatgctttcaaatagtgctggtgctgccttttccaatccaggatgtcatacatcaagcaggcaatatttcaaaaatatcagtgcccaatttcagctacaagtgagagatttaatggcaattggttatagttttacactgttggaatcagatatatggtatatatctcttaacagttatgcccatcactttatacaggaaagcaaacccctaaatctccaaaccactgaatcccaaccatggtgacccatttatattcctgaacctttcttcttcttctttgtttaccgcaatatggactgtttctttggagggccgtatggctgcctaatgttttaagagcctaattaatgcttcaactaaagaaatataactgagtcatgagtttcagcagtgtggcctgtattcttagtatctcaaatctaaacacgttaggtaactttaatatcctcagccagtgacaagctatagatgatttcttactggctatgcaaggaacacaatggaaacactgactctgctttgtggatcatctacccaatacgttgcatctacacaagtatgtgggcaatcagtatttcttcttttcctccaagctcccttctttcctttcacctgttctacctctacagcaaaacactaagaaatcctaatagactttgcttctataatacccacaagttttatgagctgacaagcaaattgtagctcagataccctattacttgggcttttgtttccagaagtaggaaagcattgtgatggctgggtctgtctcctggaagcaaagaagaatgaaataggctcatcctatgtctgagttcaagaagtaaggtgtatgagatggttccttgtatgcagaagtccagtgacgtgcacagctctgccaatcacttggtgcacctggttgctggctggcttcccattcccactaagaccaaggcttcttcagtcagcttcaatctggtattgcttgcccaaattctggcatagaaatatgtttttgtttttgttttatttctaggaaatagagaaagcttttgcccaatgatcccttagcttaacctagttattcattttaaaatgaaacagcaaatcacatgctaaggacaacaaattatttcagcaaccgggtcttaacttgaaatgttgccaatgtcttccagggacagttatcatgcattgaagggatttatttgatgtaaagcttttgttaccttggttcaacagaaatatagcctgcttgtttcagccaaaggttggaaaggttgcaaatgctttccgccaatcaaaggggaagagggctcctggatggatcctatcttggatatgaagccattatcaatttacagatatagcttaaagtggacactatgcatttgatctgcttctactaggggtagattataatttttatgcttattaatgatcttgtttaaaatgaactgtgatcttacctattaaattcaatggccttttcttctaaatccaatttaatgactgaaccattttcaagactttccctccccatcatcctcaatgctagtgcttcactcacaaaccatatcttacagaagcatgcatgggctttaaaagattactaagttggacccagaccacagccctggtataagatgacattcagtaaatacctgcaaattgctaatagatcagtctgggaagctgggcaacacagacctaattggctctgtagagacctgatgttttcattgttgacagttaccttcatggcccaactagagaccctttacattaatgttcaattctgaagtcaggaatgttctaccataactagactggtaatatttttccacataaataatttttctgaactttaattgccatttaaactgttccattctgtatttttaaaagtaaatatagccactaccactttctttaaaaggaagtgattaaaatgtggacactgcagtgaaagcagagtgctagaaatggtgctcggtcctttgaagttgccattgtataccacagtgtcacatctatgttctgatgatgcaatggactgtacacgattttagactctgcatttcagcttatgcagcctgtgcctggaaagtaaagaagacacacagtagggagccctagctagagaggagcaaaaggtacttggcttgaggctgacttagaagcagcctcctctgaatgaattatgttcagggattataaggctgggatctcctgtgtcttgttgaacaaaaaatatacacaagtcctgatagggtatgtagccaggccttggcccaaatgagaggagcagtgtttctccaaatttaaatttgtggatgtgggttttattaaccagagattttacatgcttgggagaacagcggtctgtggaagagagagtaagaagctggatttgaggtgggatttcaggatcccaaggaatagcctcttccccctaaatatgtcactttttttagtataatctagagtttcaagaaaaagggtggaatgttcatatgttacttggaatgccaatatctccaggatagggaaacatacgacccaaggcaacatgaaatagtgaaggacagaggacagtgggtccttctctgaggtcagtttaggaggcaggagagtggaagacaaagcaggaaagctgaacacatctagatgaagggtggggaggggcaaggacaaagggagtttggagtctctagtctttcccagaaccagctcgccttctatcacagcttttctacattcagcttcattttccacgcagagaacaaggctgaattcaccaggatatcagacttaagtgtggtgtttctacatagtgacatctaatgccttggctgagagtctttataactcaaactgatctctccattactacttattcaagtcctgtcctccttcagggttcaagtctggccaccctcttcagcgttttcacttacttcattaagtgctatccatctcaaggtaatagaaccagggacactcagagtcagaagtgtccatgccccatgcctaccctcagctgtagaaacagttccaggctttgatctcactcttcttttagacagtggctttttttttttttcttgtcagctacccacagtcactgtgcagacacccatccacccccacactccactttgcccagcctttttcagagcactcacttgatatggtccttccctagactttgctttcatttcagctcccttaacgctgaaatatatcgtcctgcagggtattcaaactccgaggcccctgttagttgggataagggtcaactagaaagagacctgagagatttttgtagcagagggatgcctgaatactttccacaacatcttcgataagtagtcatttgacctccgttttgttaaaaagccatcatgcatctgtcattcactacttttccaatcattccatttttctttgtctgaattagtaggaaacttagagtatgtttcacataactgagcaccagaatgtgggtccttgaccactgcttctctgtttcacggttttagtcttgcctctctgcaaatcctcaatagcaggggccagtaaaccccactcttgggaaatgcctgataactacagggcaaagtcaagtcatcctattaggatagaccttcttggccaaatatattaaaaataagatttggggccaggcatggtggctcacgcctgtaatcctagcacttcgggaggccaaggcaggggatcacctgaggtcaggagttcgagaccagcctggccaacatggcgaaaccccatctcactaaaaatacaaaaattagctgggcatggtggcacgtgcctgtagtcccagctacatggaggctgaggcaagagaatcacctgaactcaggaggcggaggttgcagtgagatcacacactgcacttcagcctgggcaacagagcaagactgtctcaaaaaaaaaaaaaggggggaaaaaagcaagggcttagaaaagcaatgtatgaactgaaacataaaaagtcagacatgtaattaacaaactatgaaatttactattttaaaattaatacatatgaagattctaattactgctagaacattgttgagttttaaaacaaagccacgtgtcaccatataaaagaatcaccatcttttgatcctcatctactacatcttattatttgttgttaattcacacactaaaagctatgaatcagactataactatcattgagcattccatattatcattatcctgaagataaaaggcctagctcaatgccttgtaatcagcgctcagtaactatctatgtgatgaataaatggacaaatagaaccactgtgtcacatgttaaaaccatgcactctcagtaatgtgtgtactaacatcatctcaccatctgaccagtcagaaggaaaatcagctgctttgaccatgtactcaatcgagcaacatcaaagagatttgtttcaggtttctcattattcaggactggttccaagtcttccagaaagttttaagctcttttatggcattttctttcttcaatttttctgcttctaatctaataatagcaacatgtttatattaccaaatgagagtgttaaatgttttcccacttaagtgaacatggtgagtcatatgcattgcaagatatctgtacagtaccagaaaatgtaataaaggaatgtaattttgataaatttttgaagtcggagtatacaattgtgaaatcagagactttatttctgagattcattttaaatatgaacttatctcatgccttcattttatagttaggcccaggaagattatgactacgtcacacattttgggagctaaatatgttcaagatttcatcactcttagatgacaatctacataggaccagtttttctgccatatcactttttaaacaacttagtgtctgctacataactgattacaaatgcagtttatctggttctccttcttaattgctgaaaacagagtggatcaatgttgtatgtttcagttaccttttggtcacattaatagcaataggcttctctgggtatttgtacttttactgtaaaataatgacagatttccataaattatgcttaaaaatttgcccgaaatatttatgcttattacatctataattaaatagagtttctactactaagatctcattattctattataaagtctattttttaatattttattttatatattaaatatttttacagagagactgtgtttggagcttatgcagcattttctcattcaataataaaccatttagtattataactatcctttgagatcatcaggaatagcctagtttgaacctcaactttttaacttaatagctgcctctagactgagagtccatttttgtaaatggaaacaataaaacatacttcctaggcttgttgtgaaaaccacatgaatcaatgtactaatgtccttagcattgagcctagtcccaagacatgtgcccaatatatgagacctattatattatcaagggtagctatttctaactttatagagcagcaatttaaaaatgtagtgttaaaaaattgggatgtggctgcataagatacaaaacactgtgcaaatgatattattaataataacaataaaagcaacagcatatggcagaaaaaacttgggcatctggtaacacaatcttcaccaaattctagttctatttcctaaagtatacagtggctttttgcttcccttcaacagagtcatctaggataatcttcttagatgaagacctcaaggctcaaaatggctaaatggtacatgattggaacttcatcccacaacttgctagtctaaggctaggaagatagcaccccaggatttctcataataagacaatagcagaacagggcaagaatctaaggctgtgacctccctgggctacttgaactgtgacttctgcaagaacagattattaacagtgattcatccagcgctcctttaggtaaaacttatagatcaaatactccagaaaaggcagttggataaccaagtctctgaactgcagtctgttttctgtggctataaatacagggtatgatacaggggatataatacagggtatgattttaatttgcaaaatttacaacacttggctggtgcaagcagagtaatggcaaatcaaagtcttgaaaagatttaataatgtactaattgtaagactatgttttggcagaaaattatatttgtactttaaggacagtgggtaatattgaaggactcagtaagttggtagcagactgcataccttctgactgaagaagaacttcctgctgctggttaactgctgcaggtgtgtctgcagaggttcataattctctgaagatattttaatcacgctggttataggatgccaagctcagccataattgctaatagctgaggattgttaaagcccacaactataattaatgttgggcaccatcatctggctcatcgtctgttcaaaataccataaagaagagcagcatcattgtaaaagagagcaggttgcactcagccagttcaatggctatatacattatgctgcatttataatccctctggcttgccaaaaatgatccagttggctggaatgcagtcatgtgactgtttttcattattgcccttccagtaagacggctgtgactattttacaaaatattaatcacttttgcaaatgcgacataggcgtaatagaaggacaaacctatatggggcttgtgtcatataaaatgtgtgcttgggtttttgttaagagtttagcctgtaacttttttgggtctaatctcttttgagcaacatctggctttactcctgaattagaaatagctacagctttgggtattttataagtagaggtgtttacaggagagggaaataatgaatatggacatgctccttaaaaagtgttgtatgcacttatgtcaatgggtgtgaatcccgagtatggattatgtataactatgtatttattgcattaaaaatttaaaatacatagtgtgcacttactttcctaaatttttctcctttatttggccctggttatactattttattaatattaagacatgatcttttttagaatgtgacattctgcagggtaagaataattgttatactttaatactgatagcaatggtacaaaaaagcactacatttcacaaaagcccattaagatcaatatataaatagtgaacagaggcacaacttttcatttttaagttatgacttttcttctatcactaaactaatcatgttgatattgcccatggacttcataatatcacttcttccaagtctactggatttagacagagatgcatgaggggagtcaactggtaaaggatgggaaagccctctgctatctcattaaatatgcagataacaacaggtagctcatttgcattcaagggaaggcaggaatgaattattacagctgcctaggatgaatcatttttatattaagaaactaaaatgaaagaaaaattcagtgtctctatccagggcaaaatgattgtgggggagttggggtaggaaactatgtgctcatgtgagtcaccaaattaactgatctgattttattaccactgtgtttcactcatgaccaaatcactttttattttgctttataattatgtctgactttcctatatgtgcccaacaagaagtaagctccttggcagcacagtcaactggctatctcagcctttatttgcactgtgtaatgtgcctagcaagacacatgcttaataaatatttgtttaagagagccaggtgtagtggccatgcctgtaatctcagcactgtgggaggctgaggagggagagtcacttgagcccaggtttcaaggccactcttggcaacatagagagatcctgtctctacaaaataaattaataagtaataagttgggcatggtcatgttcctgtattcccagctactggggaggctgaggtggaagatggcttgagcctgggattttgaagctgtagtataagccatgattgtgccactgcacttagcctgggtgacagaggaagaccctgtctcaagaaaaatttgcttgcagacacaaatgattgcaaatagaagtctttttctctcagggtgtcatgggagtaagtgatttatgtttctatgagtgaaaaggctgggaaagactaagcatagttattgggatgactgctccaatcgcacacagttcatgaggcaggaaaattctagtgtctctagggcaaaatgattgtgggggaatggcgtcaggaaactatgcgctctatgtgagtcaccaaattaactggtctcattttattgcactgtgtttcactcgtgaaaggcaccgccggcagcagcaccttactgaccaatgtaacattggtgtggtcgtcttctcctctccgctttaactgggtggtctttttcactggtgcattgcctcaggctgatcctttccctttcctttggcaggcttggcacttggagcctttttctcttgggagattttgctttccctttatccttttctaacttaggtttgtcttctattacctgaatgagagaacacttttttctccaaatcaaacagtgagcaagcaatggcttttctactccaggtgaattaattcttcatctcattcaatcacttgtatactctttattttttaggtatcattatataagtcagcatagtggagattccagcttgagactaagttgtgacaaggcactttatgcatgaggactggaggagtgggtgccagaaagctggttacacagagacttctggagagaatcagtcctatgggagagccaagtgtggcctaagaagccaccccagtggtttgaggcagggcgggaagataattctgagtacataatggtgtcaggaatttaggtttatctttagtctagccctggggagcctctgtctgagtctcagagagaggtggggttggttattaaaacaaaacaagaattaaaaataaaaaggaaaatagatgttttgctaaaatctccttgataagcatttcatagtacaagtaatgtattgaccaatttttaaataaagattaaaagattattggggaacttagcattaactaagtatttttattataatcctactgaagaatgtgcagactaaccaatggttgctatttgatgccttcaaagatggggtcagaataaaacatcagttggaagatgaattccttccatgatgctctggggcatgcttagattggcatgtaccatgtaaaattaattccgccccaacaccccgcttttctttctttcccaacagttgccaaaaatgttggcagtacttcataatgtaattacactttcagttcatgtgtttattaatacaaattagtttactcactgaaatgttgtggcagtactgagaagatatgttgctttgacatccagctaacgaatgtaacgcagaaggggagaggagcacttcccctacactactccatgtggcttctggtgttaagggctcttagctttggcacccagaggggcccatggcttctagcacctatggcttagtggtgatgaaactgccaccctttgtacctgctcctcagcagaaggggacatcatcacaggggcttcaagtgtcactcacagcctggggtggaggcaggtacagactatgaaatggctcacccatttctagaaagtgaagaaaaatccaactggctagagcatatgtaaatggtaaattaactcctttgaagagctaggggcgaagaagaaaatacatccctggagtggaagtgaggtccagggaaaccgctccatgccagacagaaaaaggggattggaaggaaaagagggcttgccaaagtcaagcttgccaggctttacacacatctcccttagtcgatccccaatgaccaaatgcggtaatcttaacaatagaatttcaatgagaatggaagttctgaaaatgtatggatgctggtattcatctattcattcattcattcagtgaatatttttatgagcttcagttctgtcccagccttcctcagcagcagagggaaacatcagtaaaggctgcaggtatcactccaaacactgggtagaggcagcaacgagagcacaggtaaggtacagaagagtgaaagggtctagcatttctctctgcaccaggtataaattggtgcctaaaatggggctcggctctgcccttgagctcacagcctatggggaaagaaagagaaaaagaaatacaaacaaacagataaaatgtaactataaattttcgtgactgctatgaagaataaaacccagtgtcgttatagaaaacaattgagaacactttcataagtaggtgatgaaggactctctgtggaagtgacatttggcgaagatctcaaaggcaagagtcatacacatgagaagcagggaaaatgtagtgtgtgttgtgtgtgtgtgtgtgtgtgtgtgtgtgtgtgtgaagatcctaaggcataagaggctgctgtgttccaagaactgaaaggagatgagcccagcagggaaattagcagtggaggtgcaggtagcccaagatgaggtgtgtgaggcacagcatgggccaggccatccagggctttggagtagaaataacaagtttatgtcttaactaaaatgcaatgggaagattttaaagggttttagtagaggagctctatgattttgcaagattggaaaccagaagactagtaaggaaactctccaatagtccagagaaaacccaatagtgacttagattaaagtgttggcagagtgaagaaaatagatttgagatgtatcttggatattgaaacttcatgggttgaaagattagatatgaatctgaataagaaggtacattaagatagtgctgtggattttagtttgagcaactgggtggtgatggtgtcacagagatagagaagactgggtgataaatgagttttacttaaggtggacgaatattaacagtgttatgtcaactttgagatgcctcttgagaggtcaagaaggtagttaatacacacattctctccctagaagagaaatttggctagagttacaaatgcaggtgtgctaacatacaaatagtagataatcgcatgggaagagatgaatcaccatgggtgaagtttctgagaaatatgagaattgagtccgagatcatgctagagactccaatgcttaccaatgggatagggagagatgccagcagaaagagacagcgaagtggataaaaagatagggaaaaataatagtgtgaagctagagaactaagaaaccaaaaaggtcaaaaagacaagaattggcagtgtaggtaacatgaagaagagcaattatggtggagtgtggaggtggaaaataggagggcatatcaatagagaaaccacttttatggacaactgtttctggaagtttggttgtgaagcagaccagagctctgagttgttcagtgggtgagtggatgcaagggggtatgaggtcaaggtagtatatatgtaaagtcaagagatgttatgcttgcaggctgatggaatgatccagtagagaggagacagtgaagatacggggctgaggagactgaagttctctagaagtcaacatgggaaagaacaaaagaatgtgccaatgactggaccttgatagaaggagagggaatttcttagttcataactaagaacaacaggaagaggctgggtgccagaaacagagacatcttgatggtgtgagaaaatgtttcaattttttcaagtgaagcatgaggcaaagtcatcaactgagaaaagcaggaaagaggcaggaggtttgaatagggaagatgacgtaagagttatcttatgtcaggagtgggggagcaagcttaccgaggtaatatggtaggactctgccagtggtgagaacttttgaaaatgttgagattgttaattttacatgaaatcagtctgtttaattgtgtgaattctccatttatgtttagctgctcaggaatagaaatgaaaatgatggatcactgagttcatctgggaggggttttgcgaaatgattgtgatggaaggagagaagagcaaggggaatcaagataagcagagaaacgataatactgattggatcatggaacctaagccaaacaaatagcagggaggacaatgaatagaaagtgttgggatttatggactgggatttataatgtggttgaagaattatgtaggaggatattggattatgagtaagagacaaggataggaaatttccaaggtagagaacaggacatctcaagactttggaggtgatgagggcttcagtgatgacaaggttcagggaggcaatggctgaggtggagtggaggaaataatcattagagaactaagaggccagaagaagagcattactcagtaataaaaaacatcaaaaaagaaaaaaaaagaagaatcagaaaatcagagaggcagagaataacagtgttaattccaaattgtccagggcagagatttccgatagacagataggagggtctgggtaacctgggagttacagccatgtggtcagggggctcatcaggccatcaggactgtaaacctttaaactaactccctagttaagacttgaggtacacataagtttctgacagtttgccttcctatgtacaatttgtctacagggagaaaactttagttaatgctgatgggtctgtcccacaaaactgacagtaatatttactgtagtaaattacaaggggctattctaatcatggctgtcattgtcactattattatcatccttatcattataatattacatttctatttattacattcttactatagtccaaatattctatctcgtcaagcttcacaataactacaataggtagagcaccatcttcattttacggaggagaaaactgagcttagtgagggcaagtagttgttcaaactcaaagctaatatgtggcaaagccaggccagcacccatgctcttttttaatgggtttgtaaggcacaagtcagtgcccctgagtgcagttgcctggaagcactggtaagactcatgcagggctctctaacagccaagctttggatcatacaaatttactaatttgcaacaccctgtgcaacatgttggtagacagctggccttgctacgaaaagttccaatgtagccatcaaaaacataccagaaacttttacaactgcaattttaataaaatctcagggtgatcttttgatctaaaaagatgaaaccattttagattaaattatttaaagtttacctggaagaataaacattaattcatttatgcattcattcattcatttcatatttcacagatactcctccccatcatgtgttagacagtaagaggccctctggccctccagttctcctaggtagggtgtgagagcctgtgcagccacataagtctcatccctttgaagcattttagcaaagactggagttctagaagctcaggaactctctggccctttcttctatttgttcttgggattctgggattctgcagaaaggagggcggactacaaccaaacattcaaagaagtgctaaattctagtagcagagtatagtttccagacatcatcatctttaatttgatccacaaggcaacctgtaagatgggtaattttatccccattttataaattaatacagagttgtccgaagacacacaactgtggtagagagtgctggtctgacttcaaaccctaaactcatttatttccatgatactcttgtctgtctttgatgctctcctgatttctccatacctgtctcctccctctactctgtcttcccaggggctgaatcacacttgcttgatgcccttttcttttccagagcactccacccacctcagccattcatcctgctcacttccctttctctctctgccacttctcctttctctcccattctttttgcctttgcattcctctagcaaggccaaacttggagactggagaacagtatattttaaactaatttccattaacattaaaattatcaatattacctcccccaccttcgcaaaagtattaaaaatgtttaaagtttttatagatgagtctcctctgtggcccagactggactcaaactcctgggctcaagaaatcctcctacctcagactccgagtagctgggacaacagctgcatgccaccatgcccagctaaaagtatttttaaagagacccttataaatccttatttacttctgtaaataactttttcttataaaaattattactaaaatttggaaaaaaatataaagagcttacaaaagccaccacaattctaccacttggggagatgagtgaagaagatgtgcaatgcattcttttgaattaactttctgcatcatttttaataactgttattgttctctctatataacttggtgtcctgcatttttccatttaacagtgtatatcttcagttggtagaatatgtattactatgtaaagaatttcctgggtaaagaaagattctctggtgcagagaaaatatatgtagacaataaaactgaatggaagtacctaggtctcctgggttccggatccaggtcgagatgtctttggtggatttttgaacatgttctttacctacccagtgcattctgctctctccccatggctgaccataatggtggtctacttattccctcctggattcagtctatccctcactcctcccatccttcatactgaagttgaaccaggaagtctctttgtccctttaattctggagagtgattgactggttggcccctagaattctacttggtttcaaagtgaaatatccttttgtaccaagccccaatcataggaaaatcatttccatctttcatttcctttttctcacattctgagtaaacccttctcacttatgggtttatgtttgaaatctgggagtgggaatggagttaaccagatcaggcgcattcagcaaagctgacccctaagttataaactcaagttagttcatacaaactctttctctggcctttcttgcttctgataacatggcatgcatgttcccatactaaggtcattagctcacaactttaaaaattcaagggaactcttgtcaattcaaggcaaattttaggaggggcatatccaaaaagtgcctcttccacgatgtttgaggaacacatgttccccagcatatgaaggaagagtcaagtttgccaagattacttttttttttttttaatgcagtatgtgcagaaagcatctagatgcctcctacgtgagacggctttggataggcacagagatttcttaaccggttaagttacatagcatatggagattcttgtctcagcaataaccaaaaaaagtgttggcatttcacatattcagttgaaataaagtgacacctatctagaacacttaatcttaagttattctcactttttaaagggaaaataaaaaattctccttctctataatagggcaacctagttattggatgcttcaaaatatttagatcatattttatttctaaatgacttcttgatgtcaaaattcaaatataattaatagtattcattctcctaattccttacaatgaaaggaagataaatggtaaatgtcagtgaaatgatgatatatatctatacttcatcttattcttttttttttttgagacggagtcttgtttgttgtcagactggagtgcagtggcgcgatgtcagctcactgcaacctccgcctgccagttcaagcgattctcctgcctaatgtaggctgggtgtggtagctcacacctgcaattccaaactttgggaggctgaggtgggtggatcacctgaggtcaggagtttgagaccagcttggcaacatggcgatatcccatctttactaaaaaaaaaaaaaaaaaaaattagccgggtgtttggcacgcgtgcctgtattcccagctacttgggagtctgaggcaggagaatcacttgaactgggaggcagaggttgcagtgagccgagatcgtgccactgtactccagcctgggcaacgagtgaaactctgtctcaaaataataataataataataataataataataatgcatataatattcatgtataacaatgtttcatataaaatttataataagatcctcagaatagtattttgaggatatagataagaaaacatactcacagagtttgtaactaattcactctattatgagtttatgagaaactgggttttctgagtgttcctctagttctctttcaagatatcacccatctcataaacaagctatcataggggacaagagataggctaaacaaaggtataagatcaataaatttgagagaccgtaggttaaacaatattaaatatagtggttttcacaaaactcctcatctttaattagctattatgttcttaaatatcttcaagagttgtatctaatacacaggatttccatgctcatttgaccaggagccattttttcttttttaaatggagaactaggtcaagtggccatagggctcactttgaacatacaaggttatgggaacatttttaaacattaaccaatttaataaatctatgctaagaatattatccaaaatatggagacttctatactgcaagtacatggtttattatgaaaagaaattgaaataacttaaatgctcaatgatagagaaaggttaagaaaattatgatagtcaataaaacatcacaaaaccagtaataatgatagagtgacactgtgataatgagtagaaattataatctatcttaactgaaaaaggggtgcatttttcaatgattacagctgcgtaaagaagcaaatcccagaaaaaaacagaaagaaaaatgccaaatcttaacattaattataatagggttacacattgcaaatgttttgcttttctttctcttattttctatgtagtctatgaaagactttagtactagatcagccaatgctatcctacctaccatgcagaaggacattaggaataatctctggatgtccagttttaagagattcccccaagactgagccatttctgcgtggggggcaggactggaaattaagtcaggatttcctttggatcagtggctggttagctcagggcattcctccttggtgagttttgttccttcccttgacactgtccccctatttaacctgaggatgttaaatgcaatgtaattaatggaaccagatggtgtgagtacatcactgagcacagccattggtcctacagggaaatgtctctgggcaagcatctactgattgtgagccaagagtgccatttcataattattgagacacacttaggaaggaatgtatgggggttaagagcatggtctttggagtctgacagttctggatttgaatcccagtcttccactgagagtagctgtttggccttgggaaaattccttaacttttcataccctcatttccccatctgcaaactcagaataatactctgtacctcataaagtcatttaaaagattaatgatataacatgtgcaaagggcttagttctgtgccaaatagtcaataatgatagctactataattattagctgctataatcatagcttttccatattttaaagtactactgtatgtaaagatgtatgtttctttgcatttttcctgaagtctgtaaaaagttttcattaattaaagcaagccaattaggaaaggactactctattttatggataagccatctgggggggtcattattatttctcctgaattgttggcttttgaagctcattagattcaacatccattttagtggatcctcatttcgataatccaccctcaaagaattccatccagttagtgaggcaagttatcctttcctgaaaccacacgggtccttctaaactgagttcctgctctttctctgttcgattcttaaaatagtttctgaagattttaaccacaactgaatcaaaactaaccagcctgtaattcctggtatgtccgtatggcttttcttttaaaacaacacacacacacacacacacacaacacacacacacacacacacacacaaatggcattaccttggctggtttccagtgtttcgtgtttggactggaggaagctggaaggtgtctgtgaaaactactctcatttctctttgtcctcttttggaggaggctctgggttgcttgtggcttcatcatgatgtattatcaaacgtagcacttttaattttgaattgttttaagaatagtttaccagtattacaaaaagttaccctgttctttaccgcctatcttccttctcttcaattatagtatatcaggaaatagggcaattgtaccatgcatatgagctagcaaaagaaagaactaattttttatagaaaagatatgcttctaaaaacatctaaggaaatatggacgacttatttgaattcataaattaaaagcacagtggaatatatttggatcttctcccaaaacctgtacaaacattctgaactaaacacaaaggacctaagactagattttatttggccaattatttaaatagttaatgactttttgtatcgagcttttttttcatttttttaattatcaagtgttttcttttagttgaattctcaatataaaaaatatttgggttcaaaattgtcttgactttaaatgtgttcataattaatatataataaaaagttgaagttaaaaagaaacaaaaatgtgagtagatatataatattcagataatgataaattaaaatggatcagaatggaaaccaaacaatttattttaaaattataaggaacatatgagaatatatttgttcagtacattgcttttgtaaatgtttctttcagtaaatgtttgtgaattgataaattattaacagatagaaataaaaatgcaaaagcaaatgttgcgataagatgtaagaaaatatatttctaaacaaaacactttaagttttaagatataataaaatcaactaatttagaattattgtgtgagaaagtcgtattcagaagttctaaaatactaaaatattttatggaaatacagtgcattttcttcatgatatttatatttggagttcatcaacaaggattttcaaataaataaatgttttcggatagatttaagttatttgcaattagaggccggctttgtatcccagaaatttacatgctgaaggcattaacactgttcattttagaaatatcttcttgtatttcttataatatgaattacccagcaagctttcttgcaaagcagaaagcaaagcaatgttaaccatagcccagtttaaaatgttattaaaagtagtggagttgaaaataatatatttcttcactgtatttggcaattaaaactatattatttatctttttttaaaaagtttgattgattaaaacaggatcaaatatgtagtgataccttaaaacattagaacaggtaccagctatattacttatttttgccctcactttcacccaagattttctataatttctattatgatatttttcaagcactgattcttaaaaatacaatttcaaaaattaaacatagaagataaaaacactctgggttgtacagaggtaagcaattaattaacatttgaaagacaacatctaacagatatgttgatgttaaaaagttgaggagtcagtcactaaccttgtagaaatttcggatctcactgtgggttcaggaaagatgaaaagattagctaaagtcctcttttctttttttatattctaatccacagcatggtgtcagttttacatactttctgcttgttttctttattgcaaactccttggctgacaagcattaaccttgattgtttcaactgacctcttaggcagtgggttgaaatgaacatcaatgatatcatcccacaaacaactgccttcatctcccctttacaagagtattttcccgattgtattccattccaatgagttttcatcaatttatttagcactactcatatggttgtgactcagagatttggggttggtgctttgggaacccaaaataatgggatgtcatattagattatgtaatcattggctcttaattgctcaaaagttctctcactgttctaatacttaaaagaaaataaaaactctaaggttcatgccccagttacccaggactctaaattttcaacagataaagattatttccatacctttagaacctcttaattgtattattaagttcacatttcaaagaaatgctgagtaaaataatggtgcaaaaatatttttatattgtgcaagctttaaaaacgttttccaagctactagaatattttatttgcttttacttaaaattgttaaaggaaatctacagtctactcctatgataaacaattagtgacataataagtggtaacaagtaaattgacgctctttagcacactatttctaactgctgtgggaaagggcgaagaaacagaaagtgcagaaatttttgcaagaattacagtctactttttataattcagattccatatggcattggaatttaaacaggcaagagatgtttctatactagtttcaaattttccatttttcttctgtcaagtcttaattaccctgagtatttcttaaggtacaactcccccaaacgatggaaagagtttcactagatggaaaactgtactatcaattatgttaatatgaataaatttttctaggcacaatatgtaccacactaataacatgctatatgggaaatatctctaaaaacataaagccctatattgaaaatggaaggtggcattattatttttttctacaattacttgttgaggggccaattcaaataggaaacctagattttgggggtcttgcaaaggtgaaaaggcactattggagcattttcacttttctgttttttcttccgtgaattgattttgcctttccacttaaggcataaagaaatgacttcatatgcaaatccatttcatacatacacatgacacacaaacattacatatgtatatactgaagtatttggctttccaaacataattcagctgatttggaaaataagaaaaacatcttattttgggttatgatggtagcacatggatgtgacctggtagtagtttgctaacagcattttaaaatatttttcatatgcaaatatgagtcttggaaagcacacagattgatttctataagcaaattaaatgaaaaatccaggtatgaagaattatcagatgtgcaatataggagtagaagtgatggattgctgctgaaatattcagattttatgaaggtgcagatatgcctattattttaaaaggcacttctatagagtatcatataactatcttaaatagttagacccgaactgtgagggttccccccaactgtccttttcatattagttttcccgactccctgtctcttccttgggtcccttcttggctacaactttattatataatatactgccatagaaacaatcctgggcacatgctttgaatattgttactttcatatttacggaacctatttttaatgggtttatcataattcctccagatctttggacagcctttcctaagaagttgaggtgacagccaaatttgccaggtaacacttaatggtaggcttaagaaagaggaagtgcccctggagaaacctggctccatttcattcaccacttgccctctttagaaacccaccagatcgtacagtaccttcttttcattttcccgtcgctgttggtccttaaattaatctggagaagttgaaatttcaagagtttccctatcagtggtaaggttaatttctctcactatccataattgcttttgctgccgttaacacctatacagaaacacaattattagaaaagtgatgttttataacctttggcacagtctgtcagtgatgaaaagatgaaaggaaatttatattatttgtcatactggaaagatacttcattgctggctgaaaaaaaaaagttagggaaaaaatgcctcaatgctacagagaggggcatttaccctctactttaaataaattggatgtctgaatatcgacttctttttccaataaggcagagtgcttcccacgatggtgttagaccagactccaggaaaagggtagagaaaagataggctgggctccattttaggatgactgatgggtgattcatgctacagaaagtctattgtttggcatagccagtagtccaaactgtcaactttgacttattaggatattataaattaaacagggttttataatagtggaaatgactatttagcagtcttttatttctttgtaactaaattcaaatgaaagataaaagctgtttgacaaaaggcgccatatgaatgttgctcccccttgcaacttaatgttgatcatgttggtatgcgcctaattggggtgaaataaggttattgagttttctttgggtgacgacagccactaggacatacagctgtattgtccagatgtgtggcactgacagcctgttttatgactgtgtttttacagcttgtttcccctaaatttcacacaacgctctaacatctgggcccttttccttggaccctataaccactttatttactgcaaaaaaaataaaatcacgtaaaatataccataaaagttgttatgtgtttctctttattcatgttgtctccctaataaagttcacctctgcctgagcattgtcacagaagtaatctagttgaagtattttttgacttttgtttttaagcaagcacatatttatttataaccttgggatgaattaggtgttactaaaatgttctgacatgttgctttctccccccttggagtaatcactcctggggcgcatatggtgtcaatttcaggcccttgtctcagacaatgactgtgcacactgcatctcacggagctgtgtcttgtctgagctcttgtcaggactttcctgaccagtccagttgcttttgacttgttacttcgccaagggaaataccggaagaaagggaggtacctattttcttctaactgcagaaggctctatggattaccattgccaaaatgtaactggacctcatagagatcacattggggttcccgcattgcatcacagaggggaaggccagagaaaggattcctttaaagctgccttttctaaaaaccaaaggaactaccaagtgtcagaaatctttgcaagtcagaaatccctgcaaggactctaggaaatacaggctttgctttttatggcagttctgctcctgctaacacaatttagggaaagagacatgatgctgtgatttttgggagcagaaaaacatagcagtacacctgcagaacctcaccatttaagatgaccagatcccacgtggaaggggatcctaaggggatggaggtcaggcgtttactgtaagtgaaagctgtctgactgggtccaaccccaagagtagatgtcaatatttggtttgcattttcaatgccagctaaatactgtgctgacaatcaggctctgtgacatctgattcaaaaattcaaatgtgggtttttaaaggtcatggcagtctagtgtttccctctaatacaaagatatgacagcgctgaagggaagtcaacactgaaaagtgttaccccagagtggttgtggagttcttttcctgacgacctgtgaaaacaggatattcacctatgtctggggggtttgggtgagcctgcctggtgtcatggcaatggatgggatgtctctggaggtgatttctctaggagtcatgaatgttacctcactgtattaaaatgtattcaaagcataacaaaacatcctgagagaaagtattttgcaggtcataatagttattactggtttgtctaaaactatctgtggggtgtgtttcaaacaaaaatctggcacagcatcaaagtaacagtgaggtcctgccctgacatgggagacaggagatgaggggcttcaccagtttgccaggcacacatgctctcatgacatacaacacagagagagagagcagtggtggacaggcagccttgaggagtgccctgggtggtgtctcctcccgaactgccctggggcggcccacatggaggcagacttgatgcgccacatcctgataaaggcacagcctgcccctggcaccactaggaatggcagaggccaggcatacttggctcccccagggttgctctgaaaaggcttgactctctaaatgccactttctttctgtgcgttcccaaagggaatgatattgtgaattattggaataattaatgaaaatgaaagtctatgcgaactcaaaatctgagacaacattttcatggtatatgggtcattcccaaaagaggcggaaaagaaaaatgtttacaaattaatttcatttcaaaattctttcttctgatgtcccataataacaattctaccctatcagtagccagtagtttggtctcagatgaaaaacaaatctttcggaatctgtttgaaggacaagtttttgagggaagaaaaaattaaagagacagaatttaaggaaatgtaccttttcacataacatctccaaaggtttctcctccctggccttagttgtataattaaaagaataaatctccaacattctagcactgtaaagataatttgcccatcatcttgtcaaaataagtgtgcgtacctgtgcatatgtgtgtgcactggggggtaagctagccaggctatagttataggggggatgagagacataagagaacatgtgagcagcgagctggcaggcttggggagtaattaggcaaaaatttaagcttccagaactagtcagaaaaatagtcctaatgggttaaaaccttagttctctttaagccaaaatgccaagtaaatgtgcttggcgtgatcaggaactcaaaaaagcacgagtcttaacgggcaaatgagacttattaaaatggagaaaatgttgccaggcaaggcctgtgtctcctgacctcttcaggtcagctctccaggcagaaggcctgccaggaccggagagaggctctacgctgaaagaccaaaggtcactcagttccagaatgattggtgaatgaggaaattaagcttcaaagagtgcagctgaggcagaagccatgtcatgttgtattgtgtgaagatatttaaggggtctagatgctatttttctgttagggagttgtaattctgtacacactaagaaataaaaatatttcctttatcattgtcctggctcaagaattacatcatatttactatctaatgatttgatccaacaaaaatataccaaatgagccaattatttccttgcctgaggatcaggtccacctacagacaccagtgtcctctctccttcaagcattcctcttctctctagaacctccctacattagtaagcacaagcccaatgcttagattgccctaggcgctctcatggaaaccaaatatatgcatgcatgtatgtgtgtgtgcatcatatatacatatgcacatttatacatatatgcatatatgtgcatatataagatagagaagagagatagaatggactcccatgaagcctgctgtatgatttcccttgtgtgttgacaaaagtcatatgaagcagcttgaatcattgcttaacctgctgcatattcaatctcgagtgattctgaggttgtgtaaagatttggatctggatttctcttgcttggaacaggttatgggatgaggtggcagaggaaagggcaagctgtggttgtgtgaagcagagagaagaggggtagtgaagagagatggcctgggagagcactttccctccaggagctccaaatatccaccagtttcgactaaaagaatcctttggcttcagggactttcttggaggcccatggtgtttattgcataactgtaaaaattcacaacatatgacttcatattcaacctattttggggaggtgaatacttaggattgctttggatatatgaagacctcagcaaacagaagcagaatccataagctaagcttgactcaatttaggctagcacaaggctgggcaaacaggctttcagcacacattctttgggtagctcatttctctaatatatgattgatcaaatttacttaaagtaagagtataacgttctttaccacagtaaaaaatatacacacatatatgtatattcaaacacaaatgggatatactattcatattaagtgctttgtggtttgtgtttttacataaaaacacatccaggaagctttctgtgctgataagttttgcttacgtatatggtttttaataaatagcatagtctctattgtgtgggtgtttgctcatttatttaactagctccccattgacagacatttaaacatttcagttttcctttttttctatgaagtgcatgtgtgtttttgttagtagcatttttgtcccaccaaaactgtatgaaagggtccgttcccccacttcccatataaacaatgagtatctccaacttttatttgttgatattagtgctaatagtttttctgtgatgatgaaaatatttttatctgtagtgtacaatatggtagccactaaaccacatgtgactattgagtactttatattgctagtgagattaaaaaaaaaacaaatttttaattttgtttttaattgattaaaataaaattaaagtgtaaatagccacaagtggctagtggctactgttttggtcagagaaggctatatgatagggaaaagtgaaatatagtatttcatttaaaataatattcatttaatcacctatcactctatccctcttattttatgcccaaactgaaaggaatgataccttttcagcccatccttggcaaattttattaatgcaggagatgcttacatacatgtattgaataacaaggcgtactcagatttatacagtgctaaaggtgaggagtaaggaaaatctatggcttccagctaagatattgcttgtggccacacaagaaacttgtctttgtttggatttagataaacaggctggtatggggcaagaataggaagaatacagaatttgcttctggctcctttctgttacttttaaaatccctctgttacacccctcccacttctagctaccagatacctttttgcttctaaatccttcctgccatgaaaatagaaaatatttaacttggtagctcactttgaataagtttatttataccagtggtttagctatattttgagatttttatttattatagaatgaaagaactagtggctgatgaagtattttcgagcaataagtaacaggtgtggcagtttagaattaggggtaagaggtaatctggaaatttgaaatgcctgtctggctctgggtaaacatagtttggcatttgtggtgcttataggccaggggtgagagcagcacccctgggcttccctgccggagttgctgttacattctaggactagcttattcaggggaaaggctctgaagggaaaatgaacttcccctccagccagggtcagaggaggataagcatcagagagggtgggtggagggtggagccaaacaaaggggaggcagcaattctgtattgcgggagaggagtaaaggcaaaaaaatctgctctggcaagtaagatctgggacctatctatgcgtgcctgtataggtgtgtggcatgtggtgtgtgactttagtgatatatatcagggggtcccatcccctggttagggccgttcctaatctgtccatggcctgttaggaactgggccacatggcaggaggtgagtggcagtgagggagcattactgcccgagctctgcctcctgtcagatcagtggtgatattagatttcataggagtgtggaccctattgtgaactgtgtgtgagggatctagttgtgtgctcctttgagaatctaatgtctgatgatctgaagtggagcagtttcatcatgaaatcatcctgctcccactctgtgaaaaaattgtcttccacaaaaccagcccctggtgccaaaaaggttgggatcactggtgtacatgagtgcatgtccatgtgtgcacaaaatatgtgtgtttgcacagcgcctttgatgtttattcagattattaaaatatactcaatatctaaaaacactgtcaaaatgatttgcacatattgaagagctgataaaaagagaaaaacattatgaatattttttattgcattttaaaaagaatactgatgactatttaccatttctatctaattatcctgcagcatcaaggggctatgtttattattaaatatgtcatattaaatacatgcaatttattcatcatgtaagctatgttgccatatattctatctttaaagtttattgcttaggtagcatgatataattctgcttttatcttacatcttgttatatttgcttatatcattagaaagtcagaggaatattgccccaatgtgtgtctgtgtgtctgtgtgtgtgtgtgtgtgtgtgtgtgtttacaaattttctgtttagagtgaaaggctgtttagatgggcccgattctgcacatttgatgaaatgatggaagagcagataatttgcaaatgattgaaaagggccacttgtattgagatgtttcacataagattccaatggggaactttagctcctttggtacaagatatgattaatcagtgcggaagccataactacatatgtgcaacttaatgcaaaagtacaggctctatttgcattcagtcttcccacgtaacactgcagagcctcaggcaagttacttaacccttttaaacctctccttttaacatctacaatggtggcactattgacattttgagccaggtaattaccatagaggtttttctgtgagttgtaggatatttagcgaatccctgtattccaccgagctgtgacatcaaagggatctgcagacattgccaaatgttcccttgggggcaaagttgtcccaactggaacagaaagaactacagaaagagaatatgagtagtgctgacttcataattcagtacccgaattaaatgagatgacccatgtaaatactttgcatggtgaatgacatatgcatgataatgttcactaaagtcagtacttatggttattcatacatccaggacagagttgggattcttaagattccacagcccaagttgtgagagcagagaatggaatggaatgaggagcaactgggagtgagacagtgacctgaatttattatcaactggccataacctggctaccccttttattaaccctttgtccaatctgaaaaggacaaattgagatatctttagagagaagcagagataaaagaaaaggtgtaaaaatgtattttattttggtgcagtgtataatggggaggatgtagggaaaaaatatgctattaatttcttctcaaatgtgagatggaggaattccatcaatagtttctgtaattttacagcctcctttcctgttccctctgctcccttccctccttcattcttctgcatttatttagggccaactatattgtagttattgcattacttgatcctgtatgtgttagtctatccaattcacattctttaagtaatgagtaatttccaatgaggcataattggaaaacagctgaaaggataagggtagcagtgagagggggctatggagagaaacagaaaaaagagaagaaaaagaacaggaatgactgaaacatattttctcactttgagaagaggaaaagaaataagcaatattaaactgtctatacataaatttaaaggtgactgaagatataggttcatatagatcatactgtctgtctaacgcaaatggaacgttatgaaagtgctcagaccacacttggtgagaaattcataatgatgataaatatctgtagcaggtgactcctagatcatttcagctgtccataattaaactggtatccatctctcgacaatgtcagggctgtaaaataatccagtcattggaccccttacatctgtgctgaaatgaaataatatttggcagtaacaagggtcactgaaactaaataaacaacccctttcaagactacataaaagttggtaacataatacatttgacagggattaagacctctttggggctgtaaggaagtttcagaagcagcaataaaaatacatggaaggtagaacagatctatgctttaacagacatgtataatttaaaatgtatgaatttcctacgggaggtgtacattttgaacaaccaatatgtgcatgtcaaaaagcacggactattttagaaatgtttgctggaattactcttcaaagaaggaaaaagcaaagcttctttttattaaggagtgtttttgtttttgtatacttgcaaaatgtataaaggcacatgaactgaatgtgataacgtatggaagaatgacataccaagttaagggcttttctttaggtgttattagcaacaaacgattctactatcatggcaatgttttgttttggtttttagactaagtcttttccttagtctaagatgctcccacccctctgaagtcattcttggtccttgcagtttagtgaccttcccttctgaacaaccctacaacgttttttgtatatttcctaagggatttgctgtctcttgtattaaaattatttgtgcacagggtttgtctcctctactagcttggaagttaaatcctttcagattcatcttttgaaatcccctcacagaatctgatgcatatatagcaaacagtatattcactccttaaataaacataagaatggcatctctagagctttttgtttttggcttgaaggtaaatgtttttgattgtttatagctgcaattacaaagctttaggaaatatttcaagtagtagtaggtgctcagactgtgtaacacacaaatggttatgtagcacaaccctgtgctggacaaggaccgttccaggcacttcacatattccaatccatttaattttacctacacttttgaggtgagtattcctatcacctattttattagatacagaaactgaggctggtgatcacacagccggtaattagtagagatgggatttgaacccaggctatctggttcagaatcctgtttctagtcaacatattgtgtggcctcacagtgggccttttcaccccttgctggagctactggactcccatcttgggtcacggtccctcttctcctgggcatggatgttcctagtccctccccagtctccatggccaatccccatcttagctgcaagagcctgagagcttttagcccaggtttttatgtttaaatattcttgctacccttactagttttgctcctactgatgcctcaactctaaatagctgagctgtttcttttttcctgagacctagtggggactgtgactcaggaccctcagtcctgatagctccagctattgctcgtctcctggcctgagccatatcaattttttaaaaaatttgtattattttttattgtattcatatatatatatatattttgacatataataatggtaaatatttacgggatacaaagtgatatttttacacatgttagagtgtgtaatgattaaatcagggtaattagcatatctatcacctcaaacacttatctttctttgtgttaggaacaattcaaaatcttcttttttagctatttgaactacatacaattattagactatattcacctacagtgctatagaacactagaatttattcctcctatctatggtaattttgtatccatgaaccaacctctccctttcttcccctttttcctccccttcctgactgtaataattgcgactccactctttacatctataagctcacttttagctccacattgagtaagaacatgtggtatttatctgtctgtgtctgacttatttcacttaacattagatgttcaggctcatccatgtttttgtaaatgacaggatttcattctttattatggcagaaactattccattttgtataaataacacattttctttatccattcatctgttgacagacacgattgattccatatcttggctactgtgaatagtgctgcagtaaacaggagggtacagattttctttaatatactggtttcttttcctttggataaatacctaataggggaatggtggacatatagtagttctatttttagtttttttgagaaatctccatactgtttttcataatggtgcactaaaaacctttcccaccaacagtctatgagttcctttttcttagcatcctcaccgcctctgttattttctgttttttttttttttttgataatagccattctaacgggtgaaacatatctcattatggttttgatttgtatttccctgattagtgatgttgaacatttttcactagctgttgccacttacatgttctcttttgagaaatgtctactcagatcctttatcctttttttttttttttttttgagacagagtctcgctctgttgcccaggctggagtgcagtgcgcgatctcggctcactgcaagctccacctcctgggttcatgccattctcctgctttagctcccgagtagctggaactacaggcgcccgccactacacccagctaatttttttgtatttttttttttagtagagacggggtttcaccgtgttagccaggatggtctcgatatcctgacttgtgatctgcctgtctcagcctcccaaagtgctgggattacaggtgtgagccaccgccccggcctcctttatccattttttaattagattttcttgctgttaagtttttgagttcctatatattctgaatattagtcctttgtcagatgaataatttgcaaatattgtctcccatctataggttgtctcttcactctgttgattgtttccttcgttgtgcagaagcttcttagttgatgtaatcccatttatctatttttactttatttttgcctgtgcttttgaagtcttatcataaaaatctttgcttatatcaatgtcctaaagtatttctccaatgttttcttctactgttttatagttttagatcttacatttaagtctttaatccattttgagttggtttttgtgatggtgagagaaagaggtctactttcattcttctgcatatggatatccagtttcccagcccatttattgaagaagtttcctttccctattgtatgttcttggcacttttgtcaaaaatagttgactgtaactatggatttatttctgggttctctattctgttccattggtctgtgttctcttttaataccagtaccatgctattttggtgacagtagctttgggatacattttgagtcaggtagtatgaagcctccactttgttctttttgcttagtatcgctttagagaatttgggtcttttgtgattccatattaattttaggatttttttttctatttctgtgtattaggctttcttgcactgccctaaagaaatacctgaggctggattatttataaagagaagaggttaattgactgacagttctgtaggctgtacaggaagtagggtgctggcatctgcgcagctctagggaggcctcaggaaactcacagtcaactgtgggagtagacacttcacatggtgaagcaggagcaagatgggagtgtggggaggtgccacacacttttaaaccacccgatctcattgaactcagagcaagagctcacttatctctaaggggatagcccaagccattcatgaggattcaaccccatgatccaaacacctctcaccaggccctgcctccaacagtgggggttatattcaacatgatatttgggtagggacaaatatctaaactatctcgttctgaagaatgtcattgtattttggtagagattgcattgaatatgtagactgctttgggtagtatggtcatttgacaagattcattcttccaatccatgaacaaaggatatcttttcttttttgtgtgtctttacagttcctttcacagtgttttgtagtatccattgtaatgatagttcatcttcttggtaaattgattcctaggtggctgggcacagtggctcatgcctataatcctagcactttgggggccaaggtgggtggatcatgaggtcaagagactgcgacaatcctggccaacatggtgaaccctgtctctactaaaaatacaaaaattagctgggcatggtggcgtatgcctgtagtcaacctacttgggaggctgacgcaggagaatcgcttgaatcccggaggcggatgttgcaggggccaagaccgcaccgctgcactccagcctggcgacacagcaagattccatttcaaaagaaaaaaaaaaaaagattcctaggcattttactttatttttgtgcagctgttgcaaatggattgcttttttgatttttcagctagtttgttattggtgtatagaaaagctgatttttgatgttgattttatatccacctttaccaaatttattagttctaaaagttttttgtgaagttttaggtttttctatgtataaaatcgtgtcgactgcaaagagggacaacttggtttcccttttccaattttgataccctttatttctttcttttacttgattgctctggctaggacttcagtactatgttgaatagaagtggtgagagtgggcatccttatcttgttccagttcttaaggaaaggctttcagtatttccctgcttcgtagaaatgactcaggctggcagccacctcattttctaccttccttctctttaaatcttaaatcattttcctaaaaatcctgctttcagctgagactagtgattgagaccctactagttactgactgactcatgctgcctgcttagcttctgaatatggctggtccctgaacttcctgcaccccaacactggagcactagatgtgttatttagcctttggtttggataccatgttccacttctcagactagaggttgctgattgctctccatcatgtcaccttccttcataggagaatctgactttttttcaggcattgccctcttctcattcagctcatgtgactcaggggaaacacagctccatgggtgggccccttcacacaaaaataatcctaaccccccttgtccatgattggttcaagaggtgcatgtgattttgttaggccagtagaatgaggcatggttttctggggctgcttgatctggtttccttggtcatgcaaagctctgggaagagtcttaagggatgagattgctgcagccactttaccttcttcggaagctgaagctcctacacagatgaaggaaggggtaagagcacagcagggaagtgggctgagcccctgaactaagctgaccttgaagcctgcctggacttctacgtctgcatgccagtaatttcctaattgtttaagccaactttaatttttgttgttgttaacttagaagatgaacaattgatactgatatggagagatttatgccttctaattaatagaattttaaaaattaaccgacaatactaagatgtgtttcccagactagcagcatcagtatcacctgacaatttgttaaaacgtaactcttgggctccaacgcagacctgctgaatctgaaactctgggggtagggcagcagtgtttgcttttaacaagacctcaggtgattctgatatacgctagatttgagaacattgttttgtacctggtttcttatgtggcctttcataataatgtatttagcccacatatgtcagtttcacccttgcccttgctaactctcagttatgcatttatatttccttaatttcttctcctcctcctccccctgcccatcctccttctcttccttcttctttctctaccttctcttcttcctcttcccttctttctttcttttctttctttccctttcttttctttccttcttgtttttttctttttctttctttccttcttcttcttcctcctcttctttgtcttcttctctccctcttcctcctcctcctcttcctcttcttcttccatttagacttactaagctgccctttcagaggacagcctggagtcctggagtgggatttctgctaatgtcctgctagacaagaatgtattcagtgtatcagccctgtcttcatttaccctaagttcttggtttctccacattatcaaaaagttgtagtgtttctccagcttgatgtggatgatgttctaggctgttgttatttctaagtattaatctgaatgaaatctgcttataaaagggcttattccttgaatttcttgtcctcccccttaatctctttgacttgttagttagctctaggaggcatacagggtattctcctggctgactactgggaaagcccttaatgagcagatggatgctgcatagtttccctaggacagttttcctccagtgtatgctgtgtgccacctaccccagaacctctgggaaccagttaaagatatgggttacctgggatctaccccacaactattaaatcaatctctggaatgatttgggcctagtagtatgacattttaataagctttctagggattcctaagtacttttagtttaagaattatgcaaaggtcatttacatattgacactggggtgaccaactctggggtttccagggattgaactttcagtgctaaaactgggatagtccctggcacccaggacagcggccaccctgagacagcaagttcaaggggagccatctcaagactgcggtagaatggcatagttaactccatccccaaccccactttccccagtccttccagttcatccactgatgacctcccagagcctcatgttcaccccagtttctgagccaatcttatcagaagcaacaaagacttaattcccccaccaggaggccatgtccaacatggttattcatctcttattcaggatccataacctaatgataaatattttagtatactgtggattattgagtgcatattctatgctaacaccgtactacaaacattatttcatggggttcagagaccaagattctttcccaagaaccaggggttaaatagtggtggtactaatctttagatacagcaccatgtttttagaatctgtcttccagccaatgtgatgtctgcttctcttttgtgtacctttttctaacttctggaacgactagtcttttctctagtggactcctatcatggactcaaaccacaatgagctatgagggtgagccagatcacagtttagacacttccttaggatatagattccttaggattagactcgaacccagcactcatactgcctggttgaggttcctttcaaaattctttttgtggcttcaattagttcctacatggactggccacatctcttgttgctttcattttctatcactccattcagctccactcccttcttgatgttcaccaaatgtgcctcagagcctttgcttttgcagttcccctgctcgggaggctcttccccagatgaccacatagctccatcccctccttcagattttattcaagtgtcaccatccagttttgctcccctggctactcagattagtaactcttcacttctcaccctttcctcccttttgctctgtagttcttattaccatctaacataatacaactttatttatctcttccattacttcctctccccaattaaaaagtaagtcctgccaggaattggcttttatctactatttttcgttgatctaaattcaaagcctggagcatagtagatattagataatttttgaatgaaatcagatggccattgtgtaccatgttttatgctgtttactgcaaatttcaccactacctagagcttttcctattgtgagtcccccatgcttggatttctggttggcctggatcaaatctgaggtaactgtggtcccctgaagggtgcactgttgatttgttcatccttactcagaggattttctatagctggactcttcctgtggtgcaacctgggatgtcctcttttcatgaactgttgagatggagccattcttggttatggattaacttggccacactttaaggattccccttgccattaattcatcaaacttttacagagcacccattaattcccaatgctggatattcaaagacaaaagaagcaggccctgcccatagtgagcttttgtggagttggggagatcatctacaaggcacatggagcattcaggacagtatcgcatgcttgcccagcagtggaggtaagcgagggtgctgtggtggccccagagggtgccttctccacctgggagagtcagcaaaggctccctgcaggtgtcactcctgagttgaaatgtgaaggatagtgggggtggctatgactgaggtcaggtggtatgagactggggaagagtgacgagagggagcagtgacccaggaagaaggactgaggccagagaaaggcagtgacccaggaagaaggctgaggccagagaaagtagcatattcaggaaactggaaagtggctgtgggtgccgggttggctgggggatgaggttgatactggagggaggtaaccaagggtgacacgatcagatataaatctctttatgaatttaggcattttatttatcttcatatgagcaaaaccccaggctttttagatattttggtaacccatggcaaacttcaaaatctttctgtatttcagagcttccatatgtatcttccccctctagctttgtgtaatggtaaactacacctagtactggaagcatcatgtttagcagaagtattttaatttagcagaagtattctaatttagacagaggctgtagacaaagacattaggtacctctgggcatgcaggcagtgccatccttgccttgcaaagcagggaataggcaaagcgtgaacattttcttttcttttcttttcttttagatggaatctcgtctgttgccaggctggagtgcagtggtgcaatctcagctcactgcaacctctgcctcctggttcaagcaattctcctgcctcagcctcctgagtagctgggactacaggtgcgtgccacatacccagctatttttttgtatttttagtagagatagggtttcactatgttggccaggtggtctcgatctcttgccgtcgtgatctgcccacctcagcctcccaaagtgctgtgattcaggtgtgagccaccatgcccagccagcatgaacattttctaacccttcgctgaccacttgagttgggcagagctccaacagattggagaatgtgaatatcctgaaggcatgaatatctccagcaactagaacagtggccagcacaagtgctcaaaaatgaaggaaagactgaatgatgcatgatgggcaatggaaattgataagcagtgccacagtccagttctgggtgggtcgcagggggcccagagtgcagatggagagagagtttatcgttgaggagggcaatcccccttcggcactgtgagcggcaagtggacgtaagtgtggctgcccttggagaagggcaggctcagagtacctaggtgctttttcagaaggtatgttcctggattctcctgaagatactcctaatcccatcatggtggctaagatctggaattggcattttaaacaaactctttaggtgattttgaggcatgccactggtacaaggaggcaagaagaggttggaaattagatggtctcatgccaagaggttcctgcatcaaccccctcagacttcctcatctgggatcactctccctgctccattgccacagcccttgttcatatttcccttgaggcacctcctgcagctgagcctttgttgaagttttgcctgcatgtccttcttctgaaggatgctgtgagcttgtgcagggcccggagatggcttatcctttttgtattattcacagcacctaatatctgttgtgaaattacttaaggaaatattccctagcctgaattttgacaatacagagtccctcccattatctcaaggagctgaaaacaaaattacaccatcatttcactttaaagaattccatactcacaaaacacagcaatcaaaatatgattaaatgttcaaccttataatttttgcttgtcaaattgactagaaaaaaataaaaggttgaagagggcatggataaattggaactatcagaaggactgtaaattatacaaattgtcttgaatgcactttggcaagatatgtcaagagctttaaaaagaattattgctttgacccagtaattctactttatgaaattttcataaggaaacaatcagggtcattctattggtaaacagtctaaatttagcaaaagggggagtggttaaataaattagtgaataaaaaacatgctttttattatatatacactgaataaggatttagaaaaatgctaacatcaagtatgtggaaatgatatgatatagagcatatataatataattcctattttataacaagagtatacatctctgagtggtggaatattttccttacttaagtacctacctaatatatgagtatgctttctctatattttccaaattttctgcagttaacatgcattgctataataataaacagctaataaaatatatgtacaatttaaatgcatccagcaatgaactgcttttaacatgccacccctccaacttcccatggaattattcccgtactgtggttctaacatctttgccagcatattactcccctgctcagaattcctcaatggccccccatacctaaaggataaacctacactccttagcaaggcatactagggccctttatgatttgtccttgagccacctgtccgactaactcctggctactccttccaatttccctccttatacacatcagagataccatctgagttccttggtcataccttgctgtctgtctgcctgactttgcatggcctgattcctttcctagaattcctctcctccttcatgacttcttcattcagctttcaagccattttcctaaatttgactctcaaaactttaaaaagatttaagcattgctcggtgcactcattgcacctttaaaatgtgatacaactgttcatttccctatctgtttttcataagactggaagctgtttaaggctggaattaactttgtgattggcacatggaaggccaccagtaaaatatgtgctgataaaagaattagcacacaaattacccagatctttgcaaatgctgtgtgggttatgcttttattataaacgggacccctgtgatcagcaggtggtggcggacatccagccagccctccttcaccaaaccaggcttgctgaaaggccaggaaagcaagcagtgctagttcactagttcaaaaaaagtgtctggtgtcatgggaagtgctatgaacttactgtgccagaaccaaaggagaatgagctggagatactacaaaactgtggtttatcagctcaagcaatgtgtgtgtgtgttgtgtgtgtgtgtgtgtgtgtgtgtatgtgtgtgtgtgtgtgtgtggggtatggtgtgtcaattatggagcaaagcacatctgttttgataaagaaatcctaggcttcgcagtcacttaggtcctaaccccactctcaaaatcacccctaggttctaagtgtttctggagaatatctaagttaatttctgaccattcacatttttattttccctgacttggtttactgttgtatttacaagtttgtgaaaagtggtcagtattctaaatgtgagatgttttctgcatggggaatgtatgagtaaacttgtaaaacctcacgcaaatttctgaggccaaatgtgtgtgagcagagctttggcacagtgcaactggaaattttaagacaatgggaaacactttcttactactactctggaaaaagcttccaggtctcgctctttagtttagacagatagctttaagcaggttaagttaattgtcagctccttgactgcagggattgtgtcctgaagagcttgaaggaagagagaaactttggatttggagtcagaatgactgggttccattgcgaggtactgtcattaataatgcaggcactgggcaagtcacttaacctctttgaggctctttcctcattttctacatgacatagtaagccttaaatctgccatacaaggttgttggtgggatcaaaatttgacatacttgaaagtattttggactctaaaaaccatcttccaaatgtgtgttatttatcattcttaattctttttaggggttccagcaaagagcattgcctgtttgagaaaatgtcatgttccagaaatattgattcaaaaaagactgatggaccatctgaatgaatatggaagaagtttaatttaacaaatgcactcgtggtatgcagaaattgcttccagtgacttgcatcattactcttagcttagactttgctaaccgcttcctcactctccccgaatgcatgtacatcccctcaggatcagcttttatctctgataaataaatgcatactgaaaggataacgaatataatgggttaaattctaaaaatgcagtttcatttcatttaaaccatggttttatggacactgtgcctgaatcaacaggcgggtgtgggggctatttttggacaggcagaacttccagcacctcttaaatacatcacacggcaactgccttctccacctacacacagggcgggcctgcatgcataaaacggatgctggcccagggtgaaacggagaaactcttttccccatctgatgactaatacttgctctgctttcagaaagggaaagcaccacatacaaacctcaccaatgcattttcctttgctgttttaaagaaaggggtaaagtgtgtgtgtgtgtatgtgtgtgtgtgtgtgtgtgtgttgtgtgtttttaatgatggaggaatcatgaaatgaacctccataggaaagccctgacaagttctgtggatgcttttgcatagggaattgaaacaagttggcaggaagaagaattcttttgcataactcaaagcagacattttactgggggaaagagcaaatcagaaatttgctgtcatcctcaaaatctcattagttacgaaatgtaatatattaggcctttgcattaaatccagaagagcctgtatctttttttccctcaatgatattcctaaaatggatctttgagcatgcaaaagagtagctcttcacaaaagatgtaggtcttggcagtggtggcctgtgactatgtgactgttattagactgttctggcttctctgcaactccagggataaatgaaacaataataattaaaataatgaaaataatttggtgattcatttgataatgaggataatctctaactaaggatgcctgatgaatgagtaagcccagatagaatgtctttccatatgaatttctgataaaggtcatgaggacaatgataagcttgttagtgtaagagtgtttcatgggtaccaggtactatcagggcatcctgttggcctagctcaccattagagttctgcagatttcaaatggtatgagactgtgatccaaatatgtatgaagttaaaatataaacttttaaaggaaggcatttattgacaatttcagtttttctgagtaagagtttgtgtaggatttgtttcctgtgtttcaaactctaaatccgtaattatttttaaagtatttattgaagcaatatagaaatcatatttcaataccttgcagagtgatttttttggccaatcatgtttgtgaaatagaagagtaaattatttaatgtataaatatatctgaaattcattcattcaaattaatattgagtgcctataatatgacagtaccttttcaatatataaatgaatttctatccaatagtcaatcctcccagcctatcccatgtttactttggtatttcttcttccttttcttgcagctgaagatggaggagaaagatttcagaaatagaggtcacattaaaaacatgcagaagcatgaaaattgttaccatattcaattgcaactgtattttctccccctctaaggaaacaaggccttctgtatttttgttgctctttgactatttgggtaagtgttctgtctctccctccttctcctttccaatatactcttctggggatcatgacccttttggctggaagttgtgaacaataagtgaggtcagccacaggctcaatgaagaacagactcaattataaccacggcttaaatatacagcttttatatctgcttcttatgataaaatgtcacaaaataataggaaacaaatacgttgtttgcaaaattatgactatgcgctcttgagggcagagaccatgtctaactcaatcttgtgcccattacccagagataatagaaacccagcaaatgtctgctgggtgaggaaagactggggatgagtgaacatgtatcatttagcccaggattaagtgagaggctgagagaggaaatgtaatagagaatagtttcaaggtttctaaggcagtgttttttcaaaaatgttgacctatatttatagaagaaaattatttacatcacaaaccacacatatacacacatatacacacatatacacacatgctattgaaaccaaccaaatttctttgtgaaccactgggatgccacccacatatacaaaccatgtagaaaatgtggaaccaataaagggaaaatggaaaggaccaaaattgctggtacccagaaagcaccagcaattactactgaattactaccgttaaaatggctcattatttacttctttagtctttaatggtattttgttattagttcttagtaagttaattctttcagacaacaaagcttctacaatacttactatgtatcagcactgagttaggcacataaggatacaaaaaataaaaatacactaaaaatatctttcttcctgatatctcttcttagatacccctcagacattgtgacttaaactatctcaaactatactttcagacttcccccaaatttagacttcctttattttctctgtaatagaagatatttttaatatttgtaagccatatatttgataggggttctatccaaaatatataaaaggcccagacaactcaataacaagaaaacaaaaaagtcaataaaaaatggacaagaaaaaaaatttaaaaaaaatgggcaagagacctggggtggatagaatttctcaaaagaagacatgcagatagacaacagatatatgaacaatgctcaacattgcaattattagggaaatgcaaattaaaaccataatgtggtatcatctcacacctgtcagatatttttttcaaaaagatgaaagataacaagtgtcagccaggatgtggagaaaagggaaccttgtacattattggcaagaatataagttacgacagcccattatggaaaacactatggaggtcctcaaaaaactgtaaatagaattactatatgatccagcaatctcacttctgggtattacccaaaagatttgaaatcaacttgttaaagaggtgtctgcacctccatgttcattgagtactattcacaatagccaaggtatggaatcaatctaagcgttcatcaacatatggatgataaagaaatatggtatatacattaaatggaatactattcagccttaaaaaagaaggaactctcatttgtgatggaatcagaaaacattatgctaagtgaaatgagttgggcatataagacaaatattgcatgcactcacatggggaatctaaaaatcaaactcatagaagcagaagtagaatggtggttacagagactggggggtggggggaatggaaagatgatggttgctatgtttgaatgtctcctccaaaactcatgctgaaacttaatccccattgtggcagtatgatggtgggacctttaagaagtgaccagatagggctttgcattcatggattactgggttaatgattaatagatgatcacaggaggggaacttgtagctttataaaaagaggaggagggaccgagctggcatattagcatattcgcccccttgccgtgtgatttcctgtgctacctcaggatccgcatggagtcgcaccaggaagaaggctcccaccagatgggtgcccttgacctgagattctcagcctccttaactataaaaaataaattccttttctttataaattacccaatttcggtattgttataagcaacagaatacagactaagacaatagtcaaaaggtagaaaatctcgtttaaaaggaaaaatacattttttctttttttaaatttgcacagtgtagtgactatagtaataatagagaattgtacatttcaaaattgttaaatttcaaatgttctcaccacaaaaatgttaaatgtttgaggtaatggatatgttaactagcttgatttaattattccacattgattcataaattataacaccactttttaccccataaatgtattcaattataaatgtcaattacaataaaaaggaatgaaactataaaacataaagaaagaaaaaaaggatatttttattagtctctcaggccagaactatgggattcactcttgatagcttcttcttcacccctcacactcacaagggcaccgatctgccaaattcttccttctaaatattctccttgaatctgtgtctctccccattgccacctggatacccccagtggcctcctaactggtctcatttccatgttgcctgccttcatcctaatttattcttcacttggcagccagaaaatattttttaaaagacttaattgtgtcattctcctctttaaagtcttaatggctttctaatttcctatgaaataaacggcaaactcctttttaacaaggactcaccagccagcagatgtggcctctttgggctctcctgtctcccactctcagtgctacaggcacccgggccttctttattcctgccttaggtttttgcaccctctgcctgaatattttcccttgctcttttcagttggatcttcttttccttcattcatctccaaacactcagcctacagtgttttcctcagtaattctctctgatttaagcaatgaaactaactcaaaattgtgtatatatttgtttgcttgttttgagttttgcttatgtccgtctcccccattcaaatgtaaattatatgaggccaggcagttataactattttttcaccaaggtcaatccaatcatagattttgtacataatagacctttgaatatttatggatgcatgaaaatgaaacatttcctaaaccttagtcattgactatcatttgatgatttagcaaagctatgtaccacctgtactataaacctaatcattttctctaagctgactgtaaataagttttaaaaaaataaggtagctctgtccgaagcacagtgttgggggagttgcaagttgtctaattttattttttaatgcacattaaaataaatgtctaggtaataaagcaaatcttatccattatatacaattttcttgtggtaaataaatgagcaagaactttttaatgaatgaaactcccttctgccaggtgtagagcaagctctagactattagaagaactgacgctgattcattggtgactgtgaacaaatcatttaagtttttgggcttccatttcttcatttgcacttggagattaattttaactgttctgcccagttcacgtgaagatttaataagcagtgtgaaatcatctttttacataaacatgaaattttatttttaaaattatttattttagaaatggtactactgctgtttgtttcttaaggtgttccgtcatattgaccccttacatgacataacaagaagaataatgtatattagtctccatcacggccatgaggactagtataatgggacactcaaatatcctttgaccactgattaacttcttttcttcccttacttgcttaattaaatgttacttaactttcagtaatcatactccacttagagaaaaacctcctcacaatgtgaacaccacgttcatagcagagctaagaggtggaagcaacccacgtgtccactaatggataaatgataagataaatgtggtatatacatattggaatattattcagctttaataaagaaggaagtctgacacatggtacaacatgaatgaaccttgaagacattatgccaaaccaggcacaacagacaaatactatatgattccatttatatgaggtatccagagtcgtcaaattcgtagaacagaaaatcgaacagtggtcatcaggggccagggtgcaggagaaatcagcagttgtcattaatggatatagagcttcagttttgcaagatgaaaaagttgtgaacgttggttgcacaaaaagtgaatatatttaacactactgaattatacacttagacatggttaaaatggcaatttatgttacatatttttaccataataaaaaaaatttaaagcctgctcataaatgggtttcagtattttcatgttctgatgttgaatattgctgagaatagaaattttaaaaataatagtatagtaatagctaaactttatggacacttaagtctgtgccaggtaataagtattttatattactatcccatgtaatcaccactacagctttataagatagatactatcatttacgaggttttacaaagagaaaacagaggtacagcagggttatgtaactcgtgcaagattacacagtagcaagcagtggaaccaggacatgatcccaggcagtctggtttggttccatacttttaccactaggtatatcgctcaccaaactagtggtaggtactctggagatgaatttacctctattagttttaattagtgagattttagaaaggtctctccacactttgatctctgctgaattgtattaacttccctcttattttccatctttctttctttcatcctccaaagaaaagacaggtcacttaaccatataaatcttaaccataagaattaaaaaaccctgttgacccaaacagtgggcaaaagccactcatcgaagtggcttaaaagctccaactgaaattatttgatctctcatcatctgcagatataccttcatgtttttgcctgagtagaaggaaaagtaataaacaatcatagaactactgagagatttaaagcttaattctaagtaactagcagtagcttatatgaagacatattaaaccacaacagtcacttccagaatttaaactatttattctcagcttggtgtgatgcaagtagaaaaaacagacttctgaatcaacaagttacctaaccagtctgatcaaatttcatcattcataggtatctgaaaggttgttaagatggttaagttagccaggtgagtggtttacacctataatcccagtaattgggctggcaggggcgggaggatagcttgaacccaggagttcaagacttacccaggcaacatagcacgctcctgttccccacaaaaagaaaaagccagccaaaaaaaaagagattaggttagttgatatatatgaactacccagcacacagacttggaatacatgtgttcaataagtggtaacttttattatcaccatatgtaattatgatttttcacagttttaaatacagaaacagaatgatacaatcttcttgattccttccccgcacccctccaatcctggtgtctgtagagtatagggtgttaagaggtttcagaaaccacccagcccagacctggaggagaagctgtgatgacttctcttcattagctgaacctcacttattcttgtggctggccctccactgaggtctgtcttggaactcctgatgagattcctgcctgcccactgcctgcaggtcctagccagcaacccagtccttgtgtggcatgggcttcctgtgctggatccccggctccactgcatcaccaccacacctccccagtgtctacctcccctccctggactgctaactatttgccacatgggcttggccagctgcctgacccccagggtggagagagctggggcatgatttgaattgtttttgaatgcctttacttgagttctgcttttcttgaaaatagaactccaggtttctgatctgggaggcaaacgtattcacaccctgggagccattcctaaagcaatggagccctgaccttctgcccctcagtgactagcttgaacttgacttctctgctgagctgctttggtgccctccagaaatgtgggggcccagggctgttaacacactgactgctcttttccccatcttgacaaaagtcattcatttgtaactcttcatagcccttgtaaccgtttctagcattactatttctcctcttctttccttcttcgggtaagaaatgctccaaaacccagattttggcacaagaactcctagattgtttttatagtcccaacgtagccttctttgttacagcttgatattcccaaattttgttccaagtctcattattttacattttaaatatcaggttgtattaattggttccagctttaaaaaatgttccatcaggggttattctgctattttgatagtggtttctaaatgtggagtgccgaggccctggtgtgggccacgtctgtaggcatccctgaaggactgatgtggaacggaaagatccgcagattctgagtcttgtgtattctttgaagactgtactggccataatagcttcaaagaatttcaacaagttcctagacatgaccttccctttccgaaaatcacgttggccaggcttgccttaatcaagctgtgctttctaagcatccttttacttgatctcctgcagcagtttttaatacttttcctacaagtaagttaaactaactggcctgcaatttcctggtgtgtccctaagctctatgaaataacggattaggttggctagcttccaattcttccagaatttttttgttttgttttaaagcgcgggttgaaaaggccagagaatgcttcctgtctcccttttccttcgtttcttccatgacatacgctctctctgttcccagtagagctgccattttaataacttcaaacctcttaaatgttttacatattatttgtacctatctctgaagcatgagttttccatttttcattctgacaagggcacccccaatataagggcttacaattcgattaaattgactattaattcaaggcactgttaaaaaatgagtttcatatcaggaatctgaaaaagagtggcaaaatagattataattaagctgtgttctcacttgtcaattactaataaatacatgttggaaaagacctgagaaaaattctatacatccaggaaacagaagtcaaaaaatggaactattacatctgggcatactaatcgaggcactagcatagtgtcttaaagtatggtgaaatgcattagatctgaagatctaattgcattctacattttattaaactgcatttggtccattatttttaaatctaatatcagaaaatctttccacatttgatggtctcccggttgcaatagaaaggcccgtagaaatattttaaatatatttgttaaaaagttattttaaaaattattttcttaaaaatatgagaatttttttctgacaggagtaaaaaaaaaattaataattatttgcatttacaaaattgcaccatatcaataatgtttaggatagttcaagttctttattgtacagaaacttggaaaattgttttgaataagtgagtcatcaactagagcataagaacttttattctttatagacaatttttgtttcgtaagcttttcattttttttatttttcattttgtgatgacctaatgcgtcttttataaaaagtcacaggcacataaatcacggcccatttgtgtggatgaaggctcatttcctggttgtaggcatggtgaccaccatcatgaaatgaaaagaaacatgaagtggaatttaaaaactttaggatggttggttctgatttcagataaattggataagtaaacccctatcaactagtagtttttctgatttaccaaagtgataatgtcaaacctaaaatttgcacatttatcccataagttcacttactgtgtatcagatttagtcacaactgggagaatcttggcatctatggtaccgtagaactctctcatcgagaacatttcagttggttttgaatgactactgatattttccttttaattttggtcaggactgactatacctgtaaatgaacaggtcagattttctatgtggccataaagcatacatacacagaaaattatttgtgcataggtagcaagtatacttaagtcaggcatgaatctaaaccatgtactttttccagtgtttgaaatgtttcctcatagatttcatctttaggattttaaagttgccatcaaaatatgtacggaattcatctttcctatttacatatattataccatataactacaaatgtagtacacattaattcggtcttctctcattctatggccttgcttgagctattcccttttcttagaatgccctcttccacatttgaaagtcagatctacctatccaaggggtagaccagtgaaagattacttggttggtgataaagtagaaaacttggtgctataggtttacctttggttaaatccaaattcttcattttgctagtgagagacttcctaccttctctatgcctccatttccccgtgcacacaatggagattttatcttccttttagaattgtgatgtgggctaactgatgtaatatatgtaaaagatcaaaactatcggacctttcctttcaaatggcaatgtttccacaaaaatgtctctgggtctcacccctcctgccaactaccccagctaatgataatctcatcttcctttgaattcttatacactttaccgtctctcaagaacttcactattttctgcattgtgttattcacttacgcagcaactattatgaatgcctaccacgcgccaggcttatgtccatatacattttgtccttttttctctctacttgttcttaagcttcctgaggttagagtctttgcttcttgaggttagagtctttataaattaatattccttcctctctcttcatcgtctgatagtgcctggcactagtgctttaacggtatgtttgttaatattcggtaaaaccggctactatataatgcaggcaataagcgtatatttcaaatgtgtccatatcctcaagtaggattcacatgtgggaaatggtgcttatatgcagtgcatgggttcatcttcatcctcattattaaataataatgagatgataaagcagtagcaacattcctgagaatatacacaaataataatattctgttctcattcccacatgagttctgaaacagttcctagtagagcaaaacatgctttccaaaaagagaatgtgaatgaacaaagagctgcagctacgtctctacagaattacattagcacaaatctaagcagcttttcaaagactatggtttataaataaagactttcatatatacaatgccatggctagatgaaattctaggtttcaggggaaattacacaatctcataatgaggctgtgtgtacacaacaccatgccaccaaatgaaaacttgagcaaatcacttaggaatgtggtctttgctagcccagacatttgagtcattattggaaatatgcaatgtggctctgacactattttactactcatggatgaagatactatacagaagtctcactttagtttgctgcttctaatcaaccacaggctaggaaacagaaagcctaattgattaaaattgtgtttaaaataagaataactaggctttgatttaaactaacgagagtaccctacaagtagaagtaaatacaggtgtttaaatgcatggctgttattcgtgagttccttatctccaaaatggaggtttctaaaaagttaccatgtaacaaaaggatttgttagattatcttttatctcttctcccacagtgcagagtttcctttgagaaatgggtgttgcaagactttcgctcctcaggagtttaccactatcaagtgtcctagtgtgtctgggttgattccttccagtgggttcctcgtctcactgacttcaaagaatgaagccactgactcgtggtgttacagctcttaaagttggtgcagatccaaacactgagcaacagcaagagtttcacaaagagcgaaaaaacaaatcctccacactcggcaagggtacacgaacctgctgcaggtgctagctcaggtggccagcttttattcccttatttggccctgcccacatcctgctgttggtccactttacagagcgctgattggtccattttacagactgctgattggtccatttacagagtgctgattggcccatttttacagaatgctgattgatgcatttacaatcctctactagacacagagcactgattggtgcatttacaatcctctagctagacagaaaagttctcaagtccccacccgacccagaagcctaggcagcttcacctctcactagttggtacaaccagcaagattctaaacagaaatagattcatgagcacactgtccacatgtctcaaaggtccaaagtcccaagagactttctgggcctattccatggccaccactcgcaactaccatgcagcctgcaggggttgccagtgacttttcaattgtcttgggatgagaggtactaggtagcagatgcttgagcaggtcctaaatgtgaagggactgagatgggaaatattcccctcttctccaatgtgcaacctgtccttggctgatgctgacaaggagcctgaatttgttttatggtctttttagttttgcttcagcgactggcattaatgaatgtctggtgcacctcaggttcagtctcatggcactccacccaccttctcttttcttctggaaccattcagaagagtgtatgtgagcagtgtgggaggcttattgcccaaatgctccactggaagaatgtggtagagccagatgtgaatggaccccctgagtgaagaatatgcaaccaagagtctcagcacatattggagaggaaggctttctaacttaactctgggtttgtaatcttgtgctatcccacatccaagtcagaatcctgtccagactagacatcaaaactaggctgctatcatttctgatttttactgagtatcgtgaagaagaaagaatcttttggggggttaattgatcccaggcctgagaattggatgtgatttctatagccactcacaagaaaaattccagtattttaaatccacgtatcacataatgttcaagtggagcacacacattcggaacattataaaaaagagacaaagtatattatttgatgcaaaagcacagataactttggcatgatggtgagcgccgcgtagcaagagttaatgcttaaaattcacagcactgtctattgtgaataaatccaatgaaacttgttcagatagtactaagcaatactaaatagaccgtatgtaatcacccaagacctgagacacataaaaactttatagtcatcactgaaataaagtgcaaacaagttcgtcttagaaagattcaaaactctttagttttaggtcggctgctccataaaacagtgcctgacaaattttaagtgatattctaattatcactggatttttatagtttcttgaaagctgtaagttagatattaacaaggcagggtggaagaaatccccttatacggagaatgagtcctacgtcctttgcacaagcccactgggtcgccaagccagattttatactaagcagctgttggaaatggaacggaccattaatccgaaggtatcattattttcatatcgattaaagtgggatataaaccgtgcaccaagttcacaaacgatggaaaatcactgcagctgtacctctgtcttatacaagaaacactttctggcgcattttacattgtttttttcgagaaactaacactttgtaatatactgatcatatgactctcctaatgctgtcacatactcagcaattatcatgagaaagtatgacccaatactttgtgtctaagaagtttctgatttatatttttcaattatttcaattagatgcaatgatggtataaacgtctaggaaattgtatttgtaaagggaaattttgaaattttaaaattttaaaaggaggcaattttttttgtgtgtgttcaccatcaggaacaaatatctccaatgaggagcaggcatttttttcaaagaatgaaatttaaaaatggctatcaaattattacttcaattcttttttctaaaacacaaaaatatcttctataaacactttcacttacctcataatataaaggagcattacacctacaggtttttttgcctttttagatgaagcagatccaacaagtgtatttatttcataatctgtaagaaaattaaatttacttatgatgaaaaaagccttatttgaagaatacttgatatatgtaactttcaaatatctaggtgatctgaagggttggggaacctagcaagaaaaggtacccatgaattaggtaaaatatttatagttacttcgtaagctgtcagtaattgtagggtatgtgccacctggcagatcttttctatattattgctgtcctctgacctctgacagtatgattctctgtagccttcattttccaattagtcatgtacctccctggaatcttaaatgtctagtcttttataattatttaacttgaattaaatattttgtcacagaacctagcatgtgcctggtatgacctcagaaatctttgtcaaataaatgaatattgaattaacaaaattataaacaaaaataaattcttccagattgaacaactcaaatttattctggctaaatagttattaaaataatccatcaaaatttacaaaacagcccaagaatatgatagtttattttataatctattctattattttaagtaaaaaagtcttcaggtggctttgaggtaggaagggacagtacctgctggagaatgtcttgccacgacaccatactgaagagtttacgctgagggacctgacagccacggtaagggcttggatgagaagatcatcttcaatctggttcccaaccacaaagcaatggaggcctgccaatcgttctattaaaaatcagacggaattagattttaaatatcctgaataggtcatttcgtgtcaaatatttccactgagaagcagaataattttcctgtaatcttacttgaaagacagaggtgaccttgtaatgtatgtggttttctgattgaagtagcgcaaggcggcagtattgtgccaaatttcatgcaacttgaccaaaaaacaattttctggaaaactagtccttttattttgaggaagacaattttttaaaacgacactttcactagaatgtgtccaagaataatctggtgttggaaagcaatcattcattcctatgtcacaaatatacataagatgtctcaaaaaacaggaatctttattttgttccctggtatatcccaagactctaatagtggtaggaatataaaagcagctgaaaaaaactgttaaatgttgggtcatattggagagctgccaaatgagaactgaaccacatctttttctcttaatgtaacacaggaatcttatgctaattacactcccaagaaatgggcaaaaatattacacttggacatgaaattttgcacaaataattttaaaaaattagttactaaagaattacatgcagtacttttttctctttgttattgtaattgtaatttctgttgggagattaagagtggcgctcactggattacctcacataccaactgtgagatgctggggaaagctactcacgcaaatcagtattcctgcttttgaaactaacaattttagggagagatgaaacaaacaaacacgataaagacatcagaaaagagaggaataataagggagggcactctagtcatgtgacctctctggggcttagtttccccattataaaataaaggggttggacagggcaatatctaagcaactctctagctcctctctagagtctgattcaaatatagtaaaatggtctcctggtgaataccaaaacaatgtctaagatttaaaaggtcacacaaatttaataaaatgcatcattttatttggttcctctggtttctgccactttataatcaggttgacgacaaaactagggtataggtgggagaaaatactttagtataattctttcttaccatcaaagagcaattgtccttaaatccttcttatttagctccatggagtctactaactacctaacaagactcacccaattctcaaggctaccaccaaaacagaaacacatgtaaaagcataaaaatgtatattttacttgcaaagtgtgtgtgtgcatgcatgctgcaggtaggtgtgactttgtgtggtttcctctgttataatgagttgaaaacattctttgtctctaaattcaccaggggaagactgaccatttattttttaaacattctgacttttaaagtagatatgatatgtataatgtgtaatgacctttcctgaattagatgccttttttctctgtctgcttcctcagtcaaagctgcaactgtagtcatcattaaaggggaaaaatctcttcatttcacaataaagtacacacagttacagtacaggcaataccttgaagttcctgatgatacaccttccaaaactgaagattttaataaccacctttacccccttatcccgctgtccatgcaagtttccttgccaatatttgaaagttaatggtgacaagaaaaggctgtctttctgtctttggggggcaactgagaaagagggtattgtagtccattacccatctacttattagttttggtgtcaaggcaggtgttgaccatttcagaccagaaaataaaagaagagaggagggcaagagggaactaacaattattgtgaatctgccatgcgtcaggcatatgttatctcattaatccctaagttaccctacaagataggttcactattatcttatagatggaaaaacaaagtccaaaaaagttaaatgacttgttcaaggtcattttggcagaacctcatggagaccacaacatggcttacaactttgtgatcatttcagaacagttttgggaataagtctttgggctcgaatgtctttccataatccttaaattgcacctaacagactatttggccataataaaacttcagggaaatatttatctcaaatgtatacatgtgtataggccttcaaaaatagattaggaggctgggcatggtggctcatgcctgtaatctcagcactttgggaggctgacatgggcaatcacaaggtcaggagatcgagaccattctggctaacatgatgaaaccccatctctactaaagatacaaaaatttagccgggcgtggtggagggtgcctgtagtcccagctacttgtgggctgaggcaggagaatggcatgaacccaggaggcagtgcagtgagctgagatcgcaccctgcactccagcctgggtgacaaagcgagactccgtctcaaagaaaaaagaaaaagaaaaagaaaaaaaagagattagatattaaatccttaaaacatcatataattacttttttaaaattataattttacaaaggatcaaagaggttaaagaaatttcccaaggttctttctctcagcgcaaagctcttgttccttcctttgctccaggagacatcttaacataaaattgttcctcaagtcatggcacagtaccgaaactcacgggtccctgaagtcactctgagacagtctgccaggcgagagcacgttcagatttgtttagagctctctaggagagctgggttccaggccagtctccccatttcaaggggtcttaagagtcgagctctgtcccagtttcccatctatggttcttgcccactaaatgtgtgctttaaaattgcatctatgtggcaaaacaggactcataatttgtcagagttatggtttagtgtctaatcacatggccagaacctgagcaaacatgacaggaccagtcagacaataataacacaaactgagaatgcctacagagaaggatgcactcatgtgagctgcagcaggggggcagtaagatgctagcaaatgtgcaatattcaactaatgaaaacaagtcatttccccatgtctaattggacagcatagttaaataagcaattctctgcaatacaatttctgagtgtttctcttagtatttcagggtaaccagagattccaaacttccacaactggcggcatttttagaaataaaaaacttgaaaaaaatcagacacagattagatttgcaaaatacaatcaaaaacacccctccacccatatcctatcccaacatgcagctaaatgagtccttaaatttaagttcacaggacagaaaaagaaatttagtatggagaaaacaagggtgaccattgtgggcaaatgaaagtataatgtgtgcaacccaattcaccacaggctactaatacatccaaacttcttaaactatcttaagaagtttaagtttaagatagtttaagaagttgggtgtaattagtagcaagagctgagagaaagaaaagactaataatttcagaaaagctaactggatatatccaatggtgaaggaagagggtctgggtctgtcacaccgaaagcaccttggaaatcaagtcggctgcttaggaaatcaagtcagctgtctatgacctggaggcatgtatgtacatgatcattgctgagtctcacccctcctagtgattgataaagccattcaaaggaggaatgaagtcatgtatggacacaatccatttccttttatttactttaccagtctcaccaatttgaggcctagcaggagggcttcttaacccagacacttacatagtagtctcctaagcaggaaagtattcatgtaaatgcagagaaactggctgtctcatataagcctactgtcccgagacacagggtaaatttacaactgtttttctttcatatattgcaaattctccaaatttacttaggcatttcatattcttaaacaattgcaaaagccttttcaaaagtgaaaagtagctttggacaatcggattgtaattgcttccctctattagcaccagcaacttgctgatttaggaaagacaagggcaggacttgcaagccctcttctgctgcctttgctagtatgatagggccctgtgtccctgaaggactcgagatgagagtctcacagtcctatacccagaactgaacaggcctgataagctatatgaaccagtagtggtcagcgcccttattaggagaagacgtacaatgccccaggtaaaatcaatgcaacattcaaaaagtctggttttattaagagctacttacactgtacagatatgcaaacctgtactttatgtcaatactctgctgagacgataaccttttgttaagcagatttactgcaaaatggacagggatttgtgaatgtctttctcataccagtttttccttcaaaaaaagtcttggatctccatcagcaaggagtgttggtatgggcttttgccagcagaagaaatatttttattacatagaactggctgctacaatcatatttgtgtgatctaactgtaaaataggttgaaaatgtatgtttaaaatgggcatacgttgttatataataacaagaatactattaacgaccatgctatgcactaatctttttattgtctttactaaacagtagttattatgatagactctaattatatatctcacacaatttattataagtgctatatttcacttaattagataatactgttaaagtaatccttatttaggaattggaccacatattggctgtcatgttttctcatctagactgtaaactcattaggtcagaaatgatgttttcttgcttttgcactttgtggtgcctggcagtgaatgggaaatggagcagggctctatacataatatctgttggctgatatttcaaagcaacagggagtacatttggatcctgagatggtttgaccctcaaatcataaagtgctagaatgtagcatgtcaggaaactgcagggtattcagccatggccctggagtcctttaggaggagaatacactatatctgatctaacatggtccatccaggggtcagtaacaatggtttgggaattgggccttgaggccatttctctgcttagactatttcccaggagtgacttagacatgcaagcagatgtcaggggaaggaggatgctcctcagataggagaaaaaagccaaagactcacatccaaatctgcattgcctataaaaccattctcccctctctctccttcctactttctcccgtctcctattagaaggcatcttgatggcctctccctcttcctttctcaacctactacctataggctgcaaattctgtgatttcttttttttttcagggtgccttagaaattcttatgagtttgatttatggtggaagaatatcaaggtgagtggggagagaagggaggcagactgaagcagcacacagtgtgtgctgtcatgttccaaatctgggagagggctataacctgacatctgcctcctgcagcaactactgcttgattcacctaatcttttgacctctgtttagcgatgtgttgaagccgattgctcatggctcttcccactctcttcagtgtgattgccttaataatttgaaatatgctacagtaggagtattcaaataaggagatgacaaacactacaaatcagagatgttcacttggagaaggttactaaacattaccagcatatcacagctgccatcccaggaagagctgcatgtctaagactgacttagtttgattttcattgggaagaccaaagctgtctcagagaaaatattaaggagggcaaagcagtttattccctctattgcatacaaaccccacccccatcccaaagacacactctgcagcaagcgctatgtggatctataattaagagtctgctgatgttgcttcaagtgtgacctagcctaagtaatatccttcaaaatgggctctatgaaaagcaggtgacaaggcaagtatagagacactgacaggagcaggggcaaaccactccagggctctcctttcctcctgaccatttccctcttccccactcaggcatctgcacaatggggccaatgatctgggagatccctaagcacccctgccaacaaatgactagattccttcatactgtggtggccccttgaagaagcatgggtcctgtggcacagtaattaggagcctgggttcgattcactgagcccagattcgaatctcagaaaccagctgtgtgtccctgggcaagttacttaacttctctgtgcctcatgcataaatgagataatgacagtacctgtctattgggattgttgtgaagattgaatgagaaaacctataaaagcccttctcagtacagcacctagcaataatcctagccatccttaaagatattatttggggggcttctgctcttgttggtcattagaacaaacatggctagtccatgcaagctgctcatgtgtgaagaacttatgggagacccagggaaaaaaaatcaatcagaatatcaacagtgcatcacaaaaaggcaaatatgagtttgaacaagagtttgtataataattttctcttggtaataataaacttgttaactgacgtgtttctaaagtattttgggtccttggaagagaggccagaatcatgaacatattatgtttaaaattctaaaggaatgtataataattttttcaggccatggaagagaatgtgagtgtggcaggagaaatcttcaagtcattttgtgccctgtgaagtctgccagagacattaacctatcaccaaccatagaaacaaaccaattatcaattaggtcaaatgagaagacactgagttttagattttgtgcactggctgactatgaagatgatccctctgaggtggccatacagaggactaggggaagaaagcagcctcaggctacttttcatagagatgtggatctgcttacttggcttaaaaaatatgaaaatgaatcagttgtttgctgttgaactgcaaatattaatctgatcaattttgggcatcaaggtctaaaacatggatgtctgcagcgctagttcttaaaataaaaacaaaagaaataaattgaagtttatttttgataggagccttagtgcaataagacacgtttcctggcctgccgctatattctggcttcacagggtcattacagaccttagcagaatctactaactccttctcctaggtattacctgctattcactcagagtcttaagagttgatttgattatagatatatatatacacacccagaggctttatgctaggaccattttgaagtatttcttctaatatctgcatttccaaaaaggaatcccaggactcctggactaactcaaagtgatgccctgctaatggcggtatttaaggctgtggactgtccagtggaaaaggctcccctagaattataccagaacagacccctagacaacttcctgttcacccatgtgcctagcatatagaagcattcaataaatgtttcttgaacttagcagccaaaccacacactaaagagaacttttacacatgcttagcatgggagggctgactgagtattggcattttatcagccaaactcagcactttggaaggagtcatgcctctgaatcacccagatttgaattagagaaagagcgcattcctttgatgtttagacaacactgtacatggcttaattcactgatgaaaacacagtagtctagaaacagctttactgtgcatgtatacactgtcggctggttttccttgtcttcataaatattaaatgtgactaattaaaattattgaagttcggtgtaggtatgcagagaggtttgggtagtgtcaaattctgcctctgtggtttcttagcaaatgaccttgggcttatctttgtgactcagtttctcatttaaaattatgaatctattatacaactttcaaaagactattgcaggacccaagaatgaatacacttagggtccttttgtaatttgttgagtaccacataaatgtaaaatattaatatatgcaagggaaatattctaattcctgtagaaagttctgcaaaaatgggttaaaagaggtgactgctgcagtaattttgaatttgaatttagatatgtcctggggatcttctttgtaccatgtagcctctggcttaggcttttgattgtttttctttcgtttttcacagagttcttggcccatcccaccaatctagcactgagcttaattcggttttgctccatgcatcagagagttttaagacagctattaaaacacacatggaaaagctttgcagggaattctactccacagagaaaccacagagccactacacacttaactatctccccacccccaacagtgggctgaaattacggctccattatgttagtacatccaaccagttttatggcttggagcaaaatctgaggttcaaaatgaacttcagaacataaaagtaaggcaaacctcaaaaggaaacgagcttctttgggttttgaaacaaatattactatcagagacattcttctaacagaggagaccaagaaaagccaagaggagtcctgctaatgctccagaaatgtaaaactggaatcagagactcacccgccctaaaaggagatctcttttatcatcatatattaaaagctacaacctttcatcaactccttcctcaagcacgagacctttttgaccttgattgagttccttcaatgttgcatcactatcttccacattaaaaaataagtatatttttaagacttaatgttagctcattacttactctactgcagcccttttgctttgttttctatcttccttcctgtattgtaaatgtcatttatacattaagctttgtgtatgttcatggatttgttgtgccttggcactagggctacccagaagaaacaaaataaccgaccaaactcattctcatgagccatccatgctgttgcttggttaattcaatctcatggacaacttttttcttacagtgaatacaagcgtcttcatttatcccttgtttactacaaagccatggaataatttaatttctacatccatcttgagtggggcatatccagggctacttctacaaacaaagattgccctgattacactaactctatcttattcttccccaaattcaataaaatgtccagcaatgggaatattttggcagcccaattacatatctcataatatccctaatatctgaagcaggatgtgtctgaccatgtgttctgatttttaggtctacaaatatggtcttcaaatgtagggtgagaaagaagagttaaagaaagaggatccagggagcagtgccagatcttctaggagctgagtttgtattatgctagcagggaatgatgggaatttctccaataactccctagggtgtgtcagaaaaactatgagactgtaacttgagcaagaatagtgtcagggaatctgtccctacctcaattcaacaaaaatgagtagtcgtgcagctcaacaagcatttattacattgtatgactaaatgtatatgatgtaacaaactaagggatacacaaaatgactaagatggggtgtgaaaatgagcaaacaatgcttgtatcatgaaataaatttctagagactatttctttaaaggctatttaacatcagtggccctgactgggttttactgagggaattagtgtccaggctggagctgtgcagtaatcctgacttctccagctgctcaggacatagcaattgtgctagaaagtaaaaggcagtggagacctgtcatagggtaaggaaaatgaggtcagaccttaaaagacaagtggagggtaaaagtattaatcaagatcaatcaatcctagtgggagggaagataaattgtggagggtggaggtgtctgaagtagttcctgagatctttcttctgagaatgctgtaactttctttagagtttcatgcaattatcattttttttaatagggaaggttttttttttcttttttttagacgtagtctcgctctgtcgcccaggctggagtgctgtggcaggatccggcacactgcaagctccgcctcccgggtttacgccattctcctgcctcagcctcctgatagctgggactacaggcgcccgcccccacctggctaattttttgtatttttagtagagaagggtttcaccgtgttagccaggatggtctcgatctcctgacctcatgatctgcctgcccggcctcccaaagtgctgggattacaggcgtgagccacggcgtccggccagggaagggttcttaggaggcaaacaagaaggacaggtgaaagagaactggggggaaggtgtcactaaaccaggggaggaatggtgtatgtagtcaaaggcaattagaaggtcactgctgaccttagcagagcagttctacttgagtgaaactgcttcccactcattccctcacttgtgtaatcctaacaccctcataattcacatatctccttcataatataaaacccctttaaggaccacgtgaaaagtatccccagtcaatgattagaataaatttcaagccctagatctggttatggttctaattttctccaattacacaggtacatggaatctatttattggatacgttagggcagtaatcattataattattcctctcatattgattccctaatagagtccttacaatagctctttcatggtgtaataaaaagagcactggatttagtatcagaaaacctgattgttagtcctgatccaaccacatggccttggaaaaacatttaagtactcacaacctggaccttagcaaaatataataatacttagagcagaaagtccttcattcattcagctaatatttactgaggggttaaaaaattgaaatgggcatggcattgggaataggcataaggcataatcacttcccttaaaagcatcagcctgggaagagaaatacacaaaaaaggtgaaaagagattacatgtaaacgttttcgcagctatgaagcactgtacaaattgttcatttctattatcatattgttcatccaatgtatttactaataattaatatttactacgtgggtacctacgttgcatgtgctgccctgaaatgaaggatgcaaaattgaataacatggagcccaaattgtttcatattgtattaacaattctgcaatttgttttttttccttcaacattatgttttgatgtctatccatgttgagtatacagatttagttcatttattttaattgctcttgtcttatttatgtttacatccttttttctagggcagcacatgcaacataagtactcacacagtaaatattaactattagtgaatcatacaataaacaatactatatgttattcatgaatatagataaatagatacataggctagaggatatgtattccatccatattagtgtttgcttctgagaagaaagagaaagaaatgaacatagaatgggggtgaggacaagagttcttcagctttaattttacaggtttatttcaaaaagaaaataattttttgtgagggtacaaatgtgcttgccacattatcttttcgtgctttctgcatttaaaaaagtactgaaaaaaagtgtctgctctcaaaagaccaacagtttagagaggaaacagatatagaaacacttataatacaaggtgatacgcattgacctagaaccctctctccctgtgtcttaggaaaagcctcacgagcagaggtcacttgaagaattagtggaggaattctttgtccatgtcctgcttgtccactgtctgtctatgtggtgacctcattcccctgcctgagaagcacaaggttttcctgccgcggtttcctctcctttttacattttccattgaaaacatccttcactggccccaagaacttactcctttttgttgggctgaagaagacatctgattccttcttcctttttttttttttttactagagcaaatgacctcttctctaacttgttccttcaattttcccatctctccctcgcctcgccttgttttcaatccactcctcttcctctctatccctacttcacacatacatggccatcttcacctaagcccagactccccacaaccattttcccttatgacctttttacttcatagtcaaactcccccaaacatgtgacctcaccaaaagctcccacatcctgaaaggccataatgtccttaatccccacactcccactaacttcttccctcaccaccagcaccaccaccatacaccctattgaaattgcattctggaaatcactgattatgtcctcattaccagatatggttgccttgcctattctcccaaggtgttgtatgttggggacttgaattgccattttgtgaccttctctctaacttgactcttatgacccaccccgttctcattctgtctttattcctttggctgttccttctctgaccatcaggcttttctcttcttctgtcccataaacaaggaccttttaggtatcccacagaattctgttctttggcacatattagctatggatattataactactcccatgctattgcctctgctctgacattccctagtctacatctccaactttgcagtctgagctatatagtccgtatttttgactcttgatgaacatttctactttaatgttctgccataatctcacagtcagcatgtctaaaactgagctcttcatatctctccaaaccctaacataacaaaacaatcaaacaaaaaaacctcctatcacaaacaataaaaactaagttcattctactaaatttgtcagtcagtctgaagtggccatttctcccagtcatcataacttaaaatcctcccccattattctctcagatatgcatcacagttgccctcttccaagagctttttgaatctgtctcttcctttttattctcatcctattctcctagttctacctataaccactttgaatctgaactattgaaaacaccatctaagggtctgtttaagcttccagctactctcatctccaatctattagtttttctgagacataactttatcattctgtgtcttccttcatgtagagcccaaactctgaagtgtggaattcaagccctttacattctcttcctaacatatttctaacaccatatcttcattacttttctaactcttactgctctcaggcaaattgctctgtgtaaattcttgagtctgaatttcttcacaaaatgggaatactacttttttggttgttttgaggaataaccattgtgtaaagcacacacttattgttagtggttacctgtggtatttcaaacacgtcctgtgttttcccagctctctgcttgctcagcctggtccttttattcagaatgccctccttccaggtcaaagtcctgcctccctgtgactatttccctaagtgtctcagcccaacagtgtcctctgcctgcctatgaaaattagtgtctgtattacacaagtaatgcaatacttgcactgtgatcacggccttagagcagtcttgagtgctagtgtggatcagtttcacacttgttaaagcacaaatcatcacggtcgcctggggtttctgattcagtaaatctaggttggggcctaaggattttcatctcttacaattcccaagtgatgccgaaacttctggtgcaagggcgccagaagtcccacttgggcgccctctctcttgcaggagagagctgttctcctttctgtttcttttaccagttaaacctccaccttaacctcactccatgtgtgtctgtgtccttgatttccttggcatgaggcaaagaacccgggtatttaccccagacaacgacgctacttcatcaagagttgaaatatgactgtaataaccatttttcacatattttcttaggttggtgccaaattcataagatatgcatggcaagtaaacaataggctttttagagggtgctttgacttgacagttacagtaacaacaagtgtaattaaaaaaaaaaaaactttcttttttttttttttttttgagacggagtctcgctctgtccccaggttggactgcagtggcgcgatctcggctcactgcaagctccgcctcccgggttccgccattctcctgcttcagcctcccaagtagctggaactacaggctcccgccaccatgccagctaattttgtattttttgtagagacggggtttcactgtgttagccaggatggtctcatctcctgacctcctgatccacccgcctcggcctcccaaagtgctgggattacgggcgtagccaccgcacccggccgaaatctttctttttacctagcatcctaaatatttgatgtgagacagaggtggttgaacttaatattactaaccttaaactagtttaacaaaaacccaaatttatatacatacatgaagtcatatacatttttaggatcacatgctttttcattggtgttgtataattgtggaggttttctttctatttctactcaatatatgctgctggagaaagtgtacagtgtctatgccacccaaaccggcacattacaatcatatttaacagaaaacacactagaacaacacaaagaataatgatggtgaagggtgaggacaagggaaagccaggaaacagattcactcaaacattttgaaagcattttacaagtttctgtatgaaaaatattgagttacctggaagtataggaaatgttttgtcatggctagaaaactggcttaaagacaaaggtaaggtaattgggcacttctctggacagagaaatgttaacagtggggatccctggaaatcatcctagatggatcttatttaactatttgtatacaagacatgaaataaattatacagtaaaactaaaagcacagggttcagtgctggaagatttatttccttgtcattttgtctaattttttttctaaaattgcaggctaaaactccagaccttctgcatgtcaccaccttggcacaattttgtgtaaatacttatcattgaaaccatttttcttggtaatcaatgatattgtttgagctttgcaggtgctattttgtctagccccaccagatcaacaaaaaacttttaccatcttcagatcttaaaattttgcatgttaaatattattaaaatacttttacataaaatatttaaagcttattaatagtgattaaaatttcactgtactatacgttttccaaaaagtttgctttctttttcagtagacaaatgctttgacaaagtcaggaccataaatctacattgcaatggtacactgtgtagatattactttttgaggctcaactaaatatttcatgtctgacaatgctcactatgtttaactacataacacattatgttaaaagttctgatgatatgttcaaaaatgtctttaattactttattgatacactttgataaaatttttatttcaaaaactttaatgcataaactgatacatgatgttctttaagttttctttcattaatgattgcaaaatttctttactagaacatgagctttaacaaattctctgatttttttaaaagtgttttgccgttcagctcctacaacatagaatttgaacttaatttccatccaacatttatatcattagcaataataaattatcaatttttaagtagactcaggttgtttttcattttagaaatacaaattgtttacttagttataatgatttttgtacaatatcagaacatgcctccagttgtgactgattttttctttaatctcctgaaatttagaatatttacctatttatgatacttaaagaaacattaagaaaataaccaaattttgaagtctctttactgtgggttttcattctaaatatttaatcttacattatatactatgtgtattaaaaactattcacacaaaaaattgaattgcattataattaaataaaagtaaaactaaacatcagaagtaataatttgaggatgataattaacttgaatagttttagatacaggagtagagattttaggtacatttcaaaggcagagtcaacaggatttatgattaatatggcttggttctatgtccccacccaaatctcatgctcagttgtaatctccgtgttggaggtggggcctggtgggaggtgactgggtcatgggggtggatttttcatgaaggtttagaaccatcctctgggtactattctcacaatagtgagtgggttctcgtgacatgggtcatttaaaagtgtgtggcatggcatctctccgctcactctcttgtccctgctcctgcatgtaagacacttcctcctcctttgccttctctgttatgactggaagcttcctgaggctccccagaagcagaagctgctgtgctacctttaagcctgcagaactgtgagccaattaacttattttctttataagttatccagtccctggtatttctttatagcaatacaagaatggcttatattgatgaattgaggaattgattatgggtacagaaaaagagaaaaaataatgaaggaaggcttgggccctagtgtctgtctgggtgagtggtgacatcattcaatgagaaggtactactctgcaaagaataggttttaagggaaaagttggagtttgggtctttgatactatatctagatgcctttaattcttttcagcaacgttttcaatatctgtaagagaggtatgacaacactcctgatttatagatgcagtaactaagatttggagatattgaatttaagttacttgaccaatgagctggctgattctggagctcaaaaaagaaaacaggccatgaggctacggagtaacaaataatcagtgaatttaatccagtagatatttttcaaagaccactatgtgctatcactatcaggtgctatagccagcaaggagagaattcaaaattctaaacttttgctagtcccaggcattagcagtgctggaacatatattctgtaagagaatatagacacagtagatacacttaaattcttgggcaacaactaaaggagataacaaaggtaacaatcattgaagtatttagtgaaagcagggatgtcagtgagggccctaatggtgtgaactgaatttctttctcaagatacaggagaggattttaatgagaaagagtgagatggaggcagggaaatcttcaggcaggaaactgcatgggtatagtcagcatgtacctggggaccatttgactggagtagaggagataaagatagataggcagagaaaggccacattaggcagagctgtgaaagctgggcagacaccttggattttatcctgtgggaactgggagctactgatggtttctatggctagagcgaaacatggtcaatagtcaccatttcttaactaacattttcctaggatgttgccaaactatactggcaacacttatattttacttatatttaatatttttcacttgcaatacaaatgacacatataacatctaggtggatattttgacatactaattcccttcagttccaaactcatcaaataatacagttttgtccaaaaagtggaattataatgtgaggttatgaaaagtccattccctcttaacattcttcctagcaactcagttgttttcattggctttcattaaaacaactttgtgtgaactggcaatttgttttgtaaatatcgatgaaagcatatttcagaaaatatgtaataaaagccaactcaattccagaaatctgcttgctgccagacatcagtctt

SEQ ID NO: 2882 - DNA, 13377 bp, Homo sapiens
  misc_feature 5463, 5464, 5465, 5466, 5467, 5468, 5469, 5470, 5471, 5472,5473, 5474, 5475, 5476, 5477, 5478, 5479, 5480, 5481, 5482: n = A,T,C or G
cccttcacagctaaataaaatcactgtgctccccactaccttcgtcattttctaggccaccctcttgaatggagcccatcacaaaaaacgtatgaccactagaaatagtctcacatacaaaaccaacatttgagaaccaggttggtacccaggaaaccacccctaaaactggaaattccctacttcttcctgttccactgttcttaattcccttgcaatcacatcatttaaacaaatccacaataatcattcaattagatatttacatattagtttagtttttgtaactaagcaaataccaaaattctccttaatatcatttactaacttttaaaatatatgataaactgtgagatactaaactacctatgcaatgttaaaaataacatcagatccctctatagctcatactttaactttgtttgcatagacatttaaaattgaatttgcaatactgaaataacccacacagcaagatagctacatttgaaacttttctataatatctgatttagtggccaaaaaaccatgttgcttggtttatgctctttcttacataggcatttatttaaaacatatttaacaacctgaaacttctgaaaagtgccagctgataaaactcccaggggaattttaattatatatatgtatgtatgaattatcaactatgaatttcccaaagtcctagaagttatggaggtggatgaaaactaatcaagcatgatgctctaaactgcttataaccctcccttctttaccttctttctcccatactcctccttgacctactcttcctcccatcttttcctttttcttacatttactgtcaaaataggaataatgactccttcttaatgtgcttacaaatcctgtatttttgatgagattgccacattaaagtataatacataatacattttaaatagaaaataagctcaaaggagttttgcagagactgtaatgaatctcgttattcttaaaagttatcaaatgtctaatgttttcctgacattttcaagcagagttcatcacaaatgggtccttccttgtgcgtttttacgaaaagaacatatacactgtccttcctcatttcaatgataaaagctgaatattccaaatgccactattcttcactctgtatatcaccagcatgaagcatgggtttgtgttttggacttcctgtttctaaatcaaccaaagaaagattcaggacatgattccataaaggcaaccactgagacagtgaagcccattatttctcctcccactgcaggccgaggtcaccatccctgtcattaccatgtcataacataattgtattactactccttatgtgggcagatactgagcaataactaacacatcacatcgttgtaaaaatgaaaaagtaccacttctttgtcctatcttagcataaaccagtgaaaacaatctttggaaatgacgctgcactaagaaactgaaaagaactgttatactctgtaggtatatatttaaactgatgatctgacatctttaactagaatagaaaacagactatatcactacagaactccaattgtaagctcatttaatccaatttattttggtagcttcagctcaattaagggatacaatgttacttaaaatagtctaattagatgaaactccacatggtactcatctttcaatgtctgaaatataaccatgcattaggctgcaagaggtgaatctgttaactccagcctccatgtgtctgtccagtctatgagctacactgctatttccaacctgacctatatacagcaacatgccatccgttctggctgtttgtgtaagagatgcctcaccacttgccttaaccaacatcattcgcattgttcccacaatgggctatgtgaaaatggagctactttgcatagtgatatgttcataacgtgtattagtcttacagtagagcaatactagttaaaccgtttccaaaaatgcctcctccagagtttattaactgaaaaatgtaagtagcatttggcaatctatagagcagcagtgccggaaagtgtcagcagagtaaaacaatcacatttagtttagaaagcttcaggaagagaatattcattttctccattagagtctcttctgacatgaaaaaaatgtcaccgggaaactgtagctacagttgtaggattctaaagcacagatagtactggttccgctgggatttagcacaccaactttaaataagcaaagtgttgacaggtttaaataaagataattagtaatttatgatcttatcaccctattaaaaacaaatcacctgacaactgactgctatttgtagtaagctacatattcattacgcctccgaaggaagcaagattactttgcagtattgttcttttggggatgtctgatccaacttgttttaataaatgtaggccagatttcttacttcaccttttccaaacttctgtccttcttccatttccctgcaaatccctcatgtcattgcaaaaacaaatgctagttgactgcattatgcacaactacaattgtgggctggacagaaattttgtaccaatgctaatcatggtggagtgaaaaaactcaagtgcctggatttgtggggcctagaaaactatccagtacatttaatataatcgggaccagtgacaatatatctgatggactgctacacagagatgggccagagatgtccctggagaaacatttcctgaagtcttcttccactattagaaacatgtcttatgactttggattttaaaaaatctatattctctggataagttaaatagaagactcgcaactagtctacagaaagggtgcctaattgcatttaaaaagaacagtttgcttcttatacacggggtgacttaaaaggaacttcaatggctagtaaagaaattctgaatactttctaaattaatttattcaattcacagcacaacccctaaaattatttaaagcacttaattggaaaatgatttaatatattgaagtaattcctgatttccaaagcatttaacttttaaattaaatctgaccctacttatcacaagaacgaggaggaaatgtgtatccaagtcattaacttctttttggggcctaaaatcactgataaacttaaaagatttgtccagtctcattgccaaaatagttctgagcttttggttccggtaactacagggaataagtctttactctccaagatagggctgcaactttattattttttattagcaatatattggtgtcataagcaaaataaaacgtaacacaatacttgagtgtacagacaaaacagttttagactaaaagaactatgtcaccagcaaataatgaaacttcatcacacaaactccttgcgcttgccaaagttccccgtacctttcaacttgcccgtagctgaagggctccctgtaaatggaagcccttctgccttgctcaagactggatgtccctcttttctaacttgcctaaaaccatcggcacacagcacagtcctttgagtgggtctcacactggacacagcatcgaggacttctccacggggaagtgtgtgtgtgagagcctgcctgtgtgtcaacactgtccaagaccggagctgcgactcggtcgcgtggtgcggagtccagggctgagaaggcagcgcactaaaatctctgtatcaggtaaaaaagccgtttggtgatgactcgccaccaggcaaatgttggggtcccaacgatttttcccgtggaatgcaccgagggtcgccatggatgtgcctgcaggggtgtgagtatcaggcagatttatcaccaagcgagagttgggcgtctaaaaggcccgcccacgttttagagaactcaattctctctgccaacgttcatccaacgggactgcttagacacgccaactagccctaggcgtgggcagtcgtgcccctgcgaccactctgggggaccggtcccgcgtgtcctccctctctgggatgagagagttcgagaagccgggagagtaaccccctccccgtaccccctgactgtcctataggtggacccagccgaactccgcagcagcccaggccaggccccacctccgggtcaccggcatgatccgcctctccccgggcccccgcggccctggcaccgaggtcagcgggccgtgggtacagctcagccgcggaccctgctccgcgagtgcgggactttggacttgaacgcgacgtgctcgcccggctcccaacaaacttgcaatttccgcgcgaccccttaaacaggaactgttccccaaaccttgacccagctaccccgctgtgctctggccgcggacctgtgtccgaacccgggctcggctgccggaaccggtttgagaaaacaaaagattgtggggcagttttccctgtggggggcaggggcgcctcccaggtccctgcaccccgaccccggctgctcccctggcaactaatccggagaagggaagtggtgccacgagcccccactcccggggagggagggagagagaagggggaactgggaaataaactgaattctcttactctcctccgttcctggaccccagacacacccccaaagtattccacggttttctcttattattttttaaacgccccccggcaaacctaggcagggatccttagccgcgaacagcaggaaggaagaatccgagcaaatcgtgtcactttccgcacaatcgcggtgtttggcaagcccccggactactccacaatatttactacccaagcgcacgcaggctgcagcgggctgcgagccgagccgcccgggaccggcctccgccaagccggccccgccgcggcccggccaccgccgctcccccccaggatcaagcagcaagaacacggtggaaacaaaagcagagcgttcaccttgttgcatagtaggggtccaggcagggagaaggtcccagacagggagcgtcgggcgcagcggcgggtgggctggaggtggataaaatcttacgtccatttcactctcacatcaagcaactcctttctttttccttttttaaaaaaaagtgttcagcaaaacaagcttagacggaacagagtgagtgtctgggctcaggagtaaaagaaacaccttccttccctcacatccgtttgtggtttgttaagaagaagaggaaaaaaaaaaaaaagaggggggaaaagcgctcaactctcccccaagcgcggcgcgcacccgtcggcgccgagcgcgcagcctgctccaccgccgcctcttggtccgccgccgccgctgccgccgccgccgggcaggtaacttcatgcgctcattgtcccccccgccgcccccccatccccgcctcccgcgcccctcgcagcccggcacacgcgctcgggctctggtactgggcgttttattggagattctgagttgttctgcttgtagtttattttctccacttggaggcccgggatgtggggggtgggggggtggnnnnnnnnnnnnnnnnnnnngagaacaaccagacacaaaaccagacaagaaacaaaaacgaaaaccacacaaaagcacaagacaagaaaacccacaaaaaagacaacaagcacacgacagagcaacaccagaaacaaaaaacgagacaagacgagaaaggggggaaaaaggaaacagaacaggcagcaccaagaggaaaaacggggaaaaaagaggaccaagcgaccaacgggaaaaccaccaaaaaaaccaaaacacaaacccccaccaacagaacagagaaacaaaaaaaaagggacaagagaaacacgaaaaagaaaaaaaggaaacacgacaaagcaacgcaacacaaaacaagcacacgcaaacaacaaaaaaaaaaacacacacgaggaaaaagaaagaaaaggaagaaaagaaaacacgaaaaaaaggaaacgagcgacccgggccgggcggggaagggagcgcggccggacgcgggcacgacaaggcccatggctgctgttcggaaccagaggccggggaccggagaaaggaggagcggagaaggagaggaggagagcacggcctggctgggacagaagcggtgggaccctgggaggcctccgctgtcccgtgccgcgctcctcgggaccagcgcgtcgcacacaaaggggctgccgagccagagcaccagcgcctcagggcaccgtggggagcgcgcagctagggggcctgtgcgcaccccgcccgcagccccgcccccggccctccccggccccaccccactcccaccgccctctccgcggcgtccccacccctatctccgcgacccccactcctcctcggctgttccccaaccctgtcacgtgctcccctccctactcccggcccgtagtggaggtgactttcctgcgcagcgccgctttgagggcggagaacccacagggagtgcgacccctttgcacgctgtgagtgggcaactgtcgagggactcgagccgatcgaagggtgaggaccagctcgcctgggggtggacggcctggaaagccgcccctctttggcttccctctgccgcctgcagcccgcacccctccgagattcggccccactggacggtttgcgaaggctgaggctgccttggggactcacaaaagaccacagggtgattcgaagtgtaaatagggaaacaatcatcagcacacaatccggctaaagggatacatatgagtttgcttgttgtccttcatgggattcttctctttttatagctggacgcccttagggctcttggcagtccacgaaagacctggagtccgcctccccatttctccggtcggtagtggcaggaggaaatcgccaaacatgttttcccgctttgcctccccaactcggaaactgcaacttgccgtgtcctggaggttgagacaatttggggtctcttggctgccgtccaacaatttatctctgagggcagtgtccttggtgagaggtccaagtaggtgtgggcgacattttctccatctcatgagggagcagccctgcacactagggcccaaaactctgcgaaggagcttgaagttcttcatccgttccacttgttttgctactccacacacccttctaggacatgttgttgccaactgctctgtgcagctttcccatagctgtctgttcccgtgcatttcggagcacaagcaaatacgagcagagagacctggaaaaaaaaatgatgaagacagtattaatgataaattaacatggctgagtgaattgtcaatgcaagttcctttactaactctttgttaagtttgctttgtactccttacatcctctttctcttaagccattgttttaatttcttctcgttatatttttaaaagtaacagaaatacagctttcttcctaccttcacgattgacttggtggagttgggttgcaaagaggaagcagtaagaaaaaataattattctatacattcacaagtcctcaaggcacaaaataaaagtaagaaatagaaaatatgtcctttctcctaataaaggtcttataataaaatttaaatgaagttttgtgtttcataacagcttcccaaatactgttgtagaactaaaatgtgcctgtatgtatttccttccacaataataatagtaataataaactttttaggtccaaattaaacatttctcagcttaaatttctatcctcaatccaacatttattatacaaaacttgatttttaaaaataaaactttcttggaattcatcattgatgtctgtttgatgcctcgtgaacatcaggaagatgaaatgaaatggttcaagactggaacaataccattattgcatcttgactcctgggagataatgatatctcctgctttcctctacagacctaccagtttctctgctttaagggaaaatccaaatgcatgagacctgtgcattcttctacataatcagagtctggtttcttccatcggagtgtatggagttaaagtggtatactgtacatggcatgtgtgataggtgggaatatgagctactgggggaaaaagttcttacttctagccacttataaaagagaggccatctcagtgtaatctgaaaaaatgctcactttataatgctgtatccaagcccatcaaaaactaaatggatgtatttgtactaaaagttggggaaagttgaatatctaacctctgagcaaatctttcttaatttagaaaataaaatagagcatcattgtaatactttcagtttcctggacattcaactccacatcatggataaataaaatagttatttgtccattcctcattcatttgtacattaatcaacagagagagtggtgaaaaacactaatgctttgtatatttataggtttaaaatacaaaacaaattacttaaaatggttcctgctctagatgtagttttcagagtagtattttccaaactagtctggtcagtgaagtcatcttagcagtttagaaaatactcatgccagagccccacacgcacagattctgattcagttcttttcaggtagggctgagcacaggaatttttaaaagctctccagtggctttaattttcagaaaagattgagaacactggcctaaaaggaaagataaggtagtctagaaggaaagagtccttaacaaaggaaagttaaaagtatgaaattttagtagataggctggattgtcattttgtgttgatccccatagaggacattgaggatcaccactcccaaaacctcatcacctacgctgccttttagagatgagttggcaatttgcccatttactgtcagtaaacttgcatgacttgtaaaggtccaggttcagtttattcacctgacctaggaactttatgtactctagttaccagaaaatgagtgccttaaacaaaacgtgtctttaccagtgctgatgtaatgctatcagtacctacttgtgaaatcctactatatcgtggacctggtcctaatttctttacattgaatttcgcagtcttatttattttccagattactttggaaagcctcatcagtaattacaaaccacacggagcatttgatttgttccctcaacattgcccatcttcactttaattatagtttcacaaattgttacgtttcaaatttatacttgttttcagtgaccacattttatgtctactgattctttgtattatgtggttaagtcctaaatcttgtagtaatgtctccaaatcacatacagaatgtgttactttgggaaaatagcttttagacagttaatcctatctgtgatttacaagagtcttataaaaattttcaacaaaccatggtacttcctggcaggcattctttgctagattttggagttagttttcttcaagggttgaagccctctatagatgcacatgagaatgaaatgtcatatagaggggtgattttgaaatgccagatattaaaactaaaatcaaagcctgccgtattgtataactaaataatatttagcccttcactggcctttctgatttatgggctagttttccagtgacagctgtgtcgcaatatttctagggaaaagaaagcctcattcttttaaaataccattcattttatcctcatatggcccacctaggattttaagccctcattggacatgtgtatacccaatgaggtacatggtgaagtagctatttgtttccttagaatctagccaatcctgagtgctatacatttaaattcaaaaggacatcattaatggttttcatgggaaatgtttacatgttctcaattaccagttagcatttactgttgtccagggttatttaacatttttctaaagtaatttaaattaaaatggaatgatatgcaataagtaatatctttcaatggaagaatgcagagtactgaatttatttcctggggagactagtgagaaatgactagattgtaagtctttctaccagaaaaaaaggatttcagaatgatgaggaaagtttgagggaaatgaaacaggtccacagatagctacatggtactaaatgactcataaaatgcagtattttttacataatttgggaagtgtgcctgcttgtacatctcaccattgagtgtggtacagtactttgatcttcaacaatacacaactttgtgacataatagctataataggactattcagctattttacacggcaataatccagtctctctcatcaggataaactatgaggacaaatcctttcaaaatcagaattagttccttgagaagagtgaggctacaattatcccttaaataggagcagctgcaacatggtatcggcctgagcatggcagtgaagtgtttttccaatgcaattaaatggattttttaatgcaaactaaattctataaaaagtcaattggtaggggagtaagtgtggaattgctgagatgaaagaaacatcattttgcttacctgagttaatattcctgccttagtaaatgatattttggtaagaatgataatcaaggctcatattttcctgtgaagtggggcccaaaagaaaaccagagtaatacaaggaaagataattctggtttatttgtacactctacatcttattttgaaatggattcacgccatattttgatattgtttttcaaaatggtatgatgagtgaacagcaacatttcaattaaacagcaaaggtaatactgtggtggaaaaatataaagagagctcacaggacctatattgtcagtgcccacatcgagaatgagacaaagaggaatgggaacttaaatttcttaccacaagatgattaaaggatcagaaaataagacctttaagaaagattaaaggacctgtctaggggaacaatactgagaggcaatgtaatgtcttcaaatcgtatatatccagagctcgttcacagcaacagggaaagaacacctccacggaagatatgacatgaggaattggattttaatacagaacatggaggactaagcccacacgaaaagaatttttcctagcgtaagcttaaatgtatgccaaaggagaggtgtcggctctcagtaggactgatttaaaaatctctgcaaaccaaatttgtgaattcacctgcacatccactgacacccttcttgagtatgctttccttatataaatcgagtgggctgatagtttgaacttagctctgattatctaaaagacatatactcataattttggataacatatagggaagttcagccagatgtgagctaaataatctcttacagttcttgaagtcaataaatgcttccctttatattatgacttgttgatgaatattttcaaggacttcgttacacagaaaaataacacatctgattttgcaggcaaaatttaagatatgacataaactaaaaatcaaaataacacatttctagagtgttacattagtaaaaggatagtctcactgatagggatggtcttttaggatgacctcagagccaaaaacaaaaggagtcctcctgcctactatcatatattttaaggcatggcattcactaagtcaaaattcacacatttttcagaaagaaataccccagattcccaatcaggctgatggccgttgctgaattccgaattatccctgaaatcttccagggttgtgtgggtaaatgtgactttgcaccctccccctacccgatctccccaggaataggtactgtttccttccactaaaaatccacttatgcttgacctttacatatgtgattagctatctacccatgtattgttttaatgtttccattttattcctaatggctttgaatatgcctgtctctattaatgtgtttgatactgattataggctcctagagagaagggcagaatctctttgaacctgactttgaatctcttcaataggatatatgaccccatgtacatcagttccttaaatattactctttgcaagaagatgacctcttctgaattgtgtctctccaaattcaattcacctgttgaggctccaactctgacgtgatagtatctggagacgggttttgataattaggtatagacgaggtcatgaagatgaggccgccaggctggaattagtgccttataagaaaagataccagagagattgctgtctccctccctgatatgtgaaaacacagaggtggctgtctacaagttacgaagagggcccaccccagaaacatgtgatgctgacacctgatcttggattttcaggctccaggactgtaggaaaataaattcctgtgacttccagccccaggactatgagaaaaataaatttgcccagtctatggtattttgttataacagcccaactaagacaacaacttagcaatctttttcttggtctcagccagagttaatttaggatgctctgatgcagattcaaggtataacagtatataatcacttccactgcattaagacagcttagaagagttacagtagtcttatattctctatgttgcctcatctgtattgttatagttcaaatcacctttagttaaagaaaccattattaagagtcctctgtgtgtcaggtgctgtgactacagtatatgttagttgctgttgatcctccttttcttccccttcccttttctgctcttgctgccttacccatttatgttttctgtgtcgcctgtatacacatttgtaatctctagattgaaattagtcagagaatgaacagagaaaataacacttaagccaagagaagagcatgaacgagtcggagaggcttcaaaaacaaagaaaagtttggaaacaaccagatcaattgagtattgctataatttttaaggtgttgaggtggaagtaggaaaaggacagatgcaagagaaccagagaggagacggaggaggttctgatagttgcaatgttgtccttctaactgaagagctggactctctgttggggagtcttgaagagctttaatataggatctaactttgatatatttggttataatattttatgaacaatgggatttttcacacactattttcgttacagtaaggattcataagcaattgcaggaactacttactacagaaagagagagcagatactactttttccaaattctataaatctgttttagtagctattgaatgtaaatatacctagaaaaatattgagattgttaccctctgtaatatacctatctctttttttttttttttttttttttttttttttttttttttgagacggagtctcgctctgtcgcccaggccggactgtggactgcggtggccaatctcggctcactgcaaactccgcttctcgggttcacgccattctcctgcctcagcccccgagtagctgggactacaggcgcccgccaccgcgcccagctaattttttgtatttttgtagagacggggtttcaccttgttagccaggatggtctcgatc

SEQ ID NO: 2883 - DNA, 100000 bp, Homo sapiens
gccaagtagtgaaatcttttatctgcaagttgtaacatggagtgggagcaagcgattatgtgtggtaatagtaatccagcgatggaggccgagtcggttggaaatggattgaggtaaataactcccgcaccatgataaatgtgaacagcgctttgctgacagatgatctaacaggtgtcataacaactatataagaggatttatttatgaccagccacagccgcagcactgtaaataactccagcagctgcacaccgctgaaaccaagtccctgatggaggaacggtgcaggagccaaagaacacaattcactccagaatcttaatcatcaaataacatttttttaggtaattaaccacagcacagaaatcataatgactttcaattagaaaactgggctgtccataactttgttacaaaatatttttatttaggccctatggttttgatgagtcctgaataaaacaaagacttggggtcaaggaagagggctcttggatgatgaggatttctgtgtgatgccagtaagagccctttcacactggcttcattttttaagactcaaaaatcaaaccttaagttggaagggcttttgtgtccgccaaatttctacattaggccccccttatcagcatgcttgagttcgtatttacccttggttgccattcctaattttatatatggtttattgacaaaatgaaataagcatcgaaagatgaactcattagaaacgacgtttaaatgtagcttgaagggcctaccttcatcgacctttcttaactactttgcaaaagcagaatttaagttttcttttcataggtcatggcttaacaattccttaccatccatggagttggttgaccctatcatgacataaaacttctcttcatcacatcactaaagaaaaaaaatatgtggttcttacatggggtgagaaaatgctctctggagtggcggggggaaacgggaatcttggtggggcactgtttgagaaagctaatctctttatctcttcccccactatgttctgatactttctccttggcaaccactctccctccctcctatccagggcagtgaatgaggaaggtggaggtgaggtttccctgctctcttcaagtcccacgcatcatctgcaggatccaaggcctgacatggttgagtctactggcagaattattaccagttaggttttctaaacatctctagatctcaggataaagatgtttcttgagttaccctggatctttggtgtctctggccctcaagattgcagatgtcttagactgttatcagtgcttagactgttattaaaggcaggttcatgtcagtttctgagggttcagtcttcagttgtcatatttactgaatcagctaggaattatatgcacaagtgactatgtacataaaactggcccagagaaagacaaacacaagggaagattagaaattttaatatcacctcagctcacaatactgaaccagtaaatagatagtaatggaatttaatattcttttttttttttttttctgaacagagtcttgctctgtcacccaggctggagtacagtggcacagtctcgacttattgcacctctgtctcctgggttcaagcgattctcctgcctcagcctcccgagtagctgggattaaggtgcccgccaccacgcctggctaatttttgtatttttagtagagacggggtttcacctgttggccaggctggtctcaaactcctgacctcaagtgatccacccactcggcctcccaagtgctgggattacaggcgtgagccaccactcctggctagaatttaatatatatatatgttttctttttctttttttttttgagacagaatctcactctgtcgccaggctggagtgcatggcatggaatctcagctcactacaacctctgcctctcggattcaagcaatcctcctgctcagcctcccaagtagctgggactacaggcacgtaccagcacatccagctaattttttgatttttagtagagacagggtttcaccatgtttgccagatggtctcgatctcttgacctctgatctgcccacctcggcctcccgtagtgctgggattacaggcgtgagccactgcaaccgccagaatttaatattctttagctactttgactctaagtctgaaaagaatcattttagacctgcaaaggcacaggaaataactaaaatccccaaggaaatatctaaaattggcctttagcagaagagtaacataaacaatgctggcttctcctgatctctatctagttcaaggttttccaacctttttttctgcctctacactatttacaagtgcaggctactcccatccatgatactcaaccattcatttctcctgtaagccagtggtccctaacctttctggcaccagggactgtttcatgaaagacaatttttccatggatggggatggaggggatggtttctggatgaataagtgcatcacatttatatttagattctcataaggagcatgcaacctagatccctcacagtgcagttcacagtagggtttgtgctcctatgagaatctaatgccactgcttacatcaaggaggcagagctcgcctgtcacttacctctggctgtgggccaggttcctaacaggccacgtagtggtccatggcccaggggttggggacccctgctctaaactaccacaggccattgagtggagacatggggaatggctttgagagaaagggactgtgtgagaggggaaagagaagtagggcaaggagggggagtggaagcatcgctttcttaggtgtggccagtgttgctttctgacaaaggtattttcaaaacattttaaaagatacagcctcagctgagaatcacatatttgccttctcccatgcctagaaactctgttttctcttctatatgccaccctacttttaagaatagctagtttcattgcctcagtggaaccttctcagacctctctagccactaatcacttctcccctaaactcaaaggtacttactggtgttatctgacaattaatcacgccacactgcccacaatgtttctcacaaaccatctcagctttcaaacagccatgtttcaagtttgtttgtaagttaccatgtggaatctaacatattttcctcagaaaacagtatcacatagtggttagttcccaggtcagataataaagttctgcctactccacaactcagctgaaaagcggtagaaaaaaaaagtcatgttaccaaagtaggatacaagagaatgaattgatcatgaaaatgtttctgaggttagaaagcagggggacgggagccggcggggaagaggacttaagaagataaacagcacagtcgagaagtcattgtctttcaattaatcaaccccaactgatggaagaacaaagtgtgtcccccatggccggccagtccagtgcggtcacctgtgtaaggaggccatggagggaaaagctggggccagcaggcctctggggctgccaagctgcaggacttggcacctgaagaagtgtgggtggggcggaggcaaacctgtgttaggatgtaagcaacacttatttgcaaacagggctcactaacttagggaggtccacatggtcattcctttgtttattgccaattagatgtacgttttttgagtaagtacagagcataacttatattttactacacccctgatgaggttactgtagttctccacattcacagtagatatagtctttcagcaaaaagggaatagaaagctctgtttttttttggttttttttttttttgagacagggtctcactttgtcacccaggtggagtgcaggggcatgatcacggctcactgtagcctccaactcctgggctcaagctatctcctgcctcagactccccagcagctgggattaaaagcatgcaccaccacacctggctaattttaaattactttagagacagggtcttgctctgttgcccaggctggtcttgaactccgtcctcaagtaatcttcccacttcggcctcccaaagcgctgggattacaggaatgagccccacagctggcaaacatagtgctctttttttctctctcattttgtgaaaacaggattccttctccctttaaacaaagttccctagaaggtcagagagacaacagagagggaacaagtcggggaaagatcttaggttctcttttagctggtccaacttttctttttttgaaatcttcctcagtctggattcttatcttgtctaacatctaaattcttaacaacgggaacacaggttaaagggcaaacgttttgtaagctataaagttattcatacgtttgcaaatagttatcgagaggacaagtatacagtattttaatttgagaaatgcattgttacagtctctttagaataaaaaactctcataataaataaagcaaatgtattgtgatatcaaaaatgaggcttagtctgaatatactatgagagccattcttcaagattggtgtacataaaatgtcccattaagtgaacttaaaatgaaaaaatatagctagaattaagaattcaacattgactaactcgactcaatgaacaatttaaagataatcatggattatgacaaagttaaaggaaatatgaggcaaggaacctgaatcaccacaccacaaaagaaaaaaaaccaaacctttaacttggggctttggtcgttttctgttttacgtgaaaaacattttaatgatattaagctactagtgttaaaatggtttaactggtagcgcacattacaatcgatacatactgttcactgattcatactacattatatattgatttaccataattttaaaagttagcagccaaaaataacttagtcaaaagtaaagcctaattaaatttccttagtttaaaaaaatacaaatgtgtgaactatcttttaaagatgatgtcctaatttaaggaaaaataagacctttctcaatcacaacatgcactttccctctgctgaagacagcatggatataatttttttttcttcctcagaaaacaggtattaaacctgtcaattctgtctgacatttcaaaaagttattgacttaaaattcaaagttatgaagctctgacaataaggctaatatggaaatgccaacgacctgcgattacaaaggggcttttgggtgtgtaccacagcgcccaggctccagagggaagtggaactcgtggcttccatacattggtacaaatggtacagaatgtacacatggtacggaattggcacaaaatgtacacgtggcttctgtcattgcacttctgtacattctcttcccggagattcagggctatatttctttctggagcagaaaatttaacaattttgtttactcttgtcatcccaccagcttgaaaatttaaataattttcgactctgttttgttcttttcaatatgtatgttccaagaaaattccattcttttctttcagccttcctataatgcttcaagcaatgtacagtcacttcctttttactttttaaaaacattatgtatgtggctctatacaaaaagaactgagtagcttatactacctgaaagtccataccttgcttcaaaaaggaagtaaaatttcagctggttttaaaaaggtacgaaagtattgaaaagttctctgattatagaacaaccttgaaaacagtaacttaaggtagcaaataaaaaaatactctaggaaaagatgctaataggttgatcatataactagttttaaacatttctaaagtttatgctagttagtttccaaagttgggcataaggaaaaatgagattcaaagaattattcagcaggccacataatcagatatctactaatagatcaaaactacctagaagatgttattttgcaatatgaagatttttgtttttgttattaaatacaccaattttttttccttgggtaaactataagtagaaaatttacttggtttggaagtggtttttctttcgctaactaaacacattgcttctctgcataatgtaacactcaaaatacttgctttaaaataagaaaacttagcatatgaacttcaggattattaatagtttctcattaaaaatgcaaagacaaatatgatcatatgctagtttatttatcttattattgagagataatttcatgatgacagttatcaaaatcaattacaatatcaagaaattcaaagaacaaaatcttgcagagactatgcttttgttttggatttaaaaagtatgtgatctcattttcacataccaagctgagaggccatttagatatctctttgctaatttttgcttactgctgtagggaagaagatttccaatgaactttaatatctcattcatgtctaccattgtcgaaaaagagaaggaaaacgaggaggccaaaagaacagcaggacagagaaaacgccacatggattcaagagttgagacaactgacagtaaaataatgctctttggttagcaaagcaaaaagggggaaagtattgcatacatgatagatacacatagcattctaaagcaggagacaagaatgtcaagagtgtattctacccccactgccagatgaagggctattattataaatgaaaggcagcagtagtggatgccaggcacttttgttgtggccagattctaaagtccagatgtaagcaggttacccctgagacaggacaggcttcagttccgcagcagaacagagccaatcacagttttctcagtgtttatgataagctgggctgtaggccttccttcagttccactgtgactagcatcaatgacccactgtgcacagttttagctgaaacctggaagagaaaaaagagagaccttttatcataagatggggagggtaaaggagatgcatacattcaaataggattaaaataactcttttttgtcaaatgaaataatttgctgcagctccctattgccaaaaacccaaagccaagcattcttctgaaaaatcaataaactgtccgcccatgctaaccacaagcaggtaattttagtgcacatttaaaacagaacagaaaaaggagtctattttacttattagtttaaacaatagatgcatgtgaataattctccattacaattatttgagaaccattcatccacttggtatttaacatttcaccatgcatagggacattttaataagccattgtatttttatttttaaaacatgttaagaaaaggtacctttctcaaagacttcaaaatttaactcctcatatctgaaaatgattatgtaataagttagataattttactacattataaaattcttactaagtttcaatgaattcactcatgtaacaatattcaaattaatctctaatgttaatgatgacatgaagcaaaatcacgtgacagctaagtgcaacctcagcttccctttttctttgttttgaaatgtttaggacattagatctttctttctgtagagttaaacaaaaacatttccagaggaaactggaggtctaaagctctaactctaaattccaagcatgaagaacctactgattacacggaactaaaagcaaaactagccttttaagcactgcattgactgaaaagccgttgcaggcataacgaacttctgtcaatcctgctaattcattctgatgcacagttgagcctcagggtcatgaaggaagaggacaggaacctcccaagcctccctttccacatgaagcatgttccacacactttttgggggagggggtttgattgcagggatgatggagaaaaacaaagttgctgcacatgagcttttgaaaacactaacaagtgtagagcagtctgtgacctgctgtgaccccactttgcagggccaatccccttgcccctttctatatgaacgtgtctgaatctgagccatctgcctcaatttgcgcaacatcttcagccacaatggcaccagttagccctgacaacagctcacaatacataaaaataaaactgccgcgctaacagcagctgcggactattcaagagcaaaccaactggtcagtgtctcatgtctgacaattagcatggcctcgcacagagcccacggtgtccacagggatctgtttaattaccatcaacataaaaagggagtttatcaggagacactcagaaaaacttcactcccgacttaattaaaatattagcacttaagcaggaagcagattctctttaaatgaaaagtaatttcttttttgggttttttaaaaataacatcaagatctcataacacattaatttttttaaaaccaaacaagccattttggacaaataaaatcatgaactaggttgtccaacaataattagaataatgtatccaaaccaaacagatatgctaattttactaaatttcaaatattataaacactttgaagttgtgtttaaaatgttagctaatgggctatcaacaaaatatgttagaaaatcttcctaggcatttgctgtgcactctacaagcatgctgaaaacttgcaaggaatctgacagagcagtattcctacgagagaagcaattgtaagtaaccagtttaggaatataaatcataccaatgtttttaaagggtttttataaacctcttaacacacacatccatctgcttttcagacgtacacatgagagttatgaactaggtacctcaatttcatctttgagaaacataaagatcaccagccctaaaagatctctcttttctaaggctcctcacaggtttatgcatttcttttgtctaaatttttcagctcttctgcttcataggagaatgctgtttctatattcctgtaaaaccacgtcaccaaagatatgaggtggctctattttcccattcatttatgcaacttttcccacagattcggtcacacgtgtgtaattcactcaacaaatatttcaacagaggtccctatttctgacagggttaaattatgtaaacaatagtcttattagtccctttatttacttaacacttgtgccttgggacatagagaaggagattatgcctgaataggaacacaaaagcactgttgtttgaatttcaggtggcacagccccaaggcacattttgtctcttttctattaaaaaacttagagttaatgtacaattaatataaagttggcagagacaaatgtcaattttggtgtcagtatgttgacagaattagaattagtatcttggacatatttttgaaatcctattgccacaaaagtctcagtacataaagaataggggtatgaaagaaaagaggcatctgcttacgctgcaatggaaacacacaagcaaatcatcctagcaacataatctgctagctggtgtaaaagctactgcctttattactaggtctctatgttctagtggacacaaatggtggaagcaatgttttaaagcggaagacagaagatcagatgttctgacattctcatttcacagttcagaaaggatatatttaattggacacagcatgatcaaaattggtttgttttggccctcggaaggcaaaaaccactaccccaatttattcatcatttaactcctgcacaggctatgcttcaacatacatgcaaaaaatagtatggaaagagtactaattcataagtaataaatagctagctttgggatgtcagaaacattattataaagtcagcgtgggtcagatatttacatactaaacttaatggctgacatcagaactctgtgcttggccttgaactaagatcacactgtgacaaaattttttcaaaaggcatgaaaatttttgatcactataatgatgatagcagctatcatttgttaagcacttactgtgtttggcagtgggttctaagtgcttcactggaattatttcatttaatcctatgaggcaggtcctttatagatgaggcaagcgaggcccagagaagttgaagaacttcctcagggccacacacaaatttctggttgagcagaaatctgaacccaagcattctgattccaggtcacacaaatatcttcatatatacaaaaatgcacccataataatttgtttttatcagtcaacagataaatttttcccatttacctaatatacacataatctattattgttccaaaaacattaagaaggagagtcctctcttcaaaaattgtttacttgattttgtagtaatgcgtaattcaaagcgtcggacttgattcctcatatattttacatttctgcctttaaagatttaaaacattttaaaatcccctactctcctctccctaaagagacaccagcaatgaaaaatacaaagcctttttgatggagctgtaacacagggagggactacggggagaccaatcaacctcgaaaagcagtaaaccacaaatgagaacaaataagtgcgatgacagttaaagatgtattgcctgtgtatgacggctccatgttattaaaaggacaccatctagatatttttcatttcattctatcaccaacacttgctgtttgtaatcaccaactgagaaggtaaaactgtttggctatatctgtatttctcttattaaatgtctttgtctattatctccagcaattgacatttaatctttgaagcctaaggaattcttaagatttacgaaaaagacagaataagctggttgtcaaagctaaataaaaaaagtttcattcttcttaaaaagttattttgtcttaactatagtcataattataaaaacgaccaaatagcaacaacaaatttgaaaaaaatctaatatctataatacacagatttatttccatgcacttaaactatactttttaagatttgtaacaaactggctataaatcatacatttctttgttagaaggaaaagaaatcctataattcaattgttctaacaattaacattaacgtacagcatgaatttaaaagtatttatctgagaggctgcgtcagtctccagggtagtcaaaacataacattttttacacagaatcagatttgctatacttaatgcaacagctctaagaatgctttttcttctcttggatagtcttcctggtttctgatttttctattctgagttcaatttcttgtgctttctgttctactggttaccagaagctgtgacaatgacccactcaggctaaacttttttttttttgtactctgtacatgaagccttcaattactgcctgctgaagcagcagaatcctattagtaagaaagacgatcacaagatgcagtgccctgccctagctgtataaaataattagtccaaagttgacaaatgtgtaatgaagtcgcacgatcattatatgtaagaatactggttggaataagcctcctaaacatcaataccaaagtatagtgatttggagcgcatctgccaaaggatttaaaattataaatctttattaccttgagttattatagtagaacatttaaacaggcagagaatttgtaagttgtaaaaaattctattttgttgactataaaattcattttaaagttaaaccattacactattgaattaatagtgaaggacaaaaaaagcatttcacgtgatttagttttagagaatttacacaaagcaatgtatttttcccagttatttaaaaatcacctaacaatattgtagtattttcctctaacgttcaaatgagaaaagttaaaataaaaataaacaaccaccataatttaggactctctagttcctactctaatcttcagagatgtataaaaaaattattccccacactatcaggccaatgatgcattctctttctttatatagaaagctaaaaaatctaagtgcccttgcttaaagaagacataaaacatcccagttatttcgagcatttctggtttgtctggtgggggtggggtgagatggggttaacaagggaaaactatagtaaaacaaatacattcttaccccattctctttgattccttacaaaattgtcaaaccgaaggaaaagcatcaagaatacctttctttcatttttacgtgaaacagttacagattccattagtaaaattgttgcattagaggacattaaatggtgaacttaaataaaacttaaataagaatgttttaaagtaaaaatcagctgtgcagtttggttacttctgaaatatccaaatagctttctgtgtgaaaattaactgaggtccgcatttgtttgtcaatgaactgatgctcaggcctgcagagttcaaagcagtcagataaaaatgcagtgctgtcctctagtggacagccacaacctgagaaagaactgttttgattactaaagaggttctacaaatcttcagtcctgttgagactcaaaatttgtcatattgtagaaaagacctgagcctgatagttttatacttaaactatttatacaaaattttgtttctgtttatacaatgaagaaggttgacagtagtatcaggcttatacaattagggcaacaagatgtccaatgttatttgaaaagcaaaaattctttgggaattacaaattctccaaaattacccagaattcaaatcccatatagttaccaacagagagaaaacaactaacaaacaaaaacagtaactcaaaagttaatcaaactaagaatagagaagggaaatattagagaccccatcaagaagtgtctttgccatttgtgtttgcaaccctagcccagcaaaatctgtcacaaaggtctccaaaaaaatactaagtgaaggagctacacattaagatctttttaggataccaaaaataatgtgtaccagtatttcccctattaacaaccttcaacaggtatgcaataacagtgattaactgggtgagtttaaggcctagatatggaacaagtggccaggcacagtggcgcatgcttgtaatcccaacactttgggaaaccaaagtgggagactgcttgagcccaggagttcaagaccagcctgggcaacatagggacaccctgtctctaaaaaaaaaaaaaaaaaaaattagctgggcatggtggcatgcacttgtagtcctagctaccaggaggctgagacaagacgattgcctgggcccagttcaaggttgcagtgagctacaacgtgccactgcactctagcctgggcaacagagtgagaccctgtcttaaaagaaaaaaaaaagaaatgaaacaagttgttctttacctgtacttgaattaaataataagacttttattttaacctgaaataaactgtctttatgtgtgttgataaattaaaaagttgactacttggttgcaatggatacactgtttcactcacagcaccagactttcctaatagttaaggacctagtgcaacagtaaaccaacatttattcgactaggattgtaattatccacaagttgcatatggtaaagcttgcaaatttaaaaagtgacaggataaacaaaatccaaattactaattaagataacgggggggtgggggagggggagaggggaaggaatatcagtagtgaatacaagttaatatgaaagttgctccagaatcttactgaataagctaagaactaaaatagaatcatggcagaacaggatgttctgtcttcaatcaaatatcaccttttctcctcagagggttaatttgcggtcatgaaaaggcaaaatgagtaggtaagtgtgacaactttttcaacaatattattgtatcaaatgtcaggatttctgactatgggtgaaaatgtgagatggctgagactgctgaaagaatacacagttatggtctaagactgttttatagacactgctctaatgtactcccgtaatgacaatacactgtcttgctggagcactctgggatatgtgtaagaaaaattaaaccaaacactcatctactggcatcccttactgactaatcagtaaaaaataaaacatataaacataggaaaaatattttgaaatgtgtcatgtggcattacagcttgataattccaggcagcctcaactgtggacttcggaacatttgccttccaaccacttggagtgctgcctaaaatagagattctgggctctttctcagatttactgaagctgagtttttggggtgggttccagaaatctgattttacacaaactcacacatgatttttttgtacagaaaaaccttagcgatttcggagctcatgttttttgttttctgctttttggccactgcacttactcataagtgctgttatcagagacatgcaatgtaacaaaagcaaggcacctcagtttccacgacattgaacacaaacctcttcctaaacccttcctggatatttcacagagaatcacatgaaagttttcctggccctgatgaaactgggatccccacagctaacgcctctaatctcctaccttcgaacacatgaggtctgccctttcacctttgcagtccattcatatactggtttaatgctgtccattttgcccttggatacactttatttatgtattagtttactagtattgtcttaagtaatatgcattaagacttcacaatgtatatctcattaaaataaatttgaatatcttacacaggaagtgaagatatcagctacatatttaataaatgctttttgatgatgatggaacttctcatttttgtaatatccttatcatgcgttaactgtaatttggaaaacagcagattgacgcaatgaccataatttgtatctctcttttttttttttttttttttgagatggagtctccctctgttgcccaggaggagtgcagtggaccatcttggctcactgcaacctctccctcctgggttcaagcaattccctgtctcagcctcccaagtagctgggattacaggcgcctgccaccaagcctggctactttttttgtatatttagtagagacggggtttcaccatgttggccaggctggtcttgaactctgacctcaagtgatctgcctgccttggcctcccaaagtgctgggattacgggcatgagcaccatgcccggccactctgtatatctcaataagatgattttgttctccaagagcaggttttcaagtaagtacgacagaaatgaagataaagttgagtctctcaatagtatactgtttgctctgatcctatcactcatttagaaaattacaactaaaaatcatataatctaacagtaagctgctttctcaattgatctttaaaagtgttaacgaaataaaaaatgtctctggttttgaagtgtatttcataaaacctgtgcgcctttaattggcttttcttaatgagggccatttctgttgctgtgttaggaatcattttctattaagtgttcaattaaaatctgtactttatacattacatactactccacattaataaaggttcacttttccttagataattcttacactagtatttctttacctggcatttaatgtaaaaatgtataaaatttgaagagtagtagaaataagtattccaaaattaggcaatggaaactctattcattaaagggttagaacgaatacacaattcttattaaaagtcctctcagaaagaaaagatcctgaaaaattaaatagaacataaccagccaagagtaacttatcatattgaaaattttaatctcttaaaatactagtagtaaaatgcttttcatacttggtgtttttaaaaataatcccaaactgattaccattaataaatatagagtggctttggtcctactctttataaactcaaaaacgtaactatcacaaaagaatagggaatcattcaaaatctcatagggatttcaattttatcattagcaattaaataatataaaacttagatatagaaatgtattaattccatggagtagggtaatataatatggaacacttagttaaaaacatttatttcaataaagtggtaaacagttaatttatattattataatgtaacactaattcctatttcattttaaatgaaattaagaaaagcaaaaaaaaagtacaaaatacgttttattaacaattgtttatttttgttttaattgctattagcaaaaagaatgagaaaagtgttacatacacaggataataatttatgtcaatatctgtataaaaaataaaaatactttaggtgtttgttacctggaagctttctaaaatttagaacattattacagtcatacttagctataaaagcaaatatgaaatatttttcaattcagtatgatgggacttgagaagcagttaagacagcacaggctattcttaagtatctacaggtattttattgacttttgacccttagtaacttgggccctcccccaggttacagagccaaacaccaggccactgatgatacggtagaacagaaaagcctcaagacactgtggatgagtatgaggaccacgaacattaagtttgggttcaatctctgcactccaaagtcaaatataaatggttcttagttgtgtgtctcctcgtattagcatggacaattgagaattgattgtaattttaatttaaatcatttgagcaggtttacaggtattacattccaaaccagcaagacaagttactggcaaactatctttaataagattatacaactgtgctaagggtccctctaagtctatctcccaataggaagatagctttcttttatgtggctttgtaacttcacttttcttctttcttttctctttttttgagacagggctcactctgtcacccaggctggagtgcaatggtgtgatcacagctcactacagccttgactccatgggctcaggcgatcctcctacctcagcttcccaagtaactgggactacaggcagtgccaccatgccggatttaattttatattttttgtagagacagggtctccctatgttgccagtctggtcttgaactcctgggctcaagagatctacccactttagcctcccaaagtatgggatgacagatgtaagccaccttgcccagccttgacattttttcttctaagaaacaaaatctagacagctgccattgctttcagaaaagttaacaaaaaaaagaaacccaaaacaactatacacaaaacaaaactaaactagatgttccagcataaacagtggctactctatattaaacaagactgcagtattgctggatactaggtgtttcaggtaaaatttcatactgaagagttatacttgataatacagcattttggtgttttagtaaattcaataattccaaggaccctaaataaaacaaaacagtttctgttagagaaaattacctaggaaagtgaaaagaagtattaaagcagaataaaattaaaacaggaaaactcaaaatatttattttcactgaaaaggctttgttactcttttccctattgaacaacattaactgataaataagttgtatttttgtggtgtctgtatcatgaccttacatccattttcttattttatcaccatcctatgtgagatagaagagcttgtcaaaaactaagaaatgaaagacaccgggcgcggtggctcatgcctgtaatccagcactttgggaggccgagacgggtggatcatgaggtcaggagatcgagaccatcctgctaacacagtgaaaccccgtctctactaaaaatacaaaaaattagccgggcgtggtgcgggtgcctgtagtcccagccactcgggaggctgaggcaggagaatggcgtgaacccgggggcggagcttgcagtgagccgagatcgcgccactgcgctccagcctgggcgacagagtagactgtctcaacaacaacaaaaaagaaatgaaagcatgagacctcttgagcaacttaaaaaaaaaaaaacagtacaaggtaaatctatttttcaactagtacatgcagtttttattccccgtgattagtacagtgaagttaggcaactacggatacagtaatggcaggtcagctctttgaagtcaaatctaatgttctttcatagctatcacagaatttcatttcaatcctacctcctttttcttcctgccacccatttccaaacacataaggaatgtaaagcacataagaagtttaacttccccaagattaccaagcccattagtggcagagttagatctaaaacccaaatcactgtagcatttttcatatggggcctctcttgctcctgtgttaacttaaaaaaatgtttttaaggtctgcaggccttccctttgatgctaaatttgttttctatgattgataattatatagaaagggcacactaaatatacagtgtgtagatatttttaatggcagaagtatgcctgcatgagatggtttgcaacgaattcccttaagctcacagaggactgtgcaatcaccaaatgataagagataattatttttatctttacattcatttaaagccactggaattcataaaaatcaagagggcaaacattaatcacattttctgctgcctttcaggacaaataacttggatctatatttcagatgcttggtgatagaaaatattactggtctaagaaacagaagctgtatttcccccatgttggtcatctagcagctctttatttactggaagcagtctcaggggatggcttcaaaaggaaatctgtatgtagtacccaaacgtcctccctttcaattaaaaaagtccaatatactgctttatagaatagttcttcctggacatctactgaatctggtgaaataagataactctcaaccacctcaaaaagggtaactttataaattaccaagctattataaaatgtgatatgctctgtatatctttcaggaaagaccatgccagtatgataaggatgctctgagatggaaagacagccttaatgcaaagcaatcaacaactataccatcagaaaaaaaagggagtggtgtatatatatatatgtttaggggttattatttccaaagaaaacaatgaatttaaaatatatatttatacatattcaagtcatcttcacctccacatcgtgtgttagtgaacctaccgtgtatattatcctggccagaagggactgcacctacattggctacatttacaaccttctaaagatcacagagggagtgaaattctgtggtgcagcaatgattacagcagaagtttcatcattcctgttagcactcctgtaaaagcaaaagaaggctcccttttattaatttctttttaaaattacatttacagaattttaagctcatggccaaaattttaactttttttcaacaaagaaacactactttaggatgtaatttacaagataattataaaactaaaacaaaatgcaatgtttcgaagttttttaaaatcctcattgtataggaaaatgtgtaaaaattcagtaaaaatcacttaaatctaattttaagtatgataggataaaaacttagaatcacacatatgaaattcaatttcagtctctttaaagtatactcaatctggggtttatgtaaactagtaagctttacttcttaataatatataaatgtatttgttactattgctatttttttctattcattcaagatctctcattgccaaatgctgcttgagaacacatcaaagtaattccaggataactagcgcaatacctggtaaatggcctcagtatgacagatcgaagttatctcaacagtgactggagtcactgaaaatgcacaagtatttaggctatacttagagctaaaagtacttgtctagtgatggaaagtgttttgctgacaaaaacactaattgaaactcctgaagcaaaaactttgaaatgaaagaaaaaatgagaatgaaaactcttaaatcccagggacatttcaaataatatttggagagaaattaagttaagcaaaagcatgaaaaaaaccatacagagttaatgcaagacagccattaatatccagacctcctgtaaaaatgttcagtgaacaaattcaacaacataccaacacttggaacaaatactgaaatttagtgcccgggttaaaaaacaaattaattacaacaatgccatctatttggatcggtgatataagtcatagacatctaatggttatctattagaacaataactctttgagatatttgatatgtgcacagtagtttacaaaattgatgaaaatagaaaaatctgatttcatgttttcaaaagactctgcaccgtctggcatatatatttaatttgttatttattgcaaatgaaaactaaaatttaaaagaatccctacgattaacagtatgaaacactaaagcctaacattgtgaaaagacttttgccgtcagttagaaaatagaactatctgcttctaacaacaagcatttttcactaaccactttcaaactctgggaacactatgttcttcttagaccgtttaacttcaatattaggcaaaagctttaaaaactatacaaacagtcaacactgcttttaagtaaagcacagtggctgacataacactgctgagagatgtgtgtactctttaggatttaaaccttctccattaagctctattgaagagcaactgctgaataaatgaagcaactatgtttatgttaaaagcctgtttcccgcagcatgtaattaaaggaaatgttgtcaaagccagtacttttgtcaagctcctgtaaatggaaagatggatagcactcagagaaggaatgcattgcttcatatttaaccttaacactcttgtcattaatggtttgtctaacttgtctataaaagacaaggtactgctccattgaagtaaaattaaaaaaatcaactaaaccatcttttcagaacagaagattcattatcgtcagctaatgtattggcataaagcaaagtaactcctatcaaggcacacattcaatctgccttcccacccccctttatttttaactcatgctttttattgttataggcaatttgtaccactcagcatgacagtgtaaactgaatcaagattatttacatgcaaaagaacacttaggagagcagcatggtaagcaaatgtattgtctcgatgctgaggtggaaaaagaacctggaaagaaaaaaaggtgctctaattaaggggcatcaaaatgattgcttatggtagttaagggccagaaaatagtaaatgtctgaccatttaaagaatagcatcttgctagctaggaactcataagatagatgcataaatcataataaaattaagtaacattttaggtttcttaaaccagagatttttctaaatgaaactatatcaggtattctcaattaacaggaaagaaaaataggcaaaggtttcattaaaagttcctcctaaaaaataatatttaaaacactgtagagcctgttcatatataataaaggtaaaatcactgggaaaatattaaaaactgtaggctaaataatttgtggctttattagaatctatctaaattttggtgaagcagtagatagcacttactttaggctaatcagctgtaattaactactaaaaggcaaaccaataacataaaaaaattcagaaaaatttctaagttttagatttgtaatttaattcacaagagaaaatgaataaaaattcaaaaaaaattctaagttttacatttgcaatttaattcacagaagaaaatgaataagaggagttatctcggaacacgtactcttgaaattaaaactgcgtaagaaaccaaattaaatatttttaagtaaaaaatagatcccatgttattttcttattgaagcatctcacagctagatcattaactaattctgcaatgcttgaaactcatagcaatgaaaaatcatgcttctgatggaggcttatatacataaccgtcaatacgtagaataatctaattttcatttaccactttgactaccaatcttattatatatatataaaaaagtttagccatgaaccctaaacacaactgagaaaaagtgatagatcatgttgcatattagaaataaaactttgttttaaaaaatattaatctaaaatgtaatactctgttagaaccacttttatttaatatgtacacttttcagttacgtatatctttagaatgaaaatagaaccatattccccatgttcttatttataattttttcagttaaatttaattaacacatttaacatacttcttgagtttaaaatgtgtcatatgaaataagatattaattatgtaaatccactttattcaaggtagaaaatcggttaaagctggtgtaacacacacacacacacacacacacacacaccccttaaattacttgcattttaccttccagaattttgcattgataaaatctgaggaaacggatttttatctgatttaggcttttccgttagtgagagatttctaggtatcttttgtggaaataagctagctcttactagagtagtataacaaatacatgtgtaaagttgaggattgagacctctataccaaacctgctgaaatctataactaaaaagatgctattgaaaagactctttaaacctggctaaatttgccagcatcaagttccacatcaaagaatgaattcaggaagacagaaagaagatacagaaatgccaagagacttgcaaggatttacaaatacttcatataaacaaattttaaatagctttattcagagtagcctttctgctctattaaacatagcaaacagctgccagattattcagacaaataatcaacaaccatagaagtaaaatggcagaagaaaaaggaattttgcaacaactccacagaggaccacagctattctccaagtgcacctctctcatgcacttaagttctgtatggctagtcagcgaaaaatccctcagtcacagcagagcacaaaaaatttgacgaaatattaagtattctaaccaaaagctgagggagtgaaagggtatataataatctgcgcttcagatatactttagctgcacttttcaaaaaaagaatatccccttaacaataaatggccaaagccttattcagtcaccgtgtgccactcaccttggtttgctgagcagatgtaaacagagaggcaggctttagccagcaaagggtaagaatagcaaatataagaatcaattcaattgtcaatagaaaaataaaatcacaaagataattttcctctatagcaataatcaactttcaagaaatgcaaatccaaagaaagatttcatcgttcttttttattgcttaaataatgccagcaaaaatattactattaatttatggacttgtatgagattttctttttgacattgtgattgcaaaggcttagagtaaaaacagtatcttcagcacaatagcagagtgccaggaagcggcccctcttcttaggtgtaggtatttgtgtgtgcctagtacgttctggaagtttgatggtatgatttactacctcaaaatgaagggatctttgataacaccctccacaggaaaaaatgcttagattcacataaagttgtaaaaactgctgactatagcatttaaatatgccttaatttataaatgttatcgttaattaaacacataaaatcagacagttatctccccttattcacaacgaaaaaaaaccacctcgtttttattagaaggtatgtttgactctgggccaactacagtattaatacttgcattttgctgaaaatattttctttttaagtacttattttaaaaatgttcagttctaataggttctgacaacacagcatttctttaatatagaattaggtcaaaagaactagaagtattttaatgccataattaggagtttattttgaaggataaggtagtttaattgtgcagggacaaatacattagtaagacataaaaaaacagttctatagtgaaaaaatacgaaacataacaattatagtggtaggacatcggtaaagtccccaattcctggcactttgataatacaaaacccattagtatatcatcaggttgacaagcaacaactctcagcattgaaaggtgattaagaattaatgtatcatttaaagacatattaatcaattttcaagtatgccagaatatagacaaacatctgtttttaaggttgtaagtgcaaagcattaacaaaaattggaaattgtgcactaatatctgttaatggctatgtacctatgaaaatttattttagagactgtcaggaataagcacatattatttggtatgtaaatttctagtaagttgtagacatctctcacttgctctttcttaaaatctttctctgacatggccacaggtaaaagcagttctccaacagtggctgaatattaacattgaagcaatcatccttggtactgaagaaaaacaatcaaagcgactaaatgcttcataaataaacattcttaatactaagtagttaaatcaatgcaatgaagcctatgctagcatatacagtataagacctttttggtttaaacatcacagctaaaaaggttaaacattttcccaaacaaacaacattacttgcagaaaaatacatctgttatctcaataagattttttaaaaaacaaaactacacaggtatagtaaattatcccatttgaaaaagaatttaaaaaattgcagtaattgtatataaccactaccaccaagagaaacacttcatgcagttatagagaagtaatattttatctctagtttgcatacatcttaaagtatagaagatgaatgctttagtctgaaacagttaagatatctttttaaaaatattagttttaaatgaagaagaaatagagtgaccatattgtgtttagataggtgctaataaagtaatatctcatctgcaacttgctttcctaaaataaaaaaaaagcccttatttgctagcagtgctattcattgacatattgaccaacatggtaaaagttattatttcaaatgacaggatatgaagaatttaagaaaccaaccttgtttgttctaatatcagatagaaaaacaataagtgcatttacctaagtctctgatattatgatcaataaaaaatactaaaattgtctaaaaaattttttaaagttagatgttaggggtaggttgatgagtgtatcctaaatgatagtagtgtgtttgatggcaaataagagaaaatccgactaacagttttttgagaaaaaggcattgatcgtttataatacaagaagcttagagttaccagtcacaggctcattcagtggcttaaaaaaccctttagaggcccagatcctctagctttccctctgccatccttactatgttggctttcatcctcatggttgccactggctgctgtatctccaggtacctagtttacattccattgaaggaagggtggtgatgaggagtgttgagtaactatgtcaaccaaatctgttcctttttattacaaaagcaaaagcttcaggaagtcccatagagggacttctaccttcatgttagaactggatcccacagcctgtggatggtagctagagaaacagggattgtggataagaaatactaaacattaggttaagaaaacttgaatttattcatgtgtgggtacagacaaatgacataatataaaaaaagaacataaatcgacttttattttatgctattatgtattgtattcttgtaagtggccttatattttttcatatgtggattgttgaaggcaaaccaataaatccaatttatttatcaattcaataaacctgaatacaaccttgatcctatgtagtgtgtgaatatctggggatttaaagccaagtgaattggcccttgaagctcacaagtctagcgggagggaaagaaattacacttataatggaaggcaggcactaccttaggtatgtggaaagcattctgcaggaatgaaggctaagtttactccaagaggagaaagagggcattctaggcctgtactttgggaatgatgagcagcctaatagtcaacagaagaggttgggggaacattgcagagtatcatatatagtatgaccattcatccagtcctcccaggaatagtcccagtttatggctgttgttgtggaatcctgtccagctgggcctcctttcactctctaaagtgtcctgatatgtgtgataaagcatatggttactttactatataactaagacaaaggtgtttcagtgtttcttgaagcaatgggaaactactagagattttggcataggaaggtaaatggtcccatttatgttttagaaactccagtggcagtatgaaggtggagtaagggagaaatcaaaggcagatacatcagttaggagtctaaattaatagctaggcaggattttgattttttttaaggatttactgtgtgttttttacttaaataaagctaaaaaggatcttaagagacagcttctgttatttcaaatttactgatgagaaaactgaaagaagttgaacaatatgcccaaggtcacacagctagtaactgacagcactgggatttgacccaggtgtatctaacttcaaagtccacatttattccactataatatacagcttccccaggtgggtagcactgggcaaggggaagatggaatattttatggatattctagaacagaaggacacacctggtgatgaatggagggaagaaacttcacaccttctaatgtgaacaactggtgaatgacagtgtgctgaaggagtttagggacttaaagaaaaagatttggctttagccaattatattttgagtactgagttacccaggaagagatattcagcagataattggaaatacaatcaagaatctggagagagactagctgggcatagtgacaggtgcttatagtcctagctcttgggagcgtgagctgggaggattgcttaagcccaggagtttgagactatagtgaacttgatcacgctactgcactccagcctaggtgatagagtgagaccccatcaagaaaagaaagaaaagaaaagaaaagaaaaaagaaagggaatcaggagagaggacagggcagtatgtagagtctggaagcagtaagaatggtgtaaatggtgtagggaagagctgaagccttatgagtgataaaaatcatataggaaaagaggataccacaaaaaggataaagcgcaaatctggtgagacctgtatttaagtaaaaacagaagaaaagcaacttgcagaagagactggaggaagagggtcaggaaaaaaggcgtgtgccaaatactgcagggaggcagaataagataagggataaaagaagtataactgttaatcttagcaaggctgttcagattgcaggaagactacacaatgagtgagttgaagggtgaagggaagattggcaatggaagaaggaacagaaagcagaagctcctgagaatgaagaagcaaaggaataacacctaaagaaacctgagcatgcttagaggctaggggaaagagccagtaaagaagaagaaacaaagaaataactggtagagcaaggtcttagagaggtaaaagaggttgggatgaagagcacaagaatgaggtgagcgggttagctctagaaggagtaggatacttctttggaaacagccgaaaaggagtgcttaagagagaaaggattagggtaggctactcgaagaatgagaccaaacctgatggaggggaagacacagtcacattagagaaacatgtaaacactggtgaaggactagaagaagatgtatgtatacatacatggatatatatatataaattacaaatgaactcagtatgaaatttaaaatttcagcttcaagtcctgtatacaaagttctccaaagtcagaggcacaagacaatcaactgaggtataggcaaaaccctattaattatatttattttttctcattccttttaaggttctgtttttctgggagaagggtctcagctctgtcacccaggctggagtgcagtggtgtgatgacagctcattgcagctcgacctcctgggctcaagtgatgctcctatctcagcctcccaaatagctgggactacggcacatgccaccatgcctagctaatttaatttttttttttttttttttttttgagacaagtctcactctgttgcccaggctggagtgcagtggtgcaatctcggctcactgcaacctcacctcttgggttcaagcaattctcctgcctcagcctccctagtagccgggattacagggcatgccacatgccgggctaatttttgtattttagtagagacgaggtttcaccatgttgccaggctagtctcgaactcctgacctcaagttatctacccgccttggcctcctaaagtgtgggattacaggtgtgagtcactgcgcctggccttttttttttttttttgtaaagacaggtcttactatgttgcccaggctgatcttgaactcctggcctcaagtgatcctcctgcctggcctcccaaagttgtgggattataggcatgagccactgtgcctggcctctatttttgttgttttagtaaaaatacatgttagcacagtaagaaatacagacacatacatatatataccacacatatataattacaaataaacttctacagagtacatactcaaaatatttttactatagaggtaaacaatttcaaaagttagggaaccactgagttacatcattatttacaacactttgaattacttgtttattctttttaatagaaactcttcttcccaacactcctgaaggaaccacatactcctcgattaaaagtggcttgacagcaatgatgccaagggagaagggtgggtgttcagagagagaagaggcaggagatctgccttctaaggcatctatgaatgtctagcgcttgcagggggtagggaaagcgatcctgaaatgtccctcctcgcaacaagcaaggcgtagagagcccaactgaaacatatttttcggcctctcttgtagctaagagtgatcaagtgaccagttatgaccaatgaattataaacagaacttcagtagatatttctgagaaagttttgttttctgacataaacctggcccctttctccatgtcatttctttccttttttctgtctggatgcagatggaagcctggaggtggagcagccatcttgtgatcacgaagttgaccagcattgctaacaaaattagcacatgaaacaaaaaggtggaagaccttactgtcctgaagacaggggaagctactgcaccagctctgaactgccaacccctgcagttcttgttctaggaggatataaatccttatttggtcatgccactgcagttgggtttctgttacacacaaccaaatacaaatccaatataaccagtacataactcactttgtaagccagtttcatcttgtaagcaagcgtggcttataatagaactaagatggaacatttcctctttatttgggggaaaatttacttcatttacatgagtgttctaggatgtcctccagtttataagcatctccttttctaccatttgccttctttttgatttatttctctctccatgtagcttttcttttccttttttcttcaaacccctttgattaaacaggggagagacagattatctccatttctacacataactgcctaacttggatagggaatgtgaaaatgactgatgatagatgtaaatttatcagaattaacattaccagatcaatgaagcactattattagggtagctttaaatagccgagctacataggacagatggcataaaagtttaatgtaaggcaagattctacttggtacacatttaactgtagatatattcttgtagtacatgtaacctcagttcacggattcctttataggatccaaactgtaaagtttgtaggtaagagaaacgggcaagcagcctattctgagactcaagtttctcattatgaatgagtgacatttaccttgcaggctagttttaactattaaaggaaataaaatgaataatgcacaggaagtactcaaaacctacatatgtaatagggatatatcattatttcatattcccccacagattatcatttccaatttttctccattataaacaacgcttatacttggtagatctatttccgtacaagcacaaatacttctctaggcttgatacactaaaagtgaaatgctgaattgaaaagtatgaatattttacagatattgccaatttaagatcccacaaacacatacaagagtacatgtttttctctaccttcctggtcaataccagacacaaaagttatttaaaactttgcctatctgatgggtaaaatgttttaatttttatttccctaaatattagtatgttgaacatctttttcaaatgcaagttggccacttgcatttattttcttgtaaattgctattcttagccttttccttacctttctactggattcccttttcattgattgtgagagcacacgttctggtttttaaacttttttctgccaaataagctgcactgctttctcattatctgtttatggtgtctactttttctttacttgtagagaagttttaaatttttaatagaagacctgttagttattttcctttatatctttctgagtactgtgtcttgcttaagacttttgtctcagagtatgaaaatatttatctatactatatttaaatacttttatagttttttataataaataataaatccacatggaacttgttttggtataatttgtgggaggaagctaccttgttttttccaaataatggtcctcacaccatttactgcatggtctgttctttccccacggattgaaatgtcacctttatgacatacaaaatttctacatttctaaattctctggtttcatggttcttgtgtcaatatcaattatacagaataaaaatattcttgtggctttaaggaatattttaaattattatagagaaagacttttttcactaaaaatgttgacttttcttgtgcattttttttccagctgaatgttagaagtttgtcaagtttcttgaaaaagtcgactggcattagcctagaatcacattgaatttgaagattaatttgaggtgcaatactgtctcccatttaaaacacagtatatttattttttattttgcttatatttctttatatttaattatatcttctttatgccctttaggaaagttccaggtttttttctctctacataagtatttgtaccaccttctaaactcattagtttaaataatagattttctgttgattccaactttatgggttaatattatgttgaataggccaggaacagtggctcaggcctgtaatcccagcactttgggaggcgaggcgggcagatcacctgaggtcaggagttcaagaccagcctggccaacatggtgaaccccatctccactaaatatacaaaaattagctgggcctggtggcgcgtgcctgtaatccagctacttgggaagctaaggaaggacagtcgcttgaacctgggaggcagaggttgcagtagccaagatcgcaccactgcactccagcctggcgacagagtaagactctgtctcaaaacacaaaaaaaaagaaaataattaaattgaataaaaattataattttggctgggtgctgtgctcacgcctgtaatgggattatagcactttgggaggctgaggtgggcggatcgcaaggtaggagtttgagactagcctggccaatatggtgaaaccctgtctctactgaaaatactacattagtcgggcatggtggtgcgtgcctgtagtcccagctactcgggaggctgaggcaggaagagaatcgcttgaaccaaggaggcggaggttgcagtgagctgagagcgcctgggcaaagagcgagactccatctcaaaaaaaaaaaaaaattataattttgtctcttcttttccagatttatactgcaaatggcgtttacttgcctttctgtattggctggaacttccattataagtggaatatagtgtggtgagcagacatccttgttttgcttttctgacttaaaagagatttttctgatatttcatgtggctatgggtaacctgtacgggccagaagtcatttgaatttaaactacaactgatgtccatcttcataggttatccttttgggctttaaaatcagggtgatttagacttacagaatgacatggcatgatttccgtttcttttgttctagaaaaattctctttttaaggttctgatacaatttaatcgtttttattcctaatttatatttttctaggaaaaatttcatctaactactccaatttactggtgtagaactgtatggtattattttgtaactaaaagatctctgtgctttgtcatctttctcctctctaatctttcttcgttgtctttttttttaatcatattatcccatagttttccttttttttgtacatcctatatgttcttttaaaaatgagtattttctgtacacaggaaacaaggaattctatgtaaacatatatatcttagacaagcttgttaattaaatcattaaacctgtatgtatctatacctatttaaccttactcttgatttgtccatttctgatgtgcatgttaaaatatactatgattatggctttgacaattctcctagtatttgtattgttttctgctttataaattacaaaagtgcatggtttaatggttgtaacaattgtattttcttggaggattacaatgaacacaaaatattttattattacttttacctaaaatacttcttaatttttctagttttagcacatctatctgataaatgcataccacacacacacacgctcacacacacacacttcatctatctaatctcaacttttctgtgcattctctcttagggaggtttctcataaatagcatatgttaaattttgttttttacctgttagtaaaagtaggatttaatctctgacgtgaattgtgaaaactagtatgtgtggtgtgctggcctctccagccacctttttttgttttatatttgccatgctttttcctcttcctcttgttaaactgaccaagttttaaacatttattttaaattattattatttttttgaatagagcaagttctcgctatgctggccaggctggtcttgaactcctggcctcgagggatcctcccccttggccttccaaagagctgggataacaggtataagccaccacacgcagctctgatcagttttaattactccctttcttcctacctttagctgtttagaagttataatacatcacattctattattttagtggttatctttaataatttaaacaatatttaaactaatttttgccacgatcaattctcttctcagacataacaagaaccctagtataccatcactcctccttgcattgtctctgtggggattttggttccaatttattgttaatatttatttttcacattatgtaacaattatttttatacgttgataaatttcgtagaatgctttgctcactactgttttataattctatgtttttctctgtctctgatttttttttgaggtaaggtctcactatgttaccaggctggaaagcagcggctattcacaggtgcaatcatcgcgcactgcagcctctaattctgggctcaagctatcctcccgcctcagcctcctgagtagctgggactacaggcatgcataccatgcctggttctgtctcagatttaagaaaatattctattacagcatatctttgagtatcctttcagaaaagatgtgcaggtggtaaactgattgaatccttcgctgaaaaatgacatttggtatcttcaaaattttaaaggtcatttcctttaccttctggcttccagaactgaaagagtactgatgtgaaatttgattccattctcattcttgtccatttttaggtaaactgttttttctctgctttggaagataataggatattcttctccttatcaaaaattcaccaggcgtgatctttttcatagtttttcatattcaccctgtttggccctcttaatctgaaggctgcgtgtttcttttgttggggcacatgttcattcattcactcattacgggcagggatacatctgtcgcctaggctggagtgtagtggtgcaatcatagctcactggagccttgaactccgggttccagtgatcctcccacttcagtctcccaagtggctaggatgacaagtgtgtgccccatacctggctaaccctttttgatttttggtagagacaaggtcttgctatgttacccagctggtcttgaaactcctgggctcaaacaattctcccgctttggcctcccaacgtgctaggttatggatgtaagccaccacatccagcagaaaatgttcctctataatttattttctaattatttcttcccttcattgtcttttctttcctgccagagctcctatgagatgaactgaccttctaactttccttattttctgtctctgcctttttgctttgtattctagttgatttcttgaccctttcttccagaacactcgatcagtattcagctgtgtccattccattattcactactgagttagcaactatcattactatgggtctcctctcccctgggtgggctgactaaattttattttttataagtggacgagatactaactggttatgtggacatgaagttggaggcggcaggtaggaaatggcctttcctccccaccagcaaacgtgacactggctttaccctggggtgaggatctgagaatattttggatactctcttggataaaactatatttcatctcatcctgaccatccttgcttccttcacacaaactcaaaccctgctctgttcttgtaggtcccccatccacaccaaaacgtctttcccaggcaagtggctcattctctttacagttttattctaagtctcaaattaaatgtgtatgttgcctgctgtcaggggtaagattggggaactaagggctggaagcagttaattccctgatgactgtcttaagacccctactcatgctgtgcttgagttctgccagattggttcttaccattatggtagttttcccccacgagtgttttaccctggatttttattttctctgttattgtttatctgctcctatttgttttctgtcaataatgcccataatttctggtcagctaatggcatctgttcttatattttcagtgttcattcactattaagaatgtattttctttttaatggatctttggacaaaaacatgtgctcagttctctaacagcactaagctgtgtgacttcccacactggttaatgcatgcatgcctgtgggggatgagatctgtttatgtactgcactaacttttagacagatatatttatgtatattgcgcacatattgatctcaataaatttaatcaagaacttaatttgatgaccatttaaaatccaagcaaaaagaggcaaaaatgcttatcagatatacatataactacatggcttaatttaacagttcttctatatctatttatccatagatacaattataatgatatagaattaatccagaagctaagtaggatcattttactctattctttttattctaactaataaaagagtatctgacaggctttggtccatgttcccagcatttctgaaggcttcttatcaaatatgctgttattacccatattttatgtatcgatttgtataatgtatttcaaggaaaaaattcaatatcagccattctgtttctttttttctttttattgaactaccaagactaatacagcacatcactaagcaaaagtgctatttactatgcaaaaggcacagtcagtgattggcatctaagaccaattgatctaccattaccactatctccctacccccacaagcattactatgaagctattgatttaaacacgtcgatcggtttccattttctgattttgggcaggccaatcaagaaagtgagtaattgtgttacactgcttcaggatcaattacatttgatgcaagacaaagtgctctttttggaacaccacacaaaatttttgatctagcatgctgttgtgcttaacaaaatctaaaataaataattgtatctttataataacaaaacatactaatgtaaatgcttttaatagtcaagaacatttttatgtgaaatacatgaattattttcctaatgttagtttgaaagaaatttagaaaaaatatattcacatacactccttggcataagataaaaatcaaatactacctgcatatatatccaccttaaagagacttagttaattatgaaagacaaaatgcaaatcctgttcaagagactataaggaagtctttgtaaataaaattggggaaaaaaatccaattacataggaatcaaaaggtctttatacaaattgataagaaaaaggaatcttttttagttcttaattttggtctaactggtacgtgagctttgtcattgggttcacattgtccaaatcattaaaatgaatatacctcggtgtcagaggcaaatctatttagagtgatgttactcatagcctgttgttcagtaatatgatctgtgttgtttgtctaatagaaaaataataaacaattactaggcaatgttgggaaagtaatcagtttttatatatcactaatacagcagacctcccaaaacataaaggtgatgattgcataaaatcaatgtgttatgctacattgcttatatttatcattgcaggttctcggcataaaaggtataacattaggccagaattactggtaaactgaaaaggtatatgaaaatgaaagttcactatgtttaatctatacatttattttaaaatgtctatttctaaaacttcaagattttaaatcataacaaattctgttctaagctagctaaaatgtaggtaaaatgtctcaatctttttagaataaaaacaaagaaacttcaactcaaaatagccaattgggccttatatcaaaaaagaaaagagttcaaagataattctcaatgatgcatgaatacggctttgttctaattgctaatagcctctgaatttcacaagaaatgtataaagcattatagaaaaacattaacacaaaatccaatcctaaaaaagctcttctgaacagcattcagctatgaaacctttgccaatgcataaatgttctcttttgacttttatcaaagcagtttgtaaatggatgtaaaaaggaaaaaaaaatgtgtgagttttaggtactgatggcatcaataatattccacttaagaatctaagataacatgtatgtatatctcaaaagatatcttctctgagctatttaataatattataatgcttttaatttctcctggattttcctcatgaattttctcataaattttctaaaactgagtgataagttaaaaattacttagtagtagcttctttctttaaccaacaaaccatggattcaatcacatatggcaggttgtaatggctaggtgtgtaacgaatgctaaaaatacataactacacacaatttgtacaactattccaaggcagtctaaacattatcaaagcaaaacattttgtttaaatgttttgtctttcacacacacacaaaagctgttgaaagcttagtttttgtctgctatcctttacaggttatataaaaaatagaagaacaattgaacttaccacaactgaaactggcagtctgagtagaatcacaaaagtcaatacccattgaaactgtaatggatcctcaggctcaagagagtctaggaaataagataatttagacatgaaaacacagaggatgtgaaaagaggcaaactaaacactgaaaatttaggtaatgtttgtagcttggttgaaactgtaaatgtaatgatggcttaaaaatttcaaactaagaatattaaagcaaattacaaagtaactaactattctgtttcaaggttttctttttcacaaattaattctgcgcatacaccaatgacacattatacccatttgtttcagaaatacatatcttcctgagaaatgtcatgttttctatattatctctataggtactgaaaatgagaaggaaataaatgtgttcttgtttcgcatactgtaatggactttgggagttcataagaggttatgtacttaaaactatggcatgtttatctagatataaaaagtaaattttaaacaatgtccaaaattttcaatgaaaaaaatcctaattaaaaaatgtaaatcaagttggaagaagaaattaagatgcactcagaaattaattaaggatctcacattgaaaccaaaatgttaagtctaattgcattaaatactcaaaaaaatttgggcagattagattatctttataaaacaaaaaataaaatgacatttgatagatttggaattcagaagcttcatctatcaactaaccaagtataggaaataactataccaatatacaataagtattttttttcagttaacaatgacaaaacttaaggcaaacaagaacaaaattttatttgcttatgatttgaaagtttagctatatcttagaataattgaggggatcttaaataaattgtatatatttgtttatatatagaaactgtccatttttgatttctactttgctcaaagtttctgtataattgcagctataccatacaatcactttatatttagctttatctattctcttacatcctatcacacgtagttatattttagcaagcacacttctaattcaatagactgtgctattctagggcttcttggtaagtatgatttgccattgaatgctaaccacgacagagatatggtacagtcgggataaaataataattcaataagcttcatttattaagtattatgttttatctcataggctcaatgaggagtaagcattacaagagagtatttgttcaatgctgatttaaaatgctatttgttaggcaaaggaagtatgttaaaaataaaaaaagtaataattaaatgctatttgctcagtggtatgtatgttagtttgctgattctagtttgaatttcatttgttacaaacctaacattttccaggatgccactcaaatactagaagacttgctccctaaatcctagcaaacaggctttactgtagggtaaataactataatgatacatatgtttttttcattctcataaagctatgtgctgtcaacagtttagagctttgtcagtcacacgctgctccagctattcttgagtgaattcttaatgccttctgtgccataactattttggggtttggtctttttttatctgacacattagtagcaaattccgtcatctccaaaacttgatggctttcatgtttagatctcccttcatcatgtatctttgcatgtcatttgacaaagtgacagctctcaaatgccttgttgatagcactctttgacactgtttgatactgtcttcagtcttaagataataactgtgagcttagtgccatactaattctgggggacagtccatgatcaatggcatgtttattatatggatgcttcaggagcaaaatgatcagcataaactcattcaaataatggattttataatacttggagccgactaaactgggaaagcttacccaattaggtgtctctgtttggcaccatttctagatttgctcctatatatttgagatggctatgtagaagtggctgaaaaaactggctctgttacgccacaacattaatatcaacacatgaaatcatataggatgccattactttgatgtaacagttgtacagtaactggtaaaatcttagctgaactcaaatttgtcaccactaacataaagccactgaatatagtaaagagagcttaacctattctttgtgtcttaaaaaaaccctcttatatactgggtctctttggggaaaatggaatattattcctaatattttgtaaggaatacagtttcatgccaaacacagagtgaaatccagaaaaaaaagtcattgacattacagacaaaaccagattggtggcaaataagaaaactgcggactccttaatgtgttacgttcttaaaaataaataaaacaaatagcttacctcccttattttactaaaacactaaatacagtatttgttttctgttgcattcttaaaatgtttttggaggactaatttagacaattatattccttaaccctacaatctattgataatagtgtcatccaggtggtgttacataaagtacatactgcagacaaaagaactctgtatcttgaaggcattcaataaatgccaaccaatgaatgaaacatacagtcacaaaaatttgtctaagaatgacaaagaaaagcctacaacaatactgaggcaatggtaaacattcatattttatttctctgttaaagtcatactatgaatttattatatttatttcttctattctacataggccaactaaaggtcaactcatcaactattatgccagctcaaagaaaaattaatactgttctactgctttaacctttggataacatctcaaccttcagacaattcatgtatcagctgcttgacacttcctaaactaattttttttactaggtaaaaaaggttgaattacaagcaacaaaaataacacaataattccttggcaattattaatgtcacacattatataataaaaattaggatactttgtgttctttaaatagtgtttaattatcaaaatatttttaaaaattaagtggattttgaaatcagcttactttaactcactttctttgctctagttgcttataaaactttaccaggctttatcaaaaattattttatcctttgtgtaaaaatataacacacacacaaaatgactttctttaccgaaagattcatgaaaccagaggagaaaattcagcaatgccaaagagctcagataaagaaaaatggaagagtttgtgaaacaatgagtaaagaaggtacaattacctaattttacttgatcctggtcaaaagcattgtttatcttaagtattataaaaaggagctctctggagcattctggttataacattggaagatacaatgacataaaccttttattacttttaattgaggttttgcctgaagcttcctcaactaaaccttagggttatctccacttacaaaaaccaaaaagaaagagatagacatctaaatattacactatttcaaatttcaaagtaagacacacaattgttacatttaatgttaaagggtatatttttagcaaaatacttaaaaaatgcaaaggggatgaaaaatggccactacactttgttggagagacaacaggatgcggtgggcacagaagcaacctggaaagtgcgaccaaagctgggggcagccgctgctcagcaacccactcattggttgctgcatgtggggataagggccagtactgccatattttacgctctgctccaagaaaagtgagatttctcatttttaaaatgtaaaagcatcttcatttttaaatggtggcaacagattgaaaacatgtaaaaatggatgtggataaataccagtgatatcctctaggctactgtatattctatacatggagagaagataagcagactagtctacatcgggggtgtgcaatcttttggcttccctgggccacttggaagaagaattgtcttgggccacacataaaatacactaaccctaatgatagctgatagctaaagaaaaaataatcgcaaaaaaatctcataatgttttaagaaactttatgaattgtgttaggctgcattcaaagctggcctgagccaggttggtcaagcttggtctatatccttcagtcttcactcccttcactttcccataaattgaaaagtgaagggaaacaggaaaggactcgagatacgagaagtattgtattcagaaatgcagagcgattttcttgcttttaataccaataaaccacttaaaattatgcagggaatgaagctgaccaggaggagagatggggaaagtgacacaggtaagtaaaacatgatggcaatcttgactctgcagacctagccttccatcctactggtattactattactgggacctgattcactaagagcaaagaaatgtatttatctatatgataaattcagtttaacaagaaaaagcaaatataaactgaatatgctaattgtcatacaatcatattctactttactattttactaaaaagtattctactttacttttaaaatgacatatttagtgatcaaatatagttaaggttttaaatgagaattaatatttacctattgattaaaaacatgcattttcatgcctataggaagttttttttcccctatgtggatatttttatctttcgatcagtagtgttattcagtgttatttgtatagagaccatcttatcaccaaaatgcaaggctgtcttggaaagaaataatgggcagctagtccttttccactcattcgataagcagcacgtgagttttcgttggtacaaatgcaggagtactgacctattacacacggcaaaagaaaaaaagatgagttagtgaatataattattcttttagaaaatatgcaaacattatgacatttaattcttggttcccctacagtattatatgaactacaataacaaacattagaggatatcacacacatagatattagtcagaaatgatacaaagaagtaaatgccctcaaactgtatgaaaatttttctgtaagcggctgggcgcggtggctcacgcctgtaatcccagcctttgggaggccgagacggggagatcacgaggtcaggagatccagaccatcctcgctaaacggtgaaactccgtctctactaaacaaaatagaaaaaattagccaggcatggtggcggcgcctgtagtcccagctacttgggaggctgaggcaggagaatggcgtgaacccaggaggggagcttgcagtgagccgagatcgcgccactgcactccagcctgggcgacagagcgagatccgtctcaaaaaaaaaaaaaaagaaaagaaaagaaaaaaaaaagaaatttttctgtaactccaagcatatattaatattacaaacatactcattttttttttttttgctggggggcaggatttataaacttttttgttagtttttttccctagatcctctatatttggccatcttgtaactttcttattggttttaacagtttgtcaattgattttcttgggtgttttagccaacaccaaaatgaacgtctggaccttcatttccaatcctgactctttgaactgtttttttgttttattttcttttactgtaaactgaagaccatggcccccaggataaggtggcttcttccttgccttaatgatctctactttgagatcaagttaactattcacttatattttcttccagcctttgatggtttcaaattttaattcatatggaattgattttgatatattgactccatattaattttctccagatactgaactaattgtccctacatgagctaatgaatagtcttttccaatgattttaaatgcaaaaattctaattatttatgtactaggagatatttctgggcctgattgtcctgttaaaccagtcccatattgttttattttttgtagacctacaatataattaattatttggtaaaacaaatatttccttatttccccctccgaatattttcttggtaaataccttttacccttctattgaacattagactcttaattaaattcttccctcaatctcatttcattgaaatcataggcagcatattaaataatgaaacactgtccattctaaaaccatgtatagctttctttccattcaaaatatcagtattgcatactaggcttgacctgacatgggcagcattaaaaaaaaaatcaatttgtaattaaacaggcttgattaagattttttcctgacagtgttgtctcccaactagattctctattatagttctgagagtatatatcaacctattaacattttcactatgccgtgtacacctgatgacattacaaacgtagcaattatagtaatgtttaaagttccacaaaaatccaagagttaaatatcatatatacaaaatgctacatcatgcttctaagcatcatcaaaacatagtattctttctctaaaagtgcaacaaaaaatgtgggaatttaaaataatcatcacctctggccaggcgcggtggctcacgcctgtaattccaacatttgggaggccgaggtgggtggatcacctgaggtccggagtctgagaccagcctgatcacatggagaaaccctgtctctactaaaaatacaaaattaaccgggtatggtggcgcatgctgtaattccagctactctggaggctgaggcaggagaatggcttgaacctgggaggcggagttgctgtgggctgagatcgcgccattgcactccagcctgggcaacaagagcaaaactcgtctcaaaaaaaaaaaaaaatcatcacctctaatctcagcacttcgagaggccgaggtagaggatcacttgagcccaggagtttgagaaccagcctgggcaacatggtgagatcctgttctagagaaaatgtaaaaaattagctgggtgtggtgcattgcgcctgtagtcccagctatcaggaggctgaggtgggaggattgcctgagctcaggaagttgaggctgcagtgagccagattaggtcactgcactcccgcctgggtgacagagcaagaccctgtctcaaaaaaaaaaaataataataaaataataatcataaaaatttatgggatagtttatttgtaaaatataataacaattagctaaatttaaaattttggttatataaaataatagggctactggcctattcttctatttaagccttctgatgatgataacaatctagtattttaagttttcaaagcacttcacttctaaggttaggttcttttccttgaataaaaactattttcaaaactcttctgtttctttctttcttttctttttttttgagacagagtctcgctctgtcgccaggctggagtgcgtggtgcgatctcagctcactcaggcagctgcagactctccttggtaactgagaccaggttttcccatcaaactccttgagctgctgcacgcagtactcatcagtgggcttggctgtaatactaattcaaagccccacttctgcacttgctccacaaacacagagctggccacctgcctttgctctcaccagtgatgctatagatggatttctgtgcctctttcatgcaggagacaattttgacacagatgtcatctcatctccagactgggaagtgtgatactgcagcagctagacatgcgtcactggctagtggagtctttgtggattccaagctttagattttaatttttgaattctaaaattttatttattttttttttatagataggggtttcactctgtcatccaggtggagtgcagtggtgcaatcatagctcactgcagcctggaactcgtgggctcaagtgatctcttgcctcaggtagcttggactacaggtgtgtaccaccatgctgggttaatttttttattttttgttgtgatggtgtcttgctttgcagcccaggctggtatcaaactcctggcttcagcaatcctcctgccttggcctcccaaagtgctgagattacagaggtgagataccacactggcccaagctttagatttttagataaggcctcattgaatttcttgcaattctccttgcttctgccacctcagagaacagctcaaggcacttcttaacaatgtttctgtgaatgactttaagattctgctctgttggagcatttctcgagagatgttcaggggcagatcccaagtcaccacaccaaggattaaagttgagatactcttatatcatcatggctgtccatgatgaaccatgatggacacagagtttgttgttctttttttcttctcattctcaaagaagtcaaaggagccaaacaagggatgaacagcaatgctctgaattccaaccaaccttctacagagaagtcttgactgccaaatggtcttcctagtcactggtgaagctcttgtagaattctctatactctcctgggtgaatgtcatcagagtttctgatccaaatgttcttgatcttgtttagttctcccaatcaatgatttctccttgatcttgttggttttctttttcttatccttaccattgtctcctcttcatctgaacccacccacatcttcttcaatcttggactttttctcatcatcttatctgcctttttttgtttgttttgagatggtgtaacactctgtcgtccaggctggagtcggtggtgtgatatgagctcactgcaacctccacctcctggtggatcctcccacttcagcccacaagtagctgggacctaaggtgcgcaccaccatgaccgcctaattttttgtatctttaaagagttggggtttcaccatgttggctaggctggtctcaaactcctgagttcaatcatctgccacctcagcctcccaaagtcctgggattacaggcatgagccattgtgcctggctatcttcctcttctttctcacctttctcttcctctgcctatcatcactgattttctccttctttccttctccaaagaaagggtaatgggataggctatgaactgtaagtgctcttcacacttctttgaccttcctctcttctaagtactctgtctggtcttctttaaggtggagggtactttggtacccctgccaatgggctctccatggtcagcacatacagtgaaggaacccccgcagagactcccaggcatactcttcatcattgttgtgctttgtgatcacaactactttcctgccacaaggtaggcagaaaaaaaggcagcaccaaactgcccaatcatggagatatctcactagcctgaagagcctccataaatcctttagtaccagggaatacaccctgactttggagacacaggcattgacatgaccaaggctgatctcctaatttgggaaccattaccatgggtggggatgatgttaacttccagctctttaccattgtccaacttggaagggtttgtcaggtcttacaggaaatcttgtccaatgcatcagaaacattagatcaacccctgaaggaaaattccttgttagaatagaaggtattgatgacgagagacatgagttgggcaatatctgcctgaaggcaagtttccagctcctccgctccacgtgcactttctcaggcatctcgaaagaaaaggctacaagtactagagagcaaggtgggctgggactctccgacatgcacatggcaccaagctgtactgggatgactccagagctatatattttatatttatagatttatactcagcaaagttttcttttttgccataaattcccatgctactaaggctatgataatcaaccttaaattaagctcttatctggctaattatatttttcagtgttacatgtttatttccttaatgatagcatattagagacagtgacaggtcttacttttattctacattgttccacaaacatatttttatcaaatcattaaataaatgttgatgtagccagctttatctctgtggaaattcataaaagttggcctacatataatatcggggaaagaaagctgaaactgtaatgtaaaagggaagctatttgaaagttggagaaaggcaagggtagaggagtgggactagagcagaacagaacaaggtctggttcacagcggccaggaatcagtactgtagatatcatacaaggtggttagaatatgcctttagtcatttaagagccatcaagccttggcagactcactgattccttctctcgtctaatcctaggatgcatggtccaaacatttattttgtgttttcaactttgtctcaaattctacagctttattataattatcaaaaaatatgttaagggatgaataaagaaagaaaacagtataattctctccactcattctttccacattcaaccaagttcaaggtaaaaagcatctctaatgaattcaccgtctaaaaaggccctcccttacaacctccaaaggttatctgtgtaattcccagaggtctatgcactctttcacaataaacaggatcataaatgacacttcgtgtaataatatatacttgtttaactacagaaaggtagtaaatgaaaacatagccaggtgtgtggctcatgcctgtaatcccagcactttgggaggccaagatgggtggatcacttgaggcaggagtctgaggccagcctggccaacatggtgaaaccccatctctactaaaaatggaaaattagctgggcgtggtggcatgcacctgtaattccagatacttgggaggctgaggtggaggactacttgaacccaggaagtggaggttgcagtgacctgagatagtgccactgtcctaagtctgggtgatgaagcaaggctctgtctcaaaaaaaaaaaaaaaaaaaccacaaagaaaagaaaatgtttgattacttttttaaccttgtttcctaagtttatacaagtcatattagccaaacttctccagcatctagataaaatacataggtgatattttgttcaataaaccgatgggttccataaatacttcgactacttccacatataatacatttaatccagtgttatataatattaacatatatttagactttagttcaatattttgtacatcagaccagatacctatttccagaaatacatatgagatctgtggctgcttatattctaagatgctcaacattgcaatggcgttcttgacttcatattttatagacaacaatgattttattagatgcaaaaaaagaaaaacataattataaagtgatctagatttgggctgtgaaaatgagggtttaagaaaaaggaagatttaataagtctaaacacaatacatgtagggcagaggttgcaaactataacccaaagccaaatatggcctgctgcctatttttaaaaagtatcactggaacacaaccatattcttcatttacatactgtccttgactgcttttttactctacaatggcagaggtgagtagtttaatacctaaaacatttactatctggtacctttacaaaaaaagtttgctgacccccgattaagggcacaaatgttagatccttgccattccacttcccttcccttgttgttggaaacattctctacagcagagggtccccagtccctgggctatggacctgtaccaggccatgggtttcaggaatccggccgcacagcaggaggtgagtggctgatgagagcaagcattaccgcctagctctgcctcccgtcagatcagcagtggcattagatcctcataggagtgcaaaccctatgtgaactgcgcatgcgagggatctaggcagcacgccccttatgagcatctaacgcctgctgataatctgaggtggaacagtttcatcccagaaccatccccctattcccaacggtcctggaaaaactgtcttccacaaaacgggtccctggtgccaaaaagggctctacaggtctccgtcttctgagcagaaacattagcaactttgcttctgaagctcttttcaaagatgtttcacagcaaacagcctttggaagacagaggtaatgcctccctctggggcaggtgatagattgtttgttcattgtccaggattagaaagacaaaatctccctctggggcaaaggctgaataatttgctaacagtccccttataaaagcctagaatctttttttttttaaaatactttaagtctgggatacatgtgcagaatgtgcaggtttgttacataggtatacacgtgccaaggtgttttgctacaccaatcaccctgtcatctatattaggtatttctcctaatgctagccctccctactcccccaacccccaacaggccctggtgtgtgatgttcccctccctgtgtccatggttctcattcttcagctcccatttatgagtgagaacatgcggtgtttggttttctattctgttagtttactgagaatgatggtttccagctttatccatgtccatgcaaagtacatgactcatccttttttatggctgcatagtattccatggtgtatgtgtgccacattttctttaccagtctatcattgatggacatttgggttacttccaagtctttgttattgtaaatagtgtgcaataaacatacgtgcacatatgtctttatagtagaatgatttataatcctttgggttatacccagtaatgggattgctgggtcaaatggtatttctggttctggatccttgaggattgccgcactgtcttccacaatggttgaactaatttacactcccaccaacagtgtaaaatgttcctatttctccacatcctctccagcatctgttgtttcctgactttttaatgatcccattctaactggtgtgagatggtatctcattgtggttttgatttgcatttctctaatgacagtgatgatgagctttttttcatgtttattggccacataaatgtcttcttttgagaagatctgttcatatcctttgcccactttttgatggggttgtttgattttttttcttgcaaattgcttaagttccttgtagattctgggtattagacctttgtcagatggattgattgcaaatttttctcccattctgtaggttgtctgtttactctgatcaggttcctctcctgtaaagaacacaatgcatgtgcaggcttcacctagccttcagcatgtggggctcagagaagtgatcaaatgatgctactctggctacttctattgctttaacaaactgtcctttgtctctgaccggagtcttgtgtcttctaccagcattcatgaaattgttgcaaattaactagttagcttgaagtagggtaacatctcagactcttcacagttcttgatgcttgatttaaaaaaaataattaacaattcccagagccgcttatttcaaacagctaacacttagaccaccatatacatcttgcagtggcaactgactgaaagggtgaataggagctaaaatccagcttacattcaagggaactttttggaatctgcgcaatggtgccatacaggctagtggctttactaatcagaataaactttacaaagtagaggttacttttttcttttggatttcctttatgaaaatccatgtttgactttaattattcctgtgggtttctgaagtatcagaaatgttctgatagccgacaacaagtgttgagtaagtccaatgacaatgcagaataagaattcattgtttcagaattgctttatttggttcaagactaagtgctggccttttgaggaagctttgcccccaatgcttctttccctatagtggttatgtatgagactgtcagcccaacatgccctactattttctagaaaccattcagcccatgatggagctggcaagttcttatgcctccccatgactggctgcagttactggttcagggatggacatttggcccaatgagttcctttcctaggatttttggatttggacctagtaatttgagccagactctctcaagcagctaaaattctgagatttaaaactctattttgtctgtggccacatttcctgccacattgttcagtgagaaaaaaaaataataaagcaatttcaaagaaaagcatagatgagagacagagaaactagctggtaactttgagctggaggttcttgatgcccagacacattactgtccttgctgaagttgttttctctgaactgtagtgtaatttcctatttatttatttactacttaacctagttcaaattgggattctatcatcatctcccccactctactactggttgggattagtcagatttcaggacactaattagaagggaaataagcttgtaatgggagaatgcccccttcccccactttctctaaagtcctggtagtatggagccaggagatcacagactcaggtaaggcttttgattagactgaaccatatgtactgccatatctgtaggtcaaaaacagtcaaactatcaatttcatgtgactcaactaatatttgttttgcatcaaggctacttaattctacctttaatagaaaagaactttgagtccttatgtgggccaacctaactcactggagttctgtattgcggttagagagcaaggcccacaaaacaacaaagtacggctttgcctttctttgtcctctgaccctatgtctcccttgggcatttggggagaaaggtggtaacgtgcaagaattaggtatttcacagctctctgtccaataaaacaccgttatttcaaacacaaagtaactacaaatcattaatcattactcaccattaattattaattcattctttcatgtaaataacatttattcaatgagttgtaccagccctgtgcaaggagtatgatacagagacaaagccaaagtatcctagtcctcaagaagtttattgtttgcctgggaaaacagagtaaatcaactagtgtgataaatgtcatgacagaagcaggctcataggctagaagaacacaaaagtcatagctgacacctgagggagtcatcatggatgaaaaccagttattttaatgaaataatctggctatttctcactactgccactgtggccagcccgtctgagccaccaccacctatcatctggattattccaacagcctcctaattggtttccttttcctacccctgcatcttattgaacatagactgaattgctatgttagtctatcctgaaccagcagctagaatgtatcagttaaagttacatcatgcactggggtgatgaaataatttgacaccaaactccgtgatatgagtttacctgtataacaaacctgcacatgtacccctgaactaaaataaaagttaaaagaaaaagaaaagttgtatcatgttacccctctgctcaaaaccgccaatggccaggatccttgttccatttccttgatcttgtttcctattactcttgaaccgttgtttattctactcatcgccatgacttccttgctattccttttgcatattagtaacgtcccactataggttattccctgggaccctctacctggaaggcactttctccagagaccacatggctcagctctagtatgtctgctcaaatattactatcttagtaaggcttaacccatggcatccctcccttctgatttcctttttccttttttatagacacttaataccttctctacacaatatataatttacttttttgttatgtttattacctgtcttcccatctacttccccttttatgctcaatgtattaaacttaattttaccctttctcagaactcaaagcataatttactattttaaatgattatggaaatttgcaaataatatacctctagtgttggtcataacatacattatttaatgctgagtgctcaattataacagtgtccttaaaaatactacagcctataggaacacactgtggtgatatgtggagatcttctatattaatatttgttggttttatatataacttgaattttctattacataaaattgtgaacaaataaagaagtacatttcttaatgcacaaagaacagcttattgagggacttctataattcaaacactaattcttgaaatgctacttataagtgtattattttattaaaacttatataaacaagagtatgaaagacaaagttgaaaacattagttttgatttaattgtttaacgactaacattcaaagaattaaaaactagatgcattataagcaaatgatataggtcatctttactatggctcgtgaggaagtaattgttcagtaactgcagtaactgtaaaataacaagcctcccccaagagttaacagaacaaaagcatccagtaacaatgagataatcctctacaaatctttacacagcatatgtttaaatataaaagtcgtttgtgtacctttagatggtttatgaaaataagcaatcaattctgcagaccaacattatttctaaaggaaatctatgtgactcatgatgcctgtagatacacagagacaaccacacatattttatcagtttattacagtaagcaaataagcgtggaatgagagtgcactaactgtctacttagcgcttactgaaacatttataagagctgttatctccctaataacaacagacagcgtgcaattttagagaggagaaaagcttcatattttttaacacttcactaaaagtaactgaagagtgtaaaatgaaaaatactctgtgcagttagctggtaatggaccatttatcaactcaagttagatttataggatacaaactagtcactaatagttattttatgactagcatgtctgcttttttttgagattattaagattaaagttgtaaaacttcttttgaactagctgttcaaaatgattgaattataaaatttaaaatgagattcgaaaaataaaacatgaatagcaagtaagtgccttggaataagccttgttcagcatccacattactattcaaagagacatttccacgtaaagctttatgaaaacaatgtttcccagccttttatgctttaatcccatttagttacccagtcattaagtattatcaatccattctgtttttgaatttcaaagattgaaaatctgcagtatataaaatgctctttgtatctagttttgtttggcttactttacacagtatctattttgatatataatttataaaaatgacgaggtaagaaaatagctataaacgaggcacagcttcatctttaaaattagtacttttaaaaccaatgtatgtctcaattgatagatttgtaatgcagaaagtcacagtattgtctcatttatcctataaactgtagaaagtggtcttgattttaccttcaatccatttcattgaggctagcattaacctagtattgacctgaataggatttaaaaaagtaaacggcaaatttggttaactcttacatataagcacagaccgaagaaatatatttgaatcttccagcaaatattacttcaaataaatggtttttaatacaaagataacttcttccttatgtatataaattttgatatacaaatttatgataatttctctattttattttagtaatcactatacattataaagcacacaagactttctcacctcttatttggtaataatatatattaaaaatatatttgtggaaatacttgaacacataatgaacaatatttaatgagcatcttatttcatgctcggtattaagcaggcaccagcaaaccatgcttgaggccaaatctggtccactgtctatttttgcaatgcctgttcactaataatgactttccatttctaaatggttgaaaaatcaaaagtaatatgattgtaacattaaaatgatatgaattcattttagtgtctataaatacagctttactggaacacagatgcactcatttatttattattatctgtggctgctgttgcattaaaatggcagggttgagtggttgtggcctgcaaactgaacatctttactacctggccctttacaaaaaatgtttgccgatccctggtataggaatattcaatttacaatggttttgatataaggaaattaatatcccattctttctcctcccaaagacagatcaataaacttcactatcaatacacttactgcttttctatatatctgaaaccagaataatgtctatattgttttatatatcacgtacgtggtaaatagcaccagaaccagaatactgatatgttatactattcatacatatgttctcctattctttttatatttctttctgacttttggcttaagagtactaataaaaacagactgaatttgacttgtaaagtgttcgcatgaagttctcagtaactggttataacaaatttctttagaacccagagcattttacaaagcccaaaacaattatgcattgttaagctgtgatttgaaagatgtgataattacgtgacttagcagttctactgctttttcattcacaagattaaaaacataatataaaaaagaaaagctagtgtcttctcccattataaccaagctcagaaccttggcattatctttgacaccctacattaattagaaacaaattcactgtctcctgcattcatttcctcttttctgtccctctccaccagcttaattcaagtcttcattaacactgaaaatacttttaaatcttttttttcaattacaacagcattatatatttattgaaaataatttaaatagtatgaaaatataagaaagtcaagtcccagtcgggtgcagcggctcacgcctgtaatctcagcactttgggagaccgggccggtggatcacgaggtcaggagttcgagaccagcctgaccaatatggtgaaacccctctctactaaaaatacaaaaattagctgggcatggtggcgcatgcctgtaatcccagctctcaggaggctgagacaggagaatcacttgaacctgggaggcggaggttacagtgagccagattgcaccattgtactccagcctggtgatagagcaagactccatctcaaaaaaaaaaaaaaaaaagaaagaaaagaaaagtccccctcaggtaaccataacaatttggtgtcccttcgatcttttgctcccttatgacttctcttgcttatactatacgaggtctctctaatttgccccgtcattaggttcgttttactctgagctgtaccacaagctgctacacaaaataatttcttggagttgtaactccttcatacactcagcagtgaggtgtggtgggaaacacagggcttgaaactatacagatttgagctgaaattggttttatacatagcacatgttttactagcttgtaacaccagaaaagttactgaagctgaagggatctcaattttcaagtctgtgaaatgggacactagcacctatctttcagggttgttttaatctaggctaaacataaacagctggggcatgaagggcctgaggagcaggataggcacaagtaagggagtgagttaagatttcagattgaaaggacgaaaaactgaagttcagtggaggtgaagttattagaattgaacagatcagagactgtgaggttacatgttgcacaggttatgaatatgaacactgcagttccccaagtgatggtgggccagagagattatgtatgaaatactaagatcttcactgaatatggataatgattaagagatccaaagataagaatgacaaggaggggaagaaggaataggaagatggatgggccccataagaggaaggaaaatgaggatgaaaacagaatggcctaaaaggaacagggagcttcacacaaacaatcttggtagtaacaatgatttcgtcaagacagaattatcagcattatgaatggggccatgctgaacagatttacaacaggacttcaagatccaaatggagatcccagagaaaagctaggccatgaaccttacaaaattgtatgagggaaaccgtaagctgtctacatatttcagagatgggactgtggcctctaaaagctggctgtgttgccttgcattaagtgaattgtgacttagggacatggattccccttgatgaaggatgcggatgtcacctaaagaggtcctggcgataaggaaagaagtatgtcttaggagatgtacaaattggaaagggattttattatgggtatagtgattttaaactacagatgctttctttgaatctgacagaaggaaaaggatcctcatacatcctagatgccagttccaggtaccacaagttgctgaaaattcctgatgcagggaaaggatggggaaatgggttccctgagaccataagacagacagacagcctacagacacacacacacacacacacacacacacacacacacacttacttatataaacttattccccttgatctgtgtgtaaatattttaaaattttcagtaaggaggtggggatgggagaacgtgatttactacataaggcctggttttcttcatggcaaaggcacctggctgcaggctgttccgggtcaagtcctgggattgagcctcactcctgcactgtggcactggccagtcttctcaggctatacgtatttttaacatattaaacatttttcctcagaagtaagaatgttagtttccttctcatgaggcagaattacagctggcagtggtacgaaggaaaacactggttttaagttagaagaccttcaagctatttgatgagaagaaaatcatttaacttctctgtcttgtatttgtatctaattgataggattcttttgaggagtcagtgtgacactgcatgtgcagtgtgttgctggtgaaagtctccttctttaattattattaaagacaatgtttattagataagagaaaaaatagtggcagagctaagattgaaatgtaatattcttcagtgtcattttgtcaagcaataagctataattcctttttcaataaacacaaaatggtccttatgataaagaaagtaaaggtcagtcatgcaagctcatggggagatttttttctctccttcaaggagaaggtggaaagaactagcatggaaacttttttgaatgtgatcttaattataatcagtatcttaacaaataacttttaaaaacaaatccataaactgagattagaattgtctttaaaatacagttatttaataaactgcatgtctgaaagtggatttcaagtgataatttcataagcatcatcataaggcaaaggaatctaaggggaagtctgaatgctacatcacaggggacaaccaaccttgagacaatattttacacttctttacttcctcaggattatttgttaataaaattttactagatacctaccttcagtaccaaaatgacagaatcccacttttatactaattgtaagaattaactcagtatttggacatgctgaaaagactaatgatgaataccacttttttaaaaaagcaatgaaggtaccctcaggaaactgcatggggtatgagaccagatgtcaaatgattgggttatagtttgaactcagccacatattaaatggtgagaccttagctaaaccacaactcagagcttctgttttcctcttctgtaaaatggggctaatcatacatatcctgtctgttcactgagttgtcttgaggatcaaatgagaccatatatgtgaaactgatttttaaactgcgaaagttcaataaaaggcattatttggattattagtaaattgagttttcagcccacgttaaacaccaatctgtcagataacgcagggtcctgagattaaaagtacatgtcaaaaagctaatcaccattggaaaaatgcttttataacaacattgctgtatttattgatagtaccatcaaaggcctttacaaaagtaatcccttcccccgcatctgtttttccctcctctgttagtttgggtgaagagaactgttctctaaaaggtttctaaatgatgttgatgttaaaaaatatatatcaccatttaacagccttttaaagagcagtccccagtatggtctttgttaacaactggggaggaagggactattttttcaaaggcttttagaggatgttgttaaaagaatatataggacatcatttaaaagccttttaaataatagtcctctttccctcccaattgtaatgtcctggctttcatttattttgtactacaagccgaaaatggacaagccaacatattattggctaggcagcatttgttggatggagaatgatgcattgcttttaaaaaggtcggtgtccagaaaaaatccaactcttctagaacatagtttcatttttatacaggatattgcccacccacctttcatcaacttgtagtactttttgtttgttttccttaggagtttactgaaaaagacaccagccaacaggaaagaagtcacggctaagtcattccgagatttcccacggcatgaatctagtccacaatcgactgaggtttgcttcagtgaactctccatccaatttatggcaaattctacttttagctcctcttctgtagtctttattaatctatttcttcccactgttcctctcatttagtttagtccactaggagacagcagtggacccttagggttcctttccacacttagttccagggaggggaaaaatgaagtcgcccgtttggtttaagacacaaagtctgatagacagtatctttgaaaaaaagaactagccagggagataatcatatgatatgaaacaatttcccgttcttcttgagctgggtattttcagaaaagtgtcccttcattttaagaacaggatttcatgatccataacactttgatgaaaaaataagcctttaaaacatctaaatgtacagccctctaacacactgtattttaatcctaaattttagtgctccccttactttttgccaatcttgcaacagaactcacttgtttattctatgatttacttaaatcacagtaaatcattatttactttgatctactatcataaatcatatttagttaaatattactacccacaatgcaatgctcagtcaagtcccaatttatctattcaactcttcctggccctactccagcccattatgatcttaccatattccatttgacatgttataatttaattttcacactaactttatgtgtaatctttatcccatgtaactaacaaagtgctaagcctagataagaataatttctttattacataaaatttcataccaaacaaaaaagaattagccaggtaaataatcacagtatgcgaatcatgttttgcatgatttttgaaaaatgtaaattactttttagttctctactaccttaatagcacggttagttatctgtgcctgtaattatatttgatggtaaataaatattttaaaatatttaaaacatctcgataaaaattcatttcatttgagatttatatctccattatcttgagataatgtttcactgagaagtgctattataggccggacgcagtggctcacgcctgtaatcccacactttgggaggccgaggtgggcagatcgcgaggtcagcagtttgagaccagcctggccacatggtgaaaccccatctctactaaaaatacaaaaattagccaggcgtggtggcaggccctgtaaccccagctactccggaggctgaggcaggagaatcgcttgaacccgggaggcgaggttgcagtgagccgagaccgcgccattgcactgcagcctggacgacagagtgagactcatctcaaaaaaaaaaatgttattataattctgattctaaagtaaagtaagtaaaaattttaaatataagtgttaaatttcctgacctgaagcatcaaagagacagtactaggaagattgacactttatttaatatgactgatctgaaaatttcaaatttctcttaatttccttaacgtagttaagcagaactgcctcaaatacgaattgcttcattaggcagatggccataatcttacagcagggctgcatctgaactctatgactagtgagttatccccatggtacaatcaactcatgaccagagaatacaagcctgggtgtggtgccgggttctgctcttcatggaaatggctctatgagtgccatcaccctgccctcctgttcctctgcaatttgatagggttggggtggacatgagtatctgagtcacctccttcttcccacaggttctataagtgaggtggtatacgaaaaacagccccttcaaagatgtctaggtcctaatccacagaaccaatgaatatgtaaattatgtggcaaaagggaattaatgttgccaataagttgactttgagattggaggtcatctggattttctgggagggcccaagtaatcacacagatcctgtaagtgaatgagagaggcggagattcagtgtcagagtgatacagcatgaaaacaactcaattggccattgctggcttgaaggtggaaaagagccatgaaccaaggaatgtgggctgcctttacaaactggaaaagtaaaaaacaaaaaccaaattggattttcccctagagctccagaaggaacatggtcatgctacgccttgaaaaataataataaatttgcactgttttaagccactaagtttgtggtaatggttacatcagtgactggaaactaataaaggtaactgcggtgcctagttgaaaacccctgtctgaattcttatgttgtgaaacctatcttcagagtttatagtatagtttgtatgcatgaactttttcaatggctgatctgtgatctgagaagcaacaaaactccgcagtattttctcttgaacttaaactccaactattatagacactaataaatttgagtggctctcaaattgtcgaatcagtttagacagctggtttaaaaaaactcccctcccctaacactccttctatgcttcaataagcgccatgggttggttttgatctatctgtagttgccagacaggtgctggcaaaaatgaaaaaaataaaaatgaactgccatcattaaattgaggcttcaatttaatgcactcttattatctaagactccctctttaccccctttatttagtatgaatctttctggtaaaaacacataaagaagcattttgcatataagcaaaggggattattattagaagtagtagtgaagatatagacacttggttgaagaaatacaaacagacatgtttcaatggggaaaaggaagaaaacaaaaacatgagggggtctgggtggggcagaacaagttcaggataataaaataccaggttagaaaaatatcaatagtaagtaggtatcaaaaaagaatggaaatcctgaaaacttaaaatgtgctatttttgtctagagttacctctctctaaaataagcacaatacaaaaagcagatgtttataaaagttataccgagtctctgaatgaggactcttaagcattctgcaacatttgtgtcaagttaaggtgtctataacccattataaccgctggaataaatacaggtgcccagtgaacgcttatgcaatcaggtctatgtgagaaaagtggaaccacaaaacatataacaaatgctgctcagaaaaaatttaattcagtctgtatcggtctgatagaaacacacatgagaaggacaaaatgtttctttgtggatattccatatgggtaaatcatattatagaaggctgcacattataattcaagaatatattacaaatataaaagaatgttttctctgtgtatttgcagcattagtaattccttctgtcatgatcccaagacaccttatgtaaacgtccactgcgcccgactcatacgctactgaactcttgtgtttacatgatttctgtttccataagactaaagataggactcaaaactgacatcatgacttatttttttatttgccacagctcataccaagatcagaatgtagtagacattccatccatgcttattaacagaaatattcaggtttttgaaaaaaaaaatctttcatcacaagtaccataatccctaaagttttactagaaagcaaaaagaatttgctctatccatggataaaagtctgcaaagaaaataaagggcattaacctataccacgattctacccaaatttttcttggaggactaagaagagagaaatttcaaacaatcagttatgtaatttttatgtttaatctgacacctgctcagatcatcacactacctcttgactatagtggcaccctttggttgatacctttgaaaaaagaagtactgaaccacatatccataacatacttccagaaagcacaccgctgggtctcagaatacaaataatctggtcaaacatgaaaaaaaaaaaaacacttctcttatgatttcccacatccctcattgatcaaaagactgtgaattgataaccttctctaggtatgtatcctttttaaaaatcagtgaaaaggtattgtttctaagagaaaaccagataaaaaaaagacagacattaatttctgatagtttcctttcactgttttacctattccctgagcatttaaaactagcaaggcattcaaacttggtgagtggatgtctacaggttctagtaaataaagctatgtaaaaatttcaaattcttatcaaggaattgagaaaattctgacacacgacacacattaagtatggcagaaggtacaagactaagttgcagtggctgacatgttttcaccatctatatgatgctggtatgatcaagcacttgatgtatgcctagaagtaaaatgaacctgtgaacattttctggtataaaacatgtctctgccacacacaatttcttaatttcaaactcatatttaggatcactgctttcagcagcactgtcagccgcaaggctggcatgaagcttccaactgcatattatcacccattgacaaactcgacatttatgaagagcccctctttcacactgacatcctctgtaccctgagtaaataacttacaatcatttcctaaccttgattttagagtccatccagcctttccacccttctttttcttctttcaaacaagtgacaaagaacaaggaagctgattgaaggggtccattatgtatcaacttaagaaaggcaaagtgattgatgaaaccagcagtcaccttcactgctagctactgcacctgttcctttttgtcaaatgacctgaaaatcctgctgacagtttaacactcactacaaggataacagtatgagactacagttttcaatatttttatttgcagtgaaatctttagggatataattgagaacaaaagtttagctttataatttttgaagctttgtattttcctcctacacagttctgattgctatcaactttctctgcaaaaataccgtcatggtgtggacagggtagttagtgtggtatggtaggtaacctgaatgtttattttaaacttcatgtttttgtttttgttagggagacaacattgttaactcagcaggattccttctgccaagtgatttgatgaatccaaataattatattgctagaagaggtacttataatttctcattttatctctttggggtggccatagctcaaaaagtaattaaaattaaaaagtaaaaatgaagtattctaaaattactaacatttatctaaaagacctaaagttgtctctcaactttcaataggtgaattcactaggtaacaagcaactaagaatttcttctgtgaatagataaaagtttacttaaaaaactcatgacattccgtatagcagtgaatttagtcataagcttactgtgttagaaataaaaatttcactagcaacagggacacacttgagagccagcaaaatctcaaaagaagccacagttctctttgtgacatagcaccatttcctctgggcatttattacctgttaaaaaccaatcttttggtgagtgcagttcagggtttttgagagcaagctgcaatatttcttcaggtctgcagagtcataataaagctgaactgagcggaattggagagggaaggtcagcgaggtgccgtatgagagatgagctgggctgatgggcaccaaatgaacaaattatgatgggccccactcaatgtgatgaggcaaatgcttgtttctacccactgacagttcaatttccctgaaatgtctctcggttctcttgagctaattatgaatgaaaagttatcaactgcccacaccaaagggggcttaaatactatttgtagagttcttaatgtcaaaatattgttcaaaacagcatgctgtcccactccaaatcaatgcttgggttaatgtaaataccagtgaaacactatcaattttcctcaggtttcccaaatgtatacataaagcaaattctccagcacttgtcagcttaacaacaaaataaagatcattcatcaagtaaatctatattatacctacaactcatttccacagtaatagcagttcggtcttatagttttgcatatcacaggctacataatcttcaaatagcactatatattttttcagaacgatgctactggattattagcttctaggcatcaatactcagatttaccccagcataagatttattatactaaatcagctcaacagcaattgacaaaatgtaaactccttttatggacctcagtttttgaggaacaatttccacagcctgcattcatgatggacaattattttcttacatctataagcctaagtgcctacatcttcttttttgaatcctatgacacatggtaaaatttgattgaatgcaggatccaacaaattcttaaatagtatatggcctcaatcacagtacacaaaaacagattgaagtgataacatttgctgaagccctactatgtgccattcactataaaagactttcacataggaatgtttaatataatacgtagtctagtagttttctagcaattacgacacctataaaagcttggatcaatgaggttaaagtgtacatcaaataaaaaataacaggatctgcataaaatatagtactgagcttaattttttttaaaaatgataaaatatgtaacataataaagttgaaaatgacacttgtcaactttctaattaacactaggtggaaaagagttttaggaatacgttctataagaaaaatggatttaaggtataaacataagaagtactgcagggggggtcgggcaggaagagggaaagatcaattacaattcaggtaaacacagtggcattaaaaaaaaaaggagcatgaagtagggaaaaaattttgccatttaaaaagatcatgacagatatatacaagtacatttttgggcaacttactaataatgaaagtttttagtgttactgttgtttccacatttaacataatatgcttagatatacagtatcaatttatatgattcttaagaagcattaccttatatacgcatgtttagagatcacaatttaattcattcattaaagaccctttctggaagttgattttttctaattcttattgtaattgcattgttctaatctgtattataaaggcagctgcttgcctatcatttgtactttccttgttaatcctgactcaggaattaacctttaattacagccgttaaaattgaaatgagcctcttgtctggctggggctccccctttcagtgcatgattctgatgaaaatttttagggtcaatgaatatgtcccatgtatgtctgatagctgctaaagatgtgaggaggtaaatgttaccttagaaagatgtgctttaatttttagatctgctctattgacagaaaaataaaatcaaaatgttatttttcatttttagcttaccatgctgtatttttagagagagcatttaagaaatataaagaatggaatattagctacgtttagtcaaataatttaaagcaataacttaatccccattttactgtcttaaatttacatgctaagtaataaaaggaatgtgtaagtagcacaaccactttctagatatgggctgatgggaataattctctcagtaatgtaataaactaacatattaaccagtggggaggggcaagatgactgactagaaacagctgtggtcagaggctttcaccaagaagaatgaaaatgtgagtgaatcctgcaccggcaactgaggtatctctcactgggactgactaggtggttggacgacccacggagagtgaggagtagcagggtggagcaacagcccacacaggagccacatgggcaagaggagcttccacccccagccaagggaggtggtgagtgattgtactatcccgccaggaaaccacgccttttccatggatctgtgcaagacgcagatcagaagatcccctcgtagcccatgccaccagggccttgggtcccaagcacagctgtgcagactctcagtggcccccggctggagactccctgagactcgtgagttcaagaggggcagccatcatcatacagctgctgctgcctaagatgactgagctttggcaggggaaggggggcagctgccatcactgtggtgcctgctgcctaagaccaccgagctcccgggcaaggggcagcagccatcactgcagctcaggctgccgttttcccctgccagtgccggggagactgggcggtttggaccccggaggattttccacagcgcagcacagtggctgtggcagatcatggccagactgcttctttagagtaacatggacccattcctcctcactgagctgggcctccctgcaggaatttcagcaactccgccaggggtttagggacagaactctgatctccctggaacaaagccactctggggaagggagccatggtcttggtggatcagtgcacttagtccttcccctcgctagctctgaggaatcgggcagtctggatgagtgggattcccgcccccgcacagagcaacccctccaccaagggtagccagagtgcttccttaagcaggtccctgatcctgtgctccctgactgggtgagatctccaacaggggtcgctagacaccttacacaggagcattcctgctggcatcagattggtgccctttgggatgaagctcccagaggaaagagaaggcagccatctttgctgttctgtagccccactggtgacacctccaggtataggagggagcaaggacaatagggtctggagtgggcccagcaaactgcagcagctctacagaagaggggcccgactgttaaaagaaaaacaaacataagcaacaacagcatcaacaaaaaagtccccacaaaaactccatccaaaggtcagcagctcaaagattggaggtaaagtcacaaagatgagaaagaatcaatgaaaaactgctggaaatcaaaaagccagagtgcctcttctcctcccaattaccacaacacctctccagcaagggtcagaactgggctgaggctgagatggatgaactgacagaagtaggctttagacggtgggtataacgaactttgctgagctaaaggagcatgttctaacccaatgcaaagaagctaagaacgtgataaaacactacaggagctgttaaccagaataaccagtttaggcaggaatataaagacctgaaggaactgaaaaacacaacatgagaacttcacaatgcaacccacaagtatcatagccaaacagaccaaccggaggaaagaatttctgagcttgaagactatcttgctgaaaaagacaggcagacaaaattagagaaaaatgaatgaaaaggaacaaacaaaacctccaagattatgggattatgtaaaaagacctaacctatgaatgattggggtacctaaaagagatgggagaatggaagaagttggaaaacatacttcaggatatcatccaggaaaacttccccagctagcaagacaggccaacatgcaaattcagaaaatccagagaaccccagtaagatactcgtgagaagatcgaccccaagacactaatcgtcagatttaccaatgtcgaaatgaaagaaaagtgtaagcgcagccagagagaaaggccagatcacctacaaagggaagcccatcagacgacagcagacctctcacagaaaccctacaagccagaagagaatggaggccaatattcaaattcttaaagaaaagaatttccaacccagaatttcatatctggccaaactaagcttcaaaatctaccaaacaaatgaaaagcagaaaaaagcaggggttgaaatcctactttctgacaaacagattttaaaccaacaaagatcaaaaaagacaaagaagggcattacataatggtaaaggctcaattcaacaagaagagctaattaacctaaatatacacgtacctaatataggagacccagattcataaaacaagctctcagaacctacaaagagacttaagactcccatatgaaatagtgggtgactttaatatcccactgtcaatattagacagatcatcgagacacaaaattaagaagataattcagaacttgaactcagctccggatcaagtggatctgatggatatcacagaactctccaccccaaaacaacagaatatacattcttctcagtgccacatggcactactctaaaatcgatcacatcatcggaagtaaaacactcctcagcaaatgcaaaataagtaaatcttaacagtctctcagactatagcgcaatcaaattggaattcaaggttaagaaatcactcgaaaccacacaactacatggaaattgaacaacctgctactgattgactcctgggaaaaaattaaggcagaaatcaagaagttctttgaaaccaatgagaacaaagagaaaatgaacagaatctctgggatgcagccaaagcagtgttaagagggaaatttatagcactaaatcccacatcaaaaagctagaaagctctcaaattgacatcctaacatcataactaaaagaatagagaaccaagagcaaacaaaccccaaacctagcagaagacaagaaataaccaagatcgagcagaattgaaggagacagacacatgaaaaacccttcgaaaaaaaaaaaatcaatgatccaggagctggttgtttgaaaaaaattaataaaagagaccactagctagactaataaaaagaaaagaggcctggtgtggtggctcacacctgtaatcccagcactttgggaggccaagtgggcagattacctgacgtcaggagttggagaccagcctgaccaacatggagaaacccatctctactaaaaatacaaaattagctgggcatggtggcacatgcctgcaatcccagcttcgggacgctaaggcaagagaatcgcttgaaccccggaggtggaggttgcagtgggtcagatcatgccattgcactccagcctgggcaacaagggcaaaattccatctaaaagaagaaaagaagaaagcagaaagaagaagaaagaaggagaaggagaaggagaaggagaagaaggagaggaggaggagcaggaggaagaatcaaatagatataataaaaaataatgaaggggatataccactgaccccacagaaatacaaccatcagagactactataagcacctctatgcaaaaaactagaaaatctagaagaaatgggtaaataccaagactgaaccaggaagaagttgaaccctgaacagatcaacaagttctgaaattgaggcagtaataaatagcctaccaaccccaaaagcccaggaccagatggatttacagctgaattctaccagaaatataaagaggagatgtaacctttcttctgaaactattccaaacaattgaaaaggagggattcctcactaattcatttatgaagacagcatcatcctgataccaaaacctgtcagagataacaacaaaaaaaaagcaaacttcaggccaatatccctgatgaacatcaatgcaaaaatcctcaattaaatactgcaaatcaaatccagcagcacgtcagaaagcttacccaccatgattaagtcagcttcatcccagcatgcaaggcttgttcaacctatgcaaatcaataaacataattcatcacataaaagaactaaagacaaaaaccacaggattatctcaatagatgcagaaaaggcctttgacaaattcaatattccttcctgttaaaaactctcaataaactaggtattgatggaacatacctaaaataattaagagccatttatggcaaacccactgccaattatcatactgaatgggcaaagctggaagcattcccattgaaaaccagcacaagacaaggatgctctctctcaccactctattcaacatagtattggaagttctggtcaatcaggcaagagaaagaaatagagtattcaataggaagagaggaagtcaaactgcctctgtttgcagatgacatgatcttatatctagaaacccatcatctcagcccaaaagcttcttaagctgataaccaactttagcaaagtctcgtatacaaaatcaatgtgcaagaatcacaagcattcctatacaccaacaacagaaaagcgagggccaaataatgaatgaactcccattcacaattgctacaaagagagtaaaataccttgaatatagctaacaagggaagtgaaggatctcttcaaggagaactacaaaccactgctaaggaaatcagagaggacacaaacaaatggaaaaacattccatgctcatggataggaagatcaatatcatgaaaatggccatactgcctaaagtaattcatggattcaatgctattccattaaactaccattgacattcttcacaaaattagtaaaaactactttaaaattcatatgaaccaaaaagagcccgtatagccaagacaatcctaagcaaaaagaacaaagctggcggttcactctacctgacttcaaactatactacaaggctacagtaacccaaatagactggtacggtacaaaaacagacacatagaccaatggaacaaaatggagaactcagaaataagaccaaaatctacaaccatctgatctttgacaaaacggacaaaaacaagcaatagggaaagattcctatttaataaaaggtgctgggaaaactggctagccatatccagaaaattgatactagccccttccttacaccttatacaaaaattaactcaagatggaataaaaacttaaatgtgatgggcaccgtggctcacacctgcaatcccagcactttgggaggctgaggcaggcggatccctgaggtcaggagttcaagaacagcctggccaacatggtgaaaccccgtatctactaaaatacaaaaattagccaggtatcgtggtgcacacctgtaatcccagatacttgggaggcgaggcaggagaattgcttgaacccaggaggcagaggatgcagtgagcagagatcacgctctgcactccagcctgggcaacagagtaagactccatctcaagaaaaaaaaaaaaaaactaaatgtaaaacccaaaactgtaaacaccctagaagaaaatctaggcaatatcatttaggcataggcacaggcaaagattttatgatgaaaacgtcaaaagcaactacaacaaaagcaaaattgacaaatgggatttaattaaactaaagagcttctgcacagcaaaagaaactatcacagggtgaacaagcaacctacagagtgggagaagatttttgcaatctatccatttgacaaggtctgatatccagaatctaaaaggaaattaaacaaattaacaagaaaaaaacaaaaaaaaaacattaaaaagtgggcaaaggacatgaacagacacttctcaaaagaagatatttagtggccaacaaacatgaaagaaagctccatatcactgatcgttagagaaatgcaaagcaaaccacaatgagataccatctcatgccagtcagaatggcgattaaaaagtcaagaaacgcagatgctggcgaagctatgaagaaataggaatgcttttacactgttggtggaaatgtaactagttcaactattgtggaagacaatgaggttattcctcaaagatctagaggcagaaaaccatttgacccaccaatcccattactgggtatatacccaaaggaatacaaataattctttataaagatccatgcacacatatgttcattgcagcactattcacaacaacaaagacatgaatcaacccaaatgcccatctatgatagactggataaagaaaatatggtacatatattcatgaaatactatgcagccataaaaaggaacaagatcatgtccttcacagggacatggcggagctggaagttattatcctcagcaaactaacacaggaacagaaaaccaaacaccgcagttctcacttataagtgggagctgaacaatgagaacacatggacacagggaatggaacacacccactggggcctgtcagggggcacgggaggagggggagtatcaggataaatagctatgcatgctgggcttaatacctaggtgatgggttgatactgcagcaaaccaccacagcactgtttacctatgtaacaaacctgcacatcttgcacatgtatcctggaacttaaaataaaaaaataaaaataaataaacactcaaacaccaatggagttctttaaactgacagcagtgtaatgggttctatactgatgactctggaaaataggaagggttaattcattccaaacacattgatgagcacctattatgtattaagcactgggaataaaaaaaggtcctgttctatcttcagaaacccagactccaatattattacatctatatttctaatgtaaaagacaaggcaaccttcccctatgctgatgatgtttactgaagccatttgaagtctctccacttactttctttgatttctagaaattttagagctggaagggactctagaatcctgttccctaatttcatagtaacagcctgaactgaatgtaaactttgatgtactagtttatatttacaagatattttgcaggtcacatattctatgaagcatgaatgtcaaatcttcagtgaaaatatgtaaatgaagagtttctgaaattacgcacttaaaaacgcattatgaaaaattttcaaatgtatacagggcagggacactgatatgatgaacaactagatactgagcactaaatttcaaaattaccaaattagccaatcttgtttaatctaatcttttactcaacttctgaattattgaaaagcaaatccatgtattatttcatcagtaaatactttggtttgtatatgtaacagataaagattttaaagaaaacatacaatattatcacatctaaaaatgatataaaacaaaaattcctctaattcacctaaaatacagtattcacatttccttggccatttcacgcatatcattttagagatatcacaattcaagcaagatgaacacatttggctggtatcgcttttaaatctctcttaattaaaggtatatgccttctgaattggaatttgctgaaattttctgttttgttttttgggggagtattatttgtacagaggtgtaaagcagattttccatattaacatttggaggggaaagtcataaattcagtaatgaaaaacagctgcaaatttaaggaaaaacacttactgataggttataaaagctgtatataattatattccctgaatgatttgagtaacaatgtgtctgataattctttttttttttttttttttttttttttgagatggagtcccactgtgtcacccaggtggagtgcaatggtgcaatctccgctcattgcaacctccacctcccaggttcaggcaatctcctgcctcagcctcctgagtagctgggattaaaggcacaagccaccatgcccggcaatttttgtatttttagtagagacagggtttcaccatgttgttcaggctggtcttgaactctgacctcgtgatctgcctgcctcggcctcccaaagtgctgggattacaggcgtgagccacacgcccagcccacgtctgatatattctaagttaagtggtttttacttttctttgatatagggttatatactgtacttgtttttactccatactctcttgtcagtggtaatcaattctagtgttcattggacatgtattctacagctaaattcgtttctcttccttcgaagagaaataaggttttgtaaatatcataacatcttccatgtttaggtcaggtttctcatgttaagagtttaatactattagaataagaattattaatttccataccatgccctgccctgtgttcagaaaaaatttggcactgtttttaaggggaacagtggtaacagaagttaacttggctgacagtaattaaataatatttgctatatgattgaccaatgcataatctaagataccataatgctaaaaactatatttttcatttcaataccacaattcaacagtagcaacaaaatttgaaattagcaattcatagtcacacaaaattccatcaaatttgtgtgactatgaactgcctttttaaatgcataatttcagactatgaactgttttttaaaagatagaatttcagaaactcattatttacatattttcaccgaagatgacaaaactgccataaaagatgaatcttttaaaaactattacatttttaaataaattatattttaaaaatcatcttatttcctactgtggtatattaataataataattaaaagctaaaaatcataatcttagggaaaagtggatagatgttcatgaactctcagctctgaaacaagtgaactcacagccagcagaactacttaccacaaaggggaggaagggaagtcgaaaggcctaaggctttctttatcacaacctctttaatccttcatttcttgcagatctgtgtgcatgtttcctttgtttttttgggtgacctgggttttttgcacaaataattgctagttcattaataactataattagcatctgattcagcggatttgtcatgtggggaattttactaaaatactaacaactaacattatgagtactatccgccagttagacaaactggcacatatttgcttaagccaattaaaaatattttgcaataaaaaaattccactaaaaattaataacaatctctttttaaaaagtagctccttttagtaatctaggaaaagagagatgaaaatggtctgttatgagtacctcagaagtagcatagaaatagaaagatcaacagcaggatgacataccttaaggtttaatttaagaattaaagcaacctcatacccagagattgaataaaagaataagatggggcatggctaggcaatggaagcacaaaatactgtcacctttaatttaaaaatgttttcaattgaagcagacccaggccagtgatttttcattattttaccacagttccatgactactgacattttcatcagaacaaataaaggatttttcctaaattaaaatgacaaaattatttttaattttgacttacaatttctccctcttccaaactcaaggaatttgatcttagctggacttgtctcttagcctggggcctgaatataccttaacttttaaaatggaaaaaaaaaatttttttaaagatagttcttcaccgggcacggtggctcatgctgtaatcccaccactttgggaggctgagacaggtggatcacctgaggttaggagttcggaccagcctgaccaacatggagaaaccccatctctactaaaaatacaaaactagccggggtggtggcacatgcctcaggaggctgaggcaggagaactgcttgaacctgggaggcggagttgcggtgagctgagattgcgccactgcactgcagcctgggcaacaaaagcaaaacccgtctcaaaaaaaaaagatgattcttctactatattagaaaaactttatcatataatttttgaatgagatcacatattcatgaaatgtctggcatataacttagtaaacgtacatattcacaaagacgtccctcaaagcaatctctccttgcagaccaacttgaaaaaagtctagcacctgccaatataagagattggaaaacaaaactaaaataccctagtagcaattaaaagagatgaggagaactggtaggggggtggttggggaggatatatctaagataagactactcaaggaaactgaaatcctaaatacaatgcaactaacttcaatcacaatagttactattataatcacaattatcctaataattccaaatactgttttagtagatttcagatggagtgaatcagtacttcttcatgaattatggtttgtttttttcttattattgttttaaaaccaacagagtacttccataccaaaacaaaggaaaggcctgataagagtcttctgtttcccagttgagttctacaacacaaactgggtcagggacttatccctaactcacggaagagttgtaactccacggctgccaattttcgacaatagcaaaaatccgtaagactacttgctagccaatttcccaattcctttgataaggaacctgataggacaaatgataaaaactgcagaagctacatttgcttgtggcttttctttgtaccactctgggtgcccaaattcaagtggattacaaatggggtgcttcttcctatccttcggcctataaatccatggggagctgaggggcatgagtacagggttcttggtcatgctgccaaacttaacgtcatctttttgctggtcataggaaattccatgtagctactgatattccatgctagcttcaccctggcatggtcatcaagtgacaaagtgatgtcctcaatggtaattcaaggaaagcaaacggcgaagagtacggactatgaaaatcatcttctacttcttgctaaaggagaagagtagttcaggtatctaaatcttaagctgtgtcaatattgaaagtaactcttttaggttttaagttataatggtacagaggaaaaaaggtggaatgtggaatttagcaaatatcaaataatagtgtttatgttcataaccagagaaataatgaaaataaagacaacttgtatctacggatacttccaaatgggcaaaactgttacaaaaagggagcacttggtatactgtaattacatactttgaggcaatttttctttattttcccagtcactataaactttctcagggcaagaagctttcccatcttgtttaccactatatccatggctcatattctggtctgaataaatacatgttggatgaataaaacacttaattggcatatgttagtaaggaatttgacctaacctaaagaggcttaggactttctcttagctcttgagggggacctctaaacccttggaatttccccagtgataaaagtgtctttgttattcatggtgggcctttgggaccacacctgataatttatgccactgaggtgactcatgacaggtccctcagtagcttatgctaaggagataactcaggataaggctggccaagatagaaagaccaaccattgattagagggttggggcgttgagctacttaatatcagcctgacctctagagacagggggggctggagactgagttcaactatgtggctagagttcaaccatgtggcaatatttcaaaaatcaaggctatatgatgaagcctcaataaagactctggatgtcaaggttcagtgagctccctggctggcaatagtccatgcatattgccagattttcatgccagtagggtaacccaaagtttcacatttggaaccctcctagaatctgccctaggtgtgtcttcgtttggctggtttaatttgaatcattttgctaaaattgtaatcctaagcacagtgcttttctgagttctctagttgttctagaaaattactgaactagagagtggttttgggaaatccgtaaagttacagtggtgtcagaaatcttgggccaacttagtctggaggactgtgcctttaaccttgagtttgctacctccaagaggcatacaacaacaaattaggcctttttgtttgtttcatggattgtcttgaaattccttactattcctcagtgtaccacttttgcattttgaaatgatcacttttttaatgagccttcctgtactgtccaaaattaaattccacttagggtttgtgatccacaagatcaaatctgttatctttatggtagctaagtcagagctccctcactaatttgccacaatgggtcagaggtgtgctgcgatactgccccccatgaatccccaaggccaactggggtcttggtagctggagctcctagactgggtgcctccaacctccttcagcattgtttaccctagatgcattacaggtattgccacttttctacatgtaccggcacacaaaaagattggaaaacagttaaggaatcattactacaattttcccatgacagtgcgtcaccaacatacttctcaatatcagatctggttacacatgttatacttaaaccctacattgaaatactgtttcagcaaactccagttcttccacaccccaagccttcaggtatactagttcctcttctaggagcgtcttcttctactccagccacctaggcaaactcatcttccagactcagttccaaggttacattgtatatcttctctaagagatctttgtcacccaggagaacttggtggatttgtctctagtcagcacttactacattaatgatttgactatttccctcagtaacctgtgagtttcctcaaacacgctgctctatgactcacctccttctttcactgcttttatttggcttttttctttttgtcttctaaagcatgatgttccctaggattccatcttcagttgtctcttctcacccaaaggtttcccttctgttcccctaccttaaaccattacccataacctgatggctttaggagtgtgtgtatgcacacacatgtgcacatgcttgtattctaattagttggccctaattttcactaaaatccagaatggattttaccttcttactggacatctctaacttgatgttccaaagcacctcagagtaacatgttccaaagaaaatttcaatgtcattgtcctttcctcttcctattttctatcttggttaactgggtaccactatccagataatcattccggtgcaaatctagttatctacctaaaagttaccaaattcttcctttgttctcttcctatccaattaatcttcacacaactttataaaacaaagatctgatcactatcaataacctgctctaaaatcttcgaactcctttcaactgtttcacaatatggctttcaaccagtagctacttctctctccccaaaacatacattttgtacactagctatatctagctacagaatttggcaaaaacataataacattttatcttctctctttcatctggccattccctgggctgaaatacgcatctcctctcttccctgttggtaaactcaatcattctccaagacccaacacaaatatcgctatccaagccatattgataggcactctttgcagaattacttgctcccttgtctgtactcctataatgagttttctagtctttttcattcactaaactgtgagctcccttaggaagggactatgtttattaacctgttatctgtaattcctagcatagtgatttagtcatactgtgttcaataaagttttaagtaaatgaaattaagctataataaagcctttcagtctgcatgtatgttagaatcaaatatctagagaatctcactggtatctatgaacaacataaacattaggggaacatgtttgttacctgccttacagatttcagatatgaaagctcttaggtattgcaaatttttattactatattcatgaatacattgcaaaatgcaagccttaagtaatacagctagtattccacatctgaaagtcagaccatctgtgtctggctttgccaaaggcaaatcctgctttaaactctgttagaatactgtcaattcttcttactgaatgttttttaaaaaggtaccatccacaataactacatggctaacataagttaacatttttttttgaaataaaatctaaagggttgaaaatttctatttcattacaattttcttatataattccttggaacaggaatcttaagacatttcttttttacaaaagaattttacagaaataaaaccctcattaatctgaactctaattgaaatttaagaaaattaagcatggaatgaaggatggactaagtttgcaccatctaagaagcaaagacctaccatggagcaaataagattttacaggacatataaatgcagttcattaattaataattctaaggagtttaccacatacggtatatacaaagattgatttagtatataatttaaaggaaagcagaaagatatggaagaaaaggaatagaatttggaagcacaaaacccggctcaagtattaagtgtactattgatagttttattttagttatactttggattttagtattatttaatgtagctcacatttataaaaacctgtatataaaataattcaggcaaagaagttaaagaatagattaaaacaaaaacaaaatccaacatccctcccccatcgagcatcatgataaaactttaaaaatctgaatgacaatcacaagtatacccatcccagattgctttccttttgcttctggcatcagaggtaaccagaatttggatttggtgttcgccagttgcaagtatgttttaaacattttccacatatgtatgcatccatcaattaaataattctaaatactttttactttctacaaatggcttcctatgtattcttttgtaattttcctatttatttatttattgacaggtctcactctgtcacccaggctggagtgcagtggtgcgatcctggctcttgacatctcagcctcctaggctcaagtgatcctcccacctcagcctcccgagtagctggaacccaggtgtgtgccaccatgccctgctaatttttgtattttttatagagatggggttttgtatgttgaccaggctggtctggaactcctgggctcaagcaatccgcctgcctcagcctccaaagtgctgggattacaggtgtgagccactgtgcccagcctgtgatgtttcttactatttttttgagatttgtctaacaggtatttccagttcattcattttaacaactggcacagtatccattgtatatgcatgccacaatttatgtatctattctagtgatagatgtagtttccattttcttttttttttttctttttcttttttttttgctcttacaatgtgtcggtgaacatcttgcatgttttcatgtgtagccacatcgattagtgagtcatggagaatacattattcactagagtgaatatttccaaattactctctgaaatacccactgggtatgcctccaattttttttttttttttttttttttgcaaacacactgttaaaactaatttttagagaagcctactttcaccactttaaaaattttaaaaataagcttcctgttttacaaaacccaacaaccctacatgcaaccattcaataattgtaataagcacacatattttagatttgatttaaactagttaatacaatcaatggtatgaaaatatgatcggtggaaaaacttttgattggctggtaatggatgaagtgaaaaccagctaaacaatggtttcaccaaaggtaccgtctctctttgatcacctgtgagcagacctgatgaagtatcaggtaagtaagttttcagctggagtaaaggaagcttgatcatttcaaaatacaaatggatggccctaagatcagggtttagggaaaagcctagatgttgattcagggtactcttgagttattattggccagacttgggagcattatccataaccaattccctagtcttaaagaagagaaggcaaagaacaagatgagagatggcttaaccactgatatttggcttcagttcatggcatgctaatgttttcttcagcacagaatacgaacaaggaagagacatacttggatgcaagacgtgcaaattcctgccgagcctatttttcaagcattacttcatttttttttttttttttttttttttgagacggagtcttgctctgtcgccaggctggagtgcagtggcgcgatctcggctcactgctagctccgcctcccgggttcagccattctcctgcctcagcctcccgagtagctgggactacaggcgcccgccactgcgccggctaattttttttgtatttttagtagagacggggtttcaccatggtctcgatctcctgcctcgtgatccgcccgcctcggccttccaaagtgccaggattacaggcgtgagccaccgacccggcatacttcattattttatagaacgtgtgaattactgtaacactatccttggtttattaaagaggtatataggaaacaaaaaaagtttgttattaaggaatagcatgtaccaccactgctccttttacattactttaggaatataactatctgtagttttttccttaactcgtaagacactgaaggtactcaagaaatttaactttcttttcccttttaagttctgaggaaagaaaaattatgaaatcaatcccaaacattttagagcaaactgatatttacttttagtagaattctttgcaataaaaaaaaaaaacagttataatcccatcacaagctttcaggtttgcgtgcagtgacttctgcctgatttagatatgcccagtacaaaaatggccaactttgctggcagactaagcaataatcctttctgtacaataagggtttttcagtccctgattctgcagtcctggtgcttcctgaggaccttatgttttttgtttcactgagtcgcttttcctgcatattctagtatccaatttgagggcgggaggaagggaaagaaatggaataggtgacatcaacctatgttattactgaacataaaggccttggagcctctctaccctgtcaatcccaattttactgaatccttcctcctatagtctacatccaggccaagatcctcaaatctgaatctatttctgttgccaaatcactattccacttgttccacggccattggactagatttcagggtttcagctacagaatagaattcaaacattttcaggatcattatttcattttgccattggactgatttcagggtttacagctacagaatagaattcaaacattttcgggatcattatttcattgattttcataacaaaaaaagtgtttgggaaaagtattatctccattttgtaaattaaaaacggaagtttacgcaagtcaaagaactgctcaaagtcacaatgataataaacacagctaggcaagggtgaaaaccaggtctttgggctccagattcaatgcatttcacaaatgtcacctgtctttctaaatgagttcttagcattttaaggtggaactctaaaagtgtatttccacgaaaacctctgacttgttattaggtgttaaagaatcacagatagtatatctccattatgtattatgacatttggggattgccttgggaacccttttttttttttagacggagtttcgccttgttgctcaagctggagtgcagtggcgcgatcttggctcactgcaacctccgccttcgggtttaagcaattctcctgtctcagcctcccaagtagctgggattacaggcacacgccccaccccaggctaattttttatatttttagtagaaacggggtttcaccatgttagccagctggtctcgaactcctgacctcagctgacccacctgcctcggcctcccaaagtgttgggttacaggtgtgagccaccgcgcccggccacgttgagaacctattaacctaggaaggtcaactctgatttttccataaaaacataatcttaaatagtgagtaaataaatatattttcttcacaactagtttgataagaaacaaaaaacgcaaaggatgagtcaaggtttcatgttgattttaccagttaaagcagaacatacactaaaatagttaactttaactgttttattcacttaaatttttgtgacccaaatatacaaagtaatttaaagcacaacagatcaaagtttcactaacatttctaataccagaggtgaacaagttattcttatttcacatttattcttacacacaaattgtcttttttccccctattcttttttcatccctgcaagaagcatacattttaaggttgatgtttatgtgtttgcaggtcttgatttaaactcaggaccaaataataatccattaaaaaaatttactaagttaaccggtttgttcactcagatactacagcaggaaataaaatgtccctcaatagagctatctgttggccaatggccagtctctggcaagactaaaacatgcttgtttataaataatatttattatagagttattaaaaaaactaaagcctttccttataatataataatgtttgtcaggcattattttttaaaatctctgtgttctgaatatataattaaaggataggaacaaatagtgacttttttaattagaaaaatatttgctgtgaaaaagcaatgttctttgggtttcactgtaaatattttgttaattgaaaaaatctaatatacataaggaaacaaataacatttactagaataaataaaaattatagatggactagaaagtcatcatttaactaaaaaagtttcatctctttattttaacaaacttattcaaattatcccagtgaaatattttcattaatttgaaattccatcttaggttcatacacacatagaatatcagagttaaaggaaacatggaaatctgccttgctatcatttcatagttgaaaaaaaaccaagtgatttctcaatatcacccaattaattagtagtggtgatctagaaagacagatatcagatgggtcataaaaaggaatctggttgagtgtggtggctcacttgagcccaggagtttgagaccagctgggcaacatggtgaaaccctagctctaccaacaaaaattaaaaaattagccaataaatagccatatctaccaacaaaaatataaaaattagggtgtggtggcaggtggctgtagtccagctactcaggaggctgaggtagaaggatggcttgaacccaggaagcagaggttgcagtagccaagatcacaccaatgtactccaacctgggcgacagagccagaccctgtcaaaaaaaaaaaaaaaaaaaaaaaagaaaagaagagaaaaggaagaggaaaaggaaaaggaaaggaaaagacccaaacaaataaaaaggaatcctcgtcattcatatatgtgctttccatttctatttacaagtattgctttttgggtaatagatgtattacatcttgattagagaaaatctggaaatatttaaaaatatgcagaagaaaattaaatataaaacatccataatctcatcattcgaaaagctgttaaaattatgatgcagtttcttctactctttcaatttccttgtatttgaaacagtacaattgtacaattttacaaaatttagattatatatataacattttgtatcctttttccatcttacattataccatattttatcttattaaaatatgtaataaaaacatcttataattgtacaaaattccttaaattgtttttgcatactttttgtaaccatcactactatactagacatttaggtttgaacaaccatgcacataaatctgtgtaattctaattatttcctagaagaagaatctagacatgagattacctggtcaaaaggtatacatattttgatggcttttatacagatggcccaactgccatccagaatgatgtcataatttatacttttaccagtgagcagtgtataatgcctgcttcattgcatacctcagcaacaacagatgttggtttttgaatttttgctaatgttacaggcaagatggttctttaattctacattttttcattactacactgaacctttttcgcatattatcatctatatttcctcctctatgaataatgtgtttattcatttgtccacttttaaaaatattttattgaagtagaatatacataaagtacacatatttaagtgcaaagctcaatgatatttttcataaactgaatacacccatgtaacagcccccgatcaaaagacagaacattatcagcaccccagaagctactcttgtatttccttataagcctaattctcctacgagtaagcactattctgatttgttataccataaattaatttttccattcttgtccttttgctcatttttatagtaataatttgttttaaaaagttatcattatatattataaaacatttaaacattacagaaaagaaccaaaacaatcaacaagtcattctgaaccattccatctaaagtaactgttaaccatggtgaacgtgacatttctgtaaccactgacgatacacagagaaacagacaaattatcccttagaatgggactataatcttactttgaagaaaagaaatggaattaaaaccaaaaaataaaaaaccctccaaaacatcagatagatgtttttgagtatatacaaatcattaagaggtttgcatttcattaaaaacaaaaacaaaagcgtttcaattttgcatattacggagtgttttcctacctacatcgaaaaaataattaccatgatcctgtcatctttccccaccttctagttttggtttcttatttttatcatttatactcatcacatgatcacaatttttatagctactgattctattactttgaatcaccctttccttgtttcaacaatcagcagtatccccactcttttttctttaaagtagaatccatagtaatttcatgtttcagcatatctatgtacagccttaatagtaagaagaaaacacagttttcttggtcacacttcatttcctttataaagctgcactaatgatgtacgtgtaatgaaaatgataaaggaaatatttagttattagtacatatcaggtactgtcataaacatttcatgtttgttatcatttaataccaacaacaatcctatgaggtaggtagcatgatcattttacagatgaaataatggaggcactgggaggtaaactggcttgcccgaagtctctaatttgtaaagcgcagactctgacttgaacacaggtggtctgaatcaagagcctgtggttttcactgctacataagctttgacgtttacaactagaacacaaccggagggagggacagtaaaagatgccactagtttaaggagtgaaggccaggaatgctagatgttcgtagtaatgaatagggcagatcctgcgatacagactgtaccatgtccctcacaaaagctctgtttcctactatgagaaaatgaactattaacattcaactgtctcattagacacgttaaacacgttggacaacgtgcttaaaatactcaatcctagaacatttcatataaaatacgaagttttttttttctttggcaagatttaacaggctcaattttccagggatgcaagtactttggtgcagaaaaactgttcagtgttggaaaattatgtcactgatggaaataccacaacccgtagcatttgcgttgccgaataaccacctatatcaatctgcacatatagttctcacattcatgagttctatatacgagtgccacatcatttaactacttctagtgtagtcatggtcaaacagttacatatcattgaaaatatagtttattatatattacttttattttttctattcaactaggacaacatgttgactttaaattatagatgtactctatcatctatgaacttcatttcaggatccaaaaaagctcctagattgttgagatctcacagcattatatgggagttgtaattcttgaggggttttctttatttcctctgatgtcttctgtccacttctttccaaattcagacacataatgaggaagcttaaatctggttgattcatcttcttttctcagtactgttctgagggctggatgtgctattaggaccatgacattctgcagtagaatattcagtttatttctacacgttccatttttcagagtttagcattttctttgtttaaagttctattcctgtccatattttattgttgctggtgaactctggttgtcattctttttagcgctacttgtttgatcattttgttagcttttggggagtggtgttgtggtcctgcttcactcagccgtgtcaactggcggtcattttttgcccaactttgatggagtgcttttctttcctttgaagagaccatctcaataaatactttccttagtataaagggtgagtctgtcaattactttgtgatgaatgaaaatttactacaagcttttctaattcaactgctttcttcttattattaataaagtagaagagtctacactcagagtccattatacatatcgtatcactttggagaatattcgttaatatttactgagtaatgacaatgtgtcgtcactgttctaagagctttgcatatattatttcattaatctcataacaatcctatgcgtagatagtattctcttaggaaaatgaggtgtaaaagtaccaatttgcccacagtcacatgctattaagtggcaaagcaggggtttgcaccctggacatctgatatcagggcccaagttttatttattcactaccttactgccaaccaaggttttagggacctcctgttccattcaagaactaactgcttcactattgattttttgattaacactttttctttagagactaccacaatgctcaataaatatttattacctgaataaataaaagacttaactgcttattttcaatgctctccctcatatcttttaatgtgtcttttccttttagaaacaagggcaaattaaaatcaaaataccattcttactcatttctgggtggttaagagataatctcattctatgcttaagggaacattgtagcttaaaacttttcacctgtactttctgagcgaggtgaccaatgttgaaagaaatgcagatagctttttttagtatttcattgcatagccctgatagcatatttgcttaaaggaggaattttttccataataacacacaagaattaaacacttcttttctcccactttggcagaagcagctctatgctcccaggcagctcagatgatcagttatatgccatgtagtccctgccagccctgagaaccagatctattgaagctacctatgcccatcaaagcttactatctgtctcttagtctgtcagatttctgacaacaaattaacaggaggtcaagcatatcaaagattatacatcttaggcgcagcgtgcttgatttacagtgaaaagttagtggatataattgctaacacaataaacagttgttgcagcttcaaataccatgatatgttgacggtttttgattattttgtgacaggtaggttctagcctcacttcacatcacattctataaataacattaagaataattttaaagacaccaacacatgtaaataaatgtacaaaaataagacagaaaaaaaatcttgaacttttaaataaaaacagtcatgaatttttaatagtctatgaaaaaatatgtggtaggaataaaacgattacggaaatgaaagtctgttaatgtagacaactttttgtgcacagttcaggtatatgtactgcgtcaatgtggtgaagaacctttgtatgttacagattataacaataccagagaaaaacatacagatgataattaagtgtggacaacaagggaaaaaattgagaagataatggtttgagtaaattatttaaaaaattaaaaggtcttagctaaatgggcttgttcttagagaagaatctgttcaaaactaagaatccacttcaagtatttacatttaataaaaaagatacaatggcaacataagaaaaccgagctggtggattttaaaaataattacactgatgactgaagaggaagttgacaagtgtaaaccttcaagatcagccatcaaattggagaaagagctggtgtgggaagtgcaactggagtggatactgggttaactgtaagaaaggcccaaattagtaaatgtgcatgaacgtttaattcaaattattaaaagcaacattttattttgttagtaaatctaattaaattactttgattaataaatgtatgacaattctattaacatcttgatttagtcaacttattatcaagtcatggcagttattagtcttagctttcaaacataatggcaaatcctataacaaaataaggatataaatatcttgagtaatagtttgtaaaatttttatcacataacattatcactaacatttatcacccagtaatctccctaaaaagtaaagaaacattttttttccagactatcataagaataacaaccgcttccaagagaatgtgcagtggaattagaagtcttgaaagatgttcaaatcctatatctattttattctccacctaatcaggctacctaattcccttgtaattatactttttcagcaaaagctatgtgctagtagaaatgtttgactgattctaaaactgctatatacttgagaactgatacctgtaagttggaaatcttctaaaaatgcaagtctggtcatgttactcccctgcttaagactcttcaaagctcataactgcctacaagataaaagcccaactcctcaattaagttcacaaagtcctcttggtctgccccagcccaaacagcccttcctatgctaatggaaatgttctacatttgataagtggacactagccacatatgcctaacatactcttgatatgtggctagtatgactaaataatgcattttaaactttgcataatttaagtaattacatgtggcttgtggccgccatactgactattcaggtccagcttatctccaatttcagcattgttatgcactagctctatgggaaatagttcccaagatcttgttctacgtcttggagccttttatattctactctgtttgccacttctctgccttgctcatcttgcaacttcgatctggcaagctaccctttaaaaggaaacactctctggctcacctgcaaacagcttatatgtgccttctttgttccacagatatactgaacaaacttctataactgtacttctcatgtaatacaaatttgtgtctttacatgtttgatttctgctagtctgtgtgaacagacaataacattaatttttggtgtttctaaaccattgaataaaatacattacaatgtggtcaagttttagcttccaacaaattctcattccaagaaataccctaaagggaataacatttagttaatttgacatttctttttttatttttattttggagatagggtcttgctctgttgcccaggctggagtaaagcggtgcaatcccttcctggcccaagcaatctcagcctcctgagtaagtgcatgccaccatacccagccttttttttttttttttattttatttttttttagagatgggatctccccatgttgtccaggctggtcgctactcctaggctcaggcaatcttcctaccttggcctcccaaactgctgggattacaggcggtgccacgacacccagctgtgacattacttttcaaagcatctttttctcatttcagtctacaatatccagtgaacaaggcagaacaaatattaatccgtaaagttaacaacaaatattattctgaaaggtagcaagtgagagacaaaaaagttcaagatcctcaagtaacaaaacctattaagaaaaagagatacatgtatttgacaaaaaaaaaaaaaaaaaagtaacaatacagccataaatgatacggccaaagaagaaaaatttcaaaggaaacactaaacaaaatctcaaatatataatagagaaagcagcctggaggttggatggggagggagtggagctcttggtctccctacgctcacttagtacggctgaagcacagcttcaaacccccaggcttccttagaccacactgaaaaccccggtacagtttagcaagtgtcacagagtcaggggcaaaacaaggatactggagaaggagtggaagaggaggcttcatgaacaggagggaatgaagtccaatttttagtaagagtgagatttgaataagaggaaagaaagaagccagttaattgttggataacagatgctataaacaaaggctgagaggtaggaaattgaaaaactaaggggactggatttatctatagaccaaggggaacagtcaaaaatcgatcaaacagaggaatgacaatgaatatggtctgcaggatggttaatcagatggcagtacaatgcacagactgaaggcagggttgggagtgggaagaatttacaatagtttaggaatgaagtgaaaaagactaaagtaagccaatggcatgagaaggcttaaaaagagcatttaatattgaagacactggaaactgagccacagggagttaatattgacaaggtcataaaaagtgaatggtagaaccactatagaattagaaactgctcttctaacttggatcataatatgttgccttcccatgcaacacgtaacttttcaggtaattctaaatgcatgtttattcattcctttgtacatctatctacccacccgtccaccatcttcctttcaaaatattagaatgcccatgtaacgaataaaaaactgaataagaaacagccttgatttcaactgtggcttggctaaataccatcaagagacaagagaagaaacttcacacccaagcaagttctgctgttttttaaaaaaggatgggttttaatataatttcagaagatgttgctctggtattaaagagatgattatgcatctgtttgcaggtatggcaagatgaaagttgcattgaaagcttaccctaaagtgaattctgaggctaggtgactgtgctgaagtatttattagtaatgtgtaaaaacaaagtgactctatggggtttttaaaaaaaatgtcatagtatcaagttaaaatgaaatatcatgcccacctggcaaattagaaaaggtaattttaaaatacaaatctagcattggtgaaggtacaaggaatatagcaccctcatattaatactgtgtaagtggtacaagctttctgaaaggcaattttatttacttatttttgaggagtttctctgtcatcaggctggagtggagtggcataatcacagctcagtgcagccttgaatttctggactcagcaatcctcccgcctcagcctcctgagtagctagtattacaggtgtatgccaccatgcccgctaatttttctatctttttgtagagacaggagtctcactttgttgtccaggctggtccgaactcccaacttcaagcagtcctcctgtctcagcctcccaagtagctgggattacagcatgagccaccatgccaagcctaaaaggcaattttggacaaacaaattcttcaaagtcttgttccagcaatactacttctggaaatttatcttaaggaaacagttacagagatattgaaaatatatttacaatgatgaatgttacttcactaattatgatagcaaaaaatggaaaacgctaaattcccaacaacagtaaatctgttaaacagaatttgttctaacaggataaaggaaaccatacagttataaagaacgtaggttttgttttgtttttggaaatagggtcttgctcgtcactcaggctggagtgcaatggcacaattgcagctcactacagccttgacctcctgggcttaagcaatcctcccgccttggcctccaaagtgctagattatagacatgagccaccaaccaactaagaacatgtactttaaacagaggagaaagcaagtgataaaacagtttctcatagaatccaatttggaaggggggatttgcatatgaagagaatctaaactgatatgtcagatgttaacctggggtgtttggattacaggttaattttattttcttctttttattttaaaactttctataaaacttttttcttttctaaaagtagatctaatacagtaattattcaattttcttctgatcaaagctttgccttaagatttaagaataagaaaaactgaatacataatgcttaatatgttgttatttaatttgtaatttgctgcatcatctgcatcattggcatcatcgcaccagcatcatcactaaacccagtaatgcctatcatgtgttaggcacagttctaaatcttttacgtatatcaagtcatttcatcctttgagaattaaatgactcccaaaagtattttaccatcccaattttatagacaaagcagctaaagcatggagagattaagtaaattgcccagatgtcacaactagtgagtaacagagctgggattgaaactcagacagcttgctccacttcctcttagtgactccactctactgccttgaccaaaattcactcaacaatgtgatatcaatatcataaggcttatttgaagtatgattattgttggctgacagagattttttaaatattcactgtcagttgtactaacaatgtaatgacataggtttacatttcctataaaagaacatagaatatgatcactgatttgtgatcgtcctactgagagcacatggtatggggtcctaaatatattgtttaatttccaggaatataaaatatgcctgaaacatagaaagcatattgattctctaagtctaacaaaagactgttaggtcatatattatcctagaacaaatgttttctttgtattgttaactgacccccatgaaaaagagtcatataacttaatgatctaaagaaacttggaagttttatagtctttaaaaaaattacaaatgaataaaatgagacacaaagaaaccctaaaccgattaaaagcataggactaatacctgtgctcatgataacattccctcaacagtataatagagaaatagtaagagaaataaccaaattgttttgtagtagagtcagtctattctagggttgctgccttagagacagacaatcattatttctggtagtagcaagctctttcctcctccataactttattctgcctagtataccctcccctcatgcctctaacagcttgactattctttttttctttcttttttctttttttgtagtggaatatcactctgtcacccaggcggagtgcagtggtgtgatcttggctcactggaacctccgcctcccaggtttaagcaatttcctgctgcagcctcccgagtaactgggattacaggtgtgcaccaccacgcctggctaattttctatttttagtagagacagggtttcaccatgttggccaggctggtatcaatctctggcctcaggtgatctgcccgcctcggcctcccaaagtgctggtattacaagtgtgagccccaggcctggccaactgatgctttcttaaactcaactcaaaagttaaattttgataccgtaggtggattaggaaccttgatactgaacagtattttgtgcatttctcctcatttcatcataatgcggcaatctaattgccagtttatctgtttttcccattacactttgagagttcctgggtagggacaatattttattcatttagaatctccagtatgtagcagattacaaagatacagcaagtattaaattaacatttcctgaatgaagaaatgaagaaattcagtacttgcatcttcctggtatgcactgtgtacctagcaaacaacctgtgtggattatgatgtgcctctagataaaccacagggaatgtgtctggccttctttcaagattaatctaattctcacagttagaactaaagccactggagagtaacattttagtatctgagcaacaaactgcatgccatggcaatggagaaccattgcaggctaataggaggcatacagtgaagttggcactctgcttgctttatctctaagctcagatcatggttccttcacaaggtttttgtagttttttaatttgggttaatgaaaaccctgaagaggggttttcatctccctctctgtttcttcactatacttgcatctctattttctctcgtatgcaatagttatttgtcctgttatctgtgtctctgactgattttagtttttggaagggaatgactaaattctatttatctattacagcacctactaagtaccttgcacttagcagacaatccagaaaacacaggctgaactgacttgttaacaagaagtttcaagtgtcgtttctgacaaaagcaggactatgaaagatttttaaagaaatagcattgggtattaaaaacaaagagaaacactatatcctatattgagttaaaaaatgtaggttggatcaaagttcccttaaaattcaaaaaaactttcatttcaattcttaaaaacttgattttttaaaaagcttgtgtccctgtccctctccctttccctctccctctccccacggtctcctctgatgccgagctgaagctggactgtactgctgccatctcggctcactgcaacctcctgcctgattctcctgcctcagcctgccgagtgcctgcgatggcaggcgcgcgccgccatcctggctggttttcgtatttttttggtggagacggggtttcgctgtgttggccgggctgtctccagctcctaaccgcgagtgatccgccagccttggcctccagaggtgccgggattgagacagtgtctggttcacttagtgctcaatggtgcccaggctggagtgcagtggcatgacttggctcgctacaacctccacctcccagccacctgccttggcctcccaaagcgtccaggtgcagcctctgcccggccgccaccccgtctaggaagtgaggagcgtctctgcctggcccccatcgtctgggatgtgaggagcccctctgcctggctgcccagtctggaaagtgaggacgtctctgcccggccaccatcccatctaggaagtgaggagcgtctctgcccggccgccctcgtctgagatgtggggagcgcctttgccccgccgccccatctgggatgtgaggagcgctctgcccggccgcgactccgtctgggaggtgaggagcgtctctgcccagccgccccatcgagaagggaggagaccctccacccggcaactgccccgtctgagaagtgaggagcccctcgcccggcagccgccccgtctgggaagtgaggagcgtctccgcccggcagccgccccgtcgggagggagggggggctcagcccccgccaggccagccgccccgtccgggagggaggtaggggtcagccccccgcccggccagccgccctgtccgggaggtgaggggcgcctctgcccaccgcccctactgggaagtgaggagtccctctgcccggccagccgccctgtccgggagggggtgggggggtcagccccccgcccggccagccgccccgtccgggagggaggttggggggcagccccccgcccggccagccgccccgtccgggagggagggagggggtcagccccccaccggccagccgccccgtccgggaggtgaggggcgcctctgcccagctgcccctactgggagtgaggagcccctctgcccggccagccaccccgtccgggagggaggtgggggggtcagcccccgcccggccagcagccccgtccgggagggaggtgggggggtcagccccccgcccggcagcagccccgtccgggagggaggtgggggggtcagccccctgcccggccagccgcccttccgggagggaggtggggggtcagccccccgcccggccagccgcctcgtccgggaggtgggggtgcctctgcccggccgcccctactgggaagtgaggagcccctctgcccggccagcgccccgtccgggagggaggtggggggtcagccccctgcccggccagccatcccgtcccgagggaggtggagggggtcagccccccgcctggccagcagccccgtctgggagggaggtggggggtcagccccctgcccggccagccgccccgtccgggagggaggtggggggggtcagcccccgcccggccagccgcctcgtccaggaggtgaggggcgcctctgccaggccgccccactgggaagtgaggagcccctctgcccggccaccaccccgtctgggaggtgtgc

SEQ ID NO: 2884 - DNA, 65455 bp, Homo sapiens
tcacaggcagagtcatcagaaccagccctgaaactcctttggtcagtagaagccctgtgagaaaacaggcttccgagcctcctcttctgagacaagccaggctgtcccacaggaaatgagaggaatggcctcttgtgggctctctgaaaatctttcctgtgccgtctatggaatgattccataaagaccacgtctttcttttttcctggtatgcaacttatctgtgatacacctcatccattgtctttcttatttctaaaccaactctgggtcaggtctcgtaagtttcacattacaacatataatttgcacacaatgtttaatataagaaatttgctcgaatgttaaacgtttgttttttaaacatagattctaattcagttgataactcgagttattaaaagatagcatgtccttttatctgaaataatgatatgcctttctgaattgatagcatatgttttaaagggaggattaaccacctacttaatatatccactaatgcactttcagaagggcacagtgccagatatgctgtagaagccttggctgatagcctggggaaaaaggaagcagatccagaagatggaaacctgtgatggataaagtcaaggtaatggcaactgagatgcttctggaaaataaatatattgatcaccttctccccctgcaaataagttagtcatttgttttgttttttatatttccgtaaaacatgaccggctggctttttctattattgtgcatatcctgtttaataagctaaactgaataagctgcagtgttgaacccccacagtggatggtcgacatgcacagaccggaggctctgagtctcatctttgcccacctgcattgacattgctgggacttgggaaggaaggggagctgcctgctgctcctcacagctgtcttgcatcccagcaggctttctgctggtgcctggtctgccagatgaagttgctgtaggagcactaagcatacggtcatatgtacttcctaactaatgatagatttgtttacctcaaatctagtcactcaggcatgaattttatggagagaaaaaacatgctaacaatgaaaatggtataatttttctcaggagaaggccaaagaagaagacgtgaaaagcttggtgaaaaagaagaaacaattcctcctgattatagattagaagaggtaaggtaaacaggctggagtctttttctattttattttaattcatactgaattcatacacgaacaaaggtacttgggaacagaactggaatataaagatcttgtttcttcatatttcaacaccaaatagtattagtctactactaatagtgttagaacaccagatacaaagctaaaatttcctaagtagacttgatcctcaagtgaaagaaatctaatgtctaagctacctaatgtttcctttctaacccacagcttgttacaataccagaaatattaaaaaaccttgtgtagatagagaactaaaatgaggaataggccgggcatggtggctcatgcctataatcccagaagttagaaggccaaggcaggagcatctcttgagcccaggagttcaagactagcctgggcaacaaatgagaccctgtctctacaaaaaaatcaaaaaaattaggcatggtggcatgtgcctgtgtcccaggtacttgcgaggctgaagtgggaggatcacttgagcccaggaggtagaggctcagtgagccatgatcgtaccactgcactccagccagggtgacagagcgagaccctaactaaaaagaagtaaaaaatgaaaaaaaataaaataaggaacaattactttatataagaaaatttgcaactttcagatataagttggaaaaataagagaacctatttaacattgagtataggttaagttgccccatttcttctattttgaaagtacagattgtacacaacaagggggaagccccattatgagtcctgtggtttaagtgcagtcacttaaatgaggcggattcgtggacattgaacaatgtcagtcatctttgtagcaggccaggatttgaaagagtattcaactaaactcattaacaattctagaaaatcaaattcatgcttctcactcatccatgtgcactagccctttatttagcagacacgggaactagactgaactatccgtgattgaaagtttattattctgaaacctttatatttgcttcctgagttttacaattcagttgcagccatagcgtttctataatttgggctcatttgtacattgctttgcaaagttcctagagagcatgctaagggccactgttctgtctccactgagtgcccattcagtagaggctggtcaagtgcaggtaaactctctcatgataggtgattggttggtgatttgctctctccctttactgaatttagtagtagtgttaaggaagcagttgattcacagtccctgatcactttattctgtagtcatttcatcctctctgacttacctcacacgttattagttacctattaataacattttcaggcactagcttctctcatttaaatcctatgttggtattcaccagctatgttcccatcaggtctcctcagtggatttggctccccgagggcaggccacaacctccccttccagacgcagaatgacgcagtgtggaaaatcgatttcagtttgagtagggagcaaaagtgctcccagagtcccaggcatcattaggaaattttctgcctttacagctaagagatggtggagaacaagcccaggttcagcttcccctgtacctgaagaatggtcagaaggcaaaagtcagtcatgagggaaacaggtgatcaagttgaatatccctcatctgacatgcctggggaccagaactgtttcagatttcagactttctggattttggaatatttgcctcgtatctgttgagcagccctagtctgaaaatccaaatgcccccgtgagcatttcctttgagttgtcaggtcagcactcaaaaagtttcaaatttggagcatttaaattgttttcagattttcagattagggatactcaacttgtacctctaaccattgcacttcacattttcaatgaaacaaaaaccaaccttaaccagtttctcaggtgaatattcatatatatgtatatctttgtatttacttatttttgtgtaggtggataaatgggtttactattagtatatagatctccttttactaaagagccccgcatgctttcttcatttttcgtgttactcaaatgtggcacttggagtcataaacagcttgacctaatctgaaccatagttgcagagcgtttcactgacaggttaaactccctgagggcaaggcctttgtgcgatttctgttgtattgccaatgcttacttaggtcagggcttggcatgtagtccttgcatatgagtagatgtgtggcttacaaggttaaccagcattttccagacaacctctacaaagcccaccccatgtaggtaaagggcttatcccacactgtcctgcaaaccccagtcacagcaccacatccacactatgctgactttcacgttttcctgctgtgatagtctctaggcttctgaggtcaaagccatacctcatccagtgtgcagcccccgtgactcaggaatgcctggtgcttgtgagtgtttgttgccatgaactaattagagcgtattctctggtgagagaatccttcgtgacatatggatctaatttaaaatgtacaacagcaagtataacctgtagaccctttgtaatgtttcaaggtttcatactttggataaaatgtaaaatgatttcatgccatgtgttttcccccccgataggataaagatggaaagccactcctgccaaaagagtctaaggaacagcttccagtagcaaaccagttttctctgaagatatcttttccttttggccctgattgcaatggtgtttgtgatacatttcctggttcttgcagcccatgagtgaagacttccttctggatgctttgtcgaggacttctctggtccacaaaatgcttcatctcttgtaagtccaaaactcttggtttttttctttagttttttttttttttttcctttgagatggagtcttgctctgtcatccaggcggagtacagtggtgccatcttcagtcaccgcaacctccaccttccagattcaagcgatttcctgccccagcctcctgagtagctgggactacaggggtgcaccaccacacccagctaattttgtatttttagtagagacgggctttcaccatgctggccaggctggtgtcagtctccaacctcatgatccgcccacctcggcctctgaaagtgcttggattacaggcatgagccacgcgcctggcctatttctttagttttagagtggcagaaataaatggaaactggtgacttaaatctgacttgggaactcaggaacaatcataaaattaatggccctcaacccactgtagcattaaaaatgtgttgcaccatgaaatactgtcccaacatagtggatgcttttattagtgaactaatatcaagtaccagtacccctatgaaaagagaatttaaatgtaagcttatccaaattactcctcagacaactttacctattgatatttctacaatttatcatttcccaaattgctcctaagggaacttagctccatgtggaatatagagtccctcaaagggaactctgttaccgaaaagtttggacaatattgggtaatgttaagcaggtttctctactgtaggattttcaggctttttatatgcaaatatatagtgagtctgttagagttcccaaacttaataactgcaaaccttttcttgtggggtctggtttatctgtttactgggaactcagtttttaaaccactaatgtattattagcagtcagttggaaagggattaacagtttctatgacagtggcatggaaatatatttatatcagttggagaatagacagaatgacaactagaagaaataatgattcttggaattgcctgaagttgttacttttgctgaatgaagcaataaagcccctcaaagaagacttactaaccagagcatgttattctctgtacccctgtaaaagcaccgtgctgctcagtccctcatcccgtgaccttcctctcatcgtcttccatacagaccacatcacagcaaagcacccagccttgatttagaaaccataagacatggggaagaatacaatgtgaggagtacgccagaatgtggagtcatagcattacactgaggcagaacagatgaacaaatagtggggaacaaatctcaattcccttcctcctcctatcattattattattacaattgttaggggtgtttttcttttagaaattcaaagatttggaaaaagtaacaatggatttatatgcccccttcaaagtatgtagcagtgaaatggtgagatgaaacaacctttaaaaaaaatcttactcttagaaattagcaaaggaaacattagtgccaacaatatagttaataaagtagaaataactaatcatatgagaaccaaataatcaaaatagttatttagtggaaagtttcaagaaatttgggggagagtatcacatatggctcataattagtgttcatctgtaaaagagtagctcctgtacgtacatgctctttgatataatagaacagaaatgctatataaaaagaaacacttaaaactattccctaataatactgagatcacattgataatagactattttaaaacatcaaagatattacagaaaaagtctttgagaagcagtcaaagcagtattcctgtgatacattgtcataaacaccttatcaatagtagagaaagagaaaaagagaaacctgataaactaaatgcttattgaatttaaactgaaatttctaaaagttttaataaggtagccaccaaaaacaaagtagcaataagataccaggaaatgaaaatagcggcatgaaagttaactggccaatagttgtttcttttgaataacaaatactttataaaatactagcaaatataaaagaggaaaaaaaaccttacaaaaatacaattaaattttaacagagtaatataataatatagagatcaactaaattattggtatttaaagccaatagtcagttggcttttatgaatttttaacattttacaaaactgataaaagagaaaataatcttactaataaaatttaacataaatgtgagaaaatacaataatcagtcagagcacaaataaattattaggaaacactatgtacaacaattttctaagattaaacaaaatattaaactgcgtaattcacaaaacctaaaaaaagactgaagaaaatattgcaatgatttcaaactgtccttctactgaaggtttaaagatgactctaactgttgaacactcagttttatgtggcataaatatgtcatgaaaaagatggggtcacatagttgcttctatgagtaatatggtgctaatcttaaaatctgacaaatataacggtatcagctaaagttacttaaatggtagatgtaaaaattacatacagcatacatagaatataacaaacagttaaattatttgcattataagtattgattcagtagcaggaaaactgtcaatatattgtagtggtatatcaaaagaaacaaataatcatgtccatgtaaaagatctatttaaaattttacatatactcatatataaataaaaactttttaaaaagtaggcaatcccctaatctgttaaagagtctttagtttcagaatcaaatattcaatatcatgctggaggcattttccttaaaagcagaaactatgaaagtttattgtcatttctgcttattatcacatggaagaatcattaacaacacatgaaaaaatgacaaacattaaaagggaacatttgaatatatttgtggatagcactacttgtagatatacatttgtaagtaacattatgccatgtttattagtaacaacagatgagaaaatgtaataatatgagatcagacttaatgtaaactataaaaggagaaatgatcagaaaaataaggaacaaaaaaattgaaggccatacattaagtcagtttaactaaatatcttaaaaagaatgagacaattcaagtcattttatgtgttaattttttattaaatagcaataagatacttttatactcaataaaattattcaatgatacattcggaaaataaatgtataaaatatgaaaaagtctaaaaagcatttttcagtacttttaggtaagattaatccaactaaacactagcatatgtatacagtaataataagtggaaaatacaataatgttgagaaagcaaactcaaagcatagtcaatgaaaaaattgagaaatggacataaatgatttagtatttttaaagagagtgaaaatcattattttatgcttttgtgtagcattagatgaattaaataacatatgcacatatagcttgcgatacaaatttccagaccataggttgtttcatacttagtattaaaaggcttaaatataagtcaataagatagtttaagaagagacaatacaaatgtttcaatgtcattcttttctttgacaacttgttattcttttcatttgtcatataagcaaagatttctcataactaaaatgaatttaatttagtacattttggattacctaaaatattacattctaaaacggctttacgggtataaatggacaataagtatcttatagttatctaaattagtttaaataatttccaaaataacatgctgaaatgaatttctgaatgttggtatctttttaatgtgcttttctccatttttggtaaaatttgcaattctcctttttcaaaataagctatccatagttggagtcaccaagagttctggacttttttctggtttttcatcaacagttatacctaagtttttttgtcaaagggagtatttgaaatgaagcaaatattcaatatttttaaacagaaattatttcagaagtttctagaatatttaacgttgaaaaaaaaccctgaaacctgacaccgtataccacaattacaagcaatagtagtatatcattttacactgattatcataataaaagtcaaattctggaagcaaggccatgggaaaacaggcatgcttattcattgcttttcgcagtatgaattcctgcaacatttgagagggcagtttagcaaaatatagccagcaccataactcactcactagacttattcagagcaattttaaaagagctgaaaactttgaataacctaaatgtacaacaggaatgtgtaaacaaaccgtggaactctaagttatattattgcatagtatttagaataatcatatgagaaggaaatagaaatagcaaattgtataaaataatacaatagagaagaaagaattaaatttcttttaaaattatatgttattatgagtctatttggtcaagagaataaacagcattaagctatcgttaagagttatagttaagtgatggcattgtgctcataattttatatcaacatgttactaataaaatttttttcaataaaagaaatttgaagatgctaaacttgctctgccatctctgaagtggtttcccaaaccccagcttcaacgacccaagctggagccccacccgtgatacctcggtaagcagcacatcttatttgggagataaatgtttttgcgcagcccaactagaaagaaaatagggcgcctgtttaaagcaaatgaaaataggcagaattattagaagatcaggcaccttctatttcagaagagccaagactgatgatttagcgagatggcagaattaactttgaaatgattaaatgaaactatatatgtgaaaacattgtacacatagtcaagaccttaatattattgttgctttataagaattgaaagtgcaataaagtgcattgtgtcttattcaaattactagatttgaaaagttctttagctttcctgataattgattttctccttatattttttcttatacattctataatttactacccattatttaacctcaagtttatttttggaatcgtcatgtttgagcttttacaaacattttacaaacgtcatggaatagcattgtttcttcccaattcacaccagtaaaaatttgtcactttcatactagcagtagaagaacctagcatcaatattgttttaattatttacatgctgtgaggcaaggctgtgggaccaaagctttccagacttccttgactaatcacctgtgcaataccaaattatacattaccaaggagacacagcacatcaaattataaagggattgccctaaaccagatccccatctcctttggttgaaacagtgcctcatttgctagatggagatgaagtaactttagcgaagtcagctatgcttcattccgtttgatgtagcatcaaagcatatttagtgctgtagtctgagattctgatggatttcatcctgttgcgtcagcttcaggatcatctgaaaatatccagaggcacaaatgacaagcccagacctggccccgggcagctctaccattagcagctataatcctggattataataagcacttaaaaccagtaaaatgccccgtgtgtgtgtatgtgcatgtgcatgtgcatgtgttatgtaaacacacccacaatgaagaaagtccccatgcaacagaaaggaagaatcattaaagcctaggctgccgtttacacttcagttcttaatattcaggccagagattctgccctgagaaggctatcagtaaacatttgcaatcaaaaacttttttgcctttaagaagtaggttttcaatgacacttctctgatcacatttcccatcagagaggcttgtttttagttaacatttttttgaagatgtcactaaaacaaggtataaagctttatttagataaaaatattaggaaatgaagagtcaaataaaccatgataattcacgggagctttctttgctgtgattattagattttactaacagtgttacatacactgaaagcatttgaagacatgatttcaaagatctgtgtataaaatcactccaacaggaaaactgcttcaaagaaaatagaagatcatggatgtgactagcatgacagggaaaagctttatcagtcccaagacctgggttctattcactttttaacatttgttttcaagcaactgacttagcttccctgagctttttacctcaaaaaaaaaaagccgcttagttcactgagaaccattgtgggcatcaaataaaactggatagtgtatgtgaaaaattttgaaaatcaactggaaagttctatacagtattggacagagttcagcatggtgtctatacaatgtagatattaaacacattttaattgaattcatttagaggtggaattttgaatcaatgtgttgaaaaatatggattttgctataataatactaataataatttaccatttgtgggtcctaacatacaactagtattgttttaaatgccttttcaatcatttacttttctcacaacttaggagtataagtactactattattcacatttcacggccaaggaaactgaagctaaaggggttaaataagctgcctgaatcatacagtaaataaatgttagaggaaataagcttcttagttacagtgatattgttgtccataatttttttcctctagaataccagctcccattctgcaatttcacttccatgagcttcctgaagatgaaaagagaggtttccccaccagttagaaattctctgaagtctttcagggcactcatcaccagtgtggcagacaagccccttccctctcctgaccccagattgtctctggggttttgtgctttaggaagtattaggatggcaggccgagctccatggcttcccacaaactgcgggtcacgctgcactttctgaaatgcaccctcaagatcttagagttttagagaggacccacagaaccaaagaaacacttaccctctatattgcagaatcttgcttcctaaccatctgacaacattagtagatgtttgttttcatatccgttttctaatggtgtttaatttctaaatgaaaggcacacatgattggttcatttgctttggaccctttatgtgacctccaggtcacccactggatatggctcctgaggctgccactaaacctccttaacctggtgggatcttcaccaagagatgggcagggttgggtggaaggtgctgccctccaaccccagtagggtgacagatactgccgctcttctcctgatcttccattcctgccttctcttctctgaccctgtctactcccctgccccagccccagatgtctttttcttcaaggaaacaggttccctcctgaaaagatggagttcctgggctaatttgcctctgatacatttggctaatgagtgactaattcagcattatttacttttcagcagagtgacaaagacctgatgatgccttggataaactctctgacagtctaggacaaaggcagcctgacccagatgaaacaaaccaatggaagataaagtaaaggtaaaaaaaaaaaaaaaaaaaaaaaattcactataagtgaaattttaatccttgggtcttgactctgtcattgtcataggaatattgatgtaacttaacctatattttaaacatgaaattataatgaaatagaaaaatcaatctgtactcactggaggggaaggtcactgaatctgtgacagagataccagcggagcctccctgaggggttctgggaggtaggtgtggggtatgcatggcttcctcccatgcaacacaagcagtcagccatccattcaaattagctgttgtccttcagggttgcttataaataggcaaagttgtaaagtgacctctctaaatggcaaggtacagtggcctgattttgtattagaaaagtgaaaccaacagaaaaaaagaaaaagatattttatacctttgggttctaatctcctaacatggtttcgaagataattatttaatcatttatttccatttaaaatatagctagaaaattcacagatagaattgacatacagaagcatacgggattttatattttagccaactagcagtctgttgaatcatctgtgttgttctgttgcttaaaaaataaaaacagaccatatgttttgcctcatgaagtacaacaaatgctgaatgctgcatttgacaatgtattttctaagtgaaagaggaaataatattaattctatctgctcactgttgatataggaaaaagctaaagctgaacatagagaaagcttggagaaagagatgacactatcccacctgaatacagacatctcctggatgataaggacaggtaaactgaggcaaattgctagatcggatttatgctaccaagatctttaaattaaacctcccttgaaataaatagtagctatactcctttacagtagcataaaacatatcatactgactgcttctaatgtgtcaccaaagccgaccagcaggtaaatatttatttgagccatatcattatatatgcatatgctaggctctgtggtataaacagggttgaatactgttcagcactcacagatgcttaagagtgatccaagaaatgtgattctctctttcaagaaaaggcttaaaaatgactaaggtgataggatttcaaaggaagcaatctctgtttaaggagagcagaaaggagctggtgttgggataattaatagggaaaattaataaggcagctccaagacctgggtctccctatcttctcctgcatcatcatcagcactattgcaagtgaagacaggcaaagcatattcccaatcacaaatcctgtttctctgccaaaaagtccctggccttttgtctcccaatgatagaggccagtctttcgtaggtcaaccaggcctgtcccccacctctttcctatttgtttctaatttttgagtcaattagatgataaataaccctttccatgcctgttcatcaaaaagaaacaaggaagaccaaattacacccttctctttctgtactgattcattttggtgagaagatgattcctggtttaaatagcagtgtcagcttcagggtctcctattacaggaaccattctccttgcttgcattcagtattcctcaagatagcaattccacatcctgctagagccctcccactttgatagtaccaactcaccctgcttgcgttctttgggaaatttattatttaagcccttgcctttgaagctgggaaaaatccctgatgactttctaagtgtaataagctatataaataagatgtaaaaacacaagtaactttttataacactttaagtagaattataagtgtaatacatgatggcagaaggttcacaaatagtgtttctttcacttccaggaccagacccttcatatgtttcccccaagtctacacaaatgattataaagaatagtaattaagcaaagcggtaaagaaatagtggggactcaggtttattagttattgcaagtctacactccattttaccaagtcaagtcatgggacaatagattctctactgcctaaacctaagtaaacctttacaatatctatgcttaaccaatagtctgccttctttttaaggacaaaccagtgaagccacctcaaagaaatcagaggattcaaaggtaaagaccataggaacatatttccattaaattttgtttattctagccataggggtatttggcattttagaaaactaaaacatattgaatgcctatctgtgcctggtactttgtcaaagcatgcatataaatgtgtgtgactattgtttacctccttttagtcttcacaaaagccctttagggtggaaaactgaggctcagagaatgctaagcacgtgtattaaagagtagatggaaaaaaagccatcaagattttcttgtttttctatctctttacaatacattattattaataaagaatgtcagtcagtttttttcttatagaaacatctttatttgtaagtgatgtgggaaaagaccccatattgcattttgccttctgcttcttcatgatggttatttctactcatatctcagaaacctgcagatgaccaagaccccattgatgcctctcaggagatctggacagctgtccctccactacagaaacctcacagaacacagcaaagtactgtgctttttcacatttcactctttgaaatgtgtgtgtgtgtatgtgtacatacaataagttttatttattgattgatctatctatcggtctgtcttgtaacagggtcttactcatagcccaggctggagtgcagtggtgtgatctcagcttactgcgatctctgcttcctggctcaagcaatcctcctaccttagcttcctgagtagctgggactacaggcgtgcaccacccacccagctaatttttgtatttttttgtagagagggggtttcgccatgttgccaggctgtctcgagctcttgggctcaagtgatctgccaacctctacctcccaaagtactgggattaaggcttgagccactgcgcctggcccttacaatttttaaactgtagaatgaatcaaacgagatatagagaacctgaaaatgaagaaaagaaaaaatgcctataattccactgcccccaaacagtattattttgtggatttccttttttttctatatgtatattttacataattatactacagtccacttataaaacactgcttaacgttatttcttaactgctactttgtaatttcctagccaccattttttatctccacactatatggttgtgccacaataatgctatgtctgtgtcatttaaagtgagagcaggccctaactacatcaggcactctcatgctcatttgctctcggagcttcctccccttttctgtctgcttagcccaactggtctactcttcattcctcaggcacagctcaagcatcagctccttagggaagactttcttgtcttacatcttctcccttccagtccaaagttagaggcctctcttccatgccctccttgctctctgttacctctctgtgctgtgtatcacaccactgagctacgcatttcatacagtagtgatgtgtcttttacctctggctcctcattagcaaaatgcctggtacttagcaggtgctcaaaacgtgattaaaagtgatgagaaacaactgtgtaattcaacaagtgtgaggcattttccctcaagctacaccctctgtaaatcaaatagaaggaaacgtgaaatgagtacctccttgttattttcaggagagttattctgcagatctcagtttgctattgttttggctgttctaaggcactgctctcgatcactaattgtcagcccttccatactgggtagcttaatttctagaccacttcagcatcctatcttcacccctggtaactcgtaagtaatgccttttttggtgaatggactttatttttatacgaacctgctccagctttcctcggttgtttcccattgttcatttctctcccataacactgaaacagggtttttttttgtttttttttttttgccttttggtacacaaaagccagtcctgacgagacaagctctattttgttttttaaatacattttattgtgtatatttgaggtttacacatggtagtttgggatgcatagaaataataaaatggttactgtagggaagcagatttactatctatcattctcacacaactactttttgtgacaaaagcagctaaaatctacttagttacaaaatccctaatacaattttattaaccttagtcctcatgttatacattaactctctaacttgttcattctgcatatctgctattttgtatcctttgacctatatctctgtttcctctcctgttccctaccatggtcgccatgttttattctctgtgtttttgagctttttctttttatatattctacatataagtgaaatcacttttctttctgtgtctggcttatatcatctatataaggtcttccaggtccatccatgttgtgacaaatagtaggatatcgttttttaaggtgaataatattccattatgtatatatacatgacattttctttatccattcatcaacaacaggttgttccatatcttggctattgtgagtaatgttgcagtgaatatgggagtgcagattctttataaggtgataatttcatctcctttgggtatatacccagaagagggattactggtcatacagtagttctacttttaatttctttaggaacctatatactgttttccatcatagccataccaatctacatccccactgacagtgtactagggttcccttttctccacacccttccaacatttattatctattgacaagctctgttttgattagcaaaataaggtctgggtgatcaggcaccacgggaattagagcatcaatgtcacccacatttccctccttatttctatctttttccctcctgctttaaacaattctctgacaccgttgttcaaaaaaaatcatgaaaaacacccaaagtcttccattatttaattaaattggagatctcagaatggtctggattaattaactgcagcctagttaattgctagatggattggtgatagccatagcctcattacatttctttgctttaggataagtgcaagaaggctgcttccagctccaaagcacctaagaatggagtaaagcgaaggattcagcaaaggtaaatggagcagtaaatatactacaaattagtttacagttacacagagtagggtttatcatttcagtcatttagtttcctactggaatctatttgaataaaatttcttaaagtactatctatcccatagcatcgcttggtaaagtaattgaattgtataaatacatatatttttaagtaactggtgctttaaaatcctaaatgaatgttcttacacaacccaatttgcctgtgttttgcctgtctttcttgccctaattaaaataccaccaagtatgtggtttatatagattttagaacatggaagttggaaacttcctattattaaaatactcaagctgtgatgagaaatgaaaattggattagacaacttctaggtcccttccaattcaagaacatatgatttaaatgattattactatgatcccctggctataaggaggagttaaggtgtagctttaaagacaatagtccagttacaccaaagcttttaaaacaatatattaaatcttcctgtagtagattcccttaagggatataggaaacagcattgataattggcagttagccattatatctcagattaaatacttatttgcctattatttaatttcagttatacgaagacttaatcagccctttaacaaataatagaaagcataataaccctttatgatgagtggattactggacagccatgaccctatgtacaggaaaggaaggatcaccacagaatgaaacattccatttaagaacacctatgcatattttataacctaccctagccttaaaaaaataaagctagagtgatacatttaggatcaggatcacttaaggttatttttagcttataagcttgaggggaagaactcacaatattttggccagatgaagaagagaaactgaaaggaccatcttattttccccactgactgccatcttttgtcccctaattctgagaaggccatctcctcatacttatacagaaaagaaagctcacggatggttttgctttcccttttagacaacagaggaaactccaagccaaaagatgactaaagaaatacaagttaaggtatctggtaagttgggtgtttattgtaaatgaagacaactgtatcttctgccaatttatgtgttatagatgagagaagtgagtccacctcttgagtaattcatgctcactttacagtattggcatgaaatgcatactgcagatctacagagtaattggtcattctctgaaagcactaaatgggatgagtttgctattgaatgtttaaaaaccttaatcttataattaaaagcttttaaaaatattaggccaggcacttgaatgaccatctgaggctagttgaatctttgaaatccaaatgctcattactgcaggttatgtggcaaagcaaaattagcatgttacaacttagcgaaatgtcctgaagacattggcatccccagaataccaatacatggtggggtggggagaagtaccctttagagtctggtggaaatacagggttttgggaacaagggcaaaggaaaagattggccatttttatttgtcattatttggaaagtaaagtactgtgtttgattctaatttataattgctgaagaaactggacagatgaagggatttctgagatcttcagaactgggcccttatcttaatcttcagaaaggagaggcttaatgtaagccttaaaagcatacaagcacttactgaccaaagcctaaaagaaatcaagtataggttaaatcgggttcagctctctcaccatgatccatgtttatttcctaggaaaaaggagctatattaggtagaactgctctaacatttttcccaaaattaaaaaaaattctataatccactttcatgtttacttataggaaattccttctgtctgttatacaatgcttttgcaagtggtatatttactatgtctgtaacaagaaaattacatattaaatgattcactgcatttttatttgaaatttttaaggtatctgcatgtaaaatcttcagctggtggatggtgactttgaagaacaaaaggctttggcaacagaaaacaattgttctgggtgatttctagaatggttttgttgagtctctgaacatcctaaatattggtttgttattcttttccagaaagaaaagaatttgactggttcacctgtgtactgagtattgataaactttgaatttttttaattgcttcaattgggagagaaagctttatatttgtaagaaatatatttgataaagtttcttaaacaacaccaaaaaaacaaaagaaaagctaagtgaatttttgcacattctacacacagtgctgtaaatctcatttgtattttcagtttgcccttaattttttttgttagtgtttagaaaaaatgttttaaacattcttcagtgttctgatttcttattaccccctttcctcttgggctttgaactgtatttgatgttgctttgggataatgtttataagtcaaacataagatattgtaattgggcacatatctcctcttgggctgctaataataaattaataacaggtaacctggacaaccaggaagcaccaaaccccttttcagtttgaactcttctttgccaggtgtgaggactctgcatcttacagtcagcacagaacacactgagacttgaatcaagtcagcaacagagcaaataaaggttagataagtccttgtgtagcaaatttcgagcataagaaataaaatctaataattcttagggtactcatctgacttgaactctgttggtttactgtgttagtaaactgtgtttctattatctatacataaaacctgagcagcaactgtgtctttagagctattgccacatagcctttgcactgtatagcgtctggctttatggaacttaagtttaccaaatataaaaaaaacttctgcttttaaaaaaattatatatatatattaaatttgaaacctgcatttctccacagcaatgtaagaagtaggctctgatgtcctaccactttgaatggttttctaatatctaatgaatagttcctgaacattgcactgatatcatcgattagaattttgatatttaatttatctttatttcctggtagagaatgcaggaaaagatgtcaggtacataacataaaacagatgggaatttattgtttccaaagggcatggccttccttagcatcagtttgaagcttttgtatgacttagctgacttgtggcagcggggcaagcaaaaacaataacactgcttataaatgcaccacatcttgttaacctcccccccaaatactctctgaaagtcatgcacatacctatggattttacacaccaccagcttaaaatgctatgtctctatccatcagaaatagtcattatctatttttaaggcagcaacaagaaaagaaaaaacacttttcctgagggatttctaaccagtatctaatcctcccatttgggcagtataggtgtttgcttttttgttttctttttttaaaaaaaccttgaaacctttgacactgacagatgtgtttgcaaggatacggctgcagtattctaatttccatgtgtatctggaagtatttttaaatggcataccaaaatccagaagtttaagatgcctataaaagtaaacaacatttatttaaaaagaactctgaatatgccttctttttaattagaaatatcttcgagacttgggtgtttgttaataactaataactggagtaagctcaggatctaaagcagccctttttacagtctagttaggagagagaaaataattgcaaataccacttagaggcaaagaacaattttttattatcaaaaaggtttctgcacattgttgtggaatattgtatctgtttagaaaatgggcttttccaaaagcaaacaaagataggttcctcagtgaccaaaactgaaaatcaatatttccatgtttcattaatcaaggcataaaatacaataaagcaaaatattttacattaaaatcttggttgtgtatttttttaaaagaagggaaatatttagtttggggtggaaattaccagtgatttctatttttattaaaccattcactacaacaataagtataaaaattccaattccacttttatacctatttatttgttgtagtgaatggttaataaatggcagatttatgtccagaagtcactctattttgtcgtgtattaggggaacaattttgacatttttcgtaccaatcatcaatcatattcccttatcttgaagtttttgcctatattcaaaaagttcagtttgaattctcctttgccaggtgtgaggatttccgcaccttaagtcagcgcaaaacacgctgcaacttgaatcaagtcagcaacagagcacactatgggttgataagtccctgtgtagcaagttttcagaataagaaataaaatctaattcttagggtataactgacttgacttgaactccgttggtttaccatgttagtaaactgtgctttctattatatcatctatacataaaacctgagcagcaactgtgtgctgaagcaaccgtgtgtgaagtctcacaaaagaaagacttcaaagccaaagaatgtcctatttgctaatatgagcaaatatttgtttcacaatgtactatcatttattggtgactgcaataatttactgtcagtaaatgccataactagttagttagaaattgtaaagtaggccaaataagaagcagagagagaaaaaaatcacctccctaagaaaagggttttcctacagacttgaatgcactctgctttttcagaaggatactgtaccagtcagggaaatagatgacactcagaattatctgaggagggttctataaaagattttttgcaaaagtgcgagcacattatgtagaaaccacaagtccgccaggactataaaagccagactcccactgaggccactaatcctgaagggatgaggagggagcagttacaaaatccagaggtggagaaggctgtgtggaaaagagggtcccctctcggagctaagacctcaggggaggccagcccgaggcatcccgcaagggaatcagggaagaacacctccacctatacctcctccgaccccagctccagctctccggctccccactgaccaacatccaaagggcagaaagcttgatgacttggcctttacaagtcagcccctgggcatggagcaaggaagaggatgggcagcgggtctggaggggtgagccgggagagctttaacccagtcatcgtccggctagtctcagatccaggtgttcattgttcagtagtcgactattcagagtctttcgaggagatgatgaaacagtttatgaatgataaacatggggtacagggttttggacacgggtgcttagcataaactataaaatgagaagaataaggtactttattcttctgtggcagggaacccaaacttgggtttacgttgcagggcaacacctgtgatgaacaaaacacatggtagcgatagccattcatgaaaaactaacagctattcttttcacagggatagtcaaaaaatgagttgaaggaaaaaagtatctccagttggagccaaaacagccatctctagtttgaaaatacactcaaaaaatgttggtgattagagataacaggaacctggcaagggaggaatttttacatacgttaagcttttcactttgcagccacactctgattttatcaaaattcttatccatccaaccgagttttcttcaatggtttcaattgtctgttggacacaacggagctgagaaccattttcttcaaagagctgaagaatccttttaccttgtgaggaaaaagtgggttttaaaaaattaatttatcacattaatcagatgtaactttagttaaaactgaagccaaaattccagcatttgtcaaattctatatagaaggcagtcccagctgtctgaataggattatgtacacataagctgttgaaatgagctcatgcctcatgatgtcaagttctgttttttgtctgcagttcttttgttattctcagttgccagactttaaaagacttcactgtttaccattttataattaaggtttattgtgtctatttaatgtgttattctgttctgttctcacagatgcaaacttcgttttttaaaacatgatatctaaaaagcagaatgtgcagagtcttttctttgccaagcaaaacagttccaccacgtaagtgctgtctttctccatgggcctggccttgtatgttattatagaaacatgtggggaatgggattcttagcaagttatggcggtaagacccaaaccttgccatttttttatcctaatctacaattcatgtattgttgtctcaagataaaatccacataaagttcccctgattttaaagagataagaaactcttggctacctcctgaaaaatatgtttgttcttgttcatttgtgggtatcttaattcaccccttgagctcacatgacagataggctggctttgcccaggattgaccattgtgcgattctgtttcaccttaaagggttattatccttttcccataattttcacagcattaatccatcaatttttgatttggtattcaggaagcgaatgtagacctgatgtattatttattcagcatagattccagacagccagttccttagaaatccatgtcaaataccatattattagtttgggaataaagaggggagtaggaatgggttttagaaagatcgaattcaattttaaatgatgcagagttgttttaaaattatatgtcaatacagtgcaacttacaatgagcagaaggcatggcctcctgctgtagcaacctggaaaacacttcactctctctttaagttgtagctcaacctactgtttcatacgctctcagaatgcaagattaattcacgtcgattaaaaatcactgagcactactcaacaaagcacatcaataattttactaattgtcaaatcattaatcctaaaggagctcatcatgatagctccactaaaaacagaccttctacacagcgaagccagctgttaaccattactcttacccttgtcctgacccaaaatcatctctctgtcttcacctgccttggaaatgcaacatctccactgaatatttgattcagacttggcctttaagaacaatttctgtgcaataagtagcacaatacagggataggaaaacaggtttacctactaacttgatttgagcaaatgatttaacttctatggaagccagtctcctcatttgaaaatgaagagcagtggtgaaggatgtagttatataatgcaggtaaagtgcaaagccccaacccagcatgtatcagggacttaacctcatccatttgttcaccaatatttactctgattttattcatccctctgctgtaattactgtgctagacactgaggatgcagcagtgaatcagcaagcatcctcccctcatggagcttacagtcttttggggtatacaagcagtaaatatgttactgtaaataaactgctatgaagaaaatatgccaggggtatgctagtaactgaggagtgtggcctgcattgaacagcatggttttggggaaggtgatctgagccgagacctctcaagataaaatgcccctttctagtgaaaagttggggaatgggcaagccaggcagagagaataaaagtgcagaggcttaaagacaggagaaacatgtggtagcccaggagcagaaggaggctagtggctacagtgttatgagagagtaagccaggagcgcctgtgggaattggcaccagagggtcctcagaagccaggtcttcaaggtcatggacacatgggaaggagggatttggaattactgcaagaacaatcggcagggtttcaagaagccagggtcagttatgggctgacttgcatcttcaatgtggaaaatgttttgctattggcaaagtggcaagggggaggccagttaggaactattgcaataggcaaggcaagagatgagaaaggattgaatgggggtaagagcagagaaagtgcgcaagatccagtgcatgtgctgagggaagaccggcaggacttgcgtagttagagtctggggaagaaaggattcaggatgactcccgtattttatatgtccgtagtttgctctcattatgataacatctcgggctctttacttttcatgccctgcttcaggatcttcgcaccgatatttcctctgcacacaatactcctctagatgttggcatttccttcgatatcttctcaatgtctcctaatcatcctataaaacagcaccaaccctctatcccaatcactctccttgcttattcatcttcagagcatgtaactacttgacattggttgatttgtctgtaattgtctattcccacagcagaaatttcagctccgtgacagcaaaggttttgtctgtctgttcactgtacagccccataacctaaaaccatgtgtggcatatatgtcttgaatgaattaatgagaaacaagtgaatgaatgaaatgctttgttgctatagatcttgtctatagatgactaccttttggtcaaggctttggacatctcttcagtcatcagacagagtatctctgctctagacctcctggagttcaagcttgaattattatatgcaagttaattttacaagcctggatgaggctatgaaaactggaaaaaagctacgagactgtaacaacccttcattctttttcatttccaaactctctccccatctcaagctagaaaatagtgtaaccagactacacaatggaaccactccaaaaaaattaatattagcctctcagcttttatctaaatgtaccacagtttaagagcctttaaaatttgttccacaactttactataggaaaccttattatagaagggacaccacagaatcaatggcccacacatcaaagtcctcgagtttaggactgaagaaaagtctgcttttgtaaaaatgtgtatgcttcatgttctcttttaccagacaatgagaataactcatactgattctcatttttccttgacttccaggaatgtctgtgataaattcaggggacaattgcgagaatatcctcagccataagtccctcacatggttatcacctgtccattatgtatctttttgtcctcattttaacatttcttttatacatggatcttaaagctgcctgaaattctttctgaaggagatggttatataataagtgacagggaaccatgaacttggatggtttataaagaacctaattccggacctgcctctttagcaacagctggatgaccacttcagtcatttatacctcaggcccacttttaacatccttaaacaaggactaattgtctcaagtaattttcttcaagtccaaggtttttactggcagagctaagacctcttaacgtgtctgagaagaggcacagttttcctagtttaattgcaactgatttatgctgctgtcaacaccatagcatccaaaaataactttaaatgacaatccatttctaactcaccacaccctcaaagtattttgtctaccccatattattagctaattttcatttatgtttaaaaatatatatatagattttttttttttacctctcaagccgtgttcttgtggagaattgatttgttgtacccattaccatgtgggctatggaaatgagccaagttcaaacctagagagggaaatattcaaaaacgggttgtgaaatacttatcatttaacatatattttaagggcctcctatatataatagctttcagctaaaaactgatcgtgtgaaaaatacaaaatatgatgtctatccaatgggttaagatctagctgtaaagaatatacacaccaacagcctaataaaaggttaagtatccaacagaaaatgacagaagcaggaatgctataagagttagacaaagacagatgtgaacaagcaaatgtgttcatggaaggcctggctgaactgtgaggaggaaggcttcagatatgtccatgggctcaggaaggggttatgcagatggaatggaaaacatccctgtccagattcactagttagcactgaagtccagttttagttttctacaaatattttaggtatttctactgcctatcttcaatcaaaaagtacctttaactgttactgttcttttacaaacagcaaggctaaaacacagtaaggttatgaacttatcagtcacagcacaatttttggcaccacttacttttgtacaagtttgttccagtttttcctagaaattgccaggccagtgggtatcctactgggttcctgccaatgagtgtaagaatttgggaaactcctgagtttttattttatctcccttaaagctttcatctagtagcctagaaggttaagaaaagaaatgttagcaatgaataagtgatgaaacagttatgaatcactgcaataaattacttgtaaaagaaaaaaaagtctgccagtaacaaaggttaaaaagataaatgggtaccacaatcctgataaacccactatagctacataataaaaactaacatttatatagtgtcataacacccattctcatataccctctcatttgctcaaaagaatagttaaggaagagtactctagtaaatatttttaatatgttgtcattttaaagatgcacaaatgtatacacctttaatatttttcctaacacctggttctccctaattatttgcctttctcattagatgtgtgcgacttgcagtatgttcccagcaggatagacaattcctggccaagaaaacaaaaatagatccagaatgatctaatctaatctaatttcccttggccacatgaacatgaatgaatgacggctcaccattgaagcttttccttattttgggttctgcagagggcaaattcaatttggctttctcagtactggacaaagaaaactgatatttactataaagaaaatcccagccttctgtgtctgggcccccacagcaaacactgccaaggtcacgtcgacaggcaggctatagaaaggacacactcggtgagaatctgaggtgcagtaagtatgtttagaggcataatggtgactaacatgaactgctgaactttccccatgatcagagaagcatgcctggaaatataaacaaaaacactgatttccttcagttacaattttttttttttttttttaggacggagtcttgctctgtacccaggctggagtgccgtggctcgatatcggttcctgcaagctccgccctcccgggttacgccattctcctacctcagcctcccgagtagctgggactacaggcgcccgccaccatgccggctcattttttgtattttagtagagacggggtttcaccgtcttagccaggatggtctgatcccctgacctcgtgatccacccacctcagcctcccaaagtgctgggattacaggctgagccaccgcgcctggcctagttacactttataaaaaaaaggcaagagaaaaatatctaaattaggtttgaagtagccttctcaaaaatgtgaaatgccatttttataaatacctactatttaaatactttaatgatgctgggtgactccataggggatcacctttcaagccaaaaaaattcaaactatattcaaaatttacaccatgatcacaagtcaggacggcagtaggaccctgtttggatttctttaagctgaagcatgtaggttgttggcataaatgtttcctgggtgggtttaagctccaaatgtaaaaaggactgaagtgtagcaagaatagggatttccagataggtaaaatcctaccttgcttagacagtgtcagcaattactatgcatccctgtcagggaattggaagcccaaagaaactactataaaatacaatgcatgtgtttctctatggcatggcttcaccgtttaataagattttgcattgcctatacaaaatgagaattattcccataccatctaactccccagatatttgacttttatgcatagaagttccctcctagcatttcttaaagtacgagatacatagataaatcttaaaaagcaatttattttccagaaaagggcagcagggggacacttaaactttttgttttccctaatgtttagtaccaatgatggaaaacagaaaagagcccttcacatcaacaaattggttatttagtaaggactgacctcaagtttccattggatccttccactttctgaaatagccttctgccctctgtacgcacggctgatagttgtgcacaaggcgaggagtagtagttcactccgcagcattcgctctgagactgagccctcgtctgtcatgtctgcttatcaatgaggtcccttagcagcctgatgaggaaggcctgagggcgttgtcagggaaacagggaccagtattgtcacaggtcatttcatgttaatataatccattatggctcagatgatgggggctaatttttaaagcataatctaacttttactgtataaatcatgcgcactgtttaattataaaagggccaaaaacaataaataatgatgaatgactttcatatttcataacaaacttttataagatatcctatctacttaaagtcaggatgaattgcgactttaaaacaaactcaaagagagtttacatgactaaattttgagagcaaattatgcaacaagattcaggacattttgccaagcgtaacaattttgtgcctcttcctcaagtaccatgaagagcccagaaaatctgaacgtcagccattgtaataggaaaggaaaatgaaataaaaggtttggaaaggaaggaaataacaaatccatgcaaattaaatagagtctaagaatgccattcctattttagtgccaaataaaaccaaaatctttgctagtccatctaaatactgaactaatattatttgcttttccttaatatgtatataaagatacacacacacacacacacacacacacaccaatgattaacactctttttaacacaaataataattacataacttttatttcaggctttaccttgaattgagtttccacttcattcatatctcttttctccattaacttatacataggatcagctcattcaaaccttgaaacacgggcataatttcagtttcatgtttcaagtacaggataaatccaaggccttttcaatggacagcttcccaatgctgaccaagagacactgtggtagtggtttaaaagtaaatccgggaagtcaactttttgcttcaaaatatattttaatctctagcaaaacaagcaatcagatataaatgtcccttataaatagataactacggccgggccggtggctcatgcctgtaatcccagcactttaggaggccaaggcaggtggatcacctgagtcgggagttcaagaccagcctggccaacatggtgaaaccccgtctctactaaaaatactaaaatagccaggcatggtggcaggtacttggtatgtgggaggctgaggccggagaatccttgaacccgggaggcagaggcggtgagctgagatggcaccactgcactccagcctggggacaaagtgagactccatctccaaaaaataaataaacagatagataactactatataagctcttttctatcacatataacacaacatctggcatgtttacactagggaggaagtttctaaacagtaacgtctagggctaacatgtggataagccggaaaggaagcacatcagcatcttccctgtgaaacactggattgagtggtgaacttctagagtaagcaagggatttccatcaagaccctttaggaagcctggtcaaacagactatcatctggtcaaaactatgagttcctgaggaaacacattttcttctccatttcaaagacactgcatatccttagaaacccttcattcagagggttagtgttaaaaacctcagtggtagggtatatattatataagttaaaaaataaaaagaagaagccctctaaggctcaagcagaaatattctacagaggggaattttttaggagaaagaaacagctaggtaagcaacccataactttctcccccattgctttttctcacttaggaggcccagtatggtggtgagaagaaccagaaggcactcaaaatttaggccagaaggtacgggtatgaggagaaagagataatccttcccacctgcatgcttcctcttaggactttggtctgcctacatgttgaagaagtttgagttttaggctttgggagcatttccttaaaaacattgtcatgggggaggaaaaaaaaagggtagtgttaattctgtcatcacacactcagaatcatttggttgggctacattttatgagctatattccataaagatgctgcaaagttcagtatctggtttaggaaagaaaaaaaaatcccttctttaacccaagaaatgtaatgcaaacacttgggcctgtgtcacttagtcttctaagaagacttcaaggctgttataaagacccagggtgggagaaacctgatccggtatagcggggccagaagaagctgcgggaccatgccgcgggacaaggcaaggagtttcgccaggatgttgatctcctggttatctacacttccgcctcgtatgatctgaattattaatgagaaagattaagatacagattccttccttcaagtgcctagtagtcacagacaggaggttaattataagactaaaagcaatcttgggttgttagaagacttaaaaggaaaacacctttcaacttcttgttatcaatcaatcatttttgtctttagaatcaagaatttgaacaataacagctgctttcagaaataaaccgcgactttgtgcagcgtgattacctgacgagctgaaatgcattgttaatgagacttgcccgatcattactgctgactctgtgtgtgttccttttaaaaggccagtcaaagagtcccatccatcatcctcgtaatgccaatgtaatagccattcatgcccacattaaatttgatccattccacctcttctgggaggtgagcacatctagagtaaataaaataaatcaaagttccatttgctcccttgcctgaagaagcttttctcatccaagattgggcaaggaaattagagaagagtttaatactgaaaaattgaaaacatcacttatttctctcagaaaccagaaaacagcaactcaatagacaaaagctacactagctttagacatcaattttgtgagatttacagatctatgaaaagaatggcaactaatctctggccatacatatgatataacccagtaatgttaacaaagtaatagtgaatgttcctggtaatccctcctttttagcattatgtaattcagctataatctctatctggcaagatttggccattcttctttgaaaccagaaagcattttcaatctgatcccttttgctttaaccagataaatagcaaaagaaacagcactttaatcctacacattttcacattcctccttgaataactagtagtttccaaaataaattacctgtttttgtttttagcaaaaatcgatggacctgtcggatttgctggtgatgaatgtcaatggaacatgccacaggtacctaaaagaaagggaggtggattgttcctttgttgattcaattcaacaagcagttattaaatcacctatcattgccaggcactggttagtttagaacaagatagtaccaaaactgctacagccaagctctcaaacatccccagtctgttttccagctttgtagggagtgtcagctcgggcactatttcctttcttggactccttgagtagagctaagaatttggactcacgtgaaccctgaaagccttttacagtgattggctgattgcatctcagaggcctaacttcaggactcatgtgcctcctgatagtatattaggaaggacacaatatcacctccttgggattcctgtcaatgatatgtaagtgaacctgatcatggagaaacagcagaaaatccaaactgaaaggcattctataaaataatggccagtactcttcaaaaaatgtcaatatcgagaagcccaaaaaagactgaagagttgttcagaaaaaaatggagaccaaaatgatgcaacaactaaataaaataagtgatcctgtataaatcctcagtcagaatttattttctattttgctataaggatatttttaggacaattgaaaaagttgaatgggatttatagataatagtattatataaagtttatttcccaattttgtaattgtactgtggctatggttatataactgaatgttcttgttttttgtttgtttgtttgagatggagtttcgctcttgttgtccaggctggagtgcagtggtgcgatctcggctcacgcaacctccgcctcctgggtacaagcgattctcctgcctcactctcctgagtagctgggctacaggcgcccgccaccacgcccggctaatttttgtatttttagtagagatggcgtttaccatgttggccaggctggtctcgaactcctaacctcaggtgattctcctgcctcggctcccaaagtcctggtattaaaggcatgagccactgtgacaggccataaatgttgttttgtgaaaatactatgctgaaacatttaggtgtgaaggggaatcatgtcaccaacttactgtcaacagttcagaaaaacatatgccaagtatatacatacagacatatgtatataggtatgttgtagatagatggatatcgattaatcaagatttaaaacctccttaatccttttgggaagtgggggagggaggtgtatatatatatacatatatatgtgtgtgtatatatatacacataatatatgtatatatacacacacacatatatccacacaaacatatacatatatatatagaagagagagagagcaagagagagagggaggtgaagaaagtaaaggagtaaagagttaacagtatctaggtaaaggatatatagtaatttgttgtgttattcttgtaacttctctataagctgaaattgtttcaagataaaagaattttttaacggtatccatccagggtcaatcaagtgcagcatcttgtttctaataatattcttctatagcattaagctgacaaacaggttccaatctaactcagaagaagacaactgagtctctcatcattctcggaaatcacctaaattctttgtcctcagctccaaccaaatgctaggcactattgtaatctagtagcagttgcttaggtggagttgatttcaagccagtaaccagaaattaccatcatatcaaattacaaaatatgagatgttaaagtaattacatcgtcacctttactgagaataaccaaggtttaaagcctccttatcctactgggaagatgggggcagggagtataagtcaacttcataggatacacagatgcgctgaaatattttagcaatagtggtaagggcattatttcaaaagcaaggttccatcctaaaggcagatgttacctagacaacaaaacaaattttactctaggagcattacccagtgtcggggcgccgtcagagcccttcatgtagtgctcttgcttcatgtgtacattcctccccctactgtgatggttattaggggaaaacccctctgcagtgtccaagtgttcatcatggttttacatccaccccttcctgatgccaatgctggtgtgtacacaaaaaggcagacacatcaccatttaacccaactctaagaaaagacagaacaccagcttatgctcaaacagccgctaccattgccaacctcccctcttaggagcactttctgatccctttctcagtgtgatgtccccagcatcacacctccattagagcaccagctgtttgcttgtcattttcctccactacacatactgtctggaggacaggtagcatacctagttctgccgggcacactttggggctggcaataaactgggcacaaagcaggcatgtgaatgaatgaaggaagagaagggagagaaagtgccagttttcaatacctacctaactatgctggttttggacaagcaaggtggaaacaatgttcagcaagagcctgtgtttctaaagtgagaacacagagatgacccacactcaacaaatagtggaactcaaaaggagctgttttttgatactaaaaaagcttttaagaaatgatttaagaagtgtaaaggctgggcgcggtggctcatgcctgtaatcctagcactttcggagtctgaggtggtggatcacctgaggtcaggagttcaagaccagcctggcgaacatggtgaaacctcatcctactaagaatacaaaaattaaccgggtgtagtggcgtgtgcctgtaatcccggctaccgggaggctgaggcaagagaatcgctggaaccggggaggcagaggctacagtgagccgagtcacgccactgcactccagcctgggcaacagagtgagactctgtctcaaaaaaaaaagattagtaaaaagataaaatgtgccacaggacaaatctagaaactactgaataaagcagtcctaggaacaaaaaagccaagaaagtaaacatataaaaagaaaaaagaaacataaaattcgttgtatctccagactcaccctcagcttcctctgaaaacatcccacaagtccagatgaaagagactcaggctgttttgtgacttgatgttatgaatactttatagcttagcagttaaaacatgagttagatctaaattcaaatctctgctctgcaatttaccaatcagatgtctttgatttcatgttctcaactttaaaaatagggatagtaatagtacccagctcacaggtttatatgaagagtaaaggagataatacatataagtgcttaacatgtgcctgacacatgacaagattcaagaatgctcagtgccattgtctttgtacaaatgcagagctctgtaaatgactgaatatccttttgactgctacaatgcagctgtaatctgctatagaaacatgtcataaatccctgctttaaaagggaagctagagaaattagtatcagtgagaagcattaccaaggaaagcctgcaaccctccagtatagatacactttaagaaaaattgaaaaagattatgagtatggatagtttaaatgcagtcttatctggaatgagggtgatataatcaaggatctcagaaagttggcacagagctgcctttcaaagaatatgcagtaaaagaatgtgcttgggggaacatgtaagatatagaaacttactgaggatgaagatgaatgttgacttctagagcaaaagccatcctcccttttacaccatctgtagggcaaatctaaaaaccaaaaataaacacatcactcttattctatagaaaacaatgattctcctcagagggattaacataatgcagggaaaacaaaacagatgataagcctgtcaatcccaaatgcagagatgttcaaaaacatactcacacttgcctactatcccacaggtcctcgttttttgtatttttatagctatgcttctggagatactgtcaataccacttttaaatgcgtcagcgctaagatactcccttagcatattcagaatacaactccctgaaaagataatagaaataattgttatctatagtttcattgcagtctcatctgaatcacatattcttttgcaataaaacacatttctttgaaaacgcaactgcaggaacactgtaatgtctggcaatttgtgaaacagagtaagcaggttaaacctggacctgtttaggcagagatttgtctaatgtgattgcttatgctctgagcccactgaggcccttattttctatcatagccagacctcccgatggggcaaattagcatcatctgccaactccctttgttcacatggagtggggataatggtgcagattaaacattggaccttgagctactacctggctctcccatgccattccagggcaggactaaggagaggccagtacaacaaggggtggagcactagagaggaggcagaggtagatgccagggaaggaaaagtggatatgtccagggagcccaggcagcttgagcatggagggctgatggagctggagtcacaatgagaaagggaacaagagtcttccagacaccctgtattccttggtaaagggctcttttcccctccactcccattaccacggatgtgagtcacaaactcaaatgcctccagtggcacatgacagggcatataaataagggaagagtccaaggataagaagaatgctcttttacattctttttcccctggactttcaatggaacatgcaagcaagaaagacttttctgtttgctaccggtaaaacaacagccaagcacaatgtaactggcaacacactctcagcctcggtgagaagacaatagaacagttgggaatggcaggaaagtggaaaagcagagccttgatcttacaaagagagaacaacaacttagctccagctatgctgcaaagaacatacagtggccaaatcctcctttttcttccccaagagaagctagaatctggattttacataaaatctcccaatcattaaactgttgtcaacaattcccaactctttactaagcacactgtgcaagacaattatttgcgtctcaacaatattaaccattgctgaggccttgaaaagtaagctacacgagggcaggaatttttgtctagtacaaagttgatgctaatcaatacctatttgttgaatgatgaataaaagcagagtttctgtaagccatgaatttcaacccaagaaagaatatatgaagaatttcccataaaataatctttagggttatgagccaactgcaagttagtcctaaaagagttgactccagccagcacgtgtcaagagagaaggcatcaatctgggtttaaccccacaaccttgcctataacttctccaccccagtatgtataacttagtatctaaactgtatccttatactcaatctacttttaccttatcataagaaacatctcaaacatctcccggatctgagcaggattttccacaggtgtagacacagggtgtgaggatttaaagcatctacctccattgcgtcaaaacatttgccaaagaaataatctccctattggacagaaaaaagaaaacatcacctatgatttacatttagataaaaaatgtcaaaggtggacattttatctgaggcaagaagtccatacttcacattttgggggcaacctattccatattcctaatatttatgaaacaaaatagaattaatatattctaaaagctacccaagaaacaagattttagttaaacattatagattttgttcatcttaagtcctttagaataaagaaaattcgtattaatctaaaaacgaaacaattatgcctatagccaaacagcaacacaacaagaaataactgtatagtaatttcaacatttccaatcattgtctgtactgttttagagcaaagatcttacctttaaaaacataatgaaaataaatggagaaccttaaccagctttattagagcaattagctcaacaggacaatatgtatccataatcatttttattactaaagatcatgtagaacataagaaaatatttatgattataatgcaatattgatgtgtactttctaattatgtaccaggcagatgaaaataggcagtaataaatattcacaaatgtatattttaaataatgtatcaggcagatgaaaataggaataaatatttacaaatgaaaagaatcattggagtaggataaaaaatttttacataagtttaattttgctatatgtgattttcttaagttaaatgtggtgtttaaaaaataaaccatatagcagttccaaagcaataaatttgtgatccagaagcctagttgttatacaatcaaatgtgcagttaccttaagtataactcatttgatttggcaagtaggtcctattgagatatcagtaatctgtacctaataattctgcaatgagcaacctgaaggtgggaaaatgaaatggaacatttaggctgccattatttctatttctttgatattaagaaaataaaatcggacaatttacaaacaatcatagattcacaactgagtttgtaaataagtcttgtggtatatcttgaaagttcactagcatttttgcaacacgattcatatctaaactgtcaggaagttatcagtgaaatatttttataagttctataatcaaagattagtgaatattttcagcaatattgaacaaaacaacaaattaacctcaaatgtgaaggataaataactacttaaactttcagttcaggatgggtcacactgacagacacaaactccataaatttggcaaatcttcatttagccaaagatcattccaccattccatagtgaccaggttcccaaaccactaaagcacaacataagccataaacaaagacactcagaaagaagtatattttagatgtccaataaagtttatgaatgttaacatatatttacaggaccaatatttaatcaaggtaaaaataaaaaagttcaacatgcattataagacataaaaacgaatgctttggagaaacaatttttcctttaaaaaaagacaaagtaaaaattatataaatagccttatatgtcccatagaagcaataaaatgtagtttatactttattaaaagtgtgaatgagcttatacctggtgggccagttcagggccacagtcattgtgatgccaagcttacttgatgcagaagacttttctgcatcaaacacagagcagattctctatatgttgtcagtccccagttttccatagcaccagactgaaagcgggaatagcagcaagatcttgggaaggaagtaataaaatacattaccagtctctaagcatacattctcccaaacactaatcttcagaatggataggtgtttgaaccagctgcccgtgataatcatggagctctagactggaagaacctttcacaatggagaaaaagaggcttagtgctcagcatcactttgctataaatgtggcaaagtcagacttgcatctcaggcctttttttttttttttttttttttttttggaaacaaggtcccactctgtcacccatactggagtgcattgcagtggtataattacacctcactgcagcctcaacctcccaagctcaggtgatcctccatctcagcctcccaagtagctgggactacaagagtgcacctccacactcagctaatattttgtacttttgtggaaacagggttttgccatgttgcccaggctggcctcaaactcctggctcaagtaatccacctgcctgggcctcccaaagtgctgagattacaagacatgagccacgtgcccgccttttcaggcctcttgactccatttctaaccttctgatgaggagtttggaattgaaaaactaaacaattataataatccattctattttggatgcccaagacccacataacctaaaaaatcaaacatacaatagttttaagggcttgtgtaagaaagaaaattcagatgtcttacactatataaatttattcattcaaaacagtttgttgagcatcctctgggttccgccaagcaggtgccagtaaagaaaaaatgtagcctcttccctctgctgtctgcccactataaaatcagaaggcaaaagagtccccatgccatatgcctcaagaactctatgaagatctctttcttcactatcactagaagttactgtactcatcaagggtgaggagatgctcagaaaatcaaccgcaggtttgtcacttgctggggtttttgtggcttgaggggctgctgaggcaatacagggatgtgccaattataatgacaaatctatgactgtgttcatcaaatgtcatgtgaatatctgtgcaaaatctctaccttgtttgggtaggggatacggtatgctgaaataatctcataaaattctagaagagtcaccgcagcatccagtgcataatctgcttgatttatctttctggcacagcataaacagaaacctaaagagaaaggcacagaaaggaattcaaatatctaactggcttctctccccacattgtgtagaagactgacattaatgtcttcatattgtgggtatggttgccaatattaaagaaaataattgggaattccatttcttgcattaatactgacgttcctgattaatcccccttctgaaaacaacaacaaatgctggataacatgtataaagtttcttaaatgtgtttataagatggcaaatgagaaagaaagatttagaagccaaagtgaatgacagttagaccctctgatgtcaggagagcactgcagccagctttaaccctgccggcatagcccaacacagctggacttgagctttggttcttatgtcattgaaggactcaggagttagagaccaagtccagggcctgcccaaagtagaaagtctaacaggacatacaatccctgctaaagctagtacccaaaggccaggcctttaatgtaaaggtaaactagaaataactacccttctcaaggaaactacaagtaaagtgatccctggaccagtaagtactcccagacactcttaagagcaaatacaatttctctctggaataatccactttagactcaggcaacgtaagctacaaacataattcataatacaaacaaggaaacaagataccataagcaagagccagcagaacaacgaaccacaaaatcagatacacaaagaattcagataaaacaattaccagacacagtatataattgtatgcttaatgtgtttaaagaaatgaaagaattaaaaatattaatatagttagacattactaaaataatcatttctaagagattcagataagtggcaaaacaatgggcggtgtttttgctgatagtttcactgctgaattaagaatgttcccttcatccgagtctcagcgtcaccttcaaatccccagttaagtaaagatacctccacaagaataagaaatctcagactagaggaacacaaagcaattcagcagggaatccccatctattcaggcctcagtgaaaccagcacaaacacataaggtatcttcaaacaaagcatcccttcctcccctcagaaaaactgtttgcattctgagctacggcacacagttgaataggttgcccactatgcaacagtaccaaatgaggaacaagtgtgccttgaaacaagatttttctctccagcattccagtgtacctgcccaaagcctttgggtattccaagcaggttgctctatcttccttaccatagccagaaacccctgccagatagtaacatttacttccaaactgcagaaagccataaccagaagcaacctagagaccattgcaggatctagtccaagttataccttccaaagaagtaaatactaagttcagagggaatagggccaaggtcagagagtcagtgaagtgactgcagtgaagccaggatctgactcaggccaggccacactctctccacgttgttgttattagaacctcactatacaaagagcatccgtgacaacaggctggccaaccatcccagtttgcctgagattgagaaggttccaggatgcaggacttccaggattttggtatttggttttgtctttgtttgtttgtttagaacatggttttgctctgttgcccaggctggagtgcacaatcatacctcattgaagcctcaactcctgggctcaagggatcctccctagtagctaggactagtagcaggcacaaggaacctgcctggctaatttttttattttattttttgcagagacaggttctcactattttgtccagctggtctcaaacccctggcctcaagtgattcttccacctcagcctcccaaactgttggtttatgttgggtttacacgcacgacccactgcgctcaggcagacttccagttttaaaacagttccaagcaaaccagaacaagctggtcaccatatgtgacagtcataggctcaccttgctccactcttggttatcttgctgacagactcaaaatctgaaatgatgaaggccaccagaaggtgctcatcttcacagtgacatcaaaatggtcttctatgagtccttcagcaacagtccagatttcacctaaaatcagaataattcaaattatcaagtaatccaattatccaatacatgaacatgataaatttcctaattatcagacataatattaaaagtgtatcaatcccagcattggggagtccgaggtaggcagaatgcttgagctcaggagtttgcgaccagcctaagcacatggtgaaaccctatctctacaaaaaaaatacaaaaattagtcctgctggtggtgcgtcctgtagtcatagctactggggaggctgaggtggaaggatggcttgagcctgggaggtgaggttgcagtgagccaagattgagccactgcactcctgcctggatgacagagccagacctgtctaatgacgcttctatagttactttaaaagttatctttccaatgtctaattataattagatattaacgtcaaacagttctactcaatttcttttttattgagatataattcatatccatacaacttaccattttaaagtttacaatacactgtaaatccacatttggcatatgtgattgataacacggatgagacaaagcaaaactgaaattgtgagttttgccaagatgtggtgatccacttttccttaaatacaggtttgagaattatctggcaatgcaatgtcgagctgtgagcatatacgcaacggggaaaatatataaccctgtagtacctaaaagcgcttctgtttgctgtataactgaaagtaacctgggccggacacagtggctcacacctgtaatcccagcctttgggaggccgaggcgggtggatcacaaggtaaggagattgagaccatcctggctaaacggtggaaccccatctctactaaaaatatgaaaaattagccgggcgtggtggcaggtgctgtagtcccagctacttgggaggctgaggcaggagaatggcatgaacccggaaggcaggcttgcagtgagccgagatcacgccactgcactccagcctggatgacagagcgagactcatctcaaaaaaaaaaaaaaaaaaagatttgcttcatttgcttcattggaatcaccttttaagtgcaatcagagagtaagggtggggtatggttgatggaggtacagtcttagaggtctcccctaaagaagaaagtctaacacgtcagcaataaaaagcacggagatggaaaaagaacagccagaattagctgggtgaaaccatggtcacgggcatttttcctgtaatccaatacttcctctattgctctgacctcatcttttttttttgttttgagagatagggtcttgctatgtgccctggctggtcttggactcctgacctcaagaaatcctcttcttctgcctcccaaagtttaggattacaaccataagccacctcacctggccctcatccttcttaatacccatcagcaccaacttctggtcactatttggtcattcaaaccaactctgctacccagcctaggattatcataaaggatcccaaatcatcttttctttttaaatgcattctgcttctgcctacctacacaaaaatttccttttttttttttttttttgagatggagtctcactctgtcacccaggcagagtgcaatggcacaatcttgactcactgcaacctccacctccagagttcaagcgacttcctgcctcagccccccaagtagctaagattacagacatgtgccaccacgcccagctaatttgtatttttgtagagacagggttttaccatgttggccaggctggtcttgaactcctgcctcaggttatccacctgcctcagcctcccaaagtgccgagattacagtcatgagccacacacctggccaaaaatttccattctcgagttgtgttaattattaggaaaataacctgataaattaattcaaatttaaatgtgattaatttctgccccatgcccaaaagcttcaatgttcaatggtatatattgtgtttttctggtctccaaaaagatcttttgagaccccattgttccccctcagctcaatatctgcagcctgaggtcaggctactcgtattagatttctgttagtagaggtattcccgtccaaagggacaacattgcattagaagttttcctatcctcaaaaaaaaaaagaagttttcctatcttcactaagtggatcctggatatccatggatttagactgtgcatctttgtggcgcttccaaagctccaggcctcccttctgaaagcctacaaatttctcactaatcctgtttggtccttcagtctctctcctgtctccttcccatccctggtcctttatctcctagaactttgattcaccaattaaagaactcacttctgtcccagggagtaatacccaatactgggggagaggactatattttgaaaaagcacatcctgtatattaaatttatataggaaaatagcataattgtttcttgtcttttcatatacaagggtgggagtggggacagagttcttggctggtaggaatttgcagaagagtgatttttacagaggatagccctctggcgggggtgggagatccgaatcttgtttgaggaaggcatccttatggtatgaaggcaggtagtatagagttttaaggttgagaagcaccacactagaggttggtctgtggctctcagtatcctccatgttatgatattgcttccccggtcagcacagggacaaagctgttcttccctcagactctaggcaaagcctattctactctgactctgatccccagtgagtttctctgaacaaagatgtgcttccaggaggtgttatataccagctgcagaatgacggcccagctgatgctttctaaactaccagaatcaaaggatgatggcacttactgaacagttttattcatttggcatgtcatcttctagtcacttttaaaaatcagagggaatgctgtccacatccgcattgagatggggaataatagtttccctctggaagctaagctatctatcatgacttaccttcagcacctaatatttggaaaagattacttttattctctttttctgtctgcccaattttgtacattcgttacaaattatataatgaatattactatatagtatatgtaacttagagaaaataactgatgctaaaaatatggccttattgacaaagcattacctttaaaatcattttaaaagatcaatgagaaaatgagggtgaaagtgctttgtgaagggcactaatatttaaacctgacctgatttcttataccacttccctcctatcagcatgtataacctggaatggcactgttactgaatcttgcatttttaggtgcaatttttactttgattacatataactatggcttgaaacaaagcataggttataaatgaaaagttagtaacgatctgccaggcaataaaacaaaacaggtgcccaatgttgactgtcactgggctagtgcaagtcacagagaatcagtagattttcctatgaaaatacacaggagtgcagactcaccaatggcatattggagatggctaggtgccttggtctcttctaattttgattgagaaacttgctttgaaggcaggttcatcaaagcagggaaagccattctagctgcagtgggttcaaattgtgttgatgctagtatcctaaaattaaggcagtgaaataaaaattgagcatgaagcaccaggaactctaaaacaggtgtttgctttttaatcctaaagttactataagattgatggattttgctactaaaaaatatttcatctgacaaagctatcataaactaagttaaaagacgagttacactgggcatggtcatggtgtctcatgctgtaatcctaacacatttttgggaggttgaggtgggaggattacttgagcccaggagtggagacctacctgggcaacatggtaaaaccccatctctaccaaaaatacaaaaattagccggcatggtggtgcaggcctgtagtcccagctacttgggaggcagaggtgagacgatggttgagcccaggaggcagaggtttcagtgacctgagattgcgccattgcactccagcctggcgacagaaccagaccctgtctcgggaagaaaaaaaaaaaagttaaaaagaaaaagtaaaaacagggaaaattcatttaagaagtatgtgaggaaaacttaatagccttaacagatagtagatcctaaaaatatgtaatcctaaaaatggctcatacctgtaatcttggcactttgagggcctaggcgggcggatcacgaggacaggagttcgagaccaccctggccaacatggtgaaccccatctctactaaaaatacaaaaattagctgggtgtggtggtgcgcgtctgtaatccagctactcaggaggctgaggcaggagaattgcttgaacccgggaggcggaggttgcaggagccgagttcgcgccactgcactccagcctgggtgacagagcaagactccgtctcgacaaaaaaaaaaaaaaaaaaaaaaaaaaatccccaacaaccaagggaatctcaggcaaagtaaaggtcattaacaggcaattcataaaagaagaacctataaatcattaacaaacatatcaaagctgctcaacttccttaatcaaagttacgtaaattaaaaagagatcatttatttgggaccttttttgctctaaaaagactgccaatatacactattggtgaggggtaagaaaaaagacaaggtttatcaaaaatttataggctctttggcttaccagttttacttctaggcattattctaaagaaataatttacaaagatgctcatcaaagtgttgttgatactgaaaaattgaaacaatttcatttccattcccgagggattaaagatattaatgtacaactatgtattttataaaatcattaaaaagatgtctagtaatagtcatttatataaaacatcttcccaacatttaagttaaaaaatttccttgtaaaagagaaaatataagaattctatttatataaaatatatatatgcatatccagaaagaagtctggcagaatattccagtgaaatagaagtagtggcagttcagggggctatgagtgaaataaattttactttcttaccttgataaaataatatgaatttgaaaaataaattagtataatctaccaacaaataaaattccattttaaaactgagataaaatctcccccaaataagtctcctccttaaaaacagaaccaaagcaaggtgagaaggatctctaaaaaagttttaactgagataaaagtatttcctctaatatgttgctagtaggtttgctgaagtcctaacctgtagtatctgtgcatgtgaccttatttggacatagggtcttacaagtatcatggagtgaagaagaggccaccaggctgggccctaatctggtatgtctgtttccttataagaagatggagactgggacataggaaaatagaatggccatgcgactaacgagggagaaactagaatgacgcaggtgctaggcatggagtaccagggatccacggccacactagatgctaggaagatataaggaaggattctacccagagtctggagggagcacgggctgctgacaccttgatttcagacttctagcctccagacctgagagagaatacattttgtttttatagccacccagtctgtggtactttgttacaacagccctaggaaactaatgcacagtcaggaaaattaaacatgtttattatgtctcagaaatcgaactaaataaacaaatagattttactctgatagagctgggggaaagaaaattggttaaaatagaattttaaaatgagattaaaaagcaagggaaaaagccatttttaacactataaagaagatgcaaaagcaaaactgagaaaaagttcaacagcaaagggaattttaaaagacaatcaatctgaaataatgaatttgcgtgggcagcacttgcagtttaaaagaaaaagagaaaaaaaaatacctcagttcccctccttggttctgtaggtgcttttgtaaaatccgtggaaagtctccgaaagattgccagcaagtgaatgacaactgtgtacgggagcccgacaaggaggggctcgggagccagcagtgcatttgctcctgaggggggtgttccaggacctgcaggggttcttccgatagcctctctccactcccttcctgagggtggccctagatatctgcaggtggtgactatgcaggatgatggtgtggtgggctgactggctgtgatttctactttcgtggttccccagaaggtcagcgtggtaggtttgcatggatcaagagatcataatgaactgggatgacgtactcaggaagtcgtatttattccaaggaaatggtgtcccatcactacgttttggagatgcttcagtgctctgacacatgaaggagtggacacagttaagagagccaacagtgaggaaagtagaaatgacatggttcaagggaccatttgaggggcagaaacaccatcttcttgctctacctacctagcggcacaatgtacaaaagcaaaaatatatgtcattaaaatgttattgacacagcataatttcagaagtatccacccagcattcacagaaataggcataaacttccaaaagtactaggtcttttccgaaagtaaaaggaccttccctatgttatggtttcatataagaaagatgtttacagttagaacaatcattaacacgtactagaaagcatcatttgatgttcaaagtttaaattaactctcctgtcagggttcttggttgaaagcaaccgaacaagctctggctgatataggcagaaaagaatcattaggggatcctgagtggctcactacacgggtcacagagttgcaggacatttggaaaccaggctcatgaaagaagcaaaaccagaaccatatcagaggaacatctgatcaagaccactccccactgacactggaccttggagaaagtcaccctagtaccctggaaatcaaagctgacacagtggcagccaccactagaacgaggtctccacttcccctgtaagtatatgtatggtaacctttaataacatcagtgtcttcctcaaattgtcatgccaaaagttaattactatttatttagccaggaagagcttaaagagcttaattttcccagtagtttgtggcaaactatcaatcacctggattgattttaaagacataaaagcaatgtgaatttcaggccaggcaggtggctcacgcctgtaatcccagcactttgggaggatgaggtgggcagatcacaaggtaacagattgagaccatcctggccaacatggcgaaatcccgtctctactaaaaatacaaaattagctgggtgtggtggtgcgcacctgtagtcctaattacttgggaggctgaggcagggaatcgcttgaacctgggaggcagagttgcagtgagctgagattgcaccactgcactccgcctggcaacagagcaagactctgtctttaaaaaaaaaaaaaaaaaggcaatgtgaatttaaggaagttggcaaaccatgccccaagcatcaaacataagtttttatttcttttatacaacgcacctttctaatgggtgtttgccaagaggggcccataccaggtgaatgcaagtgatggcccaaactcctcgtgttccagttgggaaaagtagcaagcttacaatgtggatccctaaagtgttcacagtacatggaattctccctctctgagatgtcaagtttcctaactctggtgcatattaatgtaacctgggaagcttttaaaattttcgatgcctgggtccttattgacacaattaaactggaacctatggtgataagatcggggtatggttttacggattgtttaattctggtttttggttttttttttttaaaaaaaaaaaaactgtccagagattttactgagagccaaggttgaaaagctcatccttgccaaatcctggctttcccccttcaactctatgtgtaggatactaattcaaggcaatggctgaagtgccttccctaacccctgacttccttgctccttcccaaatgcacagctcaagggaattcccttctcctcacctctggagcaatctggagctaaacagaaaggatacctacacattagagagagtcttggaaatctcataatcccagtcaaaaggcaccacccaggtgagacaggaagtgtgaacagggagaacatttttttgccctgaagttggggaactagagagtaaatggaacttgtgttttgctttccatatggaattactgcagcaacagcttaatgagcatcgcccctgccccaagacgggatccagaggactctgtgaggtggcaggttcaagcatgtaaggactctgaaagtccccgagacctctccaacagcccagagaagatctagaaattccaactcgttatgagctgacagaaaggctgatgtgctgcggaggggttggtaccgggaccttggatcagaggctttgcagggttgggtccatgaggggtcaaagagaaacagttatgtctcaacgaggatgcagtgcatgagtggggcttggtaaaaacccatgtagtgaataaagggcttcactaataaattctcttattaatcccaaactgtaggcacatccaagattctgtgatcatgttcgtgtgtttggctcttcccctgaaaaattagctctgtttggctttgcttccaatagtaagtgttccagtttgaaacatggcatttcatggttcggctggtctcctagggtctggttttactaacaattttctgaaagggaggcagttaaaaaaaagaaagctctcaaaaacagtagtctactcaatataagcagctcttcccaagagaagtcaattctctttgaagttacactccactaacacttaaaggaatagaagccaaggaggaaaagaactaatatttactaagctcctccaaagtgccaggcactttacacatgctcactctcctaatagcctattattctcattcaaggtggggtaactgaagcaaagaaccattcatgtactttgctaagttcacacaacttgttggaatgcaatccacatctgtgtgagtataaactcctgctttttcagcttcaccaagatccctcttttttttttttttttttttgagacggagttcgctctgtctcccaggctggagtgcagtggtgcgatcttggctcactgcaacctctgctcccttccttttattggggcactatagtatatgaaatagatcatcaagaagtaattgagttcttccagaatttcctgaacaatgaaattaacaagcactgttggtaaataataaaaatctggattaatttgaaaaaaaaaaaaaagtactagaatgtttctattcaggccgcacctgaaatgtgctacttatactaattaaaaatcctcaggcaagagacaactgtgcccaattttaagttttttgttttgttttgttttttcgttttgttaattgttgaccacgtcctgagttcgagcgaatcctctgggtgtttaataggaaacagataatttctttctgaacctagcctaccaaagaaatccaaaagcgtgacgaagtgtgtgctctcccccttcccctcatggaattaatttgtaggaccacctggccagtgaggcacccagataggaaacttttaatttgcgtcaacgaggtgctttatctgaataaaacccagccagagccagagcgaaggggagagagagaattctgaccagaagaacaggagaagcagggagggaagtgaccttaagaacacacacggcccggcatcccaccccaccagagtctttaacccaaagcctctgggtttctctagcagctatggcaggtgccctcctcagcccgagccagctgcccgccccaccccgccttttggcctcgcgcggcgtcggtggcctgcaggactggcaggcatccaggcgccaggcggagcgctgagggagctcccgccggccgaacagcggggagacccgtgaagcaggcgcaccggccacgcgcccgggggacagggacagggaccggcaggggtgggcccgccgccaacccgccgggcaccccgcgactcgggcctagccagcgactccccccgcccttcccgcgccctgtctcgcgccccgtcgcttcctcccgcgccccgtcgccttcctcccgcgccccgtctccctcctcccgtgccccgctccctcctcccgtgccccaggccctcagccccccacttgacgggcgcagggaaggggcggtgccgcgctctcctcccggcccgcagtcccctacccgcggctcgagcgcgctgtaccggggttctggggccgccctcacccttgcgccgccgccaccaccactgccgccggcctagtcccccaggaccgaaagtgaaagtggagcccggggagcggcaggctggcgctgagcggccttcggcccgagccctagcggcaggcggggaagcccctggctaaggcgggagctggggaagggtaaacgggagtggggccgagcgagggaagccgcaactcccaggaagggaattggtaatgagcgctgcacgccggggaagctgcgaggttgcgatgtgggggatcaggcgtaggagtgcacgcctttctgaacgcggatccgtgtgtgtgtgtgtgtgtgtgtgtgtgtgtgtggtgtgtgtgtgtgtgtgtgtgtgtgttgagatgctttttgtttttgtcttttttttttttcactgtttagcgttgcgagggttaggggcatgcaggaaagggccggtgctcaagttgggaccgaagccaggcaggcgctgacaagtccaccaagcctagacgcgttcgacgcccattgactcgctgggtgtccgtcatctcgccactgccagtgggctgagagctcttggcccgcccggaaagaaacatgaacccagtactctgtcgtggcaaagtgccgcaccttctggggcttggtagagaatgactacagtgggagatgctgtagaggaggaaggtgggttagaggtggccccaggactttcctgcactaccaagggccactgtaccccaaggattagctgcttcccgcacaacacgttccctctgatttttcaaagtaaatgaccatttcttcactccccttagaacattaaagctgaataaaatggccaaaaagaccatctttaaacagttgaggctaaatgaggtacaagtcaagaaaacacaaacattaaaacaccaaatgctacaagtttattaccgaaaatggtcccgatccagaccccaagagagggttcttggattttgcgcaagaaagaatttgagggagtccatggagtaaagtgaaagcaagtaattaagaaactaaaggaataaaagaatggcactcataggcagagcacccccaagggctgttggttgtccatttttagggttatttcttgttatatgctaagcgggggaaattattcatgcctcccctttttagaccatatagggtagctcccgacgttgcagtggcatttgtaaactgtcatggagctggtgagaccgtagcagtgagaccagaggacactctcattgccatcctggttttggtgggttttggccagcttccttacgcaacctgttttatcagcaaggtctttatgacctgtgtcttgtgcctaccttctatctcttctgtgacttagaatgtctaacctcctgggagtgtagcccagtaggtctcagccttatttacccagctcctattcaagatggagttgctctggttcaaacgtctctgataatttggtagtggaccatggtcctagtgggaacaggacccttttcatgcggttctcagactttcttccccacttctttattggccttcttccctttgagaactggggattccaagtcactgcaacatatttctctttttttttcaatattatgtttcctttttaaaaatataatgtttcatactgctattatctctagtcaaggacattttataatataaagattaacaccctgttccaagactaactacggtgggatccagggaagtttttttcactaaaattcaacaagaaatgaggacttgagatctggtaatttctgcatgttcagaatttgacaggaggtatcaatggatagcgtgtgcctccaagacctccagacatctcggagtgctcccagtttactcaagatgagacctcttgtccagtaaatgtatgcatttctttgcttttatatttatatttttgaatatgatggtttcctttggcttctagtaaagtttttttgtttttgtttttgttttttgtttatgtgtcttttaaatacatattgaaagtccagctggcagaactgaatgcacccaacaggctggaggttatacagaagacagctgaggagacaaacagggcaatgccctgaatggatgtgggcagaaagagctgaagtgtaggcgaggagagagctgacaccaccacccgctccacgccgtttccccaaagctcaccctgactcagactttagcctgtcgccctggccgtgatttcgtctttagagtgaagtgcactacaaagagcgataagtcagaggatttggcagcattcacttctagtttcaagccctagcagggatgtagaggacacagaccttggagtaaggactttaaggagtcctagtctagagcctgtgagatcaaaacagcacattaccgagcttagaaatggttagaaggaaggaacagagagaaagggtacctaggtttattgattccctaccaactgttagatactgttaatgctagctatgtgtgcatgtgtgtgtttataatttgatctcttcagcaaccctgtaattagatattatgctttatagatgagaaaaatgagacaggtcggcaacttgctcagagtcaagagaaaacacacactaattctactcacattgcattggccagaacaaggaggggttggtaacactaatattgtataccatatagtgtaggagggctggttggccggttgagcccatccttgcagaggcttctcagtgtccttagtcccagaggtgagccagaggaatgaggagaattcaggcctaggccaatgaaatacataccactttgagctattactgatctacttaaaaaatttgaattctagatattgtcaagtgatgttcaattttgctgtaattgattgattcagttcgctttcattagcttttagtcaattaatgtcagcgtttggctcatttcttctgttttgctccaaagctgctcctattttaatcatattaccactctcctttttgatgtaaaatctcatcagaatcatggtgtagaaaacagacaaaagcaggcctgctcttattaaacagggcagctcacccagtcagccttgcccactgctatccggcccttccacacacattgtggtccttgagatcttccataggctcccagggccttagaacttaatttttttaaatgccaatttaaaaaaaataataatgcccctcattcttgatattcttgataaagaggatgacttttttccccctcttgccaagttgcagagcaggcttgcttaacaaaagcaataccatcttattaataatcagaacagggaagacggtacagatgccatgttaaagactgttccaaaacaggccactgagctctatcaaataataaagtcctctgaaatgtggcagcttgaaagcatttacatatagtctattcatgggatcctcacattgtacttatgcaggtggctagtagctccatttttctagaatgggaaacaggattagagatgtgaagtgacctaccaggggccaccacatggaaaaagcctgtttaaagtgaagccagttcaaaggacagcagggctgacagagacagagaatacctccacaaagccctcagctccagctgtcctgagcaaatcctgtccttagaccttccattcaagagaccaatgctttcctttttgatttagccagttggagtcagtcttcagagagagtcctgtataccatacaacagagcactatgggagcgagcaatgtatgccagattctgtaggaacaaccaagcaagttgagtgaccacagctgcccttgaacttctagaattgtggatcctgaagaaattctaggtgccacgaggactgatcacatgtttcccattttccctccctcaggcatttattcacaagatactgctgtctaaggtaacctgagcatgtttccagttcttgcagccttacgaacccagggaatccacctgtctccaaccttcctcagtaggtgacaggcccatctaactctctctagccagtcttctgtattcctgttgcttttacctttgctcgtgtcaacaaggagtaagtcaccatgacatatttcttaaatttgtatttctttcatcactaatgagactgaactatgcactgaacatatgttaattagccgtttttgctttgtgttttctcttttgagaatttatgtttatgtttcttgtccatttatctactggagaatcacaattcagttatataaaaatatctatgacacacaagagaaagcaatgaaatttctttaaaatgcaaagtgtcatagtcgtaaagctctactatttcaaagaaaacccacaaatgtgtctggataaatcatgtcaattcttaaaaacccagatctatacccgttatggtgagttgtttgaaatatcagaatttactaatattgtcaatatgaacagattaaagcaaacctttgtttaggaggctttattttatttaggctccctctgccacagctatttcacaaagaaagaatgaattatccagccaggagtgaaatgatctttgcatatgcctaaaggaatgataaaaatattgggatgaaaaatatgtagattgtttattgttattttttgagggaccatggtgttatgctactaactgtcttgccttagcataatgaatatctgttgcaataactaaacatgggaaaaataacttttcaaaaccttagttctagaaggttaatggattttattatattgaaattaaatgagctatgatacaaaggagaaaggaaagaaacgaataactttctcaatgaagttctgtaaagtatatacaattggggccgaaaagagaaactcatttatgctcatccatacatggcagtgtgaaattgacagagtttgcttaagtgaagtctgtggttctaggaatgcttgcaatttattggaaaattagattgtgatatggaagaaatgactcaagtggtcttcaggccaccacagcctttcttttttttctttccaacccttcctaagagacagttctccttatctcatttaaacttatgggtttgaactaagggtgggaagtggaagaaagagacattatcttacccctataaacctacaacactcccttgctaccctggtgcttaggaatgctgactttatctgtccttaagaagctgtctggaccatagaggaatgcttggttttatttacaaagctgtctaaaggatgaacaaatgaagtgtttagggccctttgagacaaagaaatactagctatcaaattgaagagaagggcaacaggttaggataaacattttaaaatgcaagataatctctaagcctttgaaaaattttaagagtagtctataggcaggtttagggaaataattaaaatgacctctaggccaggcgcggtggctcacgctgcaatcccagcactttgggaggccaaggcaggaagatcatgagggcaggagatcgagacgtcctggccaacatggtgaaaccctagctctactaaaatacaaaaaattagcctggcaggtggtacgtgcctgtagtcccagttacttgggaggctgaggcaggggaatcccttgaaccaggaggcggaggttgcagtgaaccaagattgtgccactgcactccagcctggcgacaagcaagactccatctcaaaaaaaaaaaaaaaaaaaaaaaaaaaagcctggactgcctgctaaggcatcttcatacacgaggaagataaacaccttaccttacttgtttaacaaactgtgttagcattctgttatatctagctaaaagaaattctaaaagatagccttacagatcaagcataaagagctaaatcatttcaaatatgtgttctcgtgttataatgtttttttagtgaaccaactgttatggtatttgtttaggaagttttccttgtcactttttactatcttgtctagaaaatggcccatttccttcctttggaggaaaagtgtctcttattgttaattttattagtatctattattgtgtatcaataatacgaacatatcaacttaaaacaacacatttattaatcacagtttctgtgggttggtagtttctgtgggctgcaatcaagatgatgactggagctcagtctcacctgaggcccagcagaagggaaggatctgcttccaagctcacatcattgttcagcattccgttcctcattgactatcggattgagaacctcagtgttttgctgactgtttctggaggctgctctcagatatgactagttccttgccatatcctatgggttagaagcaagcacaggtttctctcacactaaaagaaaggaaattatgcaagagaatgaataccaggaggaaggatcatgggggcaacttagattacgtctgccacactaatgttactgcacattgaagtatttctactattataatcttaggattggcatagtctgtgtttttgaggcagggaaggaacatatatcaaaaaaataactggtgagtggataattgggaagaaattacagaagtgactgattctagagactagaaagatttggttcttcattgagctgaaaataggaatatctcccaataagagatattcatgagaaatcaatgatagcttttttcctgatggaaaaatgaattagttatgctcatcagaagtgatgccaaattcaggagaaagaaggcagctgacatcctgaccacaaagagaccaagccccgataactggatttgaacatcggtgaagaagatgattaaaggagaaagagcctttacagtctagagaaaatagtataggcccaatggaagctcaaagttgagagacttttaacagaaagacaaaggaaaaggtgtccttgggactaggggtccgagcaagcctgaattataaactgagcagccacagagaagcactacagatgtagctgagttatctagcctaacaccaaatattctagaaagacccaaagtactaaccagctctggcagcaagaccacccatgtctacctctgcagaactttgagaatctttggctgatttttattacctaactcctgtccataagagaagggaaagagaccaagactgagtggttggatcagccaaagatgtcaaattaaacttcagttaaattagcaagaattctgggcttttctgtttctgtagcattgtgtagatttgtttttttccttggttttccagtcctggtggtagattgctaaacttttataaatctgtgtgagtttagcattctgactgttcccattctaaaagatgaaaatagaaaactcaagtttatgtcactaatttgatctttgtaaatgcactgctaaataaaacacccaaactataaggtgttgttgttgttgttgttgtttgttttgtttttttttttttttttttttgagagggattttgctcttgttgcccgggctggagtgcaatggtgtgatctcggctcacagcaactctgcctcccatgttcaagcgattctcctgcctcagcctcctgagtagctgggattacggcatgcgccaccacatccggctaatttttgtacttttagtagagatggggtttcttcggttggtcaggctggtcttgaactcctgacctcaaattatccacccacctcggcctcccaagtgctgggattacagacacactcagccattaaggtgtttttaattcttttttttctttctgtttttgtaagcagtaatttattaacagatgcaataagtaaattgaagcaaaaaaatcatcacaatgcttaagaaacttgcttaacagaaaaaagattcctgagccacactctgaaaattctgatactgtaaatcttgagagataaatagacacatatatgtatgtgtggatagaggatggatggatagataaatggaaagatagagatcgagatatagcctaaacttcatggcagtataagctacttttgggaatttaggggaataaaaaattattttatcactgttgtactggaacaaagcagattttccacactttagccagaaaatgtaggagaatcagtgaacctcaagggccagcactaaaaactgggcagcatcagtatcagttttggatcctagaaaaactatggagatgatgcaaacagaagagggaagaaaggtagacagagtctggactcagctgcagttgttgatgactatctgaatcgttcccttgcattctttcttaacgaattataaatgtgaaattgcacacttgaaaattaaaatatgggtatgtactggagggaaagcactgagagaggattaggggctggataggcagatagagatggagggtctagggagaagggacagaaaggaacatgttcacaggaacaactgcaggacagcacctaccccgcctctgcagctaacaggaagaatgtggttaagaacttgcccttatgccaggatgttgctcagcagggacggtctcaacttggcacaggtgcaacaaatcaacctaaatgtccttaatttgacccagctcactataatgcattaacataacattagcgttgtggttttaggcacctcccaccatgggtttcacttaggcttcaaccagttggagtcactttggtcaaccttaggcatgcgtagatgtagtaccccagggggaattttatccctcccatgtgggcaaaacccacagaagacttcctggcttctgccactaaaagacacagaacacagacaccttactggcaacctgctttcaggacccctctcttcgtgagagctttccttttgcttaataaattttactctgccctactcaccctccatgtctgttgcctattttgcagttgtgagataagaccccggacctcaccaaactccaggggcaaaagagactgctacagcaccagagtggccattctgctcgtgagttttggactatacattctcattggcaaaacagaggaactgtatagtaaggaattaataagtgttcattgtttagagagtcaaactctaagcagaaaggaggattacatcaactaggacacttttgaaagagaaagtaatggtaacctaaagacttggggttggagggacgggcaaccagcataaatcaagtctcccctgggcaaagccagggaacacagaaagccattcctgctaggcagtcccagggcacagagcggatagagaagggtgaggagtggacctataggggccaatggaagacctccagcctcagctgttgaaccacagcaggtgtttcctatgggtctaactaaccaagcatcagttagcaacttgatcatctaattcacctgctcatcaaagcaataaataatgccaacctcatttcatgtttgtatccatgcaattacaaataagaaaaagaaaaataacacaatcaaaaagatcaatgaattttaaaaactaatttctatgttgtgtcagggttcaatggcagagcacagaatcactagctatttaatcagaaaaggatttattgcaggctattacatgacttacataatcattgggaggcttaaaaaatacactagactgagcttccagaaacaaatcgcaaaaccacaatgtagacttggccaccagtgaaactgcttctcttgccatgatccaggagccatctgctaaattggcagcctctgccacaattgctggctccagaaccataccatgtgtgccacaatctttcccacaaaatgaatagcccaagagctgcctgtctccctaccgaactcaattccaaattcaagctcccaccagtgctactgtttggcagagcctaaagcacatctagaatctaggagcaagggtctggaaaataaagtgtttgctttcctgactctgcagtggtgtgagaaattctgaaaacgtttggaagagatgctgagtgagccagtcccaatatctgcaataaatattaaactgtatgaggttgaacaaataaaaaagaaataaagcaatcatgaggaagcctcaagtaatattgttgtaattaagaacaaaaaataataattgaggtaccaatcgtagatttagattatgaaaacacggggcacttgggagtgagatgaatatttaacattgtgacagaagcatattgccaaaatcaagttatcatttggtatatttggaatgtctccaggggctttaaaacccttttgccgctcaacacgcctccctttcctcctgtaaatgaataatcacactgctcaggctcagtctagatgaacacaacacctccactctctggccaccgcgatgaggccaagggcaaagccagtcaagcagactcccagcccaggattgttctggctgaagctaacagggaagcctctttttttttttcctttatgttcccagcactatataaatatggccctagagttaatggctaagttccgctatgggtgatggctgagagaataaccccaaagaagaaagaaaaggaggctaagcttagaggcttttttgttgtgcaggttttctgagttcatccttaattaaggcctgggactactctttcctccagctttcttcaacgcccgaggcattcagaatccatgccataaatcctcctcttggataaagatagttttattgcggtgagaatcagtagcgtttaattttaagagttgaataaacaaaccacagtctcaatcttataacctgctattccactattcacttaaaggaagtagtgtcttttgtgttccatgagaaaagtgacatttctttgctttcccatacattgagtcaacctaaattccaatgaagccaaacctgaactgcatttatttatttatttatttattatttatttatttatttatttatttttgagacggcgtctcgctctgtcaccaaggctggatgcaatggcatgatctcagctcactgcaacctccgccttccaggttcaagcgattctccgcctcagcctcccaagtagctgggactacaggcacccaccaccacgcccggttaattttatatttttaatagagacggggtttcaacacgttggccaggatggtctcaatctcttgactcgtgatccgcccgcctcagcctcccaatgtgctgggattccaggcgtgagccaccacgccggcttgaactgcattttctaaccaactgactttatttcagtgattttgtaacatcaccaatttcaggtaagtactctctaagaacagcttcatttgtcagaagcctcatggacagcgctaccaccatatcatcatgttttcatcctacagacaatcatcagcggtgtagactggtagttccagctatttcactaacaatggggaagaaccaaagaaaaattgctgtgagaggagaaggcaggagagcctgtggctccagaggggtgtgtgtgtttgtgtatgtgtgtttgtgttgtgtgagggagagagagaaaataaaatgttttctaccaacaaaactcaggtgtgtttctttacttgccttgaagcttcttcaaaacttgttatactgtaagtttgaaaaaccaaacattttcctaggattgtttttttacgtactaaggaccagatcagatcagcaattagaagtagacatacaaaataatcaccctcaaggaaggtttaaattagggatgaatttccagtattgcatggatctttccaagcaccctgcatattcagcacagtattctagtattttgtgagtgagtcattatttcttaggacatcatcaaaagattgagcgtgtaatagacttcaagcacctaggatttaatatttacaattttgactatttgggtgtgacctgaaggtctagcacttgggtgtttataattttgccgagacgtaggttagagttacatgaacagatgcaagagaaggagtacttcacccatatgtgggccaatgactcagaatccacatcccaacccaattctgttgtttccatttgccatcacaggcatattcactttctcaagtgataaaatctcaacggaaacagaaaaaaagctttaaaatttcatga

SEQ ID NO: 2885 - DNA, 100000 bp, Homo sapiens
agtatttttcccccaccccccaagtacagtagctggcagggaaaaggcgccaaaatacaaagattaactctgactttctttgaacggatcttatagcaccatccttgtaactttaactccaataggcgggaaaaagttaacttttgatcccacacttgaacagacatttaaatcagcctaaaatggaataagtccagaaagtaacacacgcatgcttatgtggttagaaaagaatgacgtgtaaataagcagggtgtatgtgtgtatatgactgaggagttcaagatttaatcaaatcagaattagtgtgactttccagtgtatttacaatatgaagaaaagcattgtgaggcaagaaactgacctttaagcatcctaagtaaaaactgcaaagagtttgtgaaacacaaaacttgtggtttccagttttacatttgaggtttgatgttttcatttaatggtatgagagatgagaaagctctagcgctgaaaagtccctattaaatcatatgtgggcaaaggtcaagcactcaactcactgacgcaatatactacagattcctgcctaagtgatgaggaacacaggaaaagtactttggcaataaaattattagaacagtaattatcatcggtggttgggactgcattctgtgcactgggaaaacgtttttactggccctgatgaattttaaagccaagtattgttgaagctattttaataggaaattgattagctgagtgttccatacaagaaatggtgacggtttattgtttgaggtccaaaataaatttttattctttagcagacataggcatccctttaatttaatatggtcagactgaacagcagcataattttgagtgaatgtgatgtcatgaacatcttaactttgtttttggagtttttgacattacacaatttgataatattactgctttgaaattattggcttgtgtagttaaaatttcagatacactcagagataaagtttactgaacatatttttgtttaggcccaattgtttgtgttttttctttgtaattacaaaattgtttcttaaatttaatttgaaaattaaaatgcacaattctgttgttatgcattgctttgactttgaaatttgttgttatgcattgttatgcagttttcaaagaagaaatgagagaaaggggtgcagaagtttgagttgctctgccatgcactttttatacttaatacagaatgtaaagactacttagcattttggacagagctttctatacctgtcttaaaaacccatctgttttcctatgttacaggcatgtgtatatgggtaatagaagccagtttacctgtagaaataaaatggtcatatagtttactttataggtcagctattttgaaaaagagcaataactgcaactctctcaatatcacagacaagagacactgtgtgagagagtatatggaacctttgtaacattgtggataagtgggcaactattacctctattttcaaagtttaaaatacatcatgcaaaagttacagggcaatgctgactttgtaatctgtgaagcaagtgtcttacagtgttgggaatctctgttgatgcctggcctcatctctgttgagaagtgaaaaccggataaccttagtggaggaatctggctcgttggtgttgagatcagaactgtattataacttgtaaatatgctagaaatgtagacacattagtgggatgctttttttttttttttaaacagtggagtagaggcatttcggcagtgacttattaacagcgtcatttttctcatttacttttgtcctcaggggacaccaaatagctccagaggaggagaaaaaggtccaaggttatttattcatttcagtgcaaagggctagcaatggggtggggaaactaaccagttgtgaattctctggtggggaaaaaattactaccctaattgacagtagtacgttaagggctgggtatgattttgttttttgtttaagagtagtagacagagtagtagtactcagtagtagtttaagagctgggtaatttgattacctgagctggtaaattgattttgcaattctcatcaagtacaggcactttcaatacttcttgattgtttatatagcatttatgagtggatttttggtgttcctccttgtggatataaatttgtgttttccagatacacatgtatgatttttgtggttcatttggaaaaaggaaagatcccagggcatggtgcgtagatacttgcagttttgcaggcctgctttctggggtcaggaggtcatctgtctctttgcatttagtttttaaatattgatattggtgatgcagccagggtgtgtagaatagttgaacttcttgcaaaccacatgcaagagccaaaaaaaaaaaaaaaaaaaaaaaaaaggcatcggtgtattggaaatgacagctttgttaagttccaagaaatctttcatgaaactgcccaggtttgcaacctgtcgctgcaatttctttaggaaggaaaaggttaaaagaaaaacaatattgatacttgagatgtcaagctcctctctggagatccgtagtgaaaggctcaaatgtggtacgttgcttatttcaaatatacaactgggttttgaaaaatccagtgagctgaagcactggattctatttagaaatcaataaactttctgttagttagaaaggaaacttttttttttccctataaggcagcaaggagatctagggaggagatctttaagaatactgaaataacagagttcctgttgctgagagaatcattcacttctttctgcctcctcagccaggttttggggtgaagaaagtggcctgtcacaccagtgcttttaaccctctcagtgtgggagggagagatgaaggtttaggattggtaagtaccaaagtttaagaagtgtttggcccattttgatactatcagagcttttcagagatatttccactcttaataccacgacacagacgtgctagaaaaaatggaagtgaatacaatgcaggcactttctcagttcctccttctacctgggatttaaaagattagattttcaaaccaaaggtggtggacaagtgttgtgttaagagaagccaggcatcccatcaccgaaatccaccagtccctctttccaaacaactccctagagttcttccagggaaggctgcaatgaccttggcattggctggacaagaagaagtgttttggggggtgtcagccattcccacatggctgcaaggcctgagaagacagtcaaagccatagaaactgagcacccccataaccttctttttcaggaagtctctgttgctcactcttcattcctttttggttttcctcgctcaccatactcctatctcattttcctttttctgggaaacaaatcaaaaccaaaaactataagcatcctctatggtcatcaaagtgcaaccagccataagcaccctcaaacgtggggcattgaaagagatttgaacccctaagtgatgggcctgggaggccccagacgtcttcacttcctggggtcttacctggatctgacgctgcttcttcgcccttggtgttgctgaagcttttggggctcttctgtgtaatacttgtcaatttttcgtttttcttttttaagcttgtgaaaaattttggatgcaacctagttttggtggcagaaggaaatggtttctgttgggaaagggaaataataaagggaggaggggtagcgatgtcgggagacacttgcccagggctcagccctgggctctttttgccaggggacaacggctggttctgggctctcaggctgaaaggagtgctctcgggtgccaggatttcactgggggtggtgtggtgaggagggagggaagaagggagggaggagagaaggagagatgggcgctcgatttttaaagagaccccgaaataatggcttctatgaagtccaggcattcaaagaggtgtgttcaaggatattagtgcattcctgccaaggggaattcttttatggtaaattaactccagttaaattgaatatttgttcaaagggaaactgcagtgttaaagctggtattatcagtagagcttccccaccccctcccctcagaatctggtgaggtgagaaaggggatgcagtgtaatgtgcaatacaaagtgatgctttcgtgctggtggttttctgtgtgtgtgtgtctgtgtgtgtttaatctaagatgaggttgcctaaaatttctgaggaaatgagtatttacttggattaaccctgtcacctcatttctttcatccataaagactgcaactttatcccagcttttcaaaaagaagaaatgacccgcacaaaggaaattaacgttgcagaacgctgactccaggatttgccggggcaggggcggggaccgcagggaggccgctccagggcgtgtggccgaaagggttaactcgcaggggtccgcgcgatctccccgactttaccgtcttcctagtcccagcagcccccgtccccggcctcccgaactccccaccccccagcgctttcttctttgggctctgggtttacgggggctgcagctggtaaacttggcaagctcgcccattaagagcgctctttgaaaacggactgtgtttgagcatttccctaatgaggacaggaggggttaaaaagtgaccatttcatggttgacttgaacctgcctacttttcttgatgtgtgttgtgaaatgcttgatgtggataactcccacttggtgaaggaaaaagtcactggttccccaggtccgctgggggagggaagaggggacggtggacagaaaccagagggagtgagagggctaaagttgaggggacagatcacgagctgggaagcggtggaaagaggaccggggaatcggggcgagcctcgaaacgccccagcagtacccgtggaagcggggcggccccgccctgggatgggcccgcgaggacccggtagccccagcgccccccggatcccccagctaggtagactggagccccaggcgctcacttttcctccctccattgtctgggaggcctttgcttccccctgtccccatccaccccaagcagaaaactggatttggggggcggtgtgtgtatgtgggcgggggtgcagaaagggtgcaaggcgaaccgccttcttcaaaatccctggaatcaagttcatcactcggagcctgcacgggcgacggggtgggggcggggcagcgccgcggtggggagccgcgcgggcgccgagcggctcagggcccgcagcctctggagggctgcagcggcgcgcgcgccccgccggcccgccccgcagccccgggcgcgccgcggccccgccccgcctgcacccggggggtagggagacgctttccgccggcgccccgggccccggggggtggggattgggagccaccagcggggctgcaggaggaggaggaggagagcgaagccgggcgcggggaggaggtggaggagcaagaggcggcggcggcggctcggcccggtcctcccgctcagagcgaggccacgtcacggggcacccccggggagggcggcaaaccgcggcgaagcgccgcgcgccgcgactgctcgggtgcgggcccctggtgggcagacccgggacgaacccgcaccccctccctatccgcaacccgggctccgggcggggccgtcgggggctgggcgccgcacccccctggtccacgccgcgcgccccaactacttgagcccaagttcgctcaggtccccgcctgctcggcctccccctttcccggcagccgcaggctccgcggactgagcccgccccgggtgcgagtgtccgcgcccagccccggcctgggggcggcctgggtgtgagggaattttccactcgttcctttctcggctcagacggtttcggtgcttctcccactcggatgttcccgcggcttaaaagagtccgcacgagcaccgaaatacctcttccagggcgggttttcgggggtgtgtatgtgtgtgctggttggggagggcagcggaaagaagagctattttggaaaaaaaaaaaaagtcatggttctgtgcaccggtaggatacctttaacaaatgagggagaggtggggggagagaaggagaaggagaggaggaggaaggtgggggggcggggggtgtggagaggctggtgcaaaaggaatgcgcgttgcaggaggaggagtaaagcgatgattgtgtaattaaataataaaacaatccttaagttgatttggagagagctcgagcggggtccagagggtggaaccggtgaatttttcaacttcaagttttgcaacgaaagaaagcaagagagggagggaaaaaaaagagcctagagcagaaagagaggagtttggagccgagcgggagagcgggatttatcgtttggaatttttcaggagacgttttgatacccctgggctctgggcagcggcggcaacagcagcctccacgctcggccggtcagacgcggggcgaggcgggcgggcgggcggccgggcgccgaagacccggcgcgggcgcggcggctgctgctgccggggaccacgcgccgcgagcctcttccgccccagagatcaggctcgcgccccctccctcaccccggcctctcccttctcccccatcccaccccgcccccacccggccctctcccgcgcgcgccccgccacccgcgcgcactcgctcacgctgcccctcggcacacacatggtcggctcgcggcaaagtttcgcctgcgatcaccactccgggatcctgcgcagtgcttggggctgtaaccttgaactttcccagcgcggtgacacattctccccgcttccctcccgcccgcccgctcgccctcctgcgccctcccgcgcccccctccccgcctttttgaaaaagcattttaccaccaaccaccaccccaatccaacccacaccgaaccttcgcgcccccctacaccccaacaacaacaacaactgcaaaatagaaaacaaatccccaaacccagcgaaaagcagccaacaccggcggcggcggcggcctcggcaagcacggccagcgcgctcgactgcaagagggttaaaagtgtagattggatttcacccctggaaatctagcacgccgaggaacttgaatctttggctatttaaggaggactgggtttgttgtgaagttgcggtgatccgcgcagagccccgtcctgattgatcgcatcgcggggctcagatgactgtaaaatgaataatgaaattcttgcttctcgaagattttcttgggcatctcccggaaagtgcgttttaagggaagtcatgatgtattctcccatctgtctcactcaggtacatgtctcggtcgctttctcagctttctctctggcccgaaatgcctttgttttgttttgttgcggacaattagcggcttagttaacctccgcacatccccgtcccttggagaagtggcccggagttgcagcgggcgtccggggcggcgtgggagccgggagcggcccctcgccacggccactgcgagcgcccagcccgcgccctgggcacggagcgcgggcgctgggccgggcaaggccgccggggggtgggcaggccgggacctgtaagtgcgaggccccgtgcggcccctcaagtgcccgttgtggtgcggcaccccgcccggggtgcccgtagcccctctcagcagctcgcgcgttgaggtggactcgggcttggaggactttacgggggactaagcttttaaaaacagccagtgaacttgggcgaggggctgtagcacgagtctgtgtgggcgccgctggactgcgctgcaggcggtgggcgggcgacaatcgagtcggaggttgtggtccggggacccattcctttgctttatttggggatctgaaccctggtccatagtgacctgctgcactttggggtttctagtgaccgcaccacaaaggcatatttacgttgacacgagttagttggtcttggtgattgttaaggagtttttagaacgtgtccttttgtggaaacctgttcatttgacgatatttgggcgtagctcgtaaggcattttagtaatgctggtagaagtaaggtcatttttttcgactttgagaattgtcctaagaccttagaataatgttatgaaataaaacactggttttatactttttagaaacacgatttgtatcatttaagccagacggtcaaatagaaaagcggcgagacccaacagacttacctgggggcagtttcatcgctgcccagggaactaacaactgacaaagtaactaaaatatcttagcccagactgttatttgaggcagtattttaaacctctaaaggtatggggcagcttatttcagctttcggaagatgtgtcaccattggtaattgataactattttctttgacattgccatgaaaacagtcatataaagaagtgtcagccagtcttgggcgtgttaaaattttaaaaacatctaattcacgatgatgcatttttataatggacaaataattaagatttcaattgtatgacaattaaagccattgtgattcaaaaggactgaggcattcataaattgtgaatgaagatgaaaacatgataaggcttattcagtgattggatacagtcctgtagctttttggctgacacatttttattgtttatattttgtttggcatctgagtatgattaacttagatatggctattttcagcagtaaacacgcactttaatttaacaaaactggaaaaatgagttgctgagctatttgtatttaaaagccatgaatgataatagccaataaatatgatgaaactgtttcaggtataacgattgcctttacttgtaaaagttaccattaatattacccatcggctggatatatttttctcttctgataagctgtgttaacttgatattatttttacaccgtgatcaaataaaacaaatcaagcaagattttcacttacagagtatagcatcacttattctcacctgtaaaagattgaaaattgtgcatttctctatatttctaacatcagcttttcagaaacattgctagcaattacttgcatttttagtatcctccaaatatgtattgaaaagtcactagttttatcttaatttggtaagttaaagataatattgcagcattgagacagggaatgttgggatcatatacagcatatcattcagctatcacattagtattcagagatacacacttaacaacaataacttgtgatactaatattctctactattttaataatataaatctaggcttatgtattaaaacaaggccacaccagggaaggaatttcagcttaagaattttcacttcactaagctccatgtgactttcaggtaatataggtgttataaaagtgaggccacattaatagtgtcacttttgtatcagacagtagttttgtatcacaagagcctagtagctgtagaaaaacatgtctcaggacatgtaattgcaaaatagagtatcattcttaattggttataaacttttaaaagtatctcaattgtgcaataaggtatctaggttttagaaaaaaaatcttaatttaaaaggacctaccattaaagttatgtttagcaaaatagtatgctacaaaatcagcatatcaataaccaatatttatacccagtataaatcagatataaaggaaaaattaagaactatcatatgatttaatatatgttaaaaataatgtaaaccattaataatataactttcaattggcatgatggcattaaatatattttctttcgttgcttttaagttctttaggtacattttttgcatgatttgttgttatatgcaatgcgccaagagcacctagtatttactcttctacctctatgttggtctaaattatcatccctttcatggaaacggaagaaaaataaatatgcctagtggaattaagactctttattttatatctgaaattggtaactttgttatttactttgtcaatttagttcaactaaaggagttttaaaagagaattactgaacatcaatgcattttactaaaaattctgaaagagcaaattgcctattacctttgtatacagttgtttggttttaaatcacttatatgttttgcttttttaaagaatttatgattgcttaatgctattgtaataatccactactagttaggatatttaaaaccttaatcaccttttaaaaaaatatttttgtatcaggacagttattatgttccatttcatgtcactcataatctttaagactctagtgttactcagcattaggaaacagtcacattgggagatgacatttaggcatgttaatacagaaatatatgcgacttacagcaaacctcatttacagtcatttttggaggatatgtccccttgtcaaataagtgcttcacttgaattccataatagtgaaaccctgaacgatatcaataaggcaaactggcagcctgagaaagtttgtacttttatttctcaaaaaaaagagcatgttttaaaacaatattggcagcattgacagcaagtcaaaggaacgtttaaaaactgtgtgcatttgctaagaattttcaaattcaaccttaaatttgaattttggttgtttaaaataactcattaaaattttgagctttcttgtgtgatgattatatttataatcaaatattgaaactcaaatttaatcaaaactgtgtttgatgtcttataagaaaatgaaatgtcactgaacatagtacttaaggtgtaagtacttacgtgttacacatggcttaatatttataaaataatattgcattttaaaaagcatggcaagggtaaaatagtgagacagagcccacccactccacctcatgtgctctttacattctcaaggttttagtttgtgagtgcatatatgtgtgttttttagtcatatcaataaatcgtagtaaaagattatggaagtgagtttccaaagcacatttaagtccacatttccttgagcaggctttccttttgatatattcctaaaggggataaacaaagtttttgtagttacagtgaaagctaaaagcatgcatcagaaagtgtatggagatagggaggtcttatcatgggatgtggttgctgtgagcaggctgccttcccacacaaagaacagattgtggtttaactctttccatggcctagtttaattgctcgcatagtaactgaattgttcaaatctctgctggaaactactgatcggtttaatgtttcctctatggcatttgggtatgcctcatgctgtgatgtaatcatcagcattctgtatgttataaaattttgattcatacttattctggtgaaggaacacttacagcaatgttagaaacttgataactacattattgattggatgggacatgtactccttccatatctgaagtgcaacagctaacatgttgcagtctgtagcattaaaacttcgaatttcttcttcaaaatgtatcatatctatattggatttttgacaccttctttgttaaagagtcattagttgtactttcacatatttacctaatggaattaattagtcagtctgctgttaaatagaatttattccacgtgttcagggtgattaacatgagtatgtaaattctaacttgggatacaatcagagagttatttgtcgttgggctgacagtatagtcaatatgatcagaaaagtggtggtggtggaagttccatttgcttcaaatcttggcttattgcgtacatgcggtgtgcatgtacaggacgttaagtctttctctttgaacagtaataggcctaagcttataagacaggttttacctaaatcaggagtaacgaaactgactgcactgggaagtaacttgaaatatctgtaggtaaagattatccccattcctcactgatcccctcccttaaaaaaagggcttggatgaaacaggcaggaaaaagcaggagcctaaaggtaaactacttaattcaaaagattggtactctataatctatgtattgcaaattcacatgcacatgcatatatgcacccacagttctaactgataattcatctactggcaaatgaattgtatagattccacaaaagcagtaactgaccagcagtgtcaccccacacagcatgcagagacacaaagaatgtaaagttggtgccaagttgccatttttcattgttacctcagattgatttttaagaggtttagaataattgctatactcatgtgatcggtgaacaattaacggactctgtggggctgcatattctatagggaagctgatggaagaacattcattaatttttgttttccagtttgaaaacttctatttaaaaatgcaagagtgtgtgtgagaagcaggagagtgcaagtgtgtgtgtgtgtgtgttgggagctggcgttggtagtgtggggaagaatgcactgctcaaagtatggaaaccttctgttcaggacactgatacgacgagctgttcctttgcccactttccctcactgtataccggtttctctagttaccacttttggaatgggctgtttcagtgttggaatgttggacgtttgataagaaaatggatcaagtttaatggcgatgctctttgtgccaccagcagcctcttgctgagagcatgctccaaaagcgggaactgttggcattacactgagcatctatatgctttgtgtttctgtgccacagagaagagaaatgactgtggcatcgctcctgccttctgaacagctctactccgattaaaaaaaaaaaatctcatgtgttctttgtaaaatggtactgcatagtgttagttggtcaatcaaatattgaaatacatattaggtgccaagcaccttagttagttgcctatattttaaagaatgtagaatgcatgcattggggtggaaacaagggggatggggccagagtgtaatacaaaatataaaccttattcctttataggagggagaattgacctgtgaattttggtggaaaggggacagctgggcatatttactttcttcttgtcctgttattttgataattttaaataagaaaggaatgttattttatgtataactttttgtactgaattggaaacgggttgtggtcttcttttcttattttttggcttttaaaattaaactgactatgcacatcttttcctcacccctctgtcttccacaggagaatttcacccattcatcgaggcacttcttccacatgtccgtgcaattgcctatacttgttcaacctgcaggctcgaaaacgcaagtactttaaaaagcatgagaagcgaatgtcaaagatgaagaaagagcagtcaaagatgagcttctcagtgaaaagcctgaaatcaaacagaatgggcatccaggctccttgccaaactgcgcaaagatattcgccaggagtatcgagaggatttgtgctcaccgtgactggcaagaagcacccgtgctgtgtcttatccaatcccgaccaaagggtaagattaggagaatcgactgcctgcgacaggcagacaaagtctggcgtctggactagtcatggtgatcctgttcaaaggcatccccttggaaagtaccgatggagagcggctatgaaatccccacattgcacaaacccagcactttgtgtccagccacatcatatcacagttcagttaaggagcttgatttgtttttggcatactacgtgcaggagcaaggtaggagcagttgttcttttttctagcacggcaaacaccgcccacaaatctccgtagacagagtatctgcttgagttagatggtcctcaaggcccctagatatcctccaccctctctgggtatagtaggtgtccgctttcactcacatgtccgctgccatgtgcgagccatgtaaatagacacagagtttcgtacctggataggcttggatatttaagaaagaccacaaagaggtgcgttttcaagatctttaaaataatactgtttttcaaagacatagggtagtctaacaaatatagttcattcactatactttctgtcgtaggctacatttttgcatctaatctagtaatcttttcctgattgaaaatataactttatttatgaatagccaaaccatcctagataatttttgtattaacctattaattaatgaggtagagggactttgtttatgaacttagtggtatcgcactgaaaatgaactaatgtttactattacaaaatgcttaagatagataatatcaaaagtatatcttactagacctagatttacttaattttaatatttctatcatcacttttgattgtgcaatattcctgtcgattaaatggaattgagttattatttaaattatttatagtatgttcccagagttcttgggaacacttaataatgttagtttacttgtatgtaaattcataaaacttaccgaggggaaagtcgcagcgctgcttacagaacaaaaaacagaaagtggactggttacactggttaagataaatcttaaaaagaatacagaaactgcataccatacctattatttaaaatacctagaaggagaatggtatatattttacctaaataattaaaaaagatgatgttattactgaaatttgagttaatgaaatgtttattatttttatttttcttaatatattttccttaagtagtaagaatttcttttcttcaaataaatgcatcaagatatagatgtccttgcattaccaacatccatagtaaaacaatcattttacaaagccgcataccaaaagtagactgaagtttgagtgtcacagatggtaggtcatttccaaacttggcctggtgggaggaaaaatggcctgcagtagccaggtgacagactgttacctgaggtttgttatataaatgtgggacttaataaactctatgagctttattattcaaaaaaatcaaaattacttttttgactctgaattctaggcctcactatgtgctttttgtcttgattttcttgtagctttggagataggcttaagtgtcatttagaatttttagtctgattttaaataatggtgttggacattgcacttttagaaatattccttttcctgaaaaaatgaaacattgcatttaatatttccatgcatttaagaattacagccaaataatgatggtttggggaaaataatatttttgtcccatgtgtcctaaaataaaaccagtaacacatgacacttatttgattgacagatgtctaggaggtgacactttaaggtggctgtatatatgtgttggattgactataaatgtgttgtaactgtgttgtgaaagtcaaggtggaagtaaagtttcaaaaagtgggtcatgtaactttttagtgcagggagggaagatttcaaccacttcactactgctcacattttaagttgcttgaaggctaggttttgaggtgtgctgcctgcatgcacatttactcctggggaaggcagccagctctcttagttttgatgaactacaataaagatttgtagagatagattgaaaaaagaaaaaaaacgcataaatgccttccagttgcaccactggtcatgataactataaagttttaagcaactcttaagagaccatggtttagataaaacattgattttgttgttggttcaacaatctctattgtaagaacttttcattttttatcttgtgtatataacttgtatcctctgctacctgccagtgcatcatcttctcttacatctgttggttcttcctttgaaaaactcacgtcaggatgcttttgtgttttcccctttcaaaatttatatattcttctttgtcaagtgtaggttaattatgtcattttatagtgcattgattaaagaaggcagattttaaaagataattctccggtcagttagagggctgcatatgcgagtgatgactttttatttgtcttctaagtacatgataactcacctaagtctgtttttaaatcaggaaaagaagtataaaggaaaacacgaaagaaaaatcagaaaagagaaatgtatgtttgcagcagaaagagcaacaaaattacgtttccccctttttctctctccccactttaaatgactgggagaaaaacatgagaaagaacagagagaatgccaaagatggttgccacggcaccaggattggcatcagaccctctttgtttagctcaggatgcctgtgatttgttagtggcatccgcattgcagtgtggagtgatgttacaatatattgacaatttccagatctagaatgtcaatagtcctcttggttatttatacaagatcacacactgcatctcttctggaagcgaaataaagaccaacatgtactaaagtttcattgttgaccaacttcctatgcttttctttttccctctttctcttttggttcaacccacactttttttccttcttcatgcccagcagctcatctttctgaaatgtgggaagagttaccagagctttgacacaagctatagtgctactctgcatctgatatggtttgggaaaaaatttatgctttttgaaatcatttttgatatatgttcattagacttttgcatcacgtggccatgaggcagtattttatttaaagctaaatcttttgttattcggctactatgcatgtagtctggttgaccgcaattcagtccattttgctattccttatattagcaaaggctgatgttcaatatagttgtttataaaattaaatgtctcctgcacttcacctaaaatgtacacatcatttgggagtaactgcgtttaaatccataaagtatttgatgttattgattcagagggctgcgcttcggctgtttcgttgctacaagaaccgcattttgtttgtgaagtgccaggcgagggggaaaaaaaaggcagacactgtgtttgatgcaataatggttgccagtggcaccgaggttggcatcagaccctctttgtctagttgctgaagcctttgattcgttggttggcatccgcattgcagtgggcacactggaaagtttttgacatccctgaatgaaagctgcttgcttgtttgctgcagcaaatcttagctaatataaaactctcctttttttaggttttgtctaaaaaaactgggacagattaaagaaaaaatagctctaatggtatctattttcccaaagatattaaagacgtccaatgattcttgggcaggtgttaccattccccatattgcctttgttactgcattcatgaaagcaaagcaaaaacaaaaccaaacaaaaccaggcaagccttgcacagcacagcttcctgggatgtaagtgtcctataggatgcgggtgtgctatgacaagtgtgtggaggacaaacctaacgtaatgatatgtgatgcattcttatgactgactgttgctctcagtcacatcactgcttatttgctatgcaatttctagttcctcacttgccactcttgcaaattttatagtaacattttgagaggacttcagttttccttctagttagaaatgtgtaacagaatacatgtttaaaaagagagagagaaaactttaaagggagacctatgcgttcaggtctgaggtaaaatcagtcattctggaatttctcgattctgaccacactgttacgaaattctcagtgcacaattttgtacactgggaaaatcaaccaaaacctaaaataattttggttaaaggttcctagatagttagcgttaatattgcttttcagttaccaccgttatctcgttaattaataagaaggattagcagttctacccaaagggctgcacgaaggaagtctggcctatgggaggccttgagttgccagactgtgtcctgtctgaaggggaaaaaggaagggggtggtggtggtggtgggagtcggggggcgggagtgggattggccttctctgaggcaggaaagcgttttgaagagagaggtcacaacacaccaagacatttaaagactcaagagatagcaactgttgtcgtgtatgtaacagattagagtttaaaatgagtcacctaactgatttttggactgtactttgcactcttattaaacatgttttggagtgttaaagaagcccagaaacctcattgctatcctgaaaaagtagtttcctttagccttgttgaaccctaaaattatgatctcttgttgggtggccacttttgttgctttattgttaaatgttataatattgaagtacattttgaagttgtgaaaaatgtgacttatttacaggggaagtcataatcttattactgtttttgaaatagaagccttcctggttgtcacatatcattagtgaggaagcaatgctaagaattattttcttcctacagttactgaatttcagaatccttttgggtaacattatttctttatgaaaagcttaagtagataattgtttgcaagttggcagtgtattttaaattttaatagatttcacttcatctgcaggtatttcccattatgggaaaaaataagctttataattgattaaaatgaggctgctctctaggatgatttggtgtgtctgcactgtgaaatctctgggaacataagagtttgtgtgtaggagaaatacttggtatgcatgtttgatttagggagcactgttaagttttcccatctagcaacttgtccttgactgaacttgtgaactctatgcacatttgtttgcattctggctcatacacaattcacaagataaagaagggctcttatggcatgtcttgctcctaggcttaatgagacctttgtgggaacatatattgtgagataagtacttagcaattttctcactgataagaaaacacagtctcccaccagaagttcaccctcttgccatgaggtctctgccacaagatagctttaacagacaatttaagagttaaactctgagccccagttgccagctggggaagcttggcatctgtgttccgatatggcaaactaagctctgcattgcagttaatatgatctcatttttcaaagggaagggtggggggagagaaggagaacggagggagggatgggacgcttatttgttacatcaattatgattttcaaatatttaaaatatatagtgccccactttctggaggcagcaaaggttggtaaaatattctactgacagcttaggcatccttccccccaccctgtatatacagcactacaaattttgtaatgaaaaatattagattatgtatttggatttacaaatttagtgcacaatgtctcttgtgtggtaaaatattccaaatatctccatatttgtaagaaccaaaataatatgcattgttcgagaatcgtggaattggagaggactgtgcattgcagtgacaggagtgacggtcaggtctcctgaagaatgcttcctgataggcacagttatagtgcctgtgcctggagacttaaagctgggtaggagccttgagagaggccatctattgctacagctttagttctttaaagttactgttttctaaggtgtacctaagaagcacttccaaacatgaagattcgtaatagatttggtaggatttttcattacttacttgtttttccctaaatttggaatttaggaagaagctgtcataaggaagttaagttgtaatcctccattaactttttgcttttgaatttggcacttaaaatttgaaacagcatccaagatacccaatatagcaaggtctttctcctcataagctctcactcagccagattaactgaaaaactagactggtaggctatataaaaccgtttgctttctgacactagcgctctgccatcactgctggccagttagaatttcagcacctgaagagagagggacccaacggaagttatgtcagaattcacaggatttcttaaaaattgagataagttagttttcatttctgtttcatggtggcttacatgataatggacttataatcaaagaagtagttattgctttgtttgagctccaagtttgcaaagagtgcaaagagcacatgaaacactcattaaaatggtcaattttaaatacctgaaaattatgggcaaaggcgatccctggctctgaaactagcttctgggtaatgtttctctttggtttatgaaagaatagcattttccagtttgaagttgatgaaagtaaacttgcggcacttaaggggttttcctatgtatgtgctatggcggagcaaatgattagcaacataatgttcaaagcaaattttccagcctttttccctccatccttgtgaaggaggaaaattttagaaatctcaaggactagtggttatgcgatcggaaacttgagttattacggctcatgccccagtgccaagcatagcaagaagagacgcttccttctgatcatgctcactttttgtggcaacgtggtatgttgtctcattttaaagtaaattcttgggaccttgaactccagtttgtgatgcggttaatttaactgaatttagttgttagaatttggcatagagaataaatatcaaactgcagagaacttgtgaaaactaagtgcgttgtagtaaggagtgagtctgtggattagcttgtattagattgaacgttagagtgagactaataggacttgaatggttgggcttttggttgttatattattcagaaaattggaagaaatggctaacaagtgaggtggaaagtcttgaggctgaattgaaagccacacatttttaaaaaaccttcaaaatttaattgttctaaatgggaaagcagatgattacatgcataactatattgtttatagtaaaacacttagataacatattctgtttatgatgatagcttaaacaggacagcactgatgaatcactgacaaataaagatctctgaacaaggactatataattaaaaatatggggtgatggatgaagtaatttactatcaaaagttgcctggaggttgtgtattttcagaatcctattttaaggcagttcagacatgtagtaagttattgatgaagcataaaccagttgaaaatggaatttgtttaaacaatgcgaaataaaataagaattacctttaagaaaagaattatttcatgttaaatacatgcattttaaaattttagttagcttcaactccattcaaaatagtctatttctcaaaatagtcacttaatagtattcattgaattttgaagtacacatctctcataaaactacataaaagcattaacaagcatccattaatattaagcgacacatatatagtctcatgctgaatgaagatgactgtttttttaaaaacctgatttttcatactcattttgaaaaaaatacatggataaatgattggtgctaacggaatggtagagcttgggacaaaaaatctaatcatgagcacagatataggaaaaagttatttgaagtagggtatattctgtaattcatgtgagtggtggattacattatgcctatgctaatgacacgtcaatatgaagtctatacccctctattagtgaattctgagtgtaaaaaatgttccttcgtaggacaacttgtattttattattctgacatctgcagttctggttggattaccttaaatttgctatgctatgttaaaagccttgttttatgaggtcgtctcagcttctggccttggtgtcaggaaccctgctacgtgatgcaacttgccttgttagtttaattgaccaaagctgatgtgttaaaacaattcatttgcgctgtaacttatgccctgctaagttgctacctgaatcccttgaccttgacttgtttgggtcatggaatggctgcaagtgtttgacctttctattgtgtaataatgtcactgtttcctcttattctttaatggtaatgctgacaaaaaggcccaagcccttactttacacaccagtggattcaaggcgtccgtctgagtagctacgtcttctgtttgacatggtctggctgtagaagtgactttcttttgtttgcgacagtgatggggacaaatttgcagccctccttgctacaagaggtggggcatagtattcggcatttggagggatttagatcttttctgcttagattttcagtttctctgttttatgatgtacatatcacaatttccttttccacactcgtctgaggttgacttttcagctttttatattatggtttctttaataattacttttcagcattttcagctgctacgataaaaatattttttgtcataatatgaggtaaaagtgggaaatttagttatgctgttggttaccgatgtgaaacaactgacttttgaacttaacactataaatctttgactagtactgaaaaaatctgtatctaaacatgtagggtaaaaccaacatttttttctttacaaatgagttaatgttgtaacttatatataccatcttatgttatagttttaagggaatcctatcttttgtgacttaaatagtaaatttcatgacatagtagagaaccattagtaaatatgaagattttatttctgtggggcttttgccagcatgtaaaaataactatttattttaatgaatataaaaattgtttttttttactcttcatgaaaacctcatgtgcaaaaatagcgaattttacctccgttcttctcttcgaagcagtgaaataattttatttttaaaatactggaaaagccttctaaaatgttaaaaccagatatttttatcctaccaaactcttctttgccaaatatgacattatagttcatgatttcctatatttgccagattaaatatttaaaatccaagctgttacattttatttttaaattttagaggaaaaaaggaagtttaagttaaaatgtacatttccttacttgcgtgttgcgtatgtttatacatgtgtgtagatacactgacagatgagagacaatgtgctacaggcgctagacctgggaaaaaagcagtagatttctgcattcccatctagaaaatatctgaaaatagcagtgagaggctttcttttctttctggtttgtttgtttgtttgttactgttgtgttttaaatgtttttcccccaggaatgttcacaagatcaaggaatttaaatgcttttcagaatgaatatgttgataatccagaatcataggggtcaaaggaggaaggttgaatgaagtgctctgaactcattttagtccatggcctcagtttttctctcttctcctgtaaaaactagtctagaatgaaaatatctcttttgcctttctgccggttcattagcatcctcaggggcagcgccaatgggagttggctttagatgtggttggtgggctaaggggtcagatgacagtgagactgtgattgagaacagcagccagcccagaggatttaaaaatctctttagttttctccagacgtctactcagttcctacatcgaaagaattttaaggtgatctcacctgttgagttaaagtttctatccaacttgtgtgttatccaacttgggtgtgtgtgtgggcagggagcagggggtgtgcgatgcacacacgtgttgtagggagttgaagaagtgaagttagaagaaaaagagaaaggcgggcttagatcttgcaggaattacttaagaaagatggcttattcttagactgaagagtaataatgtgcaaattaaagtattctgtcatcctttgaattttgaattgcttaagacgttcacatatcccccttctgccttttccatttttgtagagcacagaaaatgtcttagttcaggcactataacaaaataacataaactgtgtgacttacagacactaaagcttatttctcccagtctggaggctggaagcccaggagcagagtgccagcatagtcaagttccagcgagggctccttccgggtggcagagtgccaacttctccttgtttccgtacatgcagcaaaagagtgaggctctctgggatctcttttataagggcactaatcctgtttatgaaagctccaatctcatacctaattatctcccaaaggccccacctcctaataccatcagattgggggttaggatttaacgtaggaatttggggaagacccaaacattcattttgtaacaaaaatcatgtgcatagatttgacatttggggttctagtcttggctctgccatttatctgctttgtgaccttggtcagtcacttcagctccatgtgctttgcttttctgttctgtaaatcgaggattaaaatgccacttcactgtgttgctttaggattaaatgaaataattcatgtaagtaaaagcaataatgtaataatagcaattactactatatatgaaggaaaatagcataatgtagactgccagggaactatccagtagtgaaaaaaaggaatgactggatatgaagcagagggtcatcatttagtcatatttatctcaggtaacaagacataccaaagaggaaatcgaagtcctgctcactgtatgcgcgtgaatatttgttagtgaaaactctttgtgtaggcacatgaagttagctagttggtgtagttttaaaacccatttaaattagaatgattgtatggttttagaagcctttttgttcagatttaccagagactaaatttattgatcaatctaggtatatttgaagggaaggaataaataattttattagtggctctctgaataaataactcaattttggtgtgggtaaagggttcctatcaagtactcgtaattcactgcactccaataaaagtgtaaaactgtcatgtacaaaaaattaaattgccaccatttgggagaactacacttacgttttagatttgtttcggcaaagtgatgatgatgtggctagatgggatagtgctttgtttgtttgtttgtttgtttgttgtttgttttttgagaaggagtctggctgggtagcccaggctggagtgcagtggcgcaattcggctcactgtaagctccgcctcccgggttcacgccattctcctgcctcagcttgccggtagctgggactacaggcgcccttccccacgcccggctgagttttttttttgtatgtttgtagagacggggtttcacagtgttagccaggatgatctccatctcctgacctcgtgatcgcccgccttgggcctcccaaagtgctgggattacaggcgtgagccaccgcgcccggccactggattgtccttaaaaaagcatgctgctggttttcagactctttttaaagtccgaaagatcatatttaaaaatgacccttagttgagtcaaaacctcaaaccgtttaatcagttgcagaattgttttgattttattgccatttaatttttctcctttaagtcactctttcccattctccttttctatcgtgttaagaaaattaaataattaaatgagctccgtaggaaataagttacatttattactgaaattgacttcacttttgctaagaacaactggaagccaagtggagatggttacaacatttacttcttacgaaactgtgatttgggatcaccgtgtttgacttcagagctctggttggttgtgtccatggaggtccttggaggaactagtttcggtgcttgtttcctacggccactgaactgcacccctcactttgcacaggaggtttggaaagtggagagattgctcatatccacaatccctactaggaaaatttaaatcacgtgtcacattgacgtagggtaaaaggcatcatattcttatatggagcactttataataagtgtatcacgtacctaggggtctagccaggagttaataggaaaagttatttcactgtttgtccattagttaaagggtaatagggtgtacggaaagcaggatcagtacattgattagcttgtttggattctggcacatatttttaataatctgtggcattccttttctttttgataacacactggtgtttagtagcagtctgttcatgggatacacaaaactcgaaaatcatatacatgaaacaaagtgcagccacatttttaaacatatgtaaactgggattgctgttgatggcagaaagatttgatatgatgtcttctaatgtatttgaaaagctttgcttacacttatgatttaaagttgatgttcacttaagtgggagcgtatacatggttgttaaattctagttgcctttcatagcctctcagagatgctgcatatttctttattcctgatggtaaagcatcaacattttaggatatgacttatagtttcatgtaacaatttctgttctatttacagtctccaaataagggaaaagctgcttatagtatatgaggatcactggtcttacagtaattaaatagacttgttatactacattaatccctttggaacatttggaatgacttcttagtactaacaaacacagcattagggcctacaattatctgcttttcgtatccaacattcgtataatataaaacatgtgcatggagaaacatatttgggtttaagatgagttcatgggaggacaagatgaaattattttggactgttgagcaatagaatataatgccaagtactgataaaatacggaattcatttagaatcaacataggtagacgactgtttttagtaaggttttgttttttggtgaataccatgtttgggctgtcagacttattttcccctgagatccatattttgtacatgacataccagatatatgcaatatgaaacggaacagtttttcaatctaatatccaggagtttgtgttaatatcttgtgaacttgtggctctggtatctggcattgataaggctgtctactaatcctagagaaagggaagtagactccgtttaaagtctagtccagtcttattctttagttcatagaaatggtctaagttaatgatagatccgcacttatgttcagaaagcatcatcattacagctttgttgaagggacttctgagtaggattatgtttgcgtctcctgttgtggaaggcccatgaggcgtaatttcctcctcaccagggcttctttattattgttgagtttttcatactcagggatgtgaattcaaccttgggtgtccagttacagagaaaatatttcatgaaggatgaagtgttggttcaattctaggacagatgcgtgcatatatacagagtactatggaaatgctgggattattgagtggtttgcagccatttcgaccatgtgcctgggactagctaacacattgtcagggaaaaacatgatgtagcaaaatattagatcatgcaaatgagactactgaatagtaatagttatgggcaatattttggaaacactgattagtgacagttttattacagcaaatgtatgtatcaagtccccagatttcatgtaacgcactgaaaacagatgtcaaagtgtcccaaacagaatttcatggttaatctactattgcatggaaagtacaaacaaaccatttagaattctgttatttaatccttttagaagaatgaaaatatacaatttagatttactctattctttcttttaatttcagtttttgtttttaggggatgacgataattttttttgtttattaagatgcatataggagaagacatatctggtatggacataattttacttaatgtactttgaaatgtaagtttctgaacataaggtcttacattaaaaaaagaaaaattagactctaaattatttagtgacctgataatggaattacctcttccattcctttgtttactgatgtagagattcactctacgccatatagtgattgaagagcttgctgaagtggaagagaaaaacattgctggtcctactgtttgcaggtgcttgggaactttgtccctctcagtaactcagtttctgtatctgtcagggaagagaattggcctagagacatccactatccctgttagctctagcatcctaggaatttggtttctggttatcttggagagagcagtcctcttcatagtaagcaatacttaataaagtttagcacatgcttgttaatttagggttttaatacattttatttattaaagagaaatagaaaatgtgtaacctgactctgagtaacactttcatgttgctcatttcaaagtccaatagttaactcatttggttcaattagataaaagcttactttttaagaaagaggtctttaacttgtagaattttagagccgggaaatccctacagatcttctcactttacagtttgggatactgagtctaagagaggcccaggcttctttggatgcgttacttttactgctgtaggaggaaaaataaacgtaaattatcaaaaataatgaaaggttattatttcgtgaaaacatggcagcaatttttaaaggaaaatagagaaaaataatgattaaacatcttgtattatcatttgtaattaagataaattaattcaaggactaggttttttcttttatacattttcataggaagtattctaacgaaatcaatctgcaccatggtctttctctttttttgtgtgtggatggaagatacactaaattgcactcaactataccaaaatttgatgctggttgaaaaacagaaaggacccattaaaaatatatggccaatttccaataacataagaaaagatgattgagatttgttataagaaaactttttttttttttactgaaagtcagatttttaaagaaaaggtcagagctagttatgaggagctgttagaagtctgcttttgggtgtttgtaattttccgattagcttgataattactacatctcccttttctttgtgtggcatgtatcatctcagttaaagaatttttttttaagtttaaaacaaacatcatatctcttttatttaagagatgtttctgagaatttttttattagtttaatatttagtaataaaacatatgaaatttacaaggggaatttaatttcaaaaagcaactttcaatgaatcttttgttaaggtagaaattcttttacagagtctctgtcgcccagactggagtgcagtgggtgatcttggctcactgcaacctccacctcccaggttcaaacaattctcctgaatcagctcccaagtagctgggattacaggtgcataccaccacacctggctaatttttgtatttttgtagagactggatttcatcgtgttggccaggctggttgtgaacacctgacctcgagtgaccacccacctcagcctcccaaaagtgctgggattacaggcgtgagccaccttgcctggcaagaattcttttataaaatgaaagagttgtctataatttatgttttagaaatgccctgttgtgcttatgtatatcaagagactctggaataaggcaaagattaacacattgaaacagaatattagagtattagaaaaagtttaatatcagctacttctagtagctaatttctagtttacagtatatggtgaaagtttgaaagcatgtttttcaggcacaattgttgatggaaaaatggtgaacaaaagatgggtacaatgcaagtacaggaaaccacaatcaatagaaatgttatagagcatactataaaatagataatatgtatttgttgaatgaatggatgaatgcatgcaattatttatactgaatatagaacattaggggcaaatcagattactgttactgaggtaacaaagaaagttcctcaaactaggaaaatctcctttttactgaggcttgttttctttctttttatatgcactagtgattggtcactgttttagaaatacatttccactttatgtgtatattttaatgttaagaatgagtaaaataaaaccatgtgaattacagggtctgtattagcaatacacgtattctggaatcttgctgtgagttttaatgtttgttttatactattcactatgtattgggtaaattagttttattttctaagattcagtttcctgagctctggagtaggcatgcctttatttggcaattgtgagggtaaactgagaaaatacttgtgaagtgcttaccgccgccctgccgtattgtagacgtgcaatactttctctgagctttccagaagacttggtctccctttgtgggcagagctttaagttaagggcaatgctatgcctaaagtgcggagaaaaatataaatttggcaaattttccagtttcctaggtatatggcaaaaatttaaatactgtaattgtatgtaatgtctcaaaatccactcctaatgtgaatggtatagagccacagctaatcacatgcctgtttcaatatttgtgagttacttaaggaaataaccttccctagagtacaaagactgatagattcttgtataaatttcctggtacaatccagtatactttactactatccattttcatgaggtctttcatttgggtataagacaatcccaggcacaaacataatgggagataaagtgaacatactcgtaactgttgcctagcggggagtgttcaaggtgatggtatttattttgcaaggaactaagactttaaaatcccaaacattttcatggtctggaatggtgatgtgttatttttttcctttatgtttccaatagcactgacttttagtcccacaaataaggttggagaaatatctcaatattatgagtaagattattccctgaagaataattttgactgttttctttattcattaaaaatgacacatcatttaaaaaatcatttcactggtaatataattaagtcctggataataatccttatcttgtcattttttattagtctttagattttttcaaagtgtcatatgtatttatatgtgtgtgtatgtatgtatgtatatgtatgtgcatatatatgtgttttatatgtgtgtgtgtgtatatctatctatctatatctatatggtataccaaatatatggaaaatataaccttctcaccaactaccaaatattggtataccaaatatatattgaaccagtttgtgaaattcttagttcgtctatactgccccatcccctcagccaaataaaaagtgacataagttcttagatgacagtgatcaggtgttattttcatacttcttttccccttgtttctataaggcaatatacagtgggcttgttgattctttagttcagtgttgattatatatataatgtatgtacatgtatatgtgtgtgtgtgtatgtgtatgcatatatatatatgtgtattggtataccaaattatatatttggtatatattatatattttggtaaatattatatattggcataccaaatatatatatatgtgtatatatatatatatgcatatacacacacacataacacacacacacacacacacacacacgctttggaaaatctaatgactaataaaaaaggaaagatataatatatatgtggtatattaaatccttttattttggtatgtgtttaatatgatccgtatgtatcatcgtatagtcaaagaagtaggcatttgtggatttatgaaaatatatcttcaaggaaaatatagaacatttgaactaaaggtgaaaaaatgagaaatgcatttatgagtggaagcactgtactgagcactgttttcaatattttaaggagctaggaaaaaacggtaaatactgatggccttgtccgagtaatttacaagtagaaatgagagggtcatggtcactgcagtgtttatgaaaaacaaaaataccaaagatagtgggacaagtatacaactaactaacctctcaccaactactatatatagttagatttgcggagctttctgggagggaaccctgtggactgcaatggaaaggtcacggagaggaggtgagtgttaagcagagttttctcaggggtatgtaacaaaaccaaaacaaaatgaaacagataaccaagagtctacttttcacataaataactgcatttggcattgatatatactgttttgggaatgtttgttttggtgacaaatttgtgttctgttaaaaaaaagttaataaaagaatctaataggaattttaacacagatgccaaatatttaatactaaatggctttgattgattaatctcttttttattattgaatcgtaacttgaactctgatatctaaattattcttaaatatagtttagctcttagatttcagtgtattcctatacacattgtcttaaaatgtttcgtaaagtatcttttaaaactaattctggtattcaattgtttatgttatataatcttgaatcaaaattgtcaatatatatttgtcatgtgtaataatttgttttaagatattttggaattgagaagataattctataggcaattaaaaaactagaaagcaaaatattctgcaaatatactgtatttaaaaatattcttaagttagctgattgagttttgcatccagtttacatgactatcattattattttaaaaatcaagtgtggctttgaactcagcagaagaaaaaatggtttttgtttgatgaggtatgttttattgtcagacaaaatatctgacctgatgcaaatttatacttttttgctgctaaaagcaatgggctgatcagtgacacacccaacaataaaataacacccagctttaaatattttgttctctgtaaatgtgcctcttccagaatataggtgtttcctcataggtaattgcagaaaaaagtgtaaaatgaaactgtgggccgggcacagtggctcatgcctgtaatcccagcactgtgggaggctgagcaggcggatcacgaggtcaatagttcaagaccagcctggccatggtgaaaccccgtctcactaaaaaatacaaaaaattagccgggcctggtggtgcgcacctgtaatcccagctactgggaagctgaggcagaagatcgtttgaacccgggaggcagaggttgcagtgagccgagacgcgccattgcgctgcggcctgagcaacgagagcagaactccgtctcaatttttttttttgacggagtctcggtctgtcacccaggctggagtgcagtggcgtgatctcagctcactgaagccgcctcccgggttcacaccattctcctgcctcagcctccctagtagctgggactaaggtgcccgccaccacgcccagctaattttttgtatttttagtagagacggggtttcacgtgttagccaggatggtctcgatctcctgacctcgtgatccgcccgcctcggcctcccaagtgctgggattacaggtgtgagccaccgcgcccggcctataatagctcttttaaagtactttcaatcttttaaggttacaaatcatatacccaaagatagatttgaacctagtttgtaaattctcagttcctctgtacttccccatctcctcaggcaaataaaaagtgaatgaaagtcttagatggcagtgatcaggttttcttattttcatacttctcttccccttgttctctttaaggtgatatacagtgggttttgttgattctttagttcagtgttgattatgttgtgcaatgtagggagattatgaacactgacatttaaaaagaaatctttctcagtttgccccttttgatggcatttaaaagccattctgtctgcagtgaagcggcttattcattcaacaactatcactgagcacctactatgtatcaggcactctgccaggtcctaaaattgcaatatagagagacagacattttacagattttatagtagtgagagacagtttaagaagaattacccaattttgttgttcttttttcttaagtgttcccattaagtgcttaataagttataaaaagagtatggtagtgattatacaaacatcatctgaaagaaatgacatgaaaacttgtgacaacttcgagaaaatagtgagatcatgagaatggattattgtgatgaacaagtataattttctctgatgacaaaaaatatttttgtagtgtgtacatggtagttatacataacaagcatacaagctgcttgttatgacatcttgtagcatgtagctttttttgcaggaggttggaaatgtgtcagatatatttctggactctgcgctgctcctaactggagcaattgcattgggttctgagtgccctagcaccctcccattcaaaagtgagtaagcaagaactgtaatgaaacttggaggaaagtgagtatgtgttaggcttcctgaagatgattgcacttaatggaacaaattaaagaatatagaatgtggcattggggtacacccaataatttctccaactcctcagatgtcagcagattgttgcaggttttgcagtgaacatgtcagtctggtggtgtcccatcatcaaggggcgggactaggtgtgcatggcgttggaacttgctagaaggagccctggaaatagtcaaaaagtggaaatcaggagtactatctaaaatcttgtttttgccattttttaactgtataactttcgcaagtgttttgaagtcccagaggctccatttcttcttgtgtaaaatggagataataccatcttacaagttaaggctttacatagtgacctgatgcttaagtgatacccacttaaggtggtaggattttctagctgtggtgcttttccacatgtgaccattgccatttagctaacattagtgagcatttactatgcgccaggtattgtttgcaaagtcacctgtttgactcctttatccctggtaaccatatgaggtagatactttactgccctttcacaaatgagaactctgaggcaagctagttaagtgacagagtcagaattttgatccatgcagttatcgctggacttcttcttaactgtaattctagataatgaacttcctctggccccagtagggtaaaagagacaaagaaaatattatatagtctgaaataacctctacatattaaaaaaaactcatttcacttatgacacactaaaaagaattgaaataggactgggcgcgatggctcacgcctgtaatcccacactttgggaggccgaggtgggggattacctgaggtcaggagttcgggaccagcctggcgacatggtgaaaccctgtctctactaaaaatacaaaaattagccaggtgtggtggtgtgacctataatcccagctactcaggaggctgaggcaggagaatcgcttgaacctgggaggtgaggttgcagtgagctgagattgcacccttgtgctccagcctgggtgtcagtgcaagacctgtctcaagaaaagaaaattggaaagaatcatttgttttatctttaatttatgagttatgctttcagttttattaattttgatatacaaaatcttagtgatttccaagcaaatctttaaactaagcagtctttctcattttttgttttctcttgctctatgctgcttatgtaggagccttgaaattggatgtgtttattgtgcagtccacaaaggctacatagggaaaataaaattccttaaagagaggattaagcaagtcaagagccatacttaggaatccaactgttcaagataggtatcatggtcttcattgttgacttatgataaagatcttccctatcccactcacccatgctagattaatggttttccttagaagtcttagaataaatttttcttctgtttttcttttgatttgaaaagttgggatatttttcaaataaaatatctatgtacacttgagtaaatgactctgggctctttctgttatgaaagttttctgaaggaaatagatgaacaaagaacgtaattttagtttccataagttttttggttgcatctttctaaacagagtccatttttaattcaaaacttttgaattttgagtgctcactttgtggattatttagataagagtttatgaggttgtaaatcatcataagtttgcaggacaaaaattccgccaccccttattcctatacattaattcatttttttggtttcaaagattgattttcttcttagataaggctatgaatcttagtagaaagaagatgtatggaaagatccagaaatgacttccctttctcttctgaaagacagcatcctccttattattactgttttataattatgttagtattaattggtagcaatattagtatagtaaaaacaacaaaatgtcccattccccccattaattatttattataatgattacattacccagggaactaggtattctcatcaaataatagataaagaaattgaggttaaatatttgaataactctccaatccgaaagctagtaagaggcagagtcagaattcaacccatgacgccccttcccagctcatattcccagcttcactcccactacttctccagtaaaactatttttaaaaaagggtcttctctgcatctccaagggttataagctacattttataataatgtggtatgaagcagagttagagaactctcatgagatctcagtgtagtcctacctacctacctgacaaagaaataattgtatggtttgtcttttcctgtctactgtaaatgtttcttctttcacttgcttagatgtgcatctgtttgtcctacagacactgttcctctgtccctcagtgagtacaagcaacagagctttcttgagtgttcctggatgccaacgcacaacatttaaacatatgactttatatatttgctccctaacgtgaatatggatatttttctcttctgatttcattcctttaaaaagagcagtgatggctcaggccaaatcaacttgagttcatgcagccctgagatgatcaggactgctcttgccctgaaagaggagtccattgtcctcaaggacattatgtcgagcccttaactgtgaactttcagtcaagatgctagacttgccagttagttacacagaactattaggtccaggatggaatgtggcagttaaaacagaggaactttgatccccaagataagtggatacagacactagtatgcttgcattttaccacagttttgatttgcatagttttttcaatctaaattccttcaacctgtgtccagtgagtggtgcaatgatacaaatacacaaggttttgctagaaaacctttaagaatggctgatgcgagtcattccccaagagcccctagtcggagtcacagtgatacccagttatgtcagttcgttttcttttaaaatgtgtgctaaatttaatctctttaaaaatgtgcactaaaatgtttgctaaatgttaatctctggatttgattttatgtggttatttatttaatcctttaaccttgccaaacttagccagagtagttctaaatgatagtaacagtaacaacagccgcaacatctaatatttattaagcacttactatgtgctgggactgtgttaagggcatcacatagcatgttttatttaattctcacaactaacttagtggaagctattataatcatggaaagtaaagttctcagacaaagagagagccagtcatgccgaagttcatacaacagtggttaaaaggaggaacaagtatttgaacccaggtgttcagtctgaagccctgcacgaggagctcacctggctgtgcggcctaattcagaaactcattagctggtagctttgggaaagtcgccctccttcaggaacctgtttcctgatctgtaaaaaggcaactactcttgccttcctgatcagattgttaagaagaccaaataagaaaggcacattaaaaagtacactttgaagaaatacgcaaatagatgagactgttttaatgaccttagcacatctaaagactatgtttatcaactgccatttctgtgagtaatcacattagaaagtcacatacttgtaatttggacttttgcaaagtggtccaccatgtgtaatataacattattttaatttcacatctctactgttactgattgtacaaataattttgtatattagaagaaaagtcataaacacaatacgattttttatctgagaacatcatgctttaataatatttatgggatattattgccctcttgatattgcttgttaccactttagtaggggaggagaagactgacttttaaaaaagaaatgaatgcagcatttctgtctgtagcaaataaaatgaggtaaatagttgaaggttactgaaaaaatgttatcagtgtaagggaatggtttaaatatttaaaaattgccctcaaataatgtaacttaaatccaatttatatagtagcagaagtttttgtactgaatcaaattctgcaattcttcttgccccctgagtagacagagctgtggaatagaatatttttagaagaacacttaccacaaagtttttcctttaaagtttacattggttttttgaaatataataaattttttaaagtacagatatttgacctatgcagcatccattttttgttcctctgggcattataaatatgggatttagtcattcttatgttcactgaattaatttccctaaaaaaaacagtgtggggtgtgcacgtgtgtgtgtgtgcatgtgaacgtgtgagaacacaacctaaggatataatcatttagtcaaggtcataagtgacctgacatgccctggagcatgctgtttatattgctgtggttagttttccttctcattgtttttacctataatgtcaaaacacaactataggagttggtatgttcactaatagcagtttatctctgcatggtttatagacagagtcaaagccaacaactgtaattacatccatgtttctaacttagcagcaagctagaaaagtgtggtgaagtatgctgtggatatagtgcagccagtaggaattatagggtaaagtcatttctctaattcttttggttttacaataattgttacttaaattttgttttctggattttaccactgttgttgtgtttatatgaccacataaagagtgcttgagttacgtgtctctccactctattttctactccttgccttcctttataaatgtactagttctcctttcactttcttcagactcacagacagtacattacagttaatagttttctgaagcagcctgatattcatgctctatggacccataagacttctattatttgcattatatgtttaattggataattatgggaaccatgtgaactgttaacaactgtcaagcctttgattaatcttttgaatgttcattggcatggttcagttagcaaccacaatacagattttaggtttttatttttgctgctctcacaaccatttggagggtaaaaatgatttttctagaaaaatataatatcccattttggctcaccgtacatatgtggcacaaagagctatgtaacttatgtattgccataatttcctttgcatatgaagtatgtagtttaatgaatctccagaaaattataagaaagtcttattttttaaatgatcacaatatataacatataaaagaatcctagtcttcctccaaggaaaccagttatcagttcggtcgtagtctccctggccaccttctatacctgaggattcttttccctattttactactcgtaaatagtaaatttcattatttacaaaataggtgcatcctccaaggaaccacagacacctctatgcacccacactgagctgtcatcctgagtccccccttgcctaacgttgtctcctgtgaagtggaattccctgggagctacttgttacaggagaagactagtcaatgaattgccttatcttttaaggtgtgttataaattgaatactgaccacaggagcactaatctgatagaaaaactgcctctaatctagttttaaaataagtaaagtgtgagtgtagggttagagaagattgggtatttaaaaaatgattaggataggtcctccttggtaaggcaacatttaagtaaaggctgaagggggtggtgaatgtagatactcttttaaacacttgaatgtgtgtgtgtgtgcgtttttcatctattccttacatcagccccatgaggcaagatctattagtatctcctttgtaatgtgagggaacgaaagaacagaaaaattatgcccagggtcacacaactagcaagtggtgaatcagcctttggacacaggcattttgttaaactattattttagatcagcccctaagcggcttagtgaggctgatccaggataggactaacctccttagcagactttgtactaaactgatatacaggactcagattaattcctcttcctgggaaataaaatcctggattctacctgcatttccaaagtgtgtcattttgaagtaccatcttggatcaagttaatacgattggaatggcacttcagctgctatcagagcaatcccgctggttgtgttgtcattgtgttttggtgcttaatcaaagcacgaaagatgtgagggaaggaaaattgttttagatgagaaatatgcaaaggaatctaaacatcattcttaccttctgagttcacatcattattacaggaccattgttacatttgggagctttatggtaagtgtaccttctattgaggtctgagatggcctcttcaacagttcataataagataaggaaccagagatgaagagtgtgaaaggagtgtgcagaaggacaaatacagactagcagcagtacatgttgtggcccataaatatccatcctggaaaatatttaggtgctttgagttgtagatgagcaacatccttcaaattagatttatgttttattgttgaagtaaattatatcgatctctgttgccttgagagtctttctttgaagtcgtacctttgacctgccttctctatggagcagtctgatcactgttagccttaatttccctttttgatgggatttaataaggtctcaatctcaggtggtcaagtcttaggtaaaatgtttgtgtgaaatagtgggaaggggatacaacttggagaatctagttatcagtgttgaaaacaggattcagttccaggcatgatgtacttttttcatcatagtgattagtagatgtaatatcctcttatttcgtagaaaaggtaggggatatgatgggaagacggggcttccatttttggttccattacagtgactgggacttgtgcttcggttttgccgtctgtataatgatggcattgttaacaatactcctgaggataaattttgataacgtgtgtgaaagggctttgtgaattgtaggcacacctctctgtgtccgtctctctctctgtgtgtgtatgcatatatttttctccctacctcacaaaatgaaaaattcctgaggataagaaacaccttatttttaacacctgttttatagatatactgataatgtttttgtattgaacctattgtggactttcagcttaggtgtttgagtgaagtttcctaaagttagttaacacatttttttcccctcagtatgcctgtagtttataagtgcgtgaagttctactgctggaaaatacagtggacaagtgacatggttagctttgtgctcgactggaattattttcccccagttcgtttttcagtttgtcccaagaaagtcactgcttcgaatcatggtggggttaaaagtctaaattccccacaaaacagtcaataacattatacctagtaatgaccctaacagggttctgtcccagcttcccgcccacattcattgttcatgtttactcactaacctccaaacccaaacattctaggctccgctcactcaggggctcgcctctttctttcctcagccattgaggcagcctgaggggatacatggtcttccttctgtacactgtgcttttgatttccacatgtttcagaccattggatggcccagttttggaggtgcaaaatagactgattgaacatgtgtatcttgttaggaatgttatgacaaataacagcagctgtataactaatctttctgtagcttcgcacgactcaattaacaatggaccactgtcaacatttggcctttttacctcatggttcctgtgaacttttctgttggacatcagattacttttacctacaacagaagaaaatatcaaatactgcaagtcaactgcacttcccatggtgttctccacggatctggggagggactgccaattataatgattactgcattgattctaattagaaagacaactggtcatcaggatggttgtgacagtttaggattaatttttctgaacttagcaccaaactcatggtcgtaagatgctggtctctgaagtttagagtgactacagcatgaggcagggtgcagggacatagcttcccccagagatcatcacaggagacagaaacatctttgtgagcgcttgccatgtagaagtctactgttgtgcatggtaatttcaagtcacgagaaacagaaatccaagtgaccttttatctctttaggtaatttctatctgtactttttgtgagaaaaaaggaggtacactggatgttcaagtacaatggggaactcagaaaagcagagttatagccttagataaggatgagtaaaagttcaagttccagcttaaatgtacttgacatttgaaccccctgttgaagcccttactttaggtctatctgcagaggacatctgaaattcctttggcttctaattatggcaagtgaacaggaatggatgacaaagggatataaagatagagctcaaacaagttttgttaattctttctttcacctacgaggactaatgaaaagcttaaattactaaattcagctagaccattgtcgctacttgccaaacagtacatgcttgtgcgtctgtctaatccatattgaaagccacaaacagaagcacataatttggcaaaacaccaaaaacatgcctcggcacattctggagattcttccaaatgacttaatgattcaaaaatgtgtgtgtgtgtgtgtgtgttgtgtctgtgtgtgcgtgcacgtgtgtgcgcgggtgcacatgcatattgcctggagatgttggaataaattctgccagcaaaccatgtgtattacacttgtttggaggatttgaggattctttcaaaattctgaattgtagaaagcaaaagataaggctgtttcttgggcagttacttctcttttattttaaagatgagtaagtaaaaacttgttatttaaaaaaaatctcctcaaatacaacatgtaaaacattctgtcttttaagaaagtttaagcattctatttgtttttgaatgtgttttgagctttttttaacaggtggatcacaaatagcagttcagtacaagaaaagtcttcatagcaccatgaagaaatttcctgaattgaaaaattattctttcctaagcttttacagaagtatttttttgtggcctgatttctgcttgatatagaaaagatgtactttttaaaaagcacataatctgaattcagtttacaatacttgaagatatttaggtgactgcatgaactatattaataagacagatatggaaggcaaacagtccctaagaaacctttcgtgtgatcgctttccctcgcatgaatattatttttaaagtcagatacttctatgtgtagtattttattaaatattgcaggaaccttcacaagatagatattattattactcatctaaagatgagaaattagagctcacagaattttacaataagttacccagtatttcacatgtaggaagtggcaaggtaatctgaagcctgagtccgcagataatgcctttggcgttgtacctttcagccttcctgagaaaggtacatttgtattacaatttatcttcctttcattccttaaattgcaaacctattgctctgaaggtcattctatgtagattatgttaatgtcttccagttagctgtttaattatacctcatacttgtaaattgtaaagcacctttatcttttgtttaaagtatcttattaatatttatttcaattggataagatattgtttccattttacaattgagaaaataggattggaagcaactaccccaacagatagtctagatctggggattaagaacagtatcttttcccaactgtttttccactgcattttaaatgttttaagtccaaagaaaatttgtgcttgattcccacctcataccaaaaaatggagtatggcaaacctagaccttttttgcttgacaagacaaacaaaaaacccctgcagtatctagtcatgtaattcttagtgaacatcttctcatatttagtataaattggtaatttgtcaagctatccatatatgcttgagagactcttcatttttgttaagggtaagaaagttttttttttttccttcctagtttcagagtttttggtatactggagagttttgaacatcaacaacttttagtcttttggcataataggattagatagattatgttactgaattcacacaaatgtaaaagaaaaatagagatagggaagtgagggaggagggattagttcttactgccgtatttatctatttttagtgccatttgaaaattgccacaggaattagcatctcttttctcctgcagacttagttttacatcagtttcttagtatgccatatagatagcattatactcatgtccttttagataagtactcacaactaggaaattaagatgccaggatataagcccctgggtgtgatagggttttcacttatatacacagatatcattcttcaggatactgcttgtgaatgggatgactcaggagatgttaatgagagtcttcctagcctggatgatatcctaaccatggcgccgtgcactttttcttccctgtttgcctcaactgcactgtatcgctttattcttcttcttactatgactttatgattgatggttacgaaaatcccagactgatatgaattcaagtgtgttcaacgattagagtaagagaatgttggctgataaagaaaagttgactttagttgaacacaaagatattgaactctaagttactcatttaaatatgtgcacagaagtagaattcacagaggttaaccccttggagcactcagagaccatgatcctggcttgtccacgtaaaacaactcccttcagaagtaacaagagcaaggtccagccattgccactgaagcccgttgaatacactgggacgtgggcaaattaagaacttactgatagttcgccactggattttatcatagatcttatcagcttcatggtctatgactgttgatttgactttccatgaagtaaattaacttcaaaacaaaacctcactatctcttatctgttgcctaaacaggtttccaaaaattgaccaccttactatacagttcacttggatttcttaagaaatcagttatttagctaactggcaaacagaactccaccacctcttctctggttctgaaacaatgtttcaaacgatggttgtcctttagcatgctgtcagagcacagtaggccccaatttttaaaaggataattcttttgtctttaattttgtcaattttagcccagttccacttagttcttgtgctcatgttggatagttgctctagagaaatgtgatcccaggaatgctggtgatttgctgtttaaaatggtgctgtgctttaggtttctgttcaaatctaagatttcagaagagtcagtaatgcaaataatctaaaaggggaagagtgaagaatgcttctaacttccctttgaaatgaatgctctgccagagcagcagctattagaaaaacaaaaacgacaaagaaaagctgctcagccagcacacagaggtaaatttacttacatcagactgaaaaatgagggctgggctttgaaaaacatcccttctgactagaggaaagcttgtaattttggcacggctgccgccctcctaagccctgagaaattctgaaaaacattacggaagactgttcttaatattaatggatgtcttcttgtgtgtgtgtgtgtgtgtgtgtgtgtgtgtgtgtgtgtgtgtagggaggaagaatgctgagagagaaagggggtagagcatgagagagaagaaaagatcacttaggaggaagaactacagtggaaatgtctactttctgaaaaataatttgcatctgtcatttttcactcttcagtaagtagtggtcaagatgagatatagagaagcattcaccatttgcacttcaagttaggctgcagtatcgtggctcttttaacaagacttccaaaaatacttgtagataacattgctcacgatgtgatctcaaatctattatatgacatcagaggtgaaaaaaagactgtttccctgtgctaattgtggtgagtgtcacattatgttgtactgtagtgaacaatttcgggggcaccaaagcctacagctctgcctcttgggaggagacttttcctttgcagctcagcttcaggaaactgaacatttgtgttttcaagaccacataccattgggaaggaagtaggggtggagatgcggctgagattaagtgggtatgagaatctctgtactgtgtatgatctggaaactgctgaatttatgtagccctctttctggcatgcctttagaattttaaagtcacactgacaataatacgatccttgctaaggatatttttcacaaaataatttatttactttttaggcgaggacagaggacctctgtgtagcgtgcctgaccagcttgtctctgagctgtgtgtcaatgtgtctgggaaacagagacagaaatctgccggcaggtactccacagtcagatttatttgggatgtatactgtaacctatcatggtaaagaaatttaatatgtaattatgggaactagttgttaataacaacttgaaagttattttgagaagggaggcattaactccccacagccccgagtcttccctccacctcagacactggcccatgttaccttaaaggatacaaggcctattgtagtttgaatgtagagttacacagataatacacagagaagctgagtttctttttgggattgatgaggggaaagagacggaaaatgtacttattaaaaagagtgccttgatttgctgtggagtttaaactgggaacatgttttcccagacgagcaaaagctttgtagcattgctggctcgttaatggtgatcttctttctccctggcgtgccctggctgggcatgttttcttgacttaggactgaactctcaatataatcttaattcatttttagtctaggctgactaaatcttctgatttggcaagcagactgtcgggattgccattgttatgtttactctggatttatatcttaagttgagctaagtaacacatttacataaatcaactcagcattagactctaacacaaaattgtttacgagagaaaagactaattgtattgcttcctgagatttgctttcataatatattaaacctcaaggatttaaaaatgtagcatgttctgttttaaaattaactcttctgggggttttgctttataaaaagatagaattttttttttttttttttttttttgcgagaattgattatagctgtgctactgtggatgactttcctggaggtagaagataaagtggagcaggccgatgttattagcaagagtcatatgctttcatagaaggatttatgttttatgaaactggcagcacaaatctagaaaagaatttaaaaagttcttttaatactaaagatattgcaggaagatgaagaggtttaaatttatagctgcaaacattttcagtaggagtgtttttaaatgatagcattttatattcatgcaaatatcatgttataatttatttcctttaaaataatggcaaggaaaaatgtatggctctattgcatgggtcatcatcctattaagtcatgttctatttaaaataattttactttattaaaatttacttgcattttaaaattacgacaaaaagccagattgaaaaattggagtaagatattttaacatgtatgctatagttgcaagttccagaaatatgtgggggaaaaagaggttagtagctattttaagtttgttcaaaacgtataatggaaacttgcgccttttatagtatgaaatattagcaaaatgttactgatcacgagatatactgttacatgtctgactttaaatgtaattttttaatggccactggatggaatttgccttttaaaaatactagtctttgcactcatggttaggaaatgcaataacttcatgacaagtttttatttttacttctaagtatttctttgctaaagttattagcacccttaaaatattcttttgtacctagggacaaaattctctacccagagttcttatgagtgtttttaagatggaccagatgacacagggtcacgtcattgtgggcagtatgttttgttttgctctgtgaaatggctttgtatagagttttagttttctaaataaattattattcaaccttacagtgttttccatgaggttccctaatccctgctttatctcattttgctccatgtaacagcagtgtggttatctggccaaccacctcatcctcttcgtcagtttcacttggaaagataggatccatatttccagtctctgaaaggtggaacatgtgtttcgtccagctgagtctcttggtctgatttttttcccggtcctaatacatgttattcctacatgtgacaaatctgcagtcgtgttttctttctgagttataatgactcagagtcataattaatttgatgagcaggtgggggttattagccttgtgcttcacttgctaatactgcacagtttttctaaagtactctttcaactaaggaggcatttcttcacatagaataacagtacagcacaaaagcctcagttagataactatccgtgggcttgaaaagctgccaagcgatgttgttattggagctggcccaggcgagattgggccaggcagatgctcatggggagggtgtggggagggaggaggagaagggggaggagaagtaagagagtagaggttagggggaggggggaggttctatgggacgctggtgctttctttgcagggggttgggccagattttgttgggtgggaggtctcttctaatgagccacctccatggttatggcctctggttggtctcttaaacatgcatacgtgagaatggggatgggggtggaggagaccctctctaaatatccacagggagcgaatctgagtgttcatccagcagcctgagacttctggtttgcattagggcggcgtgtgcaatttttgaagggcctacggagactcagcttcatacctatccacatatgtaatgacatgactgccctgacatttaccagaactcataggttctgctttattgctataaattagttgtgcaaatttaagacaaaatgctgttttgtttcctgtcacctcaatatgtaattttcactgagcattccctacttattaaaatgttgcaaagagacaccttactttttaaaattaaatcagtcttggaacatgtcagatttgtaggaggtaaatgtgtggaaggtttaatctaactgatgttgtttctgtcctctgccttttttttttttttttttttttttttgtgatctaagctttttagaactcatctgtcactccccttcactagattaaattctgtaatctcattttctttgagctgatctcaagccaatggtctggggattttatagccaagggataatttttgaaatgggctattaaaacacttgcagctcctaccctgtctttcaaattagcgtgtgcacagttgcctttctggggaaaaagtctttcccttggcaataagcaactgattatgtgccacaacagtataaaagcttccaggaatgtttatactaaaaacacaggtaaataagaaatgataataataatagtaactgtacagtgtgaacaggaactctgcctaggattattattattatttttaccctttggagacaaagttttgttttcccttattcagacagatttagtgtgttctgaaacagggtcatctaacagtttccttaacgatggaagtacagtggcttgagacagctgtgaaggtcatgtaactttcattgttgtttatagtgtgcttgttaataggttaaaatgaatacttgctggatggaggtcaggtagcacctgtataaataatgaatttgcccttccaaaataataatgtaaaattaatcaatatatatagcttgccattttgtttttattcagttcaacttcttgccgctctgtagttttcagaggagtaaagtaaaaattatgagttctgagaaagcaatttgcttgccataactccatttgagggtgactgcgattttgttagcataagattgaagcaatctcctaaagagtatatctgattctgtgtcttaatcatttttcacaagaaaaaaaaacgggacatataggtatatgtagagtaacataaagccaccaattgtagaactgatgtgattgaattgtactgagggttggcatgaatgcttttctttttcacgtgtaacattaggttcaacatatatgtgtgcagtgcattgctgtaatgtgtgcagatggtaagaacacatatgtctaataccatgctttatcgctcaatagcctgacagatgtatatgggtgaattcattcattgcctctctgttgattagtagcactttgaaaatgatgtcgtaatttggcaaactaaatcctgtcggggagcagtactgaaagtattgaagaaatgacacgattatagtttgatccttgtattagaaccttcatcaaatataaggttttaggtcttctgtaatgttaaaaaaaggaaaggaaaagagctagttttacatatgatgcagaatttgaaaaatttgtctttttattggcaaagctgatttaaaagtccctgaatcatttcagaatctgtagagaatgagatgtggtattattgtgatatcacattaaaaagtaaaagttcagtctgtggacaaagtctattaaaatgttttaatatagtagaggacctcgtaacatgagccactgttagtaaaaaaaaaaagtttaaaagtatatttactcatatgtactagaacataaataagtttcctgaaacaaggactacatgaacaattgctaataaggcacagttagtggtaagtggagattgatactatctgtaatttaaaaatggttgtactgtacctaggtcttcaactgtttacaattgaaacccaaagccgtcacatcaatatctctttagtacttctaattttgggtatgtctaattcagtgaacatttgtttgtgcttactacatgtctaggagcatgctaaaggttagagaaatatgaagaccaatgaagaatccctgttctcaaggagtttctaatctaatctagcagtggaaacagaaacataaaacaagcacctaattcatatgaaacagatagtagacaatgccacacagatacataaaaagagtattggagtacagaggaggcaattcagaattcacaagaatccaaagaaggttctcatgatcaagaaatgagcttgaaagatgagcaccgttttgttagacgaggatgtgaggcatggggtcctggaggcaggaaacagcacaagaaaaggtaagtcattggggatggggaaagcatgtggtagttgggggtcatgaaccatcaggggagggtgactagactttagcctgtgtaggcaagtggaggagagttgtaagagactaggctgaaagagtagggttgctgagggcttcaaagccacattagagagtttccagagggtagatcatcaagctttcaagctgttatatttaggggtcctttagaagacaattctgacagcaaagtggaggatggaatgaaggaagaaaatgggtgaagggaggaggtcgttttaagccaggcttttaaattttcatgtaaaatattatcttgtcttctccatattttttgggtacagtatataatttttttttttttttgagatggaatctgctatgtcggccaggcgtgatcttggctcactgcaacctccacctcccaggttcaagtagtctcatgtctcagcctcctgagtatcagctgggattacaggcacccgccatcatgccggcacatttttgtatttttgtagagatggggtttcaccatgttggccaggctggtcttgactcctgacctcaggtgatcttcccaccttggcctcccaaagtgctgggattacaggcggagccactgcgcccagccctgaatatttagaacctaaaacaggctacgtatttattcattgaaaggttgtaaagttttaaatgagcacctgtcataccaccgatgttcctaatggcttggatacagtagcgtacaagacagacatggtctctgccctcagggggctcactgtctattacagggaacaacaaatcaattcaacaaatttataagcaagtcatttccgattgtgttaatgctatgagaaaactaatagggtcatcgataatacatagattaaagtgaaaatggggtagggggtctttgttggctaaggtcttttgggaaagtctttctgaggaaatgaaataggaaagatgagaattaacccagtttcctagtactttcagtactcatttgtgacgtcagttatgatatagctttggttaaaaggccgtttgagccatttgcatttattgagataacctcagggcaggttaacctttcataattatcagaaagctatctataagaagcattttgctgtattccctatagactacttttgtggaatcatgatttaaccttaggttggcttcaccgtgaattaatatttaaaaatattttatatgtaaaagatccatatgcagatctttgcttttgtataaaatacctttttcctattatgtgttcagtgtcccttattcaactcccctgcaatatatttcttgaaaaatcccttccaggaaacaaattttctttttctgataagttggcatgcctcttttatcttatgatgagaactgtgtatgcaatctagttttcttcttttccctgtatgctagaagctcacagcccaaaatttgttttcatttgtctgttttccccagttctgattctgtgaatttctactgcctgtctgctttcatctcttggattttgcattttgttttatattagtggatattgaaacttttgattaattaaagtattaagtcattatttgtaataataaatcaataaaatcattcttcagatttggtgcttaggatctgaccgagaacagaaacaacaggaatggatgattctggagatattgaggaaaaagaacttggtgatgatagttgtagagggtaagggaggggaggaggggaagatgactgcatcactgaatcaatgctgagatgggccacaaaaatgggcatataagaggaagaggagatccgagggaagcatgaagacttgggttttactttatttattgttttttttttgagacaaggtcttgctctattgtctaggctggagtacagagacaaaccgtggctccttgcagcctccacctccctggctcgtgaaatcctcctgcctcagcctctgagtagctggaatcacaggcatgggacacaataccctgctatttaaaaatttttttttctagaaatgggggtctcactatgttgcacaggctggtcttgagctcctggactcaagcgccctcttgccttagcctctgaaagtgctgggattacaggtgcgagtcaccacaattggcaagacttggattttaaataagccatagatcacatgccctgctgcaatagctagtagtcattaaaaagagtgtttgagcataagggaatggttataattaggaatgcagatttgggtgtattgaagacttagaagccagtggagctgtcaaggaagggattgcttcttgagggaatctagggctacagatggacccttgagagaggtctacagtgagtgagtacgggagaggaaccccatctttcagccctcaggacctttttactgtcatcacaccaaacatcctctccctttgctgaccatcccatccttcagctaattagttctgattcattcttcagggcccatctgagactttggtattgcagtaagttgatctccccttgttgaagctggctgttccccctatggactttgtagtactttctacttccctaacataagactgattacagaatgctagaattgcttatgctaaatgaactctttctctccactacactgcaaactcattgaaaaatgtgtctctagctgtagctcaatgcttgatgcataggtgatgctcaatacatgtttgttaagtgaataactaattcatcctagaagggagaggaatgctgtctcagagagagggatatggtggtcaacatttggtgttcatggtagtcaacttgggctgccataacaaaatactatagactgtgttgctaaacaacagaaatttatttcctcactggaggctgggaaggccaagatcaaggcactggcaggtagattttattctgaagcttcttctcttggcttatagatggcagccttctcattgtttctcacatggcagagacggagcaagcaagctctccggtgtctcttctgataaggacacagttctgtcatattagggccccacccttatgatgtcacgtaatcttaattacctccgtaaggctttatctccaaatatgaaggccctgttctgcctacattggggttgggcttcaacagtgaattttggggggacataaacattcagtctgtaacacctccgttgtagctgaatactttcatcatttatagagagatagatagtcctagttgcaaataggatataatatccaatcttagtggtagatacaaccttttctccaaatcctgatccaaagaacattgctgagacctagtatacctttcccagatcaataaattcgggtccagtaggtctttgggtttgttctcatgatgatcttgcagagcgtctcatgttgtcccctgaatctctttctactcacttaacactgtgataataactgaatgtgcttaggctgcagcttgaaaagaaatttcatgagtagacgggttcaggcacaggaacatgttaagagggaagtcacggaacctaacttatcctaaagttagatagattattatctgcttgggttgctatcagtgtggctttgccttaggttgggggatagccagatttcctttcaagttccttattggctttaacgttctctgattggaacttaaaaatgtattttccagactgtttgaaatccttttcttctctacattctagaaatagagtctgttgaaataagaacagatccaggaaagaagtatgtacttaatattgtaggggacatatagcagtcggaccctttgaatggttaatgcaaagttttgtcttactgtaatctgggtaatcctcaatagataaaaattcatcattgagtgtttttactttcctaaagaaaccacagtaatatgttttttctcacctaaatgctcttaaatgcacagagagtaggggttcctttggtttctattttataatagtatcttcctttagtcagtttctttattcctagaacattatttattgggcagtacttttgaattaaaaaacaaatgacctaaatatagaaataaccttccatggggaaaaaatggttgttgactgggcaggtgaagtaaggccaggagtggatattgaaccacctctctagtaacagagaggaaggaaaaataaaattggacttttgaaatacgtatctagtcttagtgggatatctatttgctttttttttttggtcaattttaaatagtcgtttctatatttctgaatattcactaggaaatttgtttccctgaggccagaagtctgggctagaggcaaaaccttgaagtttgtctcctttcttcctttgtacattaaaataaatcaaaacaaaactctaatcttttattatatttgacaaccatgggcaattgttctgccctgtcagtgaaatcactcttttcacttaaactgggaactttttcagggttgcttttttgcctccagcaagttttaggagaacatggacataacacaggagcagtaatagtttgtacgaggaggataagtaactgccagagcagaggacaaaccctgatatttgggtttcacggattacgccatatactttcacttttatgaatgggccactttatttgtctgcagctcagttttcgttttgctatccctaaactccattctgaatttgataatgtaggctcataactgttcttcgtcacagatgcacacacaaatttttgggtgattttgagtagtaaaggtgaagaatctagatggcaaacctgtgtatagccatcagatccttctgaggtcgcagtgcagaattccatatgtatacagggtttgagccaggctttgggaaagctgcacttgaactctctccacttcgcatctttttaaaataagtttatgtttaatattttgaacacagtctttttccacaggtaaatacgggtatggaaacagacttttaaaacaagagtacgtacttggttttgttaatgaaggggaatgttgaaagtggaacttctgaagagtttttcttcatagggaagaactgaaggaaactatttcttcatgaacatccttggttcgtagcttttatgaaaaaaaaaaatcccctcatgctattcaaatgccattgaaacaccacctttaaataatgcagtaagggaaaaaaaaaaccttgtttaacagtagtttgttttgagactgtacaaataacaaaatcatgttataggttaagacaaaaagccataacaacccacctatcagcccttttcttttagggggaagtgagccagatgtttaaacaatatggcaggaatgtgcatgccgcagtacttggagaccttgggaaagaaatcatgtctgcacccctagtgttcacagttttagactcctgacctagaaacagtttaaacagatgtttagttcaagggattatgtcgacattgaatttttttttcctttggaaatggctgcctctaaaatgggagcctttactagaaaaaggaccagagaaacagctacatctcaaaacttgccagtttcatgttgaactggtctggtgcagcaggaacaacaacaaaaaacaaacaaacaaataaacaaaaaacaacagctgccttaccagtgactcttgacgcgtatgaacatcttttctttctccgctgtcggtctgtctctagtaagttaggattgtcaacagtaacagaatttacgaaaggagaaggcattcagaaaaccctagccgttataagccagcataaattgtggctccttttccttgtctcaatctaacccttttttctagccttcagcccaccacaatcccattgcgctccttcttccagaatgattcttctcactttaatcctggtgtggggagttcattccataatttggatcagtcaaaatgatacattacatcatagctgcctttatgaacatgtttatttcatatctgaaatgtttcgtgtgtattcgctgtgctttgacttgcagaaggagaaagaaagtagttttactggagcaaaacagccacctgtgaaaactaattgcgtaggtagaggtttgatggtatctctggggggatccagcaggaagaaagtaaatgttcttaatctacaaggaaatcacctgtatgccaactgaccctcacaatcaaagccaggtttgaaatatcccatcaaataggtggcctgtgttaggagcctggagtgagaagggcagcaagagggaggagtcatggtgagggccggtgcagtcatcttagtgccctgtgtagataagtgaaaagtgacatgatagtgtcagggctcagaaacgatacaccaaaatgtggcactttgacatgctgagctgaagaagcagccttaggtctcttgacactgtaccccctccacctcctgccttgcaatcctctgtctctcccaaagcaaaggggaaattgttccctgaagttcccttatctgcctcaagttcggatgcaccaaagaataaacaattatctctggttccttccccgaatttccattaactgagctcatagcatgtaaagaacactgaagcctgtcaacacatctggacagacatttgtcacaaaccattgtctgctgtgtggcccaacagactttgtcccaggccactttaagttcattaagttcccctaaaaatcattactgtccccttaaaaccatccagacttccccatctcccattcctctaagaaggagtgtaataagcatctgtaccccattgggatatggggcagtcatccctgcattctcccccttgcaactaataaatttatatgccatttctcctcttaatctgccttttgtgagttaattttcaaaaacttttagagagcaaaggggatgttttcccttggcccctacaatggactcaactacatgccttattacgggctgaaatgtgatatgaatggtatatattatcttcaaacaaaaggttgagatgtgactgcttttgagtttcttctttcttccttttcatcaagtttgccttttcatctttttttttgagacggagtcctgctctattgcccaggctggagtgcaatggtatgattcggctcactgcaccctccctctcccagattcaagtgattctcctgcctcagccacctggtagctgggattacaggtgcctgccaccacacccagctaatttttggatttttagtagaacggggtttcactgtggtggccaggctggtctcaaattcctgacatcaggtgatctgccgcctcggcctcccaaagagctgggattataggcgtgagccactgtgcccggccccttttagtcttaaatgctgttgtcttgacttttttccctcctcctttcctggattccaccaattagtatacctacaggtttcttgctattaaaaagctaagacatattgtgatggagaggcaaaaccaatgatgtggctaccttttgccaccatctgtgtagctccctgaactgagtgccttaaattcagaaaaagcaggtcctttgggccaatccatgccccatataggccaataagcatctgccttgcctgaacccagtatagaagacagatctgtgattggttgtcaagatggtaggtctgagctatcctgcaagattctacattttgtttgtcactctaggtagacagtggccagtcagatatgctcgactggcacacctccatgttaccttagctgtgcatatatctgcatgcggtaactttcctaaatggctgtcttccatgggaaatcaaaaccgtagaggagggaaaagtcctattatttgaagcaccatgagatttagggaaaagttagacaatccttcctggagtcgacaaaagtaaatctttagaaagtgacaaacgagtttcacataagctacataaactaagaagaacatgaattaaaaggatatttacatgactgaaaagcaattttgtctggaagacttggtcacatttcatagtgtccttggtgagtcatagtgagtgcttggattgggcctctgcattatacatattcagcctctgcattacagatattgagccatcctggggtggaccaggagacagaggctgtctcagaactccagtgagcttcagttttcactgacaggaaagaaactagaccattctctgaagtcagtgcgcctcacttttctcagtgcacttggactcttctctacgtttctcaccccagtgtcttgtaggttctttcaggacccagcagttctacttggcacctgtaataaaagtgcttcctccagaccctcacagaaggcaaacttgtaccaccacgaatccatttcaggttgtattggaggcctacttctcagcattaagccccagtcaactaaaatatctgttttcaccaatagttttgttttgtttcgtttcgttttgtttttgaaatggagtctcacttgttgcccaggctggagtgcagtggtgctatctcagctgactgcaacctctgcctcccagttcaagcgattctcgtgcctcagcctcctgagtggctgggattacaagtgcccgccacacgcccggctaatttttttttgtatttttagtagagacaggatttcaccatgtttcccagctggtcttaaactcctgacctcaagtgatccgcctgcctttgcctcccaaagtactggattacaggcgtgagccactgcgcccggccaccaataccttttaaacagaagatcctgccacatcaatgtatggcagtacccctggagctgtctttccagagtctaagccccatgggccatgcttatgtgagaaacttctccctcttcatacccaagactcagccataggatcttttgtcaagtagaatccacagtcaagtccagtttatttctatgatgcttaggaacttagaccatttgatatgtagcaggtctttgacatttatgaaagatttgtccagagataatgatgagttctaaatttacaggtagctctttggagtataatttctttcctagacatctgtattcttcaagaaccatcacttccttaggccttttcactttctcttcactttcatcaccaccacaagaattgacttcttttttcagtgctcttttatttttaaaacaaagaaatgttatcacttcagagctttgtatgtaacaatgaatgagatgtgaatgttgaatagttggcagggttcactcataccaaagagattctcacgagccttatgtgcttatgattcagatttgtcctaaggcaaaccacaaatttgattataccactcccccactccccatagaactattattaatatttcatgaccttagaacgtggtttgaggagcactggtatgggatatgagcctccaaatgaagccaatcctagaaagaaggcatagtaaccagagccctggactgtgtgtttgttagtcctggggtcagtttcaagttgagcaagtgtgttgtgtgcacgtatacatgtgtgtttatgtatttttttttataatgtttctatgcaacatgctttaaaaaggaatgacatccttactaacttgattatgaagagaggatgtaaaacttttaaaagcacgtattttggaaatggggtataatggaaagtaaacagttgaaataatgggattatttctcagagtagttgcatagttcatgctgaccttcagcaaaatcttatttggaatggcttctactgtaaaacacctaggagcaaacttaaaatactataagttggcagcagcagaaagaattcacagggaatgtagtagtgcaacatctctgtctttgttcaaaaaagtttataagatagttctattccactgtcttgccccatggcgaagaagttctggctgggagagcaggcctggaaaggcagcacagggccacatactccagtgtgtagaaatgttctcagatacttagacaacatgctgttctcacccaccagcaaaagtctttgactggaagggctgaattattcagcataatcctgaaagcattgttcccttactaaaagtatccaaggttaaacagcctattggttaaattgcatgttggaataaattgctctgtagatcagagcagttataaaactgtggtagatctgaatgaatgttctcagtgatgataagagtacctttgcttctattaaattcatgttctaatacgagtcatcaaaaggttcttttatctaactatgttcataaaagaacactcaatgtttgaccaccacaacagctacagccactaaaacataaatatgggggaagtccacactgctcagacagtttagtaaattgtattatttaacaaaatctatttataggagatactgagatactgatatgatgctttaagaaaaccttgtcgttaaaaaaaaatctcattttttctttagcatgataacaaataattctgcctacttatttaataaattcaatgacaaggaaaccatagctggcacattattggtcttagtcttagaatatgtttctttctttcgttttttttcttttttgagatggagtctcgctctgtcgctcagctaaagtgctgtgaagcgatcttggcacaccacaacctctgtcccccgggttcaagcgatctcctgcctcagcctcccaagtagctgggattacaggtgcccgcaaccatgcccggctattttttgtatttttagaagagacagggtttcgccacgttggccaggctggtctcaaaccccgactcaggtgatccacccaccttggcctcccaaagtgctggcattacaggtgtgagcactgcacctgtccagaattatctttctattactgaaagatttttgaggttttctctctgttcattcagcactgagctaggcattgggaatgctgggttttgctggtcctggggaattacagtctaatatccagcttgtagaagagtgactttcagtgtttcacagtttttttcagcgtgcagtagctgtaataaggcacagctgtcaccttgtgtgcaccatgttctaggactatctcagttttatatatgtgtatctcatttaatattcagagtaacctcgtacttcccctcatttataggtgaggaacctgagcctctgtgttaaccaacttaaccaaggttaaacagttataggtgtcaaagtcagatttagaaccaggacagtctggctttaaagccttgggtgctaacctttaggcaatactgcctaatccataaaagtgacagtgtttttgttactatgtgggccttcttgtgctctaggccatagaaaggcatcttggctctcacctctgcttagttctagggagcagatcataatctcatcagaactggggtagtgacaaagccaggtcaaactaggccatgaagctcagttcctggttctatttcaaaggcaggagtcaggaagttaacggcctcaggagctgtgctgtctcttcaagttctgcagaggacctctggaactggtgcattgttggagcaatcaccctgctcagctccctctcacccttctcacccaatggtcttgtcactttgggtccgttttatgagctcacagtgattaagtaactgtgattctcatggttctgagactctgactccaaacaagctagtgttgctgaaatattttaatggtctggcatattcactttcctttttgaagttagtggattggcagctagaatatgaatattatatttcactcctcttccttttttctctatcttctaattagtctttctctgctttctgatttttcttctatctcatcctactttatgttttcttctttatggttagcagtgaaattggtctaaagagaaaacttctgtttgtaggaggggttcttgtctaggtaaaagtttttggaaaattatttatttctaaatgtgcagatgggtatataattaataattttttttcttagaacatagtttccctgtaaccatgttttgtatggaatgaaagatgaaactgagattattaaggcaaaaatgcagtaagacctccctcccctgaaattcaacctctctggaatttgattagtgtttttgttggttttacatatgaatttgttagagggagaggcttctagaaaaagtgggtcaaaatgaatatttttggtaaaacaaagctgcataaaatgtctcatttttatactcataatagccctgtggggcaggcaccattgtagcttccctttgcacatgagggagaattaagggacttctcaagatcacacagctaatggtggtggatttaaactaggtgccttgagtacagtgttttgtatttcactaatactatgtagcatggtgttttgcgcttcagtaatactatgctagcatagtgtgtggattctggagcggacagagttgaattcaatgttttccaaaggcattcaggctatttgatcatttctcttaatgtgattctcacagtcagttgagtgcttcacaaaacacaccaagactcatcagtgagcggattgttaaaaggttatttatagtgaccttgtgagagtctaaacactccaagtatttctcaataaaagtgaataataacttttattatctttttttaaggatgttaggagggttaattgtcactacctatagagcaatttatataaactgaagcatgtccatgtccatgttatattgaactaattcttaccagcccatatctggtcatcagtatgccctggatttttatatcatgttggttaatataaagtttatcatcccctcagtcattgaccatacatccatttcatgagattgtaaaacaaggtaaagtcagatgctcacagtcattgatatgtgctacagttgagattaatccccaggtgatcttacattaaggaaatgtcagtaatctgttagagacacaagttcacaaattcagcaagattcttttacagttgcagaatcaaaaaatgtccaagtgttaactcccatggttcagccaagtttcttttttctttctttctttctttttttgagtcagggtttcatttgtcatccttgttggagttcagtggtgtgatcatagctcactgcagcctcgaactccgggctcaagtgattctccaactttagcctcccaagaaactgggactacaggtatgcgccccacacctggctatttttatttttattttgaagagatggggtcttgctatgttgcccagctggtggtgaattcccatcctcaagtgatcttcctgacttagcgaaggttattttgtttgaaatttggaagcatggttggcgctttcataagctaatactttaaagcttgtagctttaggtacttgtctgaagttcactgaagaggagcaaaagatcattattattatttaggcctcagaccttgcttgtaaatgcacatatatgcacatgcatagattcacacacacacagaatccaactacaaagcatttttcagaagtcttattcaaataaagaggtaaatggctctgctctggtgagaccctaataagcatgtgataattaaattatttatctcaggaacctatgtatcatattaacactaatattatagcagatgggcttttggatcagtggagggcctttgagcagcattagagaaccagtgcacgggagtactgtaaaataaattagcctcatcatttcacttcaatcagcaaacgattattgagtgcacatccctgaagatgcgtgtctccatgcttatgtgctatgtctggtggagggataagatcagtaagtaacgcaagcccatatcaagtcagtgtttagagaagtactgtataaatgtgaagctactgagatgcagtggaggagctcatatctggtctaggggtggagggagcatcttatggagaaatgctgttttgttttgttttgttttgtttgtttttttttgagacagtgtcactctgttgcccaggctggagtgcagtggtgtgatcatgctcgctgcaacctctacctcccaggttcaagcgattcttatgcctcagccacttgagtgctgggactacaggtgtgtgccatcatgcctggctaatttttgtacttttactagaatgggttttgctatgttggccaggctagtctcaaactactggcctcaagttatctgcttgcccagcctcccaaagtgctgggattacgggcatgagctaccatgactggcctgagaaattagtttttaactgactttaaaagacgggttttgtcaagtgctggggaggcatttagaccagggaacagcatgagcaaaagtcaaagggcaggaaaatgtacaagaagttatccagtgtagtggaatacaagacccatgatgtgctggaggccacgtgaaaaaaataaatagagattactcatggagagccatgaatgttggcttgagagagttttacttactgtaacaattccgcaaaatacctagaggcagcacccaggttattacgtagtctcaaaagagtatttctgacaacttattttaaacatttttttcttttttttattaaaaaattatttttggaaatggggtctcacgtattgcccagagtggtccctaactcctgagcttaagcaatcctcccgcctcagccaccaagtagttgggactaacaggtgtgagcccctgtgctaggctaaaacattttatttgtgcttatttcttcattgccaaaggatcgaaatctcacttgcttttttccttctgggagtttttgggctgttttggtctgcttagagaaaaccacacacttccaggctattctgcctctgtaatttccagccttccttgaaacaatcatctcgagaactgtgaaattatcccgctataatcaattggtggtgaccactcagtccctttgcaccagagaacttgtatctagcaagtctcttctttcaaacatttgttagttcgttaaagatgttatgttagcagtaggatatgatgcatcgagaaggaaataaaagaccaggacaaaagacatgttgaatagtcaaagatgagctgtaacatcagggaacactaactgtagcacctgattttgattgaaaaacatgataacattggcttgaagttgttgcagatctgcttaaactttcttcatggatggaatgaatgaaaattatgagcattgatgtaaaaataattgtttttggtcttttttttctttgtagaaaccaacctgcctccctccctccctccctcccttccttccttcctccctcctttccttccttccatgcatcatcaccagtcttttcttactgtacaatttccttgacagatggacttcttgtagaagtttcctgagtttaatacgggtgaccgtcatgggtgcaatattttgctgcaggagatggaaagcattatttttttttcctccacaaagttgtatggcaggaacatgtaaagctgcatcagtaatcttaagacgcctgttctcgtgatcttgttctcactttgcttagaggtttccccaaggaatattaataaggatgtatccagtagtaacagatagttcattgactctattatttctgaacatgtattgtcttttacgtaatagtagttactgcagtcattacagttctttttcttttcatattataactgaagcagtttctgttttttttaacaaatacaaatgtttaaaaatcatacacttctttaccttgctgcccattatttctcagcagttaaaactttattactttactgcagaaaaaagaaaggatgaaaaactataaatataatgatatagaaaatctacagtattttaaatgtcatattttaaagatttagtctctttaaagtgagtttttaaaatgaattcataaaataaatgcaaagtgccatagaagtaatgaggaatattaaaaatatttcaaggtttttaggcattgggaaatatgttcaagactttgaaaacagagtccaccagccatatcagcccgttgctattcctgatgtttgtattttcttctggaggaagaaagattaaaaagtggatcttttttttaattctctgcattagggagtgaaatactttctctcaccgaaagataagggtaacacagttttaaaaactggctactccttacatgcatgtacccttgcaaatcctgtagcaatgaaaaatctcctgatagatgtaaaaattaattaatgtcttactaccatgcaaagaatggggcataggtggataacggtgactaaatcccacagaatttgtgtggcttgcctactaaactcgagtaatataatataagtgaaagccaaaaccagttttctgttgttttcctctccagttgttctttataaaagttggacctgtttgttttgttctctaagtgtgccatgtgcagcagcctgtgtaattcctggtccttggagcagactgcggtgtgcaggatgcccgtgcaggattgggtggctggaactgacaaactgggattagctgacctcctgcaggaggctccagtggccctcggccgtggtgagaaggagcagagccttggtgtgtatgtgacctctaacagtgaaggatgcctagttcaccgataccacttgcagtaacctgaatgactggttattctggtcagggaaaatagcactgacatcatgtgattctggcaaagtaaaccacattggaacttggccttgaatacccaaggggctggcagcaatctcaggggttggctgggagccccattgagttcacagtaatcagttgactgctgagctggacaagctgccctagtttttctgacaagctctgtcaaaagaatgatgggcagtctgccattaggatttttaagcagagttgctaaagattaacttttagctactgtaaatatatcatgtccttcgttatgtgttggtatgcaatcagatgaaacttggagggaggttctaattcctcattcagtgattgcacctggagttcctctcttgtaaacaaacacccaaaggcaaggaaaaacaccgtaaagttctttgtatgtatgtttcaaaggatgccagtggataggtttttcttgaggtttctagtttgctttttaaaacaaaatactatatctttaattatgtaaaatgttagatgttgcattctgatcatacttcaggaatagacatacctaagaaaagtctctgaaaaactacaagcatttagtatttacttattatgacacataccatggatttcattttcaaaaaaacttttattaactcagagtattctagaagaaaggagtactatactcaaatgtcataagtccagagaaaccaattcttttgaataaacgtgacttccaatggatttatttggttatcttttactagaaaaggtgataccttagtaacttttattcttctctcacatagttaaaataaaatataattgacagagatatacaggttgacttaaaatttctatatactgtaatcccggtgatgaatttggtatgtttaatgttgctttaaactggatatttcctaaggcatactctcttttctctaggtaactatgacataagcaagggaacaccaagttctttgatagtgcttcagcactccttcacaaaatcaaattgaggtagtagtgaggcactgtggggatgtagtagccaatgatgtatcatttatcttgggacacacctgaaagtttaatggcaaaagctgaagttttggaaatctgtcttccttttgagctaaggctttaattcgcctcctctttgatcttcccttccaaaaagctgcctttgagaaatggtacaatttctcttcatgtttaagaggtttgtgacattagctacctggggacattattgtccatcagagaactatataaagaaaacaaaaaaaagatattatatgcacagacactgtctaatggattcttctgtttcccactcctcttatcttccttgactcagcacaaaagtgctcaacaggccataaatcaaaagaccctcctccctgttagagctaaaaatcctgcgtgataacctttcagatgctagttaagggcaaatttgtaactgagttttaaaacttggtgtgttaccctaagacttatcagaaaagaagaaagagactcgaggggttttgaacaaggagttaggaataggtgaaacttttatcatgtttgttcctactgtgtggggttttgggggagtcagaaatggtatccacaagctttggcatttatgatgatattcctgccttgttccggaattcctctatttatccctttgatgaggacagtgtcaccactgtctattgctaggccctaaattatctcaagaaagggcttagggtggtgaaggggttgtggaattaccttcccctctcacttttccattctctcttctgcctctccctccttcctcatttcttttccctttactctccttccttcctctcttcttctccctccctccctctctctcttccttcctttctatttttttacagtacttgctaagtatctctattgtcagtcaatgcacaatgatatgcaataatcatgatagacgtaaactgaggaagttataagataatgggagaaaacaatttcccaaatcaaaggatcacaaaaatgcactttacctaggcaacagtgagacgcgatcttaaaaaaaagtagaatgaacaattgtggtgaatctttggtgaaaaggcacatgatgctataagagcataaaacaaagggatcttataaatatggagatttccgagtaatactatttcttggtaatacttaagaaaagaaaaaagctaaatctaggtagtatctcatctccaccacttactatttaaacttgggcaatttgtttaagctcttgactcataatttgcttatcagtaaagcagagataataatatctacccccatcctcagttatgtaattggaaatactaaatttgaaatatttagttgacgtacagtgagaatttaatgaaggtatttcttatcactaagttcttatttcagtggtccttttggtcactgaaaggtgtcaattcttgctgctatttggtttgtatattaattgcaagtgtaagaaactgaagttatacgactgaagtgagaaagggagattattctctgatgtaatttaaaagtccagtttatctgcggtacagtttgattcaggtgttcaaatgatgtaactgggaatgtttctctgattctcttctatgccattctctttgttcccttacttctcgggcaaagagggtctctttccacagtgaggcttatattctattagccaagcaaacccagtggggaggaaaatgttcccttcctcactgtccctgcagacgttcctgggctggatctccttggactacccctgaacctgttgctgaatggtgctttcttctctttggctatgcttaagtctcctgcctgttcttggagaggagctaaggaggatcacgagacacccaaactacatgatctcagaaagtggggaagagtggcttccagaggaaaattattgttattactaacaaaaagtaatagaggccgggcgtggtggctcatcctgtaatcccaggatttggggaggctaaggcaggaggactgcttgagttcaagagtttagaccagcctggacaacatagtgagatcccatccccacaaaaaaataaaagattagtccacatggtggtgtatgcctgtaatcccagctactctggaggctgaggtgggaggatcactgagcctgggagaccaaggctacaggaaggaaggaaggaagaaaggaaggaagggaggggggggagtggaggagaggggagggcagggcagtttaggtgggaaggaaggaagggcagttaggtgggaggattgctaggatggaaggaagggaggaaagaaggaaagaaagaaagaagtgagctgaggtgggaggattgctgaggccaggagttcaagaccagcctgggcaacataggagaccccatctctacaaaaaaattcaaaagttagctgggcatggtggtgcatgcctttatcccagctactcaggagactgaggcaggaggattgcttgagtccaggagttcagagttaagtgagctttgattatgccgttgtactccagcctgggtgacagggagagaccctgtctcaaaaaaaaaaaaaagaaaaaaagaaaaaattagtagatactgtgtagacaacacctaaaaaacagggcagatatctactgtagattttaaaaaataataagaacaccctgttcctgctttagtttaggtagaagtgaaactgttaatgaggtgacatcgaagcatgcagagtacccataattactgagtcttgactgtatgccaagcagtgggccatgtacttctgtattttattttgatcttcacagtgaccctacaaggtaagtattaaaatcttgctttaattttatatccatgaaattatataactttttcatggtttttcagctagtcagtggtggcggtggcctttggtgcttgatcatccttttgccctgcagtggtgcctgtgcagtgtcagatggccctcctgactggagcagtgcagagacgtgccatgtaggcctccatgactggcacattttcctgtgagaatggagtagtccttttttctaggtcagggatttgaaaggcaggactttagaatcctctctgggcatggtcactgcctctccctgcattattggatggcgcatggaaggcctccaacctttgctggatctgtctgtaaaatggtgacagtgttaagcttttgagagattaatgagtcgtttgtaaagttaaatacattgtgcatcataccagagacagtctcaccacttaattgtgactgttcaagttctcttgactatggtataagtcctagtcagcttgggttgtcataacaaataccatagactgggtggcttaaatggtagaaatttcttttctcacagtcctggaggctggagtctgagatcagggaattagcatcattggattctggtgagggctctcttcgtggttgcagacagccacctgcttattgtgtctcagaaagcagagagagagagagatatagtgaagaaagcaagagagagagagagagatcaggcacattggcatctcttctttgtagggatacaaacccgttttaacaggccttcaactttatgacctcatttaaccttaattacttccataagaccctgtctccaaatgcagttacactggggattgggtcttcagcatatgcattttcaggacacagttcagtcaatagcagggtgatattagtggttttctgtgaaccacacatatacttgatatttcactctagcctgttagcactgtcagtggcaccaaataagagggtttggctaggatgtttcctaatatttgcctgttaatttgggggaaagtaattggaaattactcacgaagttctcatttacagcaaaagctcttcaaaaatgatatggcaaacatatgggcattcctctacaaatccatgtacgagatgtgtggaaatagagctatcaacaaagggactgaaggtcagaggaggacacaatgcagggttgattaggaaggacttcagcagagtgaaattaaactgatatcccagggtaaatgggattttgcagggtgaagggcagagaggcattttggtggcggctggagcacagtcctgtatgaaggtgtagtgacttcctgtacctaagacaaagggattggagagcagtgggagcttcctcccatctaatgggtcggagtttagaataccagtgcctgccaatgcaaggtattggattttatcctagaggcagtggaaagcccttgaaggtcttatgaaaagggaaagtgttaaaattaggtctgggttttagacaggcgagttttaagtgtaaaatgttgattagagagcttagagtctaacccacgctgtccctgatatctagaatgcctttcctctctaattctcaggaattagagaggaaaaccacacattcctgttcattgcacacattgtgcaaccacacattcctgttcattcttcaaaacactcctctagagtgatggatatttcagtaaactcatttctgacctgtctagatggaataatcactccctcctctgtcccactttataatttatgtgtacttattattattatcatttttcgagacagagtctcgctctgtcaccaggctggggtgcagtggtgcgatctcggctcactgcaatgtctgcctcccgggttcagcgattctcgtgcctcagcctcccaagtagctgggattacagatgtgcattacaacgcctgctgatttttctatttttggtagaaatggggttttgccatgttggccaggttggtcttaactcctgatctcaagtaatccacctgcctttgcctcccaaagtgctgggattacagtctgagccactgagcccggccatgtgtacttattattgcttgtatgacattatagtataatatgtgtttacgtatctctcccactacttgaagaaccttgagagcaaaagggttgcatttttttgttgccgttggttttttttttctgttttgttttgttctgtcctggtttgcattcaagtatatggtgcttggcatatcttaggtgttcttgtttgttgaacataaccaagctaagcttctgtgaaagtcaggagagcagcaagaaggacataggaaagcttgtactggtaggaaagaaagaaggaggcatattattatggatgtagggagaaggagttgggtgtgactgtgattttctaatttcgtcacctgggtaaatgttagtttccttaacagaggcagtggaagaaccctgagtttggaggtgagttgttcagtttttttcttctaggttgggtaggcatgacccaatgttgatgtctgacaggcaaatgaaaatacaggtctgaatttagctgttgttatcccaacctttgaagccaaagtttgattgaggttgcagagggtgataaagagaaccaggggaatgtgacttttagaagaattggagttaatacaggagaatgatagtgagaagtcagataagtagaggagaatccggacaccccaatgtcatggaatcagagatgagaaattaggcacatgctcactaatctaggctgatgtatggccagagacttttatcatgaaagtactgtgtaataatataacagtagcaagaacaacaataatagtatttactatttttttagtacttattgtgttcaggcattttgctcagtgttttttctacatatcccatttgtttcaaactttgagcctatatctttgtttaaatagatatacaaattcaaattcagagaggtcagtaatttgtctaaggcaacggctaataagtattggaactgggcatggtttgtgaactttgatatgctgcaaagtactaagcagttattttattttttggtggggatctgtctatggagattgtggagattaaattatcggtaaagcttactatactcattcccattagctcagaagaaatgtaattctttccgcttacatggatgagaaagtatgtgggtaagtttcattcattttgaatgtctctcatttatcagcagattcagaatgtattagtgactccaatatatctgactgcactggtatatggttatattttaactttgttttctactataaggtcatttaaaaaccattctgacctatcattcctctacaaatttcttatgcttatgttgtacaaactgaatttttatataatagagaggatatttaaataggaaagagaatcctgaatatctttaagcacttactttgtttagtgcttcatgtggagttgcatgcttaaaagagacatacacaatagccattcttgaaaatatttgctataattgctacacccttatggatgtgttttcatatataattcaggaaagaaaaattattcgtatgatagattagtattaccacataatagtactgatttgtgtgtcctattttagtgcttgctaattctcacgtgataactacagtatacggtaatttccatgaaaccagacagtttattctgctaccaatgtcattttaatgcagttgcagccatatctgtggcttcagctagccttgtgcaggaaaccctccagcagcaaggatcctggcttgagctcactcagtcattttaccccacatgatgtcatgcagcttagggtttcctggtctttgagtggatgaacatttctgcttttaggctatctgagacgaggttgggatttcttaggacgaacttttacgaagaaaaatctgagaaaaaaatgaaatacaataagataccataaaaaaatggatgagcacaggttttttttttgtactttttttttaaaaaatacccaattaggtaaatctaaccataggttgacttctggctggacttgaaaactcatttatttccagtttgtcttccctcatgaaacacaataaacaaaacaattccacccccaaacctgctcctcttctagattctcaagggacttaggaatggggtagaagaaaatggtcaagacagcccacctgatttatttctcttacttatccagattgttttggaatcacatgccagcttctccaccttcaaatgccttatgatgcagaatattaatattttttgagaaggtaatataagttgctttttcttctctttcaaataattagttatctttttccacttcatatgctagaagtaaaacaataaagaaacctctgggaattttcattagtgattggttttcatatattctgtctttctaaggagggagggaaggaatgtgatttaaattttaaactctagtcttgatgactaaaatgttctcaaacttggttaaatcagctatctcttacataactattggatttctttcagggggctgtttccttaccgacatactgtacaaataatgcagtttaatatagatatatcttgatgtgtttagatttggtaaaccctcttatcttcaaacatgcatcatttatttaaaatgcataggcatatgttcagaacaaagttattttcatacatatatattcattagcctgtgtgtgaaagtacatttcaaatcacaaccatttcaattttgtttttctttccaaactttcttttctctccatcttggtttaattgaaccctagaccgaactctttaaagcattcctatggagccagggtacatttgaatgtctttgactgatataaataattgctttgttgatcatatacccatgcatgataagatatgcataagaagaaatctgtacagaagtataaataatacttatctttaagccagcatctgtcatctgcttcagcagaagtgcttgctttcttcctagcacaaaaaggcctgaaagatttatggagcagctttgttttgctctgtgatgcttaatcaatttttattaaattctaaagtaaaacttggctttcacttagtgacatctctgatgtatagaacaaggggagagatcatgatgccctgaaaaagttaggatgggtgatctaaatccccaatctgtttcttcctgcaggacttcttgcaataacttttgaagtctgaaggaatccttgtaggtttgcaatggaaaaagcaaatacagcccaaactttaacttttcaaacttctagagagtggatatttgtaatttgttttttaatactcatgcatattccatatgtgggaaaaaacacataaattctttcaatgtgcagataatgtgctcattttgattcagaatcatctgaaaaataaagactcactagttatgtttacagagaatcttaaaactttggtaattgaggtttaacatattaaatatctgatagacatgtggactctgtcgcctttgctggctggtttgccttataggcttaacttctggaattttttttgccttttcaaacaattcttctggttgaatatcagcatatggtaggaggctcactctgagacaggataatttataatgaccatttcttgtcttgtgatcttatgtatataaagaatctagagtcatgagtcaattgggatttttgttcaggaaaaaggttaaaaaattagacatacaattggctttctttgatctgtgtctataaggagaggaagaatgggatttaatttaaaatatatttctgcattgaaactgatatttctgtttttgaatttgcttttttttaacatctggtacacaccagactaactgtacatattattcctttggaagcatatggttgtgggccctgatccaaaagtagcttattatctacatttcagagtgtaaagtttcttgaagaaaggtggggagggaacaactatgagtatgttgttaattattgtttattttctaggaaatatggcaagctgtaaacttaagatgaaatatctgtttttttttgaattatgtaatatgctactttggagaaagtcgattaaagaaaatttggaagccaattcttacgtgccctaggaaaattaataattcatgcagctacttcttcctatcagtcatcttttcactgccacatttatacttatgtattatgaactgctgttttttagttataaatgccacaggtagatatggatgttgatactgatatagtctatttatctattattacctaaaccttgatgcatattcttgtatttacttagccttggtaatggcctggtcgttatgcatacataactattgaggcagtttttgaggttctggaattattcaaaagaccggccagaaatggttaaatggcaggtaattgccgaatacatttgcccctcatttgcctaaaggtattcggtgcctgagtgtattcttgccatgtgctttctttctcagctgcggctgatcagaaagacccattggaattactgtgagagtagagaagaaaccctgaattaccaaaatgagacagccctgctcaacttgatatgcaaataagctttgaggatacagtttagttggtccggctttctaacctcagagctccatcttacgctgtcacttgccaatgctacttcattgtgtacttgcagcctacaaagctagagagtttgtctgctttctgtggagtaattttgagtagtgaactgaggcttgggagagtttgccaaatgaggtggtgatgatggctaaagagacttgacttagggagtgctttctggcagaagtacaacgcagacggtatcatgtttttgaccatgtactttagacatgctgccaagtgtttgtaacgagatagggctgttactatactttgctttaactttacttttgcatacagtacatcgttcttgttttataaactgtgtcgcatacttttgtacctctataaacaagtgaagctgttgagtttttggataaagtttgaagcagtcttggttgcttcttctttgctttatgctccaagttgagagctgaatagtaagatcttttttcaaccatttataatgcgatgcacattttgaaggcaatttaaattcttttggctccccagcctatgcttcaaaatggaagcattatgcatgtctgaataggggactaggtaggaaattggatataaagatatatggcaggatatatagtagggtaatattatctattgagagagagggaggaaagagagagggagagagggagagatggggacagagagattaatttcactctctaggatttttccaaactttaggcccaattttgctgaagaaaatttaaaatgtttccataggctaacaggaacttttatgtatgcaatttatatatttaatgaaattttggaacttgaccagtgattatttgagaaattggcaatatagtcaagagtaatggactttaaggtataatttttaaggaaggacaaaactaatataagtggaaaccatattcctcttcttttattacattttttatcattcctttttatgattttatttctcttcatcctcaccatcccctctaaattttcttcgtttgtttctacattggaaaagtgaaatgtaatgttctctttaacatataaactcttgcctctctccctctggagggtatctttcactgttttcataatttattctgctgggtagaaaccccagattcctccaatattctgaaaataatttgtactttttgtagatagaaatttccttttcgaagcttctctcattataatcgtgtaaggttcttgtggttatgcctcattgatcaatggatatcattataaaataatttggctcatatttggatttatatgtttatgtatctttagttagaacagagattcctttctcattcttatttaaatgttgttttcttatcttttctcttctgttttccttcatagataataagtgacttgtagtattagatcatacacaactggtatttcttctgtaactttcatcagaaatgagtattgtgtctatccaggagttcctgcacttttcctgaaggaaacagtttgtatgttaagtatacctctaaaccttattcatttgaagtatagtcttagaacatatacacatgccattttcctcttttcctctctacaccgtggatttgaaattatggaagctttttacaaaaagacctaatgggatttatgtgttattttctttgtgccattgtgtgaaaacagttttcaaagttaagttactgttctcctgtgtaacattgtgaaacaaaatactacaaacctttttggttaaatgatggaggagaatcaatttgttctttaggcaaatttcttaattttagtttcttagaatccctatgtaatgggcatattaccgactgctttgcagaatcaaatgtaactccttttcctattataaactatattgtataacataacagctttgaataattatcatgtgatgtactttcaccatcagttgaccttatgctgtttaggagcaccagggagtcctgggaattaggaaacaaaacagagaagggaagaaaaaaaagcaggactgaatttccttcattcattcatttatttttgagaagggtggagaagcccacagatttaatctcggttgggtgaaattgtgttactgtttatctgtacctttttccccctgtggcaaggacgtggagaatagacactcactcccaaagataccaagttccaaagcactgagtcatgatccacaatgaaatactaggatgcagccatttcctacctttgtttggaaatgaactgattgaccaggcggatgtaagccctcagctgcagggctttacagaaggaaatgcttttggtcttcttaggtactcgatgctgttctgtaacttctttgtatttgactgaaacaaccaatgtgaaatgtttcctagactatataaaattcagcgcatgcacccttctgtctgtttgtgcacaatactttttatgtgatggtagggaaagcatcaactgcttttaatgcagtgaatttttaagtaaccttacgtattaaactcttcacaagactgtctctcttgagtagtctcatttatattgtagcccctacttttagtggtgacttccaggtgctgtgtgatctgacccttgcctcccctccccagtgagtcactctgcctgccctttcagtagcagcaatactaccatccctccagacagctgagcctcaggcactttgctctgtctgtcctttctgctgggaaccgtttttttccagatgatcgtaggtagggcttgctcccttacctcattcagaggaagacttaaattacagtgcccccaaaatctcctaccactccagctaccactctcttcttcccaggtctttttctcttaccctgctgtactctttgccccatagctacctcacatatttcatattcatttgtttttggtttactgtttcttacccctcctagaccgtaagcctcatgtgggttaggactttgaaatctgctgttttgcccagaacccagaatatggtagaatacacacacacacacacacaccacacacacacacacacacacacacactgttatacctagcagggtgaggagcttacacaacacacacacacacacacacacacacacacacacacacacacatactgttatacctagcgggtgaggagcttggtagatcaataataaatgtttattgaataagaaacaatgtagatcgcaagagatgttgctgacctcttatattgggctatttgggagttatttaacttttgcatcctcagctttcccatctggtatgtggggacgagattttgcataccttggaagcatgttggaagtctgattaataatgagtagtaatcatgagcagtgaaaagatcagacaccagctcttttaatgagaaggtacatagacataatgaagagcttttgtgctcagtgggcaatggtattcttaggtggccaagcttttccctgtgtgtgctggccttcggcactttttgggtgttaggattttgatgatcttctgaagatggatgagaagagggctaagaatggctaaagcttggaaataatttggggagtcacagtaaatcaataggatgagatagatgaaagaaattggctctaagagagcattggaagttttagattgtcatatttaccaccttcagttctcagacctgatgttttcagtgacgtagccttttaggaatttcagaagtgtgattttaccttgaatttattgggctaaattcaattgtttatgtttatgcagttcataattttgcagtttagtttgtgtggttagtggccctactgttcaactggatggcaaatctgtgctaggaggataccatatgcaaagtattttcttaaataatgttggcgtttgccactggtgttaggggaagaagaaaaaaaatgagagcaattctggaagccctccagtaaggggttaggaaagaacttagggacaaatgtcctacttggaacacaacaccaaatagtggcttttttgtgtttttatttttttttttttaagagaagccaaaattaaacacagtagagtttactgtttgctaatcagcatgtgtttacttctcttccaaaactgaagttgccaaccaatacatttcctacccagtgctatgaatctgccaaataaacatgggaagtagtgaaacaatgacaccacatgaaaaatatatccttattcttaaatagaatccaaaaaattctctggaatttaattgtagcaatgacgtgaggactgtcggtctattaagagaggatagtgacttccctcttcagttagtccagcacggatgagtgtgtcttaagtggctctacaattccacatgcatcgtcctaaatctagatacatgaaaatggacatttcctatcaacccctcactcacacccgtggactctagggcatttgtggtagagtttatggtaattacaaacataagcagcttgtcagaattcaaataatcaattttaatttctgttcaatcactaaagattactgaccactatgatgaaattaaggagtgctttctctggagatgcaaacacaagggcagagagaagttagaagcttctattttgtggtcagttttgaaaaatcagtcaaaagcagtagccataatcaacattatagagaaccttaaattcataaagatgccatttagctattagtgggcagttccatataaaactggtagctataatgcgtacacatgtcttgttaaggggctttgttgtaggaatggaagatgagggtatagtgattattgtgttatgtcaatgctattatttaaatatgtctttaaaaaatatcctgtacactcttgatactggagccagcctcttgtcttccatcaaaatctgcttttaggaaataatgcaatatcaggcattgttctttattgtgagtttaaatacataatggtgagcttgcagtagtaattgtgttaaaaaccagtgggtaaagtttcatagttaaagttcaagccttggggataagtggtgtttctgataggacaagcattccttctgacaaaactcttactgcccaggttactatttttttctttctgtacatatcaggtcctagtgatgcttctggacgagcctcaaaacaaaaggttgttcatttttgaaggtgatttagcacctaattgtaattcagcagtacgtgaagattagagttgttcatctacagcagtacaacagtgctttttttaaaaataagaaataaattaactgaacaacttgcttcgtaattcttggacttaggtaagtgacatataaccaaataagagttgtgtataaaccaagatgatagcccatgaaaacccaaagggatcttttagggtgagatagtatatgtcaagttgtcaggcaaactgtataaacttggttgttgcctttattatctattctaatcattacagataaggaagctgaggccttcagcactaaggtctcacacaggcttttacagctggtaggaacaaggtcggggctggcaatactgggagttcctaaacacaaaaggcattctcctcatcagtttgcctcccaagttttaaatgatgtcctttgaacatcagatcgcctttatcaaaaatttttaagcctgaattttaaaggaatgagatggagtgaattagtgtgaagtcttttttctgagcttggtgtttattctttattttgttttcaatcgtataacattttctgtaatgcccatttgagtaaagttatcattatcctctataggcatatacttattaagtacctaccattgtgaaaccctaaatagttaagattgccacatttgaactgcaagaataatgaatgattaaaagtctaaaagatttggttattcaacatttgttcaaaaagaccaaatgagcatatgtaagctatttttttttgtcccctggttgatccagtgatttcacctcactattgttattctatcctcttggatctggtttttaaaaacgtatgttgaaatagttaaaacatacccaaaaaaaaaaaccaaaaaaaaaatttcaacgaacaaatgcatgcaccaccaagtttaagaatgttaataaaattttagttaaattgatgtaaattaaattaaaaatatgctagttttacaaagataactaacaaaatgttaaaaaaaaagagtagaccaagtgcagtggctcacacctgtaacacagcactttgggaggccgaggtgggcagaggtcaagagtttgagaccagcctggtcatatggtgaaaccctgtctctactaaaaatacaaaaattagctgggcgtggtggtgcgtgctgtaatcccagctactcaggaggctaaggaaggagagttgcttgaacgcggaaggtggggttgcagtgagccgagatcccgccactgcactcaagcctgggcaacagagcaagactcattaagaaaaaaaaaaaaagagtaatgataatatacctacatgcctcctcttatcaatccattccttcttatcctactacaccatgaggtagcttctctcttaaatgtggtgatttttttctagtacttttattgcatgtacttctgttgcagatgggtttgtgatctggtttttgagctgagaatgctaatctctctctgccatccaatctagagagtaatcctctgacattttacttaggataatttctcctaggtttgactgttcaataagtcacaggactgcaggcttcaacctggattttccaagagtcacagaagttagctctaagtctcctttccttgacatgtaaccaataaaacaatgcccttgactcctgttttgctaattataattgataggtgctttctatagtaaagcatctataagtaagatgttatataaattaaacaaaaattttccttttgaatatggaatgagtgctgatggtgacaaaactgccctcagagttattatttcagatcaaaattatagactagaattaagctacaatatttcagctcagactactagttaattttgtctttgtcatatgctcacctttcaatatttgtagtttgcaaacagttattaaagaataatagcaaacaagtctgggcccagtggttcacgcctgtaatcccagcactttgggaggctgaggcgagggatcacctgaggtcaggagtttgagaccagcctggccaacatggcaaaacccggtctcactacaaaatacaaaaattagctgggcgtggtggcctgggcctgtaatcccagctacttagaggctgaggcaagagaatttgcttgaacctgggaggtggaggttgcagtgagccgagtcgcaccactatactccagcctgggcgacagagtgagactccatcttaaaaaaaaaaaaaaaaaaaaaaagaataatagcaaaagagctaaatactgggtgtcagacttcaccaaagcctttatggttaaattgttagatgtttttcctgaaaatttttaggatcactttctgagaattccttcacatctgaaaatttcagcttccagtttctcatgaagggatataaatagtttactattacttacatttggaaataaaatatttaaggcaatatttgtgtgattttgcattttaacacaacgtactatctttatggctaaactacctgtctgtaagagatcttttgaagagcgtaatgacatcaattgtttaggaggtaccacgagttaaactttctgttctttgccttggtttcttaaaaagtggtgactttttgctctatcctatcaagagcaagtgcagcatgtgttgaagaaggaggaagccagaggcagacccgccctcttgacctgtcccactgagcatgccatttgctagatgggccctggccactgtggactctgctttagagacctctgcaaataggtgtgggcactcctgatttctttgattatagactaggatagttacagactatagtacataggaaaacaattgaaataaacatttaaataaaataagttaaatagttcaactcattataagacttgctacactttaggattctgtaaatcacttaagagtcatagaaaaatataaggattcgctccttaaatttctcatttgaaagtttccaaggtgaaaagaattcttagaaaagaattaacactgacgctgatccttagccctctaatactttaaaatggacttccagacttcgttttcacacctggcaacctttagtcttcctgtctcccttgtcttaacaagttccatgatgtgagtaaatctgatggcttttgtttatttaatttttgctttccttgagcaggtaggtggtggtcagtagctgagtatcttctttcctggtggcaaatgatttagaagaatccaggaccacgtgcatttggtgcgttttgcagcaggaagacaggcacacacggagttaagcccatggctctctgtgttaactgaacattcccagtgtgacggggtcgtaatccctaagcagatgctttcggggtctcattattgtccagaagtggctcttgtatgagaaaaagcagccatgcagaaaggcacaaacactattgacttgcccaccatggcatacgtttttttcttcctaacatccataacccatttcattcttacctagccatggtgtcgctccttccctcgctacacctttaactattaaaaatcaaaaacagaacaacaacaaaaaactagagtaaaatcatactgttccatatgataagagactgcgatttaccttaggatcttttgagtgtggtgttgttggcgaagacctgtttctttcccaagtctttcagccacactgtggcctttcaaaacctttaagtcctgtatagtatattttgtgaagaaggggaaaaatgagatttttttcctccttgcttttgttaaccattcttgttttagactccaacaaaaagggtttttgttaactggagcttaaaatcggccgcttgcaaagtattctctctttttatgcaaggaggattagcttgacatgttatgcagtttcttgtaggagccattcacgtgtcctgtcataaggtgtataattactgcacttcaccatagcaatcattcttaagttaaaacctgttttaaacctctcattaatataaatcataccagaaggtagaaaatataccttcaaaaagaacgaactgttagggagttaatctgttcttttctaatagacctggagtaaataatttttacttagcacttttctttctatgcaatcaaaatatttgtgataaaagatctggtacccgggattgcataaatgtgcagtgttttattcaggcagattgggcttcctgcttggtgccagcctcgttttccctctgtcacccttgaacagtgaatgtgtaatcctccattcttttacagtcagccctctgacaggactgcctctctctccctcctctgcctttccttgtctctctccctctctctgtctctctcacacatacttgctcatacgataaattcaggagcaaatagtttttcttttcagggctttctcccagtgaattctcccacatgcttagatagcaatctgaacttacaaacaaatgtctcaacgaatatatatatatattatatatatatatatattttttttttttttttccccatggaaaaactgtaggccaaggatcagatatccctgttgtatttatttcttagtggtttgttctagtgacagagtggcagcttgccactacagcttgggatcctcagttactcatcttgcgaactccatttctccgctcccctttgcctttcgccaccagaatccacatgccactgcctcagaactgttctgagggatgatgtggaaagttcaatccaagctgggctttccagggcagtaggctagtcagtctcaggaaaatgtctccaattctttgcacattgtgaaaggcccagtttgatctggattttacccaccttccaaacttgtttctcacttttctctctggaacttctgcctcatcgtctgtacaacctcttcctctttaaatttgtcaaaaagtgctacttttttctacctaaatgccttcacttctttaatcccatttcctccagctaatttttattcaccctttaagtctaagcttaagctaatttccttttctctttcatgtatttttagttaagtgcgtactatgtgcctgaaattattctggttcttgaaattcagggttcatttggatatagactatatctctgctctcatgggacttcattctaggagaagccttcaacaaagaagtcttccttgacattccattctgttagcgcctttattttgcatttctgttgctctctaagtttcttcatagcattttattcactctgttaacaaatatttgttaatacccattggaaatagtcatatagcttggacaagttctgccttcctgatgaactcaaagctctatgaggacatgatctctgacatatgtctatccaggaagatgaaggcaattcatagaacctgaatgaattaataaatgaatggctttctccctgtccccaatattataattgtactctgcctgaattattttataccattcttttatactgtcttaaaataccactaattagaaattcatcaggtcaggccaggcacagtggctcacgcctgtaatctagcacattgggaggctaaggcgggctgatcacctgaggtcgggagttcaaaaccagccagaacgacattggagaaaccctgtctctactaaaaatacaaaataattagccggacatggggcatatgcctgtaattccactactcgggaggctgaggcaggagaagcgcttgaacccggaggcggaggttgtggtgagccgagatcgcgccattgcatctgcttttctttatcacctgcagatgttagtggctgcaggatgggaataaaagtcaggttgggaggggatatttttaggcctggaacagagagaggtctaagatggttggctcagtgagggtcttgcactgggccctaagcccggaagggaaggtggagaggagtgcaaatgatgaggaaattaagcctggcttcctcaagaatttatgtaaagctgagaactctgtttctttcttcttcttcctcagcagaaagaagagagttaaaattagtaaagatttttttatgtgccacaaactttacatacattatttatttaaggcattattttatctccagtttatatttaggagccaggcctttttaattccagattagtacatgtaaagctgacactctgcagccttttggtgctcaattaatgtctactgatgaatgaatttattgtagaagtacttgatctcccatttggcataattcttcataaggcctcgtctttagactcagaattcctgttggtactattggtatgatggttgagttgcattcagattgaattgggctttgcgtgctggtgtaacaacctgatcacctaatatgttattggttaatagaattcattgagttccgaccattaacttaccgatgagcttttagagcacgaatcatagtaagttggagattacctgtacgtgaatgtagaaatattataaaatgaaatcgtatgagttgattttcctgtgatatttagggcacttcttttctcatacttagtttaagtgaattctctactactgtttttttttttttccctgtaaacctgcccaaagcgtttttacaagtagtggtacatataataatgattataataaaaacaactacctgaaaatttaaaaagaagtaaagagataaaggaatttctaagattccaaaaagataagatctttttatgtgtccccatttatattgagtcacctggaacatggcattaaattagttttggtttgggttcatgtgaaagaaaaccacatgagtaacacactctaataaaattaaaatacagttacaaagagacatctcaatggactgaaaaagccaaacagtcagatcctttcttacgtagtggtaaagcctggctagaaggaagctttttcattagaatattttcaaaatcaagcatacctcaatttgcaagcaattgaatttatgtggaattaatatagcccaaataaattaaatgaacaattaaatgtttactttttgaccactaaaatggagtgtggcttttgtaaatgggttcgagtggaacattgtatatttagatgtgggaattactattaagaatcgtggccggatgcggttctgggaggctttggaggctgaggcgggtagatgacctgaggtcaggagttcgagaccagcctggccaacgtgggaaaccttatctctactaaacatgcaaaaaattagccgggcgtggtggtgtgctcctgtatcccagctactcgggaggctgaggtgggaaaattgcttaaacctgggaggcggaggctcagtgagccgagattgcgccactgcactcctgcctggatgacagtgagaccctgtctcaaaaaaaaaaaaaaaaagaatcataaagtttattatttcaataatctaatatctttgatgatatgattctgttcctatataattatttttaaagtcagtagtttaacacaatagctttaattccttctactggttactatatgtcttcaaaagatagaaaatgcaaagttgtatgagtatctgattaaaggaagagtaaatgaattattaatgagttaaaaataaaaacttggatgctgaaaatgatgttgaagtatataaaaataaattatgtaaaattgatttaaattaacacctaataagacatgaattacttcaaaatactgagaggttgagtggctggagcttagactccgaggttcagaaggttcctctctgcagctaaacagcaatattaacttgggcacgttattaacccattgaggcctccctttcttcatttgtaagatggagttgatagtagtatccaccttatgatttgtattgagaattagagtgaaacattgtgaatcttgttacaaaaagcttgcttcaattgacatatgtaaggggtggttattatcatcaacaacattggagaaaataaatttttttaaaaaaaccatgattacagtaccgttgtaaattttcatgccagtattcatattactaggttcagggaaaataactaattcatgaaaatccaaagtaggtctgcctttctccatagatgatatatttcaagtctatggagagatattcaagaacaatgttttccaattcattggttttaaaaaattcatccatgctttgtttattcaacagatagttttgagtacttcctaatattcatgccctatactgacctagaaatgaaaagcacaggctctatcctcaaggatatcacgtctaaaaataagatctcaccagcaaactgggaatccatttagacaatgataggtggcaaaatctttcaactgataaattagcttttaaaattggtagtagttttctgcacatgtttaaatatatttcttttcttttacttttcttttctttctttttttttttttttttgacacgggttttgctctcgttgcccaggctggagtgcaatggcgtgatctcggctcactgcaaacttgcctcctgggtacaagcaattctcctgtttcagcctaccaagtagctcggattacagaatgcaccaccacggccggctaatttttttttgtatttattagagacggagtttcaccatttagtcaggctggtcacgaactcctgacctcaggtgatccacccaccttggtgtcccaagtgccgggattacaggtgtgcaccaccgtgcctggccaagatttcttactctcttccacacttccccacccatgtgagtttatgataaattgggaaaccatttggaatccaaacaaaaaggtgattttaattattagtccatcgaaaagacagaattaccagaataactacagttcttatttctaaggtttctttggctgtattagtctaatatttatttttaaaatgtgattagcattatctggactaatttttaaatatatgcttatattaataaagctcataagaagtatttttaagactaatatgcttatatattcattgctttttttttttttttctgagatagggtctgctctgttgcccaggttggagtacagtggcatgatcatggcacactgcaggcaccaccgatgcgttcaagagatcctgtcatctgagcctcctgagtaactgggactacaggtgcatgcaccctgcccggccaattttttagtttttgtagagatggggatctcactatgttttccagctggtctcaaagtcctggactcaagtgatactcctgcttcagcctcccaaagtgctgaattataggggtcagccactgtgcctagcctcattgtttttgttgatggtcgttttacctatagactttagccaaaaaaaagttatccaaatattgtttattagcttgttaaaagggagtgatccgtatctcaatgaataaatattttcagcctgtgttacaaagccaaattgtcatctttagattttagaaaaaaaaaaatgctctttaaaatgtatagtacataccttcccaattattattctgttagtgctgtatttaacaatgacagggaattaaagactataataattaaactgaattagtgttaaaaattttacctgatcactgttctaaatcatatttcaatgaattttctgaaatgtgattcattcagatttcaaaaggaaataacatgtatttcatcagaatgacaaatgttatatatacagtcagcataaaagaaaaaaatcattaaaaaacatttggcttggtctttaaatattttgttctgtatttctggattttttttcttttggctcttctggagaatacagtaaagttgagagtgaatcctgatactctgatagagtcaaatctccctttaagcccatgcctatgctggaaaacttactattactttctatatcagactttaatattataagcaagatgattttttcatgttgtttctataaaatgaaattttatcctaaatctaaagtcattaaccaaaaaattccaggcacaatccatcacttcatttcagcacaagctcaatcattgcttcaaatctatcatattacctattttcttcttcttttttttttttttttttttttttttgaacggagtctcgctctgtcgcccaggctggagtgcagtggcgggatctcggctcactgcagctccgcctcccgggttcacgccattctcctgcctcagcctcccaagtagcacctatttcttcttgaggaggaatgtagtgtaaggatgaacctagtaccaaacaataactggcttctaagaatgggatttatatatttttttatagcattcttgagataagaagattcttggatatcaaagcaaatgtatttaaaaaacgaggttacagtttttgttctaaataataccttctgtctcacttatatctggaattttaaaatgttggatacttagaagcagagtagaatggtgctaggtggggaggtggggaaatgcagagatcttggtcagagggtacagagttgcagttttgaggatgaataagccttgagatttaatgcaaaagttgaggactatagttaacaatattgtatgtatactggaaattcgctaagaaagtaaatgtcatgtgctctcctataagaaaaggtaaaaagccaacaggttctttcaaagaaaaatttataaaattgagaaaccacttatcctccagggaagatactgtattcctattttaaaggtaaagaaaatacgacaatggaaaatacatcgttccatggtattttgggggaattggttctaggaccgccccaaccccaggccccactgggataccaaacaccataatgctcaagttccttgtataaaatggcatagtatttgtatgaacctgtgcacatcctcccatatactttaattcatctctacttacaatacctaatacaggcctacatatcacttcatttgagtggattcagcatagtactcagtgtgcagcaaattgggttttactttttgtaagtttgtggaatttttgttttctgaatatttttgttccatggttgttgaattcatgtatgcggagcccatgtgtatgtacatcattctggaagagactaagatgggcagaacatccaactgtgatcctctacaccttgatttttctcaggacactttcaatcaaatattctctttagttcttagctgttatgttttagtgataagatcatcatggtcttccatattagggatatatggtttctacacagaacatcatgtggaaactgaaaaatagctgtgtcttagtgaacagaagcctcagcaaatgatggcacaattttctgtgtagcctatcacttttttccacctttttgtgtattgaatatggccttctgggtcagccagaaatatcttaaaactgttaattgttcaggcaaacataataagtgtggggactggaaggcgtaattggacgaggacattttactatttgttttattttgatgtgaccttatttcttttaatattgttttagatattttggaaggcagggggaatcctgtttgctcaagggacaaaatttgagaagatacacggacagccctcagtgacttcttggccaactagagtgtagtgggcggttagggtggctgaaggatatagtgtggctgagaaggaaacaaaccgttgcccttgaggagaccaggtggattctagtattgtacttctctatcaatcacaggtatttccatttccttcttagattttgattagtatatttagaggaattgagctagagctgataagatttttctgcgtttgcatttccttaaattagattggcctctaaccagtcatgtaacacatcttcccctcttcttcttcctctttacacattgagggaaaacatgatttctcaaaaaatttaacttttgattgatctcctattaattgcacaagaggagaacttgaggtataaaaagagtcagtgtaattattaaataattatggtttctacatttttatagacaaatgccctaaaaaaaattggaatgctaatttttaagtttgttctatttaaatttgtttctaatgggtgagaattggacttgctaaaattattacaatagattgcaattcagaaaagcaatgcagtggagaagttattagtatcatgagtctgaatggagtattacgtagtagtcacttatcagtaaggcgaggacaaggtcagagtagatcagtcagtgacctgcgggaatcataagtgtgcccctgctatagatttctgtcaggaagtcccgctctatcatctaagcatagcaactaccctccctgagcttttatttagctcaagcttgtcaacccatggcctgcaggctgcatgtgacccaggatcgctttgaatgcagctcaacacaattcataaactctcttaaaacgttatgagatttttctttctgcttttctttaagttcatagctattgttagtgttagtgtatgtgtggctcaagacaattcttcttctagtgtggcccgggaagccaaaagattggacacccctgatttagctgcataagccactagatagaattccggtaatgtcttgagggagcagtggaaagaagaaatggattaatgttgagtccaaagagtggaaagaaggggtgtttgagctggtctgcaaggaatacggatttctttttcttttcttttttctttttttttttttttttttttgagacaggatcttactctgttgcccaggctggaggcagtggtgtgatcatggctcactgtagccttgagttcccagggcttaagccatcctccagctcagcctcccaagtggctgggaccataggtgtgtgccaccatgcctggctaatttttgtagcaatggggtctcactttgttgcccaggctggtctcgaactcctaggctcaactggcctcccattttggcctcccaaagtgctgggattataggtgtgaaccactgtgcctggtctggaatgcagatttctaaacttaatgaataaagggacagatttacctggaaattagctgggcaaaggctcagattaccagtttacctggagcttgaggtgcatgaattagtgtcaggaacctgagcctggaatccaggaaatgacccttaaggaccctgaatgccatctgatgcaaggatttcctcagtaggtgcagggcttgtagatgagggtgcaggaagtcttaggggccatttagaattctgccttccatggtagataatggggagtttctgccagtgtttgaaaaaggagttacatgttccaagctgtgttcttgaaagttagtattagtgggatgtagaaagtgtttggaaagatgaactggaaacagttgacaagggaggaagtctttgcaatatcaaaagatctagagcaccagtgcattggaaatggggatccaaggatcaaaaagaggacaacttgctacctctaatttaagccaagatttgcttcctttgtgctttgcggagggaaaggtaatgaagggagtgctaagcagacaggctcttcatgctttctcttaaacagggcagcctttttctaacacctcatttaataattgagatatggtggttcagaaagggaaaatgacatagttaccagagttctaagctttgccaactatgcagtttagtttgagaagagatgactcactggtaaagaagattagctggcatacagggcataagaagggcagcttgctcaattatactatggattccagggaggctggggccagcttggcttggaatttgtcaggacagcttcatgggagaatgtggtcttaccctggctgttaaaataagttatggagaggacatgagcattacttaagtaaaggcagaagacaggaccagctctgtgcaaaattggggagtcagataagcttgaggggcagtgggtatgtggctgtgagccttggggtcttatatacttgagctgtgtgacttcgggaaacaactttgtctcatgagcctcagtttttctaactgtaaaatggagctaataataatgcacaataaatacaaaataattatttcatggcttaaatctagctgcgtattacaaatattgtgtattcaaccaaatctatttataccttatagagttcttatgatttctgtgtcagataatgctgtctagcatagttcctgccacttaatcagtatggcatcttagtaactatttgcaatatattcaaggaataggaaactttggaatctggaatttaggtagagcggttaacttttaaagtggagaaggcttttactttgcgatatggggaagtagccaggttgtaagggagaggatgtgaatttcaagtgaaatgtgggaatatcaactagaagctggggtcggaggggcagagactctggtatgtcaacatttggcttggcttgacctcaggatgcagagtttagtatcttgctgtgatggaggccttagaggagttcagacttttcgggtgagggagtagatgggctagtaggaggatataacgtagttcagagcagaaaactctccttgggagggggtgagaggaataggagaagatgggatgtggtgtgtgtgtgtgtgtgtgtgtgtgtgtgtgtgtgtgtgtgtgtaggagattgatttcactggatatagagcagaaacttcgggtggtggaacctcatctgcacgggctgattctttgcagttcttcctgaggaagttacaccttgatgaagggggttttctgatgggaaataagggagagggcaggaggaagaggagaaagtgaaggggaggtgaagtttagaggttgagagtgtgggattggtgggtataaaaagatgtgagagctatgggctgtgatcactgttgaggagactgcaagtccagcatccagagagatagcagagaagaaactggggctccaggcggggctcctggtttcttggtgctctaggtatggtcgaaagggagccccatgccagaactatcctgccttgtggtaaagatgcctctcaataatatttggagaatgccatgtcttcccctagtacaatacatggaagcagaattcaaagcatctctctctaagcctatgaacacaacaagggctttaaaatagcttcagataggcacctttgccttgtttatgaagcgtgtctaattagagttgtgttttctttgtggtataagcctttgcaatggatctacattgtcctgttatcaataataactaatgagattaaaatttaaaacaggtgtctgataatccttgatgagagaattcaggggatattgttcctgattttgctttctctccacttggaaaggaggtggcgagcccatcagaccacagcctgttgctaggaggaaattccttggctcaacatgcagaagtgtagtacgcctagattacagtttaccagggacgagggcctgttgctttgatgcgctccaagactggagttggaaaagtttttttggtgtagttccatcctctcatagtgaagttctcattttcccagggatggaagctttgttataagagtcccagtgtagattctgatgtaatgttcaagatattggctttccagaggattcttaatatattgctttattcaccatagctttattccattgtgttaaaaagaatatgccactttcttgtcatctgaagaactcttaatttctatatcccatcaaatgtagtattatttgctcaagctttctttccaaattttgctctggaggtttgtagacagttacatttatctctaacattgctcaccatttagtaaaagaaacaaaaaaaacaaaatgccagcaaaagtaactcctccataaaatacgtgtaaagcaggaataacagtgaatgaacaaaatcctggcttgaatctgttcttttgcaacaaatgtaatgcggttgtattttgagaaaagaagcctgcaaacaaaaatagttagtagtttaattttaggtttacagtttgacattgtaaccctaaattacatcgtatttggaaaaatctcttcaacttagacttttttttttttttttttttttttaccctagtgctacaagatgactctatattaaagtttcttggagataaaatagcaatatttgtcaatctatataatagttaatattcaaagta

SEQ ID NO: 2886 - DNA, 29915 bp, Homo sapiens
  misc_feature 705, 706, 707, 708, 709, 710, 711, 712, 713, 714, 715, 716,717, 718, 719, 720, 721, 722, 723, 724, 725, 726, 727, 728,729, 730, 731, 732, 733, 734, 735, 736, 737, 738, 739, 740,741, 742, 743, 744, 745, 746, 747, 748, 749, 750, 751: n = A,T,C or G
  misc_feature 752, 753, 754, 755, 756, 757, 758, 759, 760, 761, 762, 763,764, 765, 766, 767, 768, 769, 770, 771, 772, 773, 774, 775,776, 777, 778, 779, 780, 781, 782, 783, 784, 785, 786, 787,788, 789, 790, 791, 792, 793, 794, 795, 796, 797, 798: n = A,T,C or G
  misc_feature 799, 800, 801, 802, 803, 804, 805, 806, 807, 808, 809, 810,811, 812, 813, 814, 815, 816, 817, 818, 819, 820, 821, 822,823, 824, 825, 826, 827, 828, 829, 830, 831, 832, 833, 834,835, 836, 837, 838, 839, 840, 841, 842, 843, 844, 845: n = A,T,C or G
  misc_feature 846, 847, 848, 849, 850, 851, 852, 853, 854, 855, 856, 857,858, 859, 860, 861, 862, 863, 864, 865, 866, 867, 868, 869,870, 871, 872, 873, 874, 875, 876, 877, 878, 879, 880, 881,882, 883, 884, 885, 886, 887, 888, 889, 890, 891, 892: n = A,T,C or G
  misc_feature 893, 894, 895, 896, 897, 898, 899, 900, 901, 902, 903, 904,905, 906, 907, 908, 909, 910, 911, 912, 913, 914, 915, 916,917, 918, 919, 920, 921, 922, 923, 924, 925, 926, 927, 928,929, 930, 931, 932, 933, 934, 935, 936, 937, 938, 939: n = A,T,C or G
  misc_feature 940, 941, 942, 943, 944, 945, 946, 947, 948, 949, 950, 951,952, 953, 954, 955, 956, 957, 958, 959, 960, 961, 962, 963,964, 965, 966, 967, 968, 969, 970, 971, 972, 973, 974, 975,976, 977, 978, 979, 980, 981, 982, 983, 984, 985, 986: n = A,T,C or G
acacacctgccccttcccagggatcacgtgtgtctccagcctttcacctttctattgcatggtggcctttgtccaggcaagagcaggcctgatggatgtactggtgagccccacagttgatgtcagctcagccgtccaactgggaggaacagtaggctcagttcctccctgacccctacaccaggccgcagtgggcatgcacaggcccacagaaagtcagtctgggttttgctttttcgtgagcatcacagttaaagaagcgctcattgagcaactacagtgcacttggtcttctcaagtgctgggcacctagagataggaacagtcatggtccctgctcttaaggaactgatgcctggtggggccctgttgtcttcaaggaacccagaagccactgggccccaaaggtggaatgaaggactgggggcagctggctctcagcctgccacctctgcactgcctgcctttaaagaccccaccccaccccatgatggccccctctgttccccttgtatttcagtgactgtgaatgaggttaggaaggcacacctgcccttctgtgtgctctctccacacgaaggatgacagatctgtgaattcagccctcacggccaactgtgaaggggatggagaaggctgggagggctcgggagagctcttaggggctgcggaagtccccacgggggtctgagagtggagcccaannnnnnnnnnnnnnnnnnnnnnnnnnnnnnnnnnnnnnnnnnnnnnnnnnnnnnnnnnnnnnnnnnnnnnnnnnnnnnnnnnnnnnnnnnnnnnnnnnnnnnnnnnnnnnnnnnnnnnnnnnnnnnnnnnnnnnnnnnnnnnnnnnnnnnnnnnnnnnnnnnnnnnnnnnnnnnnnnnnnnnnnnnnnnnnnnnnnnnnnnnnnnnnnnnnnnnnnnnnnnnnnnnnnnnnnnnnnnnnnnnnnnnnnnnnnnnnnnnnnnnnnnnnnnnnnnnnnnnnnnnnnnnnnnnnnnnnnnnnnnnnnnnnnnnnnnnnnnnnnnnnnnnnnnnnnnnnnnnnnnnnnnnnnnnnnnnnnnnnnnnnnnnnnnnnnnnnnnnnnnnnnnnnnnnnnnnnnnnnnnnnnnnnnnnnnnnnnnnnnnnnnnnnnnnnnnnnnnnnnnnnnnnnnnnnnnnnnnnnnnnnnnnnnnnnnnnnnnnnnnnnnnnnnnnnnnnnnnnnnnnnnnnnnnnnnnnnnnnnnnnncctgggtgtctgagtttgtgaaataaagttataccaaagggtgttctggggcttgtctttgctttggtcagtccagctgagtcctggggaccatttggatgggtggcatgggaatggataggtctggggtactgaacccctggtctatagattaaggagctccttccaaaggaagaagttatgccaggactcagtggcaggtgtttctaaacagatggaggaatggagaaggcacagcgtcaatggccacaatgcgcagaggaagatcatccaggccccagcagcaacaaagccatgagcaggcccacatctcctgagctggagatgccttagccttatggaagccttggagggatgaggtggtgtcatctgaatccaatatctaggagcccctcattgccagttatatatacagataggtggagagaggtactttctaaacaccatctcactttaatcctcacaaggccatgaggtaagaatttgatgtttcagctgaggaaaatgagaaacggagaggttaaggtattcacccaagatcaccagctgcagggtggccaatccaggactcaggccacagctttcactccagaatctctccaaagtctaggaatttgctggtcagacatttactgagcacctactatgttcataagacagtctaggttgtggagcattttccaggataggccgcgtggtaggccacacattaagtctcaaagatttaaacataacatacaaagcatcttctccaaccacaataggatgaagttaggcagggcactagattctcataggggcacaaaccctattgtgaactacacatgtgaaggatctagttgtgcgctccttaggagaatctgagtctaatgcctgatgatctaaggtggaaaagttcatcctgaaatcattgtatatccctttccatccgtgaaaaattgccctccatgaaactgtccctggtgccaaaaagtttggtgactgctgccttaaactactactggatttactgagtaggcaaaccaagtactgttttgtcatagtctgtttacaggagagagttgcactgttaattgccattaggaagcagttagaaccatatatctgactttatggaggtagaatacgctcaagagaatgttctcagtgggggggatgtgcatgcatgttttagtgattaatgtggttcagtcggctgtaccaatacaatgaggtttccaaagggaactggacaagacgacccagggcccctgcattgtacgacaggactcaggtgtctgcgggcatcactgactgccctgccgaggcccctgtgctggaggtgtcactgcagatggaaggattccttcttgaggaagtctactactgggaaggtgaatgggtctgggcgcaggatcagtgcagtccaggagtgactctaaaggtgctgtgtgtgggcactacgtgcggagctcagccccaagtccttttcatgcattagcccatttatccccacagcatctctctaaggttcacattcatttgcctcattttatgggtgaggaaagaagcttggagaaattaaggaacttattgaagatcacacaagaattaaatgacagggccagattcaaacgtgggctatttgtactatctatagaattgtatgtctggcccacattttgtgaccactcatccattgatggacatgcgttgctttcacctcttggcttttgtgaatgatctcctacaaacatgggtgttcacatgtctctttgagttcctgtttttggttatttggggatatacccagaagtggaattgctggatcatatagtaattctatgttgagatttttgagtacagccatgctgttttcacagagttccagtttacccacaatctagccaacagttgttattcctggattttttttttttttttaatcacagccatcctaatgagtgtgaggtggcagaccacattttgaaaagatccctcagtctacagggcagagaacagagcctccgagacaggtcgcgactttgaatactagagctctgagaagaaacattcacgagggctgcttctcatctccgaagaccagggttaaccactgcgaatggattgtggtgactgaagggtgccggcactgtgctcaaagtgtctccctactgtgttgattggtctaaaaacacatcagcctttgggtatgacttactggggcccctccaggcagggtgtggagcagaggaccctcctttataggctggaccaatagtgaggctgcttacctgtgactcacctccaaggctcaaggtgatgctaaggtgcgatttgctagaactctgagctgtgcctgtgtctccttgggctctgggagattttttctttagcagtattttatggaaatattgtctaggtagagtaaaatgtacagatcctggttttcgttttgagttttgttttgagacagggtcctgctctgtcacccaagctggagtgcagcggatggtcatagctcactgtggcctcaaccacccaggctcaagcaatcctcctgcctcagcttcctgtagccaggactacaggtgtgcaccacaatgccccactaatttttttgatttttgtagagacaaggtctcgccatgctgcccaggctggtctcgaactcctgggctcaagcaacctcccgcctcagcctcccaatgtgctgaattacaggtgtcagccactgcacccagcctagcctgttgttaatggatgtaaatacctgtgtgatcgccacccagaaccagatccagaaatttccagcctctcaaagactccttcctgcccctcccagtcagagacccccaagggtgagccattctggcctgttgttcaacttgacttgaacaacccttcaagtcaagtttggatctgcttcttctgctcagttgcgaggcccattgatgtttcctgtggcctagctcctttttatgccgagggctactctgttgtatgaaaaccacaattcatttctcccttctcctttggtgacatttgcactgtttccagcctggggcaatgatgagtaaagctgttaaaaacaggcacattgttttcctttctcttgggtaattttttagaagtagaaaagccagaacatagaagtagaatttgactgtattacaactcaccaagcagtttttctttttattttttatttttcaatttttgagacagagtcttgctctattacccaggctggagtgcagtggcgtgatgagggttcatacagccttgacctcctggggtcaagtgagcctcccacctcagcctcccatgtagctgaaccacaggtgtgcaccaccacacctggctaatttgtttgttaaattatatgtagggacaggtcttccaacctttcccgagctggtctcaagctcctgggctgaagtgatcctcctgcccagcctctcaaagtgctggtattataggcataagccaccacgccctgcccatttttctagttggattattttacactccagtctgctgtgaatgagagttccagttgttgcgtatcgcatcaatttgtgattgcctacaaatgatgtgccgtgatgaaattgtccctggtgtccgagggatcgcaaagaatttcccttcctttctctcctttctgctccccttgtactgtctactcttaaactggtacttgatccaggaacataatggggatggacagtgcagatggcacacatgcctcagtctattggagcatctcaaaggaattagtctgcaaattctagtgcatctaggtgagcacaggaaggaagagaggtgcagactcacgtatggccctggggcacctgccatcctccgcacccgtacagcccttacctgccagcacttaccctacccagcttgagttctgggcctctcaccagcacatcgctgggacctggtcgacttcaggtaagtttatttcatggctccctccccacgacctgcacatgccatatgttccttcccagccccatgtcacttgaaatgttcttcatgtccaagacttctctcctcatcctaaagtgcagaaaataaggatggagaagagaagagaagagaatcaagagagattcattgagagggaggatcagaagctcctgggcaccccaactgtagaataaaaatattcattatggtgtttttcttgcaaaatattcccctctacatattatgtttttacatgaataatataaatttaaacaggagaaatactttttgaagagtctggaatcttcataaagttcaggcggccacgaattagctgtgtgacctggggcatgccccttgactctgagcctcagcttctctgtatgtaaaatgggttgaagccgcccttccccacaagaccctgtgcacaggcaatgcccagccccattattttctggactccgtggccaagcatgctaggacacacagccacatacttctgggcagtgtcatctggcaacttgctgtcatgtcaggtggtcaagcattgtagacctctatgaaccaaatatgcttcaggcttgggttgagcacagagagggaggagggaaaggtcactggggctgggagtgcctacttccctctgtgagtgtcccccagtccacccagtaccatacctttctctctctggacccacttccttttgctgccggtcctccccattgaataacagccaagttgctttggtttctatttctttgttaagtcgttcctctacaaaggacttcctagtgggtgtgaaaggcagcggtggccacagaggcggcggaggatggccttcagcggttcccaggctccctacctgagtccagtgagttccagggctatggcacagggctgcctcagccagagggacacagctctggggctctgaggaagcaactcctggtggcaggggatgggggtgggggcatcccaaagagaacacaagcagggcagaaatatcagggaggtcatcctggcacacctgtgccgtgctgagctcactcatgcctggagggatgctcttcccacgagtcatggctttgacagtgttgactgagctgtcctgtcctgtcctgtcctggtgctcaggggaagacatgtagagcggggtggttcatgtaaagaggaagcaagcacgctctgggacagtaaggacgctacccggcatggtagttaagggtgcttactgtgaaggtggctccctgggtccagctatttactggctggtggtctctgggcctcagtttccatatctgtgagtgggaataatacttgagccccccactcccagggttgggatatggattaaggaagtaggtatctagtgtgtttgaacagtgcctgacacactgtaggtgctttgggagtgtttcatgtattgggtgtctgagggcagcagggaagacctcccgaggaggtgtctgtgctctgaaggtgggcatgggcatgttcagggcatctgtggaggggcagtctcagaggtgagaggggggtaggactgtccctgcagcgtggggtcagagggcggcaggtgccttgctgaaaccctgtgagtttatgagtccccttcatacacggaaaatctgaggctcagggaggcagaggccagttgcaaatgcctccagatgggagtggcagccccaggagcccaggagacttcaggggtcactggtcctgggccggctcctgtcataggatctcaccccgccttggcaaagagcttcccgagggctggagagggtgggctgatgggtccttcctgggtggggaggcagggtggggagggtggcagaggcagggtactgagggagggaagctgccatggcccacctcagcagaggccagggtgggcttgagtgccccctggtgacactgagtccagaatgaggctgcctacgttctggtctcagagctcggctctgctttctaaactccagagagaaagaatggggaaaggaggcctgttcctcctggctgtcaccaatgacacctcagccaccctgtggaggcccctgaggtaggaccgcacagagggggctgggggaagctggaacaggccgctggtgggggccttagggtcagcagtgctgccttgggcatgtcaccctgtctctggttttctgtcaaagaggggatcccagagttcttccaggttctgacatattattattctggtgactggtttttactttctaatccttgattcagaaggaaaattatcctacggacatcagagagttaaaacagggccttggagtccaacaagaaagatgatcagtgcagcccctatgggtgtccagagtacccctctaccccacggggctcccctgggttgggacaattaagcctcacttggtgacccatctggcagtcggagcccgcttcctccacatgccgacagtgggggaaggtcacgcggttcgctgtcctgctgaggaggctgagtgccatgagggcctggcttggaaacctcactcccacttcttgtctggcctcactagcccagcctctttggagggcctgggggaagctggaaccacgtgctgtgtggtccagaagcactgggagagccaggaataaggatgttctcagcttactcatgagaggaagcctgttggtggttagaagcgtgggtgctggggttcaaatcccagctctgttgctgaccagttgttaactttgagcaagtgactgaacttttctgtgcctcagtttcctcatctgtaaaagtggcggggttgctgtgaggataaatgttcctagtcatgcccagagccctcatggacacacatgatccaaatgccacagcagccttagctggtcaacctcaaaacaacacatttgttcttacgtgttggaggtcagaagtctaaaatcaaagtgtcatggaaggtggccagcaggaccatgagcctctgaggcagcggggcaccttggctaagagccacgtactggcctcctgctggcaccagtcttggccagccaggctgagctccccacttcggggtcgggcctgggtgtcctctgggatgctgagtccaaaacaaggctgcccacattttggttcacagggctcagctctgcttttagacttccagataagaagaggaggaaaagtccccggtctctgggcactatcaggaacaagagcaagtcatgactcagcagagggatcgatttgttcaatgcaaagagctgcactgtctgtctgacatgagccaggggctcagcacacggaatcgcacccagtcctctcagaacgctccagccaggggctcagcacacagcgttgcacccagtcctctccagaacactgtcgggtgtgttactgtcctgccattcagaggagggaactggggcacaggcaggtcaagtgacttggcagtgtcagaattgctagtgtacagagctgggaggcaagcccagtcccgtgggaccataatccagtgtgaaaatccatcctcctgcaccacatggaacaaaagcaggtccggttgtttcctgggttttctggacacacttatccaaattccacagcagccttggctggccaatcttaaacaacaaatttgctctcttaatgattttgaaggtcagatgttaaaatcaatgtgtcagaaagttgtttccttctggaggccccaggggaaaatctgtttcttttccttttccatctttagaggctgcctgcaggccttggcttatgacccctcctgccatctttaaaaccagcagcttggctgggcccagtggctcatgcctataatcccagcactttgagaagccgaggcaggagatctccttaatccaggagtttgagaccagcctgggccacaaagtgagaccacgtctctcaaaaaatagacaaacattagccaggtgtggtggtgcatgcctgtagtcctagctacctggaggcggaggtgggagggtcacgtgagcctgaggaagtggaggctacagtgagctgagtcgcgtcaacacactccagcctggctgacagaatgagatcctgtctcaaaaaaaacaaaaacaaaaaacgaaaacaaacaaaaaccccccaaaaacgcaaaccagcttcttcttgctttgtgcttctgttgtcacatctcctacctctgacactgatcctcctgccttccttttatagatccttgtgatcacattgggaccacctttaaaatcaggacaatctccccatgccaaaatactaatttaatcacatctacaaagtcccttctacaacatattcacagtttccggggatcgaatgtggatgtttctggggggtggcccactggtaaccagtgttataagtttcttataatccttccagatatattttatctataaataaataaatgcaagtccatagacttcccccaccactttttatacaaatggcatcattccatatcagtgctcagagttctgtcttcctcttttcttttctttttaaggctacacagaacctattaaatggaaataccctaatttatttcactttttcctgtcagaggacttttaagctctttccaatgctttgctttataatcctttgtttataatgctgcaatgaataaccttgtttgtaggatgatattcaatttaaaaactcattttcaggccaggcatgatggttcatgcctgaaatcttggcctttgggaggccgagccggaggatcacttgagctagcccaggcaacacatagagaccccatctttacaaaaaatattgtagattagtgggacatggtggcctgcacctattttgtcccagctattcgggaggttgagggggaggattacttgagccagggggtggaggctgcagtgaaccatgatcacagccctcacgaactccagcctgggcaacagagtgagaacccatctctaaataaataaataaataaataataaataaataaataaataatcttgtttttccgaattttgggggcactatttaagatatttgaaacctcacagagcttttttggggaacttgttgccttggagattagcctgtcctgtccgcccccatgatctgtacttcctctttctccctcctggcttccttaattaagccttgttgtacttgccagcccatgtccatcacgctctgccttcaattctagatgctgtgctgtgatacacttaagtggaggccgcatgcttcccaggagggtgtgtattttcagtgttgtgtctatgatagtatgaaaggctctggagagaatcacaggcttccacaaacaggcaaggagaaaatgttccacagacatgtttcagggaaaacaggcttcccaatcctaggccgtgctggtcctaattggatcaggctgactctccttcccctacactgctggtgtagacagggacaagaatagaagtcagagacacagagaagctgtgatttgcttgaggtcactaaagtacttaatggcgagttcagacctgacctgaggggcaacaaaagacacccccctcaaatccatggggagcaagtctaactgaatcagatcccagatttcctggggctctcacggtgccaggtgtgtgtacctgagctaggatgggtttcccagggttctgtgtggtcacacaactcaacaatacagaccgaaagcagtggcaagtaggctgaatttggctggtgggtgttttctgtttggcctgcacatgtttcttttaacgttttattataggaaattcaaacatgcagaaggaattgtaccatcacaacacacacccatcactctgctccaacaatgatcaactcaggcctatcttgcttcatctataccctccctcgcttgcttccttcccaccctcagatatgtggaagcaaatccaaagaaccattccatttcaaatatttcattttgtatctctataatatgggaatttggggggtttaagacaggatttcactttgttgcccaggctggagtacagtggtgtgatcatggctcactcagcctccacctcccaggctcaagggatcctcccacctcagcctcccaagtaactagagtaaaggtgtgcaccaccacacctagctattttttttttattttttgtagagatgggggtccattacgttgttcaggctggcctcaaactcctgggctcaagtgatccttctgcctcagctcccaaagtgctgggattatagatgtgagccactgtgcccagccaggagcttttacatatcctttttgacaaattttcccccaagaaattagaaagttttatagaaaaaaaaaatccgacttctgtcttctcttaaaaatttggaagctctgccaatactgggcccagatggcaatactgcttagcacggagtagatgttgacttttcagatgaggggtgtgacatctactttgcacagtccccaccactcccccacctggccatctcacccatacacatcacctgcctggctctttaggcatttaatttgtgtaggaaattgacctaaaggagatattagagaagacattaaaacttgaagaatgtgaaaatcagccaggagatagaactgtgctttaatgcgggttatagacgacattggatatgaagcattttgggaataaactttgaaaattggaagtaccagtttggaattttgctgagagagatgaaggtggggggtgggtgacagtggtgaagcatctcctattgccagtctcttttaccacaggctgtttctcacaaaatcatcaatcatatgcagcaggtaaacaccttcctattttacagatgaggaaactgaggcacagagaggtgaaataggcttccaaggtcactcaggtcatgagcagcagagctaggattcagacctggagttggcctgacttaaaacgatgcatgcctcaccatggcccatcactcctttaaagagcaccagaagagagatttgacaaagtggttgcccgtggggcctgggatgggtggggaaaccacgctaggcctcgggctgctgagggcctgagggaaggaatggggagcccgggcacagaaatagaggagggggtgccccacggctacacaaggcatctgggaagatgctctgctgaaggtggccaggagggcaaggtcacagtggccattgttatatggtggtggtggggagagggggatggcttcttcttacctcttcgggtgagtcgaaggtttaccctccagacccttgatgggtccctttggtccctgggcttcctgagtctccagccagggcctgggacctttgctgggagcttagcatggggtcagcagcccccattgctacctaattccttagcagcccagggtgtctgcctgctacttcctgcctggaaggaaggccttctgcctggtgcgttcctgctgcagcctccactgcctcttaactctcacacaagctcagctccctgtcgcgtcctctcagggccaggcttctccttatcaaagcttagactgtctgagtaactaattggatttgtgtttgcctccacacaggaccctaaacccgtggggctgcgactccctctgtactggtcacagccgcaccctatccccttgcatgggctgtcaaacccaggctggccactgactagcgctggaggggagcaaacgggaggccggcacctgactgatgttcccacaccttctccctgcaggctgtccccttttctgggactattaaggaggtctccaggacggacttcagatcactgtcaatgggaccgttctcagctccagtgaaccaggtgtgtgtgtatatggatggaaacgtttcactccagcctcgtcccttagtaaccactgtgcctgtgagcctgggttagttcaaacagcaacatccaagctcacgtgcctggtcaggggaggcccaatgcgtccctaacccatgccacagggcagcactccacaggcacaactgcacccaggggtgccattaacctggactccaggatgaatggggccctgggagctgacgtctaaggagggcgtgggatggtcagagttggatgattatgttctgggttgaaccttgccactgtgactaagagttgcaaaaatcaaacttcctccatttcccgtaactgctctcatcactctgaagctctccttctgctgatgtgaaaatattgaaaattgccatcaaaagtaattggtctcttttggtttcaaggccttttctagaaactactaagtcaattcaacatactaacttgtatcagggctgtttcccaccccctcctccctcccaaggtgggctgtctgggaacaggaagagctcacatggcttctcagtggctgggagggctctagaccctcactcaggcctggtgacccctgccgaggcaccccgaccgggtggcacagaggtgtgcagctctctcctggttagtgggggaccatgggtggctgcctgctgaactctgcggggcccacagaagagcctctgactcatgactctctctcggaagcctctctgcctcagtcccaggggacctctccttaagacttctgggcctcacagatcccagctaaacctcagcttggacacctagattcttggtgactcctccgccattgccatcctgctgtgggacttctctgagagactgcggtgccctcaggaatgccaagggcagggaggccccgatctccctgaaccctccaaccaggggaatcaggacctgaccctgatcttccgccccttcctctctccctctccctccacctcccccaccccccagaccaggagggcttcccactcccatcctgtcatatagagacagatcctacctcagagggcctctcctcttgggagctttctgtctctcccttccttggggcaggaatttcgaaaggactcagggatgaagctgaaggactccaaaggaaaaaatacatgcagatatatttcaaatgcatcttctccatttattcatttaattaattaatttttttcttttgagacagggactttcttcacccagcctggagttcagtggtatgatcatagctcactgcagcctcaaattcctgggctgagtgatcctcccatctcagcctccagagcagctgggactacaggagtgcactatgatcccagctaattattattattattattttgagatggagtctcgctctgccaccaggctgggtgctgtggcgctatctgggctcactacaacctccgcctcctgggttcaagtgattctctgcctcagcctcctgagtagctgggactacaggctcatgccaccatgcctggctcatttttgtatttttagtcgagacggggttttaccatgttggccaggatggtctcgaactccagcctcgtgatccacatgcctcagcctcccaaagtgctgggattacaggcgtgagccatcagcccagccaatttttttttttttaactagagatgagctctcactatgttgcccaggctgtctcaaactcctgggctcaagtggtccacccgccttggcctctgcgcccagccccaattcacatgctctttacatttgttctcttctttcccatttaatcaggcatgtgctggcctccacaagtgtccactggcacagaaggctctctcttctaggtgtgcttaacaacttccatctcggtatcaattggtaatcactttccaagacctatgtttcttgtttgctaataccagcactttccttaaccgttttctatttgcttttagcaaatcatgctgtaaaggcaaaatccaatattaaaacaaaaacacattagatcccaattagaaaaacaaaaacgatgccaacaaagcatctctgccatacaggttgtgtgcaagatccagacaaatgcaaagcacaggcgccgaggcctcctgtgcctgtcactggcaataatccatgccacagaagactatttgctttccctgggctaggtttgctgtgaactttcagactggcttcagtggaaatgacattgccttccacttcaccctcggtttgaagatggagggtacgtggtgtgcaacacgaggcagaacggaagctggggcccgaggagaggaagacacacatgcctttccagaaggggatgccctttgacctctgctcctggtgcagagctcagatttcaaggtgagcaagaatcccctccccacctctcaccccgggacccccagccctatcaggtgaatggcctttaagtaatcacctaaattgacattcagcagagtgacaccactatacagataacacgctcatttccttgtgaggtgttacccatggcgcctagtctccttatgcaccttcatctgaatctacaggtgcacctgctgcttcttttacctgaaaataagaactagaggagtcatcacgttgctatttggtgttgtgtgtctttgaatccaagctcattccattcctctgctatagccattcctcctctccaggtcactggtaacattatttttcagcgacatcgttccagcctttatccagggtctattaagggtatagttttgtagcacattgcaaattacctttgcaagcagagtaggtctctgggcttgagaagcctgtggtaagtcagtccaagtatgcttatctgagataaggatgtccccattcgttcagtatgcaactgaggtcacctctcctctgctccccatgagcattttatgcatatataaataataccgcgcagccataaaaaggaatgagatcatgtcctttgcaggaacatggatggagctggaagctttatccttaaactaacgcaggagcagaaaaccaaacaccacatgttcttacttataagaggagctgaacgatgagaacacatggacaaaatggggggaaacaacacacccttgggccggtcggagagggagagcatcaggaagattagctaatggatgctgggcttgataccaagggatgggttgatctctgcagcaaaccaccatggcacccgtttacctagttaacaaatctgacatcctgtacttgcaccctggaacttaaaatcaaagttgaaggggatggaaatggcagtcacgcctataatctcagcactttgggaggctgaggagggcggatcgcttcaggtcagggtccaagaccagcctggccaacatggtgaaaccccatctctactaaaaatacaaaaattgctgggtatggtggtgggctcctgtaatcccagctactcgggaggctgaggcacgagaacacttgacccactgcactccagcctgggcgacagactgacattccatctcaaaaaacaaaaaaaacagttgaaggaaaaataaataattaataaatgaaaccccaggtgagctaagacagaaagacaaacctactgcaggaaacaaccagaagaacgaaaagtccaactggagcctgtagagactcgggttgatgcactttgggtcacacacacgttcctgtaactggccccacacgaagaccagactcaggtcttcattttctagaaagagggtccaggagctcaggggtggtcccatcccagcctgggatgcctcccccggaacacgtgctctcctctggcaggtgatggtgacgggatcctcttcgtgcagtacttccaccgcgtgcccttccaccgtgtggacaccatcccgtcaatggctctgtgcagctgtcctacatcagcttccaggtcagactgtccacctggaccggtcccaggggctgggatgcagggcccagcgtagctgtgtctaggccctgctgggtggcccaagccaatctcctacccaggtcactctggggacaacctctgcttccctgtcccatacctgcccgccccttctcctctgtcactctgcccctccttctgtgttactgtctctgtcggaacacctgccttggtctcccagactcctcagctgcccctttctcttcatccctcagttccatcctggtaaggagggcatattgttctagaaagagcccaggctcaagaaccaaacgaatccagttcaaattcccagctctgccattcatcatctgtgggatcttagacaagcaattcacctctctcagccttggtttcttcatctgtagaatggtcattgcctgccccccatggtggttgtgtggttcagtgaggagacagatatcagaggtcacacagtggcccccctgggccacaccagggtctgtttgacctctgtgttttaacaactttgaatgtgttgccaacatcaaaaggtcaggagagtcaggtatggtggtggaggtctgcagtcctggctactcaagaggtgaggtgggagaattgcttgagcccaggaattagagttctgtctgggcaaaacagcaagccctgtctccaaaaaactttgtttaaataataaaataaaataaataaaactaaataaggcaggagataccaataccatgtgaaaaatgggaagattagggtatgctgggcccacattccacagggcaccagcagctgggtgggagctgctgttacccttttggcattcgaggctgctcctgagatcagcgaagcacacagtaggccctcagcaaatctgggcttctcgccctttggcctcatctctcattccctccttccctgactctctcccctgcgggtggtaggggagggaaagctggagggagaccgcacccctgcactgctcaccagagcctggctctttcccatcccacttggcagggccctaacccccttgcctcatcgccctgcctgcctggtctctccctcttgccctgcctctgcctttcggcttctccttggctctattaatgcttctcctcactgcccgggccttttgttttaacagaacccccgcacagtccctgttcagcctgccttctccacggtgcgttctcccagcctgtctgtttcccacccaggcccagggggcgcagacaaaaagtgagtcaacacagaggccctgggtggccgagcagacagtaggaaggaccgagggtctgagaggcggccccagccagcaggccactcagggcctacaggccgcatcttgcccacccaagagttcctgtctctgtccgctgggcacccagagctggggacctgggggtcaccctggattcttcatccctcttctttacgtctctccaaggcacgaacgtgtctccctcctgaagccaccgatgggtccaggcctctgggattcctcaccatgacgacaggggtccagttccccaccccctaccccaaccactgccacagtgaccttcttataagcaaatgtgatcacaccctctccctgctaaaaatcttcacagcccccagcccttcaaataaagcccaaattctccagcagggtatataattcctccccagtctgccccaatccacgtccctgcctcacccccaacccacgaagctccgcagcctctgcagctcactcaaggccctcttgggccaccatgcttttgcatatgctgtcctggtcccggaagcaccctctgccagcctgcctcgagcacatgcctaattgcccttcctgctctgcctaagtgccgctcctctgggagtcctccccgcctggaatattgttggacgccccctggtgtccccacagagtctgtatgtatctgtgccatgccagttcacagcaccccatgtaactgtatttgcgtgtctgtccccgttactccacccccatgtccctatgcccatgagccccagagggccaggactgtggcttgttcatttgcactgtgcctggcactcagtagggctcagtgaatgaatgtggaatgtggttcacacagccagggagaatgggataccagccaggcaagaacagtctactgggtggggcaggatccaggacaaggaggtgagcagcccttcctcggccactcaagtagtggggactgggaggaggggcgctttgtctacgcagtcttcttatgctcatcaccgtacagacagggcacctgcctcctgccacgctgacttcaggactggtcggccccagggaacatttgcagggcagcccaactttggccctggccctggcgctggccctgctctggggaggatagaaagtgtgctggatacagtcagacagaactggctgccactttggtttgatcccttccaccttggcaagcttgggcaagttgcttaatctttctgagcctcgttcctcactagggacacaggagctgaggctgcttcccttgttggaaagcactgaagcccagaatcgacccacaataggccttcaacaaataccacttctcaccttatgggtgaaatatggactggaagtaatgctcttcgctgtgggagctacagaaagcaatgaggtctctatcaaaccagtctcctctctctcgagaggaaccagtggggataccctaccccccaaccccaaagcctgtacacctgggggtaaaaatctgggtgccacgggctcaggaaggcttgcttgggagcagagggaggtgggtgtgtccggggaggcatttctgagcacaagagcctccctggagttttccaccatctcctcccattctgtggtgcccgcgataaccaccattctgactctcctcaccctccagcctcccggcgtgtggcctgccaacccggctcccattgtaagtctcttgctttcttttggatcgtcctcattttggcttttctgggctcatggaggaggcagggccaggcattggcctctcccattgggagtggggagggcacagaccagacccttgaccatctgcccggccggtgaggttgggggttggatgtgggggttggatgaaacaacctgagttgccaccccgtggcagccacggaagaccatgccccacattcacttctgtcacctgcaaagggaggctaggcgagagacgtttccccgagaggaaagatgggccagagccaccagcgtccccatctgtctttccagggttctaacctttgcccctcgctcatccccttgagagaagagacacctgggcccccctctgtggggtctgtggggccattgggcttgttacgccccctggagggtgcctgccggtggcgccctctggtgggagctggtggttttcacacgtgagagcctgggtgagacctggttctttcttccagacccagacagtcatccacacagtgcagagcgcccctggacagatgtctctgtaagtctacaagttctggtcagttcacagctgcacagtgtcctccttcaccaaaactaaactccctagagccctagagtcgggaagaaagcggtttagcaaggaggatggggaactaggggctgagtgcttggctcaggtgacatgtggctaaagctgtccttgggacagcaagattctggaagaagcagggtttatccagtggtggaagagacaagtcccctagagaccggagggaaactggtccatctgtcaccaagtggggagtacagtggccccagcacccggatggaggttcctggccctgcatcctgggtccccaggatgtcactattgatcacaggcttaagtcttctcctgatggtgcaaatgaggcaggggggcttagaattagtggggctgcctgcggggggttgaggggcaggtgaccgtggtgtggtctgggaacacggcaggaagttccaggaagctaacatgaaaagggaggtagacgggcgagtccaagggccaaaggctcacgaggtcagctcacagtggagtcctctctagaacgcgtgggtgcgcctgggtgagtgctcgcgcaccctgtgctctcccattgaatttcctggtttcttttcaacagactcccgccatcccacctatatgtacccccaccccgcctatgtaagtggtttctcagggagggcagaggttctgtttgtgtgggcaggctgggggtgaagggccgctgtggggggatccactggccttgaaaaattaaagcagtcatttgttaagctgaagggcttcaaagcatcccagcgaattagaaggctgtgggaggagctttcaaccttaaaactgtcgtgtcaatatgagcacattgcatgtccctccctttcaccccacgaaacgagtctttttgtgtttggccaaagttcctttcatgacactaatcaagcccattaatttgaggagcactggaaagttttcctttggcttttatggaaccaagtaagatatcatgggcttcttctcagctgacagcccaaattcatgggaactggtacaatcttcccttccgcgtggtggctgacctgtcccccttcttccgacagccgatgcctttcatcacaccattctgggagggctgtacccatccaagtccatcctcctgtcaggcactgtcctgccagtgctcagaggtaagccaagggctccagtgacctctgggaagagagagcccttcaaggcagtccagccattcccctggcttcaggaaggctactgatgatggggaggaaatgggactagaattcggtggataaaggttcaggtgggctgcccaccccaggttccacatcaacctgtctctgggaaccacatcgccttccacctgaacccccgttttgatgagaatgctgtggtcccaacacccagatcgacaactcctgggggtctgaggagcgaagtctgccccgaaaaatgccttcgtccgtggccagagcttctcagtaaggcaccgcagtctggagcttggagaggctccatgggtgcacagggggagggggtaaaggaggtttgaggtaccttgaacagtatgggggtgattcctctgggatgaaggcccaaaagaagagaaggtggccaacaaattattattattttattattactgtcccgcatgaaggaagtgctgggatctgctttttcagatgaggaaacaactcacaagtgcaggttacttgcttgtggtcacacagtcagtaagtgtcaaatcagaccaagaaggaggtgttattcatttcttcatttactcaacaaccattttcttgtcgcctgcttgcgcaggaagcaccccacatgctgggggcacagtcatgaagcacacagacagggtccgcctccagggagtttataatttaggtggggaaagaacaaggaaagtaaagcatggacagttgtcacagataacgacagtgccacgcacaaagcaaaacagagcgatgagatagagcgacctgggaggggcagctagggccaacgtgcagaggcacgggtgtggcctgtccaggaacacaggcaggcgtgctccaccctgactacatattcaaatcacccagagagcttacaaaggaatatcagtgctgggaccccagcccaggccaatgaggcagtcagctgggcattcgtatttaaaaatatgccttaagtgattatactctgcagtcagagttgaaaatgactgatgtagggtttgcagccatggaaaggagcttggattttaacacagtgaaaagcctcaggagtgtttcagccagggagcaacatactttgatttgtagacagctgtgtgacctcggacaagtgacttattattctgtgcttcagtttcctcatctacaaaatggagctaataatcatgaatttcctgagttgtaagaatggaatgagacagtatctgtagtatgcttaggacagtgcctggcaggggcatgtgtgataggagtgttagctattgcaaagggaaggaggttttaacatttgtacctgactgcttcgtggagaaggcattggggtggaaaagacaagttaggagactgatgctgcggagcccaggcccagagcactcctgtgtgctgggcctgagggatacagacggcacaggcagtgctcctgtccctgatggggtgggaacagtattctagaccagggaacagtacaggggaagagcacgcacagcctgtttagtgaagagccgtcgttcagtggggatagagtgcaggtaggggcttattaacaactgaggagggagggagggtgggagggagggagagaggaggctgagtgagggtggaggacttcccaagtgtagtgcaaacggcatgatctctgcacaggtgtgatcttgtgtgaagctcactgcctcaaggtggccgtggatggtcagcacctgtttgaatataccatcgcctgaggaacctgcccaccatcaacagactggaagtggggggcgacatccactgacccatgtgcagacataggcggcttcctggccctggggccgggggctggggtgtgggcagtctgggtcctctcatcatccccacttcccaggcccagcctttccaaccctgcctggatctgggctttaatgcagaggccatgtccttgtctggtcctgcttctggctacagccacctggaacggagaaggcagctgacggggattgccttcctcagccgcagcagcacctgggctccagctgctggaatcctaccatcccaggaggcaggcacagccagggagaggggaggatgggcagtgaagatgaagccccatgctcagtcccctcccatcccccacgcagctccacccagtcccaagccaccagctgtctgctcctggtgggaggtggcctcctcagcccctcctcctgacctttaacctcactctcaccttgcaccgtgcaccaacccttcacccctcctggaagcaggcctgatggcttcccactggcctccaccacctgaccagagtgttctcttcagaggctggctcctttcccagtgtccttaaaataaagaaatgaaaatgcttgttggcacattcagtgggttgaccatggcttctttaattcatttggagacattttggagtctgtggaatcggcgggggtgctgctgagaggagtgggatgggaaagcatggactccctttgggcagggggtctgacctcacacctcctcccagagggtctcttgcaaatcccacgagggtgttggagaaacaggctggggctctagccttttgggcaggagtctcggacacaggaagggtggtaatggggacaccaggaaacagccccatgcctccgagatgggagaggggctggggcagagcctgtggggccacagcagggtcagagctgcctcctcagacctggcgtcccagtgggaggaggtggttggggaggggggtcaggagaagctgatccgaagcaccgtctgggtgtgtgttccattggggtctccccggcattaggggttagggcttgcgtgggaaaagtggctcagtgttcatgttggggttctgccagccactgggccactgcccaacagcccagctccgcgtccacgtgatgcaacacatcctgcttggctcagcaagaatccagttcctcaggccccagtgtagtcctcgagctggcagcaccagcagcaactgggagcttgttggaaacgcggcatcccgcgcaccgccccctgccccgcgacacacacacatacctacctgagagatcagagccttcgttttcacacaccccaggtgagacacacacattaaagctgagaagccggctgggcatggtggctcacgctgtaatcccagcactttgggaggccgagacaggcagatcatctgaggtctggagtttggaccagtctggctaacatgacaaaaccccgtctctactaaaaataataataatttaaaaaaagtagccgggtgtggtggcgggcacctgtaatcccagctactcgggaggctgagggggagaatcgcttgaacccaggaggcagatgttgcattgagccaataatgcgccattgcacccagcctgggtgacaagagtgaaattccgtctcaaaattaaaaacaaaacaaaacaacacaacaacaaaaacacaaacctgagaagccccggtccgggagcggactcctggctgtgttctgagatgcacggctgtcgcgcagggcacagagcttttctggagcctgaggttgacactcaccttctcctgccacctgagactctgctgctagaagagggaggggagagagaggggcgagtcggccagggcggccaggaggcagacaccaaacccgagctgggagccgtgtgttgctggaccccagcgtcccctgctgagctccttccttggttctgaccaggagaaggaaatgggctcagtctcttaagaagccttccttggccagctccaaacccgggagggtccccaatccccagacgaggatgctgtggcccacacttgcctcgacatgttgccttcccagggaccacatcgtatgagacaaactcacatgggacaggtggccccagagcaaaacgctaagacagtgtcaagaagaagctcaaggccttcccagaagcgctggcctcatgtgagaatcccacccacgcagaccccgtttcagatcctttgtgagggaggcaggcctgtgccccctgccctaccacagtctttggacaagcaacgaagctccatcttctgctgtcacacctggcagccatttcagagagccatggcctgcctgggttgtccctctgtgggggatctgtccaggctgcgacacccacagctccccactctgtataactgagggccacattccctacaaaacagcccccaacccccccccccgccacacacacatacagtgtgattaaagtaaaatgcaattcatgtaaatatctcatcaaggaatcatacagggaagacccaagtggccgttgggaacagactgggtgttagtttttaaatacagaggcataaataactgtacacaaggcagttaaatacacagtggtgtgacgcacctcctggtggtcacttgaagtggtgcactcagcagcgggttccatctttcacccattgccaggcctggcgttgaagatttcgtctccaagggaccaggaaggccccagcttgaggaggaggctctgatcaatccagggtgctacttggtaggaggtcaagtaaagggcttgatgggaatgaagtgaaaaaataagatgtgaggctgggggatatcactttcctccatctcccaggccctgtgacctcggataatgcagagctggctccgtggttaagttctgtgccggcagtttaacccctcctacgggccgtcagagcgctgacatctccaggctcctgggctgcactgcgccttgtctgcttgtagggaaatacagcaccaaagatatcttcgtgatagcacttctgctcttttaggtggaaacagagaccaaagtgtcaagtccaggctgggatgagcccccgggttgcccagcttccctatcacatggacctccatgagccatctgtcttcccaactgtcatataagattgtgcttgaatctggtttagactctaacggccctcagcacctgatctggtgtggccctctaaccatctccaaagctttacttagcatacccatttcctgcccagcactcatccccacccaagatactccaggaggtgtgagctctgagataaatatgtttgggaaatgccaatcctttctttccttccagccttgaagggtcctgatgagcagcagcatgctgaaggcttcagaagtcttgtagtaaagcaacgtgtttgccttgccttaactaagcatgtcccaggctttcgaccttggaacctttttgatgccaactgtctaccgacccattcaacgcatttggggaatgcctgttatctcctcactgttcttcaaacacaccagcttaactcccacccccggggctttgtacctgctgcccctccagaacagcccagagtgtttccttcagtatccacagggccctcctcaccatctcaggtttattctcagatgccgccttccagctccgccttccctggcaccctatttaaaattacactccccagcgttctctgggctgtttcctgctgtttttctctaagcactacagctcttccttgtttgggtttgtcagccccagtagaatgtaaagaattttgcctgattcatttactgctctatccctagcacatagtaggtgctcaaaaaatgtttggtgaacgtacgaatgtgtcttagggagagtatggaagtgacaatcacaggctttggtaccaagagaggcagactgagctctaggctttcatattcactgctgtggtccccgtaggccccctccctctgcaaaatggggtgcctccctcacaaaatcctcggcagcactgaacaaaatgtacagcagaatctttggcaagtagtatgcccagtgtaagcccttgataaatatcactatttcttcatcaataaaatgcaagcccttcctgctggggggatgagggtgagcagacgccagctgggtgtaaataagaagtgtgaggttcacacgaggctgacaaggggcagccttgctctccctgtgttcacagccttgctttggccacacagatactttctgaaaggggggtttgggggaggccagggagactctcctgcccccattctacagatggaaaaatggaacacattccccgacttctcaaagctgccaactggtccaggatgtgcagtagggccttctgacagcccaccagctcagatctcagccactgctaagattctcttggggcccagaacttttctgggcctgatcccctgggtctacctgccacccctggtcctggctccaacggcctgtgcccttggccggaccttcagcccacacacccactactataccttgagctgaaagaaatagtcctcgacctgtcctcattcaatttcagcttggcagccaccagctgcttcagggtgtgggccacatcccagccatgcgcatatcccagcaaacatagaggtggcctggctcctcgtggagtacacggagaccttgctggccagctgctgctgcaggatgtcctgaacatcgacctgaaaccagaggaatggtgggttcagtccccagctgctggggacaaggcttgcaggcaggcctgctgtcctcaggaagtggggagagggcactaaggggtgaggagtgagtcccctcccagccaggaccttgatggggccaggcttaggatgaggcgcacagatgcccctggggctgggctgggattagaggataaatgctggacacagtcctgccctcgaggggctgaccatccagtggggatcccagatgtctctgaatttgccatgcctcaaagaagcatcagtgaagccagtccccctgcccaggctctgtctatactctggaaaaggtagcctctcaatgcagactgtccatcaggtccctgcgggtacggatcccgggcttcgcagttagaaggtccaggagtcagtcggggactctctgccctgctccacacaggatgcccagtggccccagcactgggcacagagcactggacccgagggtgccctgatgggacaaatgtgtgaggaccgagagtctgttctgacacctccggctcagagacaacgcggccctgggggcagcagagcctgtctgagggccgtggtggaagcgttggcgccctccagtcttgctgggcttgacacagccagcctggatcacctctccctgggcagtgcatgtcccaggggtcctgctggggaccttcagcaggctaagctctgggcttaacccgctgtgacctaggttagtcctgaacctctccgggcctgtcgcttatgctgtatgagagggttaacgctcttcatagcatcactctgatggttgtgaactacctgcattttagagctcaaggctgaagtctcagggaggcgaggggcccgtggggacccagggctcatactgaagcctgttgtgtaatggcttcaccagcttttaggctgcatttaccttagcttgccaggcaggagggataggcgtgtgcaccgcatgcagcacccgcttccgggtcatctctagcatctcctcccgtaggtggcggtcctcatctgggcggcggcaccagaagaccagggtcctgcggccttccacactactgccgggagtcccgggctgttgttatcatgttggccaccagagggcgcaacggtccaagcccaactggaattctcacttaactcccacaagtatcctagctagttaatagcatatccccactttacagatgaggaaactgaggcccagggcattcagatcactcatccatatcacacaactgaaaatgcagatgcgggattccctcagcccatcggagctcaaaagcaagactttcccattatccccactaccaggagagggagccccggctccggtgccggagacgtgaggcggccattctaacccacaaaggcccgcacagggaggcaaacttgggagatcttcccccagagaggtccaggaaccgttcgtggggctgcggttctgattctaggcaggcgctgccctggtgcccctgccacctgggaagcctccagccttacccttccgctgggagtcatggagcgctgctgccagaaactgtggaagggagcgatacctgtgccaggcctgacaaggatgcgggatgggagggatcctcggggaggtggaagccgctgacacggaagaggacaggagaagaggggccagtcctcagacaccccaggcccacgcacacacaggatggctggggagctgggctgtggggggtggtcgtgaggagatggagaggacaagaagctcctatttgatttcccatgcc

SEQ ID NO: 2887 - DNA, 32387 bp, Homo sapiens
  misc_feature 30827, 30828, 30829, 30830, 30831, 30832, 30833, 30834, 30835,30836, 30837, 30838, 30839, 30840, 30841, 30842, 30843,30844, 30845, 30846, 30847, 30848, 30849, 30850, 30851,30852, 30853, 30854, 30855, 30856, 30857, 30858, 30859: n = A,T,C or G
  misc_feature 30860, 30861, 30862, 30863, 30864, 30865, 30866, 30867, 30868,30869, 30870, 30871, 30872, 30873, 30874, 30875, 30876,30877, 30878, 30879, 30880, 30881, 30882, 30883, 30884,30885, 30886, 30887, 30888, 30889, 30890, 30891, 30892: n = A,T,C or G
  misc_feature 30893, 30894, 30895, 30896, 30897, 30898, 30899, 30900, 30901,30902, 30903, 30904, 30905, 30906, 30907, 30908, 30909,30910, 30911, 30912, 30913, 30914, 30915, 30916, 30917,30918, 30919, 30920, 30921, 30922, 30923, 30924, 30925: n = A,T,C or G
  misc_feature 30926, 30927, 30928, 30929, 30930, 30931, 30932, 30933, 30934,30935, 30936, 30937, 30938, 30939, 30940, 30941, 30942,30943, 30944, 30945, 30946, 30947, 30948, 30949, 30950,30951, 30952, 30953, 30954, 30955, 30956, 30957, 30958: n = A,T,C or G
  misc_feature 30959, 30960, 30961, 30962, 30963, 30964, 30965, 30966, 30967,30968, 30969, 30970, 30971: n = A,T,C or G
accctctgtggggtctgtggggccattgggcttgttacgccccctggagggtgcctgcctgtggcgccctctggtgggagctggtggttttcacacgtgagagcctgggtgagacctgtttctttcttccagacccagacagtcatccacacagtgcagagcgcccctggacagatgtctctgtaagtctacaagttctggtcagttcacagctgcacagtgtcctccttcaccaaaactaaactccctagagccctagagtcgggaagaaagcggtttagcaaggaggatggggcactaggggctgagtgcttggctcaggtgacatgtggctaaagctgtccttgggacagcgagattctggaagaagcagggtttatccagtggtggaagagacaagtcccctagagaccggagggaaactggtccatctgtcaccaagtggggagtacagtggccccagcacccggattgaggttcctggccctgcatcctgggtccccaggatgtcactattgatcacaggcttaactcttctcctgatggtgcaaatgaggcaggggggcttagaattagtggggctgcctgcgaggggttgaggggcaggtgaccgtggtgtggtctgggaacacggcaggaagttccaggaggctaacatgaaaagggaggtagacgggcgagtccaagggccaaaggctcacgaggtcacctcacagtggagtcctctctagaacgcgtgggtgcgcctgggtgagtgctcgcgcaccatgtgctctcccattgaatttcctggtttcttttcaacagactcccgccatcccacctagatgtacccccaccccgcctatgtaagtggtttctcagggagggcagaggttctgtttgggtgggcaggctgggggtgaagggccgctgtggggggatccactggccttgaaaaattaaagcagtcatttgttaagctgaagggcttcaaagcatcccagcgaattagaaggctgtgagaggagctttcaaccttaaaactgtcgtgtcaatatgagcacattgcatgtccctccctttcaccccacgaaacgagtctttttgtgtttggccaaagttcctttcatgacactaattaagcccattaatttgaggagcactggaaagttttcctttggcttttatggaaccaagtaagatatcatgggcttcttctcagctgacagcccaaattcatgggaactggtacaatctccccttccgcgtggtggctgacctgtcccccttcttccgacagccgatgcctttcatcacaccattctgggagggctgtacccatccaagtccatcctcctgtcaggcactgtcctgccagtgctcagaggtaagccaagggctccagtgacctctgggaagagagagcccttcaagtcagtccagccattcccctggcttcaggaaggctactgatgatggggaggaaatgggaccagaattcggtggataaaggttcaggtgggctgcccaccccaggttccacatcaacctggctctgggaaccacatcgccttccacctgaacccccgttttgatgagaatgctgtggtcgcaacacccagatcgacaactcctgggggtctgaggagcgaagtctgccccgaaaaatgccttcgtccgtggccagagcttctcagtaaggcaccgcagtctggagcttggagaggctccatgggtgcacagggggagggggtaaaggaggtttgaggtaccttgaacagtatggggctgattcctctgggatgaaggcccaaaagaagagaaggtggccaacaaattattattatattattattactgtcccgcatgaaggaagtgctgggatctgctttttcagatgaggaaaaaactcacaagtgcaggttacttgcttgtggtcacacagtcagtaagtgtcaaatcagaccaagaaggaggtgttattcatttcttcatttactcaacaaccattttcttgtcgcctgtttgcgcaggaagcaccccacatgctgggggcacagtcatgaagcacacagacagggtctgcctccagggagtttataatttaggtggggaaagaacaaggaaagtaaagcatggacaattgtcacagataacgacagtgccacgcacaaagcaaaacagagcgatgagatagagcggcctgggaggggcagctagggccaacgtgcagaggcacgggtgtggcctgtccaggaacgcaggcaggcgtgctccaccctgactacatattcaaatcacccagagagcttacaaaggaatatcagtgctgggaccccagcccaggccaatgaggcagtcagctgggcattcgtatttaaaaatatgccttaagtgattatactctgcagtcagagttgaaaatgactgatgtaggctttgcagccatggaaaggagcttggattttaacacagtgaaaagcctcaggagtgtttaagccagggagcaacatactttgatttgtagacagctgtgtgacctcggacaagtgactaattattctgtgcttcagtttcctcatctacaaaatggagctaataatcatgaatttccagagttgtaagaatggaatgagacagtatctgtagtatgcttaggacagtgcctggcagtggcatgtgtgataggagtgttagctattgcaaagggaaggaggttttaacatttgtacctgactgcttcgtggagaaggcattggggtggaaaagacaagttaggagactgatgctgaggagcccaggcccagagcactcctgtgtgctgggcctgagggatacagacggcacaggcagtgctcctgtccctgatggggtgggaacagtattctagaccagggaacagtacagggaaagagcacgcacagcctgtttagtgaagagccgtcgttcagtggggatagagtgcagggaggggcttattaacaactgaggagggagggagggtgggagggagggagagaggaggctcagtgagggtggaggacttcccaagtgtagtgcaaacggcatgatctctgcacaggtgtgatcttgtgtgaagctcactgcctcaaggtggccgtggatggtcagcacctgtttgaatctaccatcgcctgaggaacctgcccaccatcaacagactggaagtggggggcgacatccgctgacccatgtgcagacataggcggcttcctggccctggggccgggggctggggtgtgggcagtctgggtcctctcatcatccccacttcccaggcccagcctttccaaccctgcctggatctgggctttaatgcagaggccatgtccttgtctggtcctgcttctggctacagccccctggaacggagaaggcagctgacggggattgccttcctcagccgcagcagcacctgggctccagctgctggaatcctaccatcccaggaggcaggcacagccagggagaggggagggtgggcagtgaagatgaagccccatgctcagtcccctcccatcccccacgcagctccacccagtcccaagccaccagctgtctgctcctggtgggaggtggcctcctcagcccctccttctgacctttaacctcactctcaccttgcaccgtgcaccaacccttcacccctcctggaagcaggcctgatggcttcccactggcctccaccacctgaccagagtgttctcttcagagactggctcctttcccagtgtccttaaaataaagaaatgaaaatgcttgttggcacattctgtgggttgaccatggcttctttaattcatttggagacattttggagtctgtggaatcggcgggggtgctgctgagaggagtgggatgggaaagcatggactccctttgggcagggggcctgacctcacacctcctcccagagggtctcttgcaaatcccacgagggtgttggagaagcaggctggggctctagccttttgggcaggagtctcggacacaggaagggtggtaatggggacaccaggaaacagccccatgcctccgagatgggagaggggctggggcagagcctgtagggccacagcagggtcagagctgcctcctcagacctggcgtcccagtgggaggaggtgcttggggaggggggtcaggagaagctgatccgaagcaccgtctgggtgtgtgttccatttgggtctccccggcattaggggttagggcttgcgtgggaaaagtggctcagtgttcatggtggggttctgccagccactgggccactgcccaacagcccagctccgcgtccacgtgatccaacacatcctgcttggctcagcaagaatccagttcctcaggccccagtgtagtcctcgagctggcagcaccagcagcaactgggagcttgttggaaacgcggcatcccgcgcaccgccccctgccccgcgacacacacacatacctacctgagagatcagagccttcgttttcacacaccccaggtgagacacacacattaaagctgagaagccggctgggcatggtggctcaccctgtaatcccagcactttgggaggccgagacaggcagatcatctgaggtctggagttttgaccagtctggctaacatgacaaaaccccgtctctactaaaaataataataatttaaaaaaagtagccgggtgtggtggcgggcacctgtaatcccagctactcgggaggctgagggggagaatcgcttgaacccaggaggcagatgttgcattgagccaataatgcgccattgcatccagcctgggtgacaagagtgaaattccgtctcaaaattaaaaacaaaacaaaacaacacaacaacaaaaacacaaacctgagaagccccggtccgggagcggactcctggctgtgtgctgagatgcacggctgtcgcgcagggcacagagcttttctggagcctgaggttgacacacaccttctcctgccacctgagactctgctgctagaagagggaggggagagagaggggcaagtcggccagggcggccaggaggcagacaccaaacccgagctgggagccgtgtgttgcaggaccccagcgtcccctgctgagctccttccttggttctgaccaggagaaggaaatgggctcagtctcttaagaagccttccttggccagctccaaacccgggagggtccccaatcctcagacgaggatgctgtggcccacacttgcctcgacatgttgccttcccagggaccacaccgtatgagacaaactcacatgggacaggtggccccagagcaaaacgctaagacagtgttaagaagaagctcaaggccttcccagaagcgctggcctcatgtgagaatcccacccacgcagaccccgtttcagatcctttgtgagggaggcaggcctgtgccccctgccctaccacagtctttggacaagcaacgaagctccatcttctgctgtcacacctggcagccatttcagagagccatggcctgcctgggttgtccctctgtgggggatctgtccaggctgcgacacccacagctccccactctgtataactgagggccacattccctacaaaacagcccccaaccccctcccccgccacacacacatacagtgtgattaaagtaaaatgcaattcatgtaaatatctcatcaaggaatcatacagggaagacccaagtggccgttgggaacagactgggtgttagtttttaaatacagaggcataaataactgtacacaaggcagttaaatacacagtggtgtgaagcacctcctggtggtcacttgaagtggtgcactcagcagcgggttccatctttcaccccttgccaggcctggcgttgaagatttcgtctccaagggaccaggaaggccccagcttgaagaggaggctctgatcaatccagggtgctacttggtaggaggtcaagtaaagggcttgaggggaatgaagtgaaaaaataagatgtgaggctgggggatatcactttcctccatctcccaggccctgtgacctcggataatgcagagctggctccgtggttaagttctgtgccggcactttaacccctcctacgggccgtcagagcgctgacatctccaggctcctgggctgcactccgccttgtctgcttgtagggaaatacagcaccaaagatatcttcgtgatagcacttctgctcttttaggtggaaacagagaccaaagtgtcaagtccaggctgggatgagcccccgggttgcccagcttccctatcacatggacctccatgagccatctgtcttcccaactgtcatctaagattgtgcttgaatctggtttagactctaacggccctcagcacctgatctggtgtggccctctaaccatctccaaagctttacttagcatacccatttcctgcccagcactcatccccacccaagatactccaggaggtgtgagctctgagataaatatgtttgggaaatgcccatcctttctttccttccagccttgaagggtcctgatgagcagcagcatgctgaaggctccagaagtcttgtagtaaagcaacgtgtttgccttgccttaactaagcatgtcccaggcattcgaccttggaacctttttgatgccaactgtctaccgacccattcaacgcatttgggaaatgcctgttatctcctcactgttcttcaaacacaccagcttaactcccacccccgggcctttgtacctgctgcccctccagaacagcccagagtgtttccttcagtatccacagggtcctcctcaccatctcaggtttattctcagatgccgccttccagctccgccttccctggcaccctatttaaaattacactccccagcgttctctgggctgtttcctgctgtttttctcgaagcactacagctcttccttgtttgggtttgtcagccccagtagaatgtaaagaattttgcctgattcatttactgctctatccctagcacatagtaggtgctcaaaaaatgtttggtgaacgtacgaatgtgtcttagggagagtatggaagtgacaatcacaggctttggtacccagagaggcagactgagctctaggctttcatattcactgctgtggtccccgtaggccccttccctctgcaaaatggggtgcctccctcacaaaatcctcggcagcactgaacaaaatgcacagcagaatctttggcaagtagtatgcccagtgtaagcccttgataaatatcactatatcttcatcaataaaatgcaagcccttcctgctggggggatgagggtgagcagacgccacctgggtgtaaataagaagtgtgaggttcacacgaggctgacaaggggcagccttgctccccctgtgttcacagccttgctttggccacacagatactttctgaaaggggggtttgggagaggccagggagactctcctgcccccattctacagatggaaaaatggaacacattccccgacttctcaaagctgccaactggtccaggatgtgcagtagggccttctgacagcccaccagctcagatctcagccactgctaagattctcttggggcccagaacttttctgggcctgctcccctgggtctacctgccacccctggtcctggctccaacggcctgtgcccttggccgcaccttcagcccacacacccactactataccttgagctgaaagaaatagtcctcgacctctcctcattcaatttcagcttggcagccaccagctgcttcagggtgtgggccacatcccggccatgcgcatatcccagcaaacatagaggtggcctggctcctcgtggagtacacggacaccttgctggccagctgctgctgcaggatgtcctgaacatcgacctgaaaccagaggagtggtgggttcagtccccagctgctggggacaaggcttgcaggcaggcctgctgtcctcgggaagtggggagagggcactaaggggtgaggagtgagtcccctcccagccaggaccttcatggggccaggcttaggatgaggcgcacagatgcccctggggctgggctgggattagaagataaatgctggacacagtcctgccctcgaggggctgaccatccagtggggatcccagctgtctctgaatttgccatgcctcaaagaagcatcagtgaagccagtccccctgcccaggctctgtctatactctggaaaaggtagcctctcaatgcagactgtccatcaggtccctgagggtacggatcccgggcttcgcagttagaaggtccaggagtcagtcggggactctctgtcctgctccacacaggatgcccagtggccccagcactgggcacagagcactggacccgaaggtgccctgatgggacaaatgtgtgaggaccgagagtctgttctgacacctccggctcggagacaacgcggccctgggggcagcagagcctgtctgagggccgtggtggaagcgttgccgccctccagtcttgctgggcttgacacagccagcctggatcacctctccctgggcagcgcatgtcccaggggtcctgctggggaccttcagcaggctaagctctgggcttaacccggtgtgacctaggttagtcctgaacctctccgggcctgtcgcttatgctgtatgagaggggtaacgctcttcatagcatcactctgatggttgtgaactacctgcattttagagctcaaagctgaagtctcagggaggcgaggggcccgtggggacccagggctcatactgaagcctggtgtgtaatggcttcaccagcttttaggctgcatttaccttagcttgccaggcaggaggaataggcgtgtgcaccgcatgcagcacccgcttccgggtcatctctagcatctcctcccgtaggtggcggtcctcatctgggcggcggcaccagaagaccagggtcctgcggccttccgcactactgccgggagtcccgggctgttgttatcatgttggccaccagagggcgcaacgctccaagcccaactggaattctcacttaactcccacaagtatcctagctagttaatagcttatccccactttacagatgaggaaactgaggcccagggcattcagatcactcatccatgtcacacaactgaaaatgcagatgcgggattccctcagcccatcggagctcaaaagcaagactttcccattatccccactaccaggagagggagccccggctccggtgccggagacgtaaggcggccattctaacccacaaaggcccgcacagggaggcaaacttgggagatcttcctccagagaggtccaggaaccgttcgtggggctgcggttctgattctaggcaggcgctgccctggtgcccctgccacctgggaagcctccagccttacccttccgctgggagtcatggaccgctgctgccagaaactgtggaagggagcgatacctgtgccaggcctgacaaggatgcaggatgggagggatcctcggggaggtggaagccgctgacacggaagaggacaggagaaggggggccagtcctcagacaccccaggcccacgcacacacaggatggctggggagctgggctgtggggggtggtcgtgaggagatggagaggacaagaagctcctatttgatttcccattcctgcaggctgcttcacttctgtccaggcaccagcacctcccccaggtccttctgaaaagggccatgctcactggactctgggcccctccagcactgttgtcatcgttgtccctgctgagacaggcacaccagtgtgaccccagtgtcttctttatgggccacggggcccccgagtgcacctaaaccccagatccctccctttcctcccggaacccccaggggtcggcggtcccaaggggacagagtggaaggggtgcttacttccgcacaaagcagggcactgggttttgaggttcagttgttgagccatgtgctgcagacgccgtggtgcaggggaccctggccatctgctcgataccacaaagtgaccaatgtcccctactgcccatgtgcaaactgtaccagctgctcgcccacaccacggcctccttggacgcccccactcaggcactctcaggactcaatgagcactgtttgttctggttctgagatccaccctctgtaagcgcggagctgaggaacgttgaaaggacttagagaggttgcaggttgtcccgtctgcccaagcagaaactgagttccggagtgaaaagtgacttggagaaggtcactcaggtcgcggtggaatcaggtggacagctcagcttcctgactcctactccagtgctccttccaaagactttctccgggaacactcccagctcacactgagctccactgacagcagcatgaagtggcccctcagggtggctactgctgtgcgtgtcatgagcgtggcccttgctggtagcaaccctgggtggtggatgagttccgcgcatttcgcctgctctggcaccttgctttcctcctcagtgggccctcccgggcttgtagaaacccagaggtttctctgggttctgttccccttacaatggcccagcacttgaaggaggcctccaacaactgcagaggtccccctggttttcctcgggattaaattttgctctcacaagacatgtggcctctcctctcctggtctgggtggctgttctctagcagggcaaacagagtctctggcagtttttagaaactgtgtttgtgcttcctagaggacagaggactcagaagtgtgggcagtcccagctttgcccacccaggcaacgctcagttacagagggcagggcagggggcagcggcagtggtggagccgagaccacctggacgagatgttggcctcccgctctatggcagcatcccccgccccctgccaccccggcccactttgcttccctcagtgaccctgacctttccttctggcttcagcacaatgagaataatctaattatttctatgcctatctctccactgccgccctagatgctccctgagggcagggctgatgtctgctgtatttccacacccaccccagtgcaggcatgaggaggtgtgagataaaccatcactgaatgagctgagtaagtgaatgaacaacaatgcagaatctcccttgtgttcaggctgcacgaccaggaagactaagaaccactggctcccaccaagcattgggtgctctccacgtctgatctcattaaattgtcccaagagtagtgaacagtggggtggtggaggacttggacttagcagttagactaatcaggtctgaatctcgctctccacttactaacagtgtgactttctgtgccacctgtaaaatgcacacagggcctccccacaatgtaactgatcatatacatacagaaggcttggtttagtgcctggttcctacgatctctcccacacgcctcctattacggttaacaactctgggtggtgggtgttccctcctccttgaactgatgagggagctgaggctgagttgatgaacagatgcccaataaggggcaactgcggctgttccagatcctcctccctgggctcacctcgggtgtggtacatgagcacgtcacagtcaggtggatctccatgggcatgtgatcccaggaggagctgatggagtagaactgggattcagaatggggagctgggagagcaggaagctagcagacacccacagggacagaactcctccagcacctccaggaacgtgaggctgttggtgaacttccacttgctgtactctagagtaagtggagggtgatgtgagcgactcagggcacctgccccactttgggggaaaagctttcacaacctagtagtcattcattcattcactcactcactcaacaaacaagtccatggccaggcactgtccagggtgctgagactaccgagcttgagaagaaatagttcctgtcctgaggaactcagtccagtacatttatctaacttatgtgacctcctccactgtcggcaactgtgggcaggggtcaaatttttgttgcaatttaatttggggcaaggctttggaaccaatcgacctgggtttaaatcttggctgggtgtcctcactagctgtggaatctcatcccaattattaacctttgtgaaacaaggatagtattgcctgccttgtggggatgttatgggaattaatgagaaagcatgtgccaagttagtacattgcagccacaaaataatggtggtggaggtagtggaatcgagataattagctataatgatgacaataataatgacaaccagtgccttttgcgacttggaaccagacagttgcaggtgagctaatgcattctctcattaacttattaattcgctctccatctgtcactctgcccattatgcccatttatccattcatccacaccatccatccccaatacatcttaagtgacaagtttattccagttttggggaaagcaaagacggataaggcggctcccctttctagctaatgttcaaggcagtgcactctggttgcatcctgcagaccttggaaaaattcagttcactcaacacaactgtgtcctagacatgggccagcggacgatcctggcttcccaccagcctttgacaagtctcactttgggaacctggtgtggatccctctgaaagttaaaaccagctctggactctggctccccacatgctgggaccccccacataccccactgcccaccagccctgatcttcacctggcacagggcctccagcctcgtctctcaggctttctgtggccacctgggccagcttttggagcagcagctgggtgggggtgtggtgatgtcaggaagtaggtgagggcctggctgagtgagcaggggggcagcctcttgtcactgacccgtagctgcctggatggggaaggaaggtgtcaggatggaaaagaggccccattcaggatttcagtaggtagcgaggcccccaggcagacaccctctattctccagctgcaggggaaaggggctctaaagacctggctctaagagcaaaaggcaggaagaaggtggcgcatggagaaagactgccagggaaggctgatcaccagcccccaaaggggcagtaagttggcgtggtcctgaaaactaaccacgtccttttctggcccagacctgaactttagcaagacactcaccggtgactacagactcacaatgactaaatccaccaaagactaatggatacctcacaggccagttgtcacttggagaaaagcccatgactgcagtcccttgggtgctgtaccaagaggtgctggggagcagaagatgagctcaaagggaactcccagggggcagcatgcagggcagtcacagcaagaccctggggctggaagacatgggttcaaaccctggctctccacttccgaggtgactaagcctctgggccttgggttccctccctgtgaaacagatctgatagcacaacctatcttgtgggttggcatgagcgctgaatgaaattgcgcacatatagttggtgctgtggccaggtgggtggctcacacctgtaatcctagcactttgggaggctgaggcgggtggatcacgaggtaggcattcaagaccagcctggctaacataggaaaccctgtctctactaataatacaaaattagctgggcgtggtagtgggcacctgtaatcccagctacttgggaggctgaggcaggaaatcacttgaatctgggaggcagaggttgcagtgagccgagatcatgtcactgcactgcgcctgggcgacagtgtaagactgtgtcaaaaaaaaaaagttggtgctgtgcctggtaaaatgttccctaaatattaggtaaaaatatgagtatgacgttatttcctctgaccagggtctgatgaaccacatccatcaccctgcagtcacaaggacatgtgtctcctcgtcctcacttctcctagatggtggcggacactgccaggctctgcctctctgatcccactttttttttttttttttgagatggagtctttgtcacccaggctggagtgcagtggagcaatctcagctcatgcaacctcctctccccggcttcaagcgattctcgtgcctcagcctcccgaggggctggattacaggtgtgcaccaccatgcccaactaatttattttgtatttttagtaaagatgggtttcaccatgttggccaggctggtcttgaattcttgacctcaaatgatccacccgttttgcttcccaaaatactgggaatacaggcgtgaaccaccacgctcagctgatcccactttcgactttggccactgcattgagggggatacactggtggtgtcattatcactggggaaactaggccagggagccatgcctgtggctgggactgtttccacagctgctttcacataagatttggcagcccaccctctcagcaggaaggacagggatgactgtcactggcaggcccaggctagcccctcagccagatggggtggccagaggatgccaggcagcactggctccctggcccaggctcactgctctcatccagagcctccaggtgccctgtctggtggggtgtggggccatcaccactcgctccagcatgccttggaccagggccagctggttgcctgggcaaaccccaagtgctcccttggcaggtagttcaggccttggccctcctcacaagagaattccaccaggatgtggtgtggctgggtaaggaaatagaagcctcaggtgggccgggcgccatggctcatgctgtaatcctagcactttgggaggccaaggtgggtggatcacctgaggtcaggagttcaaaccagactggccaacatggtgaaagcccttctctactaaaaatacaaaaattagctggggtggtggcaggcacctctaatcccagctactcgggaggctgaggcaggagaatggcttagcccgggaggcagaggttgcagtaagccgagatcacgccactgcactccagcctaggcactgagtgagactccatctcaaaaaataaaaataaaaaaagaagcctcaggtgatgttgcggatttcctccaaggatccctgatgggcaagagagattccccaggaaatgcactctccttcacttacctggctggttccacaagcctgggctgccaccctgagcttgggaagcatcccacagccaggggtgcttgagagggccctgggagcttccctctggggaggagaggggctcacccttcccagcagccctctgagccccccgagcacttggccacagcctctgcctggagaagcatccctcttggagataatggacatcagaagaaacctttccttgtcaccaggacaaatctgttcttattagaaccaaggccaattttcttaatgcatgtggggaggacagcacagataatgaaacctgcagataatccacaaggcttatttcccagagctgggaaatttccttcccgccaacacttttcctgaaagttcttaagaatgagtcaaacagtttaagtctctcttgcatctccttttagtgaaagagttcaatgaggaaggagaggaagtggaacagacgcttagagccaagctggaaaagtggcccgtggttaaccaagagtagatgtaaaagcacaggtggccaaggttaccaggtgagccagtcctaccgatggcatggctgctaatgccagcagatgctccctcctctcccttcaaagactgacttcttctggtctttcattcattaaaataaaatcagtgagcatcacccgagaagccctgcactttcccttacctggatgttggactctgtagcttcgctgagatttgagcctcgtggtgaacatgttattggcgtgcatgctgctgagggctgtgaggacacagagacggtgaaacggcaaagtggctcttgagcgtgggtggcagaagccccccatgtctgagtcagtgacaccagagcactacccttggggcatcctcctgaggtggctgtggggttttctttcctttccttttattccactgtttctgaatcacaaataaaggtccttgtctgatacagggcagctgggttgcttctaggtgttgggaaattcaatttaggaacctaaatggaaagtcccaggacatctccacagcttgggatccacaggagagcatcgttgacattgggatatcttaaacatgtagaaaccttcaggactatctaatcagggcacagggcacagccctgggggtgcagagtggagagttcaccactacagcctggaatcgcctctgtgatgcctcttcatgaccctttgctgcctttgtggctagaaggctggcgctcagatcccaaagtggcacaggctagcagcttgcttcacctccctgaactgcaatttctccatctgtgcctttctccaggaggagtgtccagattcacttagcccatgtgggccaggagccctggacagtgcctgcacacagtaggccctcggcggatgctgtccccttctctctccaccatccttctgcggctcctcctgaaacagcctccctcagcgccttgagtcttgtgccctaacaggctcttgcatgagtgagagggaggccccgaggccagctgtctctgttcagaaggacctggggttctccttaccatgagctcagggctcagaccccaacacaaacaagccccatgtgctacagagaagcagtcccttagctgaggtccaaaggctgtgagtcctgcacgagcctgaagtggtgcaagcccaggtcacattggaggtgtagagcttggggatctgaatgtgctgttggcttcggacatcaacgtttcacaggctgcctggaagaaggtggagcagatgggggttaatggtcagcagcacagcagcatccccaccactggggctaccactttttaggcccttaccatgggccagatacaagccatctgcttcgtgtaacttcgaagcacacttacctgatagggtgacagcaaggaccaaagaggtgtctgggcttggcacatagtagctattgctactattttgaatgttgttttcctttgtttttgttttgagatagggtatcgctctgtcacccaggctggagtacagtggttcatcatagctcactgaagcctcagcctccctgggtttaagcaatcctcccacctcagctcccaagtagctgagactacagatgtgcaccactaagcctagccaattttttgtattttagaagagactggttttgccatgttgcccaggctggtttcaaattctggggctcacgccactgcccacctcagcctcccaaattgctgggattacaggcatgcgccacagtgtctggccttatgaatgccaatattgacatgatcttcttgtatcctcatgaccacactggaagaggttgattgttcccttttcctgttgtggaaccacatggaggaggcctgggctttggaaccaacctgccccgatgcaagctgatgctcctaagcaccactgctgagtgacgctctgcatgaggatgagttccctaaatgactggggccaaccatagcagtaaagagctatggagatactgatggatccaaagtggatctgccactgtgtggtgcctgtccctaggctctctatggctgtggactgaaacagacacagtagttaaaaggtgacctaggtagtcagtgggggagaccttaactagaagctccctaagggcaggggggtatctgtgccaccttctcccccagagttgtgtgacaaggtggagctcttctaagggcctgagggagagcagcagtgacctaagccctcaggctgtggccctggctcatgcctgggaccacatctacaggaccaggggcagaggtcatggcactgggacacccagcacagatgtcctaggttgaatgcaccctgtcatgtccctgctgtgggcagctctggctgggaaccgaccttgaaggtttgcatggcccagctgcggaaggcatccctgcccactgacctcatcctcttcccccatcggggtgagctgagaggcccccaggtgggcagctactgggtgaggtcatgagcaaaggcacagaactgagggtacttgctggagctgagccaaacatggcatacctgcccaaggaaacacacagagactcatgtcccatgcaagcaaacctggcacccagcacccagcaccaacagcctggagggccagccacagactctccccatcagctggagcatggagctgcagccccttctagtcctcccaacccctgagccttgtcaccactcccatgaccaccccatgcttggcctgcagacccgtgagagggacttggtttctgtgcttgacccgtgacacactccgagggcaaacctctggcccagggtccctctgtgcctggtagctctgagaagaccccgtatgcgcacccagttccatcccctgagccagactttgggtctcagggcaaggttagaagttgcaggaggagggaaaaagctttacctgaatttgttggtggctctttcagcatgaagagggatttcttcagtttctagaaagagaggaaatgacagagtctcaggccaagatgaaaaaaaacaccgctttttccattcctctggaaaactggccacagtggcaggagatggctcctggcccacaatggaagttggtttacatatggggccacctggcaaggacctggttgtcaggtgagaattttagcttgtctctcactccagctaaactgtagcacttgtgtgggccctgtcccctggtgggagacccagaatagcctggccccctcccatccgccctgggcatctccagagggcctcctaataggccgtgattctgtcttcttgtttggaactggtaaaagcaacaacagttggtcctacagtctctgaaataaggctggctttccaggagccaagatgattccaggaggtatgtgacccagcagaactagcgtcaaatcccatggtgatatttactcccttttccataatttattttttagttattccccttcaattacattttcatcttttgagccctggagagacagtcttgagttggtgctaatagacctttaatgcctctctattgcctagtactcttttaaaaaacaaagaaggagcaggccttggccagggaatagtattagctaaaattcattaacttcattttgttttcattgaatttaagttttgctgctttccattgtgagagtgacacaagtttcctttaaacatgaatttgtaaatacaaacaggtaggccttcacagaaatatattaaatatgtcataggaaagggggcactcccatatggcaataattcaatggaggccggcaaatgacctgagtgacccagatggcctgagcactgactcccaaatccctctgtaggacctgcttcattccccggaccctttcctgggtcctcccacaccctacacctcctagaccagccagacctcaggccacccacctctccattgctggggaagtctccatcccaaatgtggtggtctccaccagcaacagctgtgcctccctgtacttgtccatgcagaaacctggatggtacccaggtggacatcagccctcagctcccagtagatgctctgggctcctcccacacctcccccaggccagggcttctgtgctcatctgtctcttccagtgcccggccaggtgtggcacggaggaggtgagtgaacagatttgaacacattgtcctcggttctcctccttgctcaagccctgaagctaacccgtcaggaagccctggatgctctgcctgtaaaatctgcctatcctatgtccaagctcctctcagcacatccattgctatttacagttttgtgttgtggaaatatttccacgaaattggaatgagcaggtcacagctgtgcctggagggaatgctggggaaatgtgccctcgccttgctgttctatccaggcccacccagctgaggatggggacctgccaccactctcctggcagttccggagtcctgggagctggcaggtgaggacccaaagtgttttcagcaacctggctgacctggtcatccgtcagtcccaccttagcctaggccttacacagcacagatcacagctcatcccattgtggcattacactggcctgtgccctgtcccagggtcacatccgtctcccagaagccatgtgaccctgaccctggaaaacccatcaaccgtctaacagtcaggttcctcctctgtgcattaacaatggcattgacgcctgctttgcaggcgctgggaggggagagggaggtgtatgctggaaagctccccaagggcaaggcctgccttgcgtcactcactgtcagatcctcagagcccggggctggtccagcacgtggccaccattcctaagtattggatttgcttcatcagtgctgaaggcaggggatagagcttagacagacccctgtgttctgtcttctttatctgcagcttactcattcttgcccctttcacatgcacccgtagagcagacgttcactgagtttgaacaaaattcagctagagcagctgatgtatattgggcctgagttcacctgcctgggtctctggagtcctcggagtctctgtgtggtccccgtgtctgacactgaggacacacctgtagtctgctgatcccagaaagaggggtgtgtgctgccggggtggggaagatgtcggggcatggcaggtggctcctgggactgccccccagggttcaagaggctgaaggcttcctgccacacaaccttatccagggctgttgggcctgggatatggcccctgtcagaactcaggtaggaggggccttggctgttacccagcccccttgccacctccatggggacctgtctccgcagtgggcgactgggcccagatatgagtcaccctctgccctctgggctgctcagtccatgccaggactgaccattcccacacctggctgaactcttggcttggctctgggcccggggtcctgcctgtgccctctccttgaatgctctgggggtcaggaaacccaattcccttgtctccctggctcaaggcttgttgtcctggcacccttagaggggtcgcaggagtgaggggcctctgctgctctctgaggctgtgggtgctctcagggaggggtggggctcccacaaatgggtctggctcctccagtgcgcttgagggccctgtgagggggagaggggccaccaaggaaagtgggagggggcttgtgggaggctcttgcccacatccccctcctcacagcatgttcggtacacacgcattgagcgcctgccctgaggaccgatgggcctcctgactttcttagagtccaggaagaagaggagaaagaaaaggtgaagaggaagacccaggtataggattgggggtcctgagcactcccccactattgactgccccagaaggtgattcaggagggacctggtactggagcccacctgggggtggcaggtccccatgcttccttgttagtttttcatagaggcccgaaggtgtttcagaacaggatcattgtccatggctcaggtatgaaaaactggtctcgaaaaggtgcccacaggccagacctggacgtcttcatgaggcgctgtaggacagggtgggcatcaggcccggagagttccctgggagaggtcagagcccacaccccatgccacttcagtctcccactgggtggtgctggatactttcatggccactccaggggtccaatatgcacagaaggctgtggctggggggtagcctgggcaaaaaaagtgctcactacactctgactttcatctgggtcatgtgggggatggacttggtgtcattgtgccctgcccagccacctggacagacctccttctgggccagaacagaggatcatgagaacagtgtgaggaagcgcccttgggccagtcagggtctgaccccagtgctccccaggccccactggccacacgtgacttactcctctgaaccttaaaggcaatgcttgttatcggcatcaatgcctgttcccctccagcaaatacatgtcccacaggtgcagggtgagcccaagagagatctgtggggacagcggcatgggaggacctggcccttccaggctggggttggtggctcgagctgcacccattgggcttcagtctccagagtcagtgaccttccccatgagggtcacctgacccctccaggacatgggtcagacaaggtcttgccgctcctcatgggggggcactcatttcagtggggacgtgcttctggagataggggcttgcccgcggcttgaggcatccctgagccctcccaagttgggcctggcccagtctgcccatgaggctgggcctgaaccccagcctctgccctgggatgaccctcttgggcagagggtcttgcttgtgtggcctgcagggaccctcctgggcctcctgtagctaggggtgagcctaacccctgggctggggatgcagggcactgcagggcaaggagggtttaaactgatgtgcagaatctcctggccactgctccagcccctcctggagtgactccttctcctccaagtctccagggtggcccctatgcagccagcctctccctgatccgtcagcatcggccacccagaccagttctcggtccctatggtttggccttttccagaatggtctaggaagggaatcctactgtggtagcttattgggcctggcttctttcccttagcaaaacgcatctggatccacccatgttcatgtgggcatcactagatcgttcccttttctctctgaatcttcgccatttgaagggaggaccacccttcctctctgcgttcccgtgttgaaggtcattcccgagcctccatgtgtgagtgtcaatgaatcaagcagtgaatgtggcatgcaggtttcatgtgacatcagttttcaaatcagtgggttcaatatcggtgacactttggggacatgtggttcagtccattgaactttgtgagccactgcacaactggctgccaaagtggctgtgccgtgtgtgttcccagcagacctggatgagagtttccaggaccccaagctccccctgcttttggtctgtcagtgttgcctggggaagctcatgggccctccatcctgctgccctcccgtgggtccaccatgggtccctgtgggtcagggagagcacttttcaccattgtgcatgattttctttgcgccgtctgtctcctcaggatcctcctgggttctggccccacgtgttccagtctggcccgggcttggaacttgggaggtgctcggtccatggtaccagctgctccctggtacaggagactcttggcagctctgtcatccctcctgggtgatcctggcttctgctccagggaagtcccatccctctggttcaccccatctccactgggaccctgtggctcccataggcttacttgacccatatcggtccctgaagaacaggtggttccttaatgtccggctcatgtccaggtcgattggtggatgtgtccagaggacctcttgcccttctccttcatgacctgtagggcagggccagaggaggaagcaggctcagaatagatggaagactctctgccccaaatggcagtcagccacagtcagcccttctggaaggaaggaaagaagaaagatttccttctgcagaaagctgcttttggcttgtttctgaagccagggagggtcacgagagccgagttcgtctgtggtgactagtcaccatctgtgcccaggatgtgcatctgaccaccccccaacccccaaagcctgggctgatgttccctccagctggagacctggctccctgacacggcctggcctgtttgttgtgtcggctgagcgtgcctggtattttctgggattttttgccttgctttcctgaatgttcaggggcctgaccacagttggccctggacattaatgggaatgcctttatacactcactcaatcactgtgggcagaaaacaatctggtgtcacatgccacaggacaaccccagtgaggaccagacccgaggattctggaaatctttggttttggccccatgattcctcagtagaggtgaggtcagctggcacagggtctcccttcccaggattgaaagagtgtgtgggcactcagagtcctgactctgatctggaccttttcctcctttcgggtcaccaggaggcatccctactccgagctcaggggtctccatctctggattcagattccctccaagcaaggtgatgcttgcacgaatggcagcaaagctggcaaccaggcctgtggtcctctgggtgaggacagtgtgccattcgtctctgagaggacacagccatgggtgcctgtcccctgtctctgcagagagtggttcctgggcctctccctccacacattacttttttgctgttctgatatgtctcccattctcccagcattccatccacttgctctttcatctcatctcctgccacatttgctgtcaaatgagaaatgtggagttagcggagctgccaggcttcccggagtggcccgtggatgctgggtcttgggctcgaagccttggtgggacccaggtggaaggagccagggaagggcagaccctaagggctgaggcctttgagcaaatgagcactagtgggctggccttgggaccccgggacgtgccatcctcggccacagacacaccagtcgtaggtcaggtcccagcctctagatggggtcctaacacaatgggcagccacccccataccatgactgtggttctcactttggaatttcatcaaactgccgagatacaacaacctggggtcaggtccagcaggaatagctgcccctcccagtgacagcggttgccctcacctgccactgcacagacctgctgcctcctctgcctcatcaaccacccacgagtcccccatcccgggaccagcccccgatggatcaggctcttaccttcaccttccaggagtgacagggggcagctccgtctcactgtaagggaacccaggcagagctgaggacttgccagggtctggagtcgtccggttcagggagtcaacccccagaaaggactggctctgtccctccagctcagggctcatcccgggagaaggcacagggaagggaggacaagggccttcctgggggctgactcccaggagggtccaggacctgggagaagagggagtacagagccagcctgccggggttactggggcccctggtgtggggggtggtcaggctgcacaatgggtctgcccccctggactggaggtggtgctttctgctggagctgagaaaggtcagcctttggatgggatcgggccacccagtgtgggtgaccaggccctgacagtaatccctcaaggagtgaccagtcagggagcctggtctgagacctgcctggtacaccctgggtgcaccaggggcccatcccactgagagtcccaaggcccttacagcatctgacctcccagggtccacctgcctctccctgccccaagccacacactgcatttcagaagtggcatggctcataagctccctaccacactactacccggtgatcctccatctctccatcctatgatccctgagggatgggctccgggctggctcctcttacctggccccagatcccttcccagcaccagacccagggtcattagccacaactctgctgcctccctggctctctgtgagatgcccagaatagggccctgccagtcttctccccattctcctagggccacagcccctactgtccccatgcctttcccccttccccatgggacagtgagggctgtagctctagggaaatgggggtgaacaggggaaggtgggccctcagaacctgctggacaacagccccgaggctggatcaggcctcccctcaccctgtggccacaaccttggatctcactggggttgtctccaagtgaacagggccagaccctcaggctgccttcccctcttgtgctaactcggagacagaactgctgagagcccaggggcctgacctagcccccctccattcccacccgctccctagatgggccccacaccactggcctaacagcaacctcagctggaccggcaggggagccaggaaggagttctgaccctggaaaggaggttggctcgaccagggagacaagtcctgcctcagaaaggcctttgtaaaagcaaacccagccctgagctgaataggtgctttaggggctgaggggagcacagaggactcactgcagaatcccaaagcaatagcactgctgtagattccaacaggcacaggccccatgtctgctggcagcccagcttggttccctgcaacccagtgggagccttggtgaggggtccaaggtaaagggtgaaagggccactgtccccgctctgtgctcctagggagcccaggaccctttcaccagggtgcactggaggagcctccctccagggagcagactgccctctaccttctcatgcttcataatgatgtcccctactcctgcaaagtatccgcatcctctaccatgtccatcctgtgagacaaaattgtctaaggttacactgtacccgagagcttcggagaacacctgaactgctcctgcccggttcccagtgctgcctggctgcataaccccccttccaccactgcacccaggtgaaaaagggccagcccagtggcccacacctgcacaggtctctggggtctaaagcctcaagcaggggtaggcatctcccaaggacttgagaacagtgggacctggacagagaatcccattgtccccagatgccagaaacgcgcacacatttggcctagcaggttcaatggtgtccatctgccaagggtgaaggcccatgatgggctattccagggatgtggaggcagactggggagagggaccagaggtctcgtacaataggcctcctgggatgctcagggaccacagagatgttcagcttcctatggggacaagacctctcctgaccgcttggttctactccactcatcacttggactatcatggccctcagtctgaacagtgaagccactttaggaacaacaccagttgagcaggagggtgtttggtttggggatgaaaataatctactgtctccaaagcagcccctgtgctcatggaaaccacattctcagggagggactgtggactccaccattctgagctgtccatacaggaaggggattcatttcctgggtcactgaggaagaacagtgggtctttggtcctggagaacacctagatggatgtcccttctgggaacacttggggcaaaaggagggcaaggccttgagaggatcagacaggaaagaaatacttggggagaaccccagttcctggacccctttgaacaggatggaagatatctcactccagccagctctccagggctccttcattttccacagctgcccaaaggcagaagctccccatgctactcccagacaaggggccatgtgtgtccagtgggtcccacagggacctcaagacccagcttagggcacagatgtgttcggagggccctcccctccaccccacccacgtggatccatcccagtggctctgccagggccaggctctgccccatcgggatcggaaacctggacaaatttgggatctagggcaaggaggccaccgggttcaagccttaagtccagtgcgcacagggcagggctgagagcaaaacccagggtcatgcctggattcctgggctggttacgcctctctgaccccagatgtctcaactgccaaatgggtacattcaggagccaccatgagacaaaagagacaattgtctacatgggcagtgtagagtgggtacctggtgagtgctcagggtcaccttcctcggctgctgcctagaagccagcaccgcccacactgtagccacagtcccaagtcagcatggagggaagagagcaggtcacactcacctgatactgatgaatcagctggctgggctctgcctctcagggagaaaacctttgagtccacagagctgctcacagataccatgtgtgtgtgtagctgctgtagaacacagaggcaggccggacaacggacgggtaataagaccagtgacattctgaggtcatggcaggcatcacaatggggccttgcctgggtcagcaggcccagagtcagcatcctccactgcctgaggcgtcaacatgcctgcctgcaatgtgtttcacatgtgcatgcacacgtgtatgtgggtaaacacatctgtgcatgcatgtgttgcttcctggccaggcctggctgccccactcatgtgtgcacccagttccttgtcactgtcaccccggagccccaggccagcatcaaagcatccatgggtgctccctgacctcagccctccctgccagggtaggcctgggatacacatagggatggagggaagtgactgctgttgttgaatctcgaagaaaaatgctaatactattacctaatgatccttttagtatctctaatggtctttttgtatctctaatggtatctatttttttatttctgatattttaattgggtatttctctccagatccttggttattccagctagaggatcctgtggggaaagtgcccggcacacagtagagctcactcttctagacatgttatctaaaatctggcttatccgtccttccacccaaggcctggtgatgccaaattccaggagccagaaagagcttgggataaaaaagaacattcaagggggggctttggcctgggctgagtcttcttgtgccatccaaacctggaggctcaagtcctgaacagggtgtcctgatgccccaatgcagtgccctcctgattgacacctgctcccctgtaccattagcaacctcacccaccctactctcaaagcacacttggccctcatatctgggagtttgcatctgtggattcagccaacagcagatggaaaatattcagaaatgaaattggatggcgtctatactgaacatgtgtagactgttcctgtcatcattccctaaacaatacagtatcaaaccatttatatagcagctgcattgtattatgtatcataactaatctagagatggtctatgtatacaagaggatgtgcataggttatatgtaaatactaagccatgttatatcagagattgagcatccatgggttttggcatccccggggaccctagaaataatcctccatggatacaagggatgactgtataaactcactcaggaaggcttctcatcagaggaagggcctagttcggacacacagggacatcctccctggactactgtccattcatccatccattcatccattctcccccagcaactctaggactgtcccagtgacaaccctagcaagtggggacaagaaaaagaccagctcacgttgtccagctttgagttttggaagaagttgcactagtacgaggatggggtcagattcctccaggatccagagagcatatcaggcagcctcggggtgaggaaaggagccagcctctccagcagccacacaggcctgcagtaggatggtgctggggctggccctgtgatcacttgggcctagtgaggggaaataaagaccagggggcagaggaggagcatgggggcgctggtggcctaaggagaaggcatctcagggaaggggtctgtattagtttgctttcacatcctataaagaaatacctgagactgggtaatttataaaggaaagaggcttaattgacttcagttcaggaaacttacaatcatggcagaaggcgaaggggaagcaggcaccttcttcacaggcgacaggagggagtgagtggagaacaaggaagtgccacactttaaaaccatcagcttcctgagaactcactcactatcaggggaacagcacggcgtggggggaagaactgtccccaatccaatcccctcccaccaggttcctcccttgacactggaggattacaatttaagatggatttgagtggggacacagagccaaacctatcagggtctcagctggtcttgcagctccctggggctgagaatgtgtgcagatctgctgaccctgctttatagcactcgggggctctatagtgcacccccatctgctgcttcctgggggtggtggctgcttcctcaagaggagagtggtctgctctcttgccagccccctgcagggccttgtggagctctggccatgtcctcccaggtaagggcaggaaacctggctccttgcccttcttactccttgggtgacaagcctggggtctccttaggccccatcactgcccctgcttctaaatgaagagcattttgccaaatcttcctggagaggctgggggctcatccctgctgtctgtttcatcttgttaaagccaggttaagacgctgagcaaacagacagtagagtggcccccaggaagggtgggtggaggatgctggccttgggcttgcctggaccatggtgggagggggaaggttaccaggaagcagtgctgtcagggtaaattcaggaggaggtggttatgctggtgggggtggtgtgtggctggtttggggtagggataagtaagagccaaggttggtcagcacccagagggggcagctgactcatccctgtggcgcggaacccagtggttgcccttagttcctggatccagggagacttctggggcctgggtcggggcagcctagggtggaggtggtgggannnnnnnnnnnnnnnnnnnnnnnnnnnnnnnnnnnnnnnnnnnnnnnnnnnnnnnnnnnnnnnnnnnnnnnnnnnnnnnnnnnnnnnnnnnnnnnnnnnnnnnnnnnnnnnnnnnnnnnnnnnnnnnnnnnnnnnnnnnnnnnnncaccccaaattcacccctactcccaccctggtgtaggccagggccttttcaggtgtcctctgcgtggtctcagcagatcacaggatggaagctggcagcctggcaggtgcaccacttgagccggggtgacctgcagcttctgcttcttagagtgcaaggtcccacacgcctgtctttgaggtgctgggaggtgggggaccagcttctgtagccctgtgcatgtgccctgaaaggtggcctagactcctgtgtgtgcctgtccaggtggggccccaggagcctgaacagtggcagggaggagatgaggagggagagagaagtggagatgaaagacagagagagagagaagggagtgagacgagaggaagagagatggggagagagacagaggaggctgagaagaagagaagggagagaagagagtgatgtaaaaggtaaagagacagggagagaggtgcatgagtaggaggttgggtactcttgatcccagttgccagtgaaaactgttggtcactgtcacctaaccacacatgcataaagtcttctgcctgctccttacagcccccaagaacaccttcttcaagagaataaagttttgatggctgcccttccctagttgattttggtcatgtcttctaatgaaccatgatgtcctttgtaggaatggtatggaaaaagagccagatttgaggaggaacataacatgaggcttccaaattattctcagctgaaaggtctttaatgaaagtttcaaactctttagtagttggacgctggcatcagtggtgctggtgctagctgcctttcttttctctcattcattgtttgaattgttgaggattgaacaagtgtgaagatgacctgaataggccttcacttttgacagtcaattcttggtaactggattatacctatgataaaggagacagatcagaaccacactcctgcgctggagtacccaaaccctgggaaggcaggtgtgcagagaacgtgagaatccttgggataatgtggtgcagcttcctaaagaaacagagttttaatttcgagtaatttattatttttatatgttaattaatgaagaacagacacaggtatactacaaaatatgtatgggttttttatataatgtttttttttgagatggagtctttatttcccaggctggagtgtagtgacctgattcagctccctgccacctctgcctcttggcagattcaagctattcttcttcctcagcatctgagtatgtgggattaaatgtgcccaccaccatgcccagataatttttgtatttttagagagacagggtttcaccatctggccaggctggtgtcaaactcctgacccaaatgatctgtcacctcggcctcccaaagtgctgggattacaggcatgagctactacacccagctt

SEQ ID NO: 2888 - DNA, 15941 bp, Homo sapiens
gagaggacatgttggaagatctgttctccactctgaccaactcttttcttccctcagaggttctaccaaggagaagcagagctcagaggaagaagaaaaggaaacaagaggggttcagagaggcgaggagggagcacagtacccaaagatgggccagtgagacctcagaacgctgaaaagaaaaaagaggcttaggtaagggccagagttggtgataaatttgggcaagggacatctcacaaatcacatggaatatgtgctgtgggtaatggcaggtatctgagaaacactaaagactgggtgtaaagtggtctctgaggggaggtgtgagaatagctgaccaagactggaacagtggtgatggaagcctctgatcattttctcttcttgtcctgtacaagacctgcgtgtgtggggtacctgaatctggctgctgacttggcacacaacttcactgatggtctggccattgggcttcctttcgagggggccggggactagggatcctgaccacaatgactgtcctgctactgaagtgccccacgaggtcggagactttgccatcttggtccagtctggctgcagcaaaagcaggttggtgatgtctgccaaacacagctgcctcaaaccctttatctctcctcactcacctaaacccaaacagcctcttattagttccaaacaattcatactgtcattgacaagtccctagaaatgagggggaagaagttctggttactttgtcctttagctcagtatttcttaaatggtctataaaccatctgaatggtttagtggagtcttacacacacacgcctactcaatcgaaagtctgtggaaaggacctctgatctcttaagatttttcagaaattgtctattctagctgctccctcttctctttttattttgatgtttagtttccaaatccatgtcccctataccataccccaccagccacttctaaaccactgataatctttagctattggtgagtgccttttctcttttctgcccatcaggcgatgcgtctgcaactactgacagcagtaggggcactggcggcacagcctgtgcccttctcactgaaggaggagcagtgggcagtgaaattgcaggtgggcaggtcctggctgggtcctgccatttactgcaggtggctttatctacgtagcaacagttctgtgttgcccgagctgctgagggaggcatcaccattgcaatcacttctggaggtgctgggctgctggggggagttatcatgatggtgctgattgcccaccttgagtgaggggtggaaaactacccctgccccaaacctctacccctaactccaggtcaggggtgcgtagaggttggggccctggccagggacatctgccaaaggaaggaactgtagcctgggagaatggttacttggcattagggccttcaagggctggcagtcttacagaggctggagcggtgagaatgagagccagagggaccatagtgttgggcactgtctgaccatgttgcatttggaaggctaaatgggccatgaagaaggctggaagggacagggggtgatggcagcctacctggtgtcccctacccacctgttctcggagaaccaagttgctacacaggaagttctccaaggtccagtttccttctcccaccagttggtggaggcttcagggaagaccagagtcctggacagagagggtaacggaggagtcggggataaacatcaaacatcaatcgtgtgtcctgatttgggagtgattgggggatggggtgggagagggttagttggtattctcatggcctgattttttttgtttctatccttttatatcactgtgtttgaatcgagggggaggggtggtaaccggaaataaagacctcgatcttccgccccacatgcagtctttgtctttttggggggaatggggccccttgtctttccacacccggggcccctaagcagcagtgtcgggccacgccccctcggtgggaggtcggctgcgctggtggccgcagatggcctaaggctggcgggcctttgattggccccggctttgccttgccacgcccctctgcgctgggattggcttagtgctgggattcccacccacccacacccgccatggcgtctcagctccagaaccgactccgctccgcactggccttggtcacaggtgagggggttctttccccgggcggtttggggtattggagtgaggtcaggggcgtgccctggagtgcgcggccgctgtgacctctggccccttacccacattttactttctgccctgtgcctctgatccctgccctctcctccccgtgcccggtccggcgtgttctgtcctacctcagtgcggggagcggcatcggccgagcggtcagtgtacgcctggccggagagggggccaccgagctgcctgcgacctggaccgggcagcggcacaggagacggtgcggctgctgggcgggcagggagcaaggaggggccgccccgagggaaccatgctgccttccaggctgacgtgtctgggccagggccgccaggtgcctgctggaacaagtgcaggtgaacgctaggccactttcccctctaaagctctgatattgcctccactgccccggctttttgtggggggtttttgatgcgaacctccccctcccataggcctgcttttctcgcccaccatctgtcgttgtgtcctgtgcggcatcacccaggatgagtttctgctgcacatgtctgaggatgactgggacaaagtcatgctgtcaacctcaaggtggcgatctctgaacctgcgacgtttggcccccttagcctgggagggagttggaggagggctgtcaccccagctgatcttttctcccttgttaccctttcccccagggcaccttcctagtcactcaggctgcagcacaagccctggtgtccaatggttgtctggttccatcatcaacatcagtagcatcgtaggaaaggtcaggttgagttggacgaggtagccagccaagtggtatagagaggagaacccctccttgagactcctgactcattccacactctgactcacctataggtggggaacgtggggcagacaaactatgcagcatccaaggctgagtgattgggctgacccagaccgcagcccgggagcttggacggttggtcagatgcttggggtgctggggagcacctggggggtctgagggaggtaccagcattcagccctctccagatcggcagccactctccttcccacagacatgggatccgctgtaactctgtcctcccagggtcattgcaacacccatgacacagaaagtgccacagaaagtggtggacaaggtaggaggcgtgggtggagggcagaatcattcagagactcaatctctctgggcttcacagagagagaggagagagagagagagaatactgggcacagttcctggcaaacattaaatattcaatgaattatgagaaatgaagacaaaaaagggtcacagactcagtcttcaaaaaaatccataaaagagctttcacccacatgagtatttccttacagattactgaaatgatcccgatgggacactgggggaccctgagggtgagcactgaatgtagtggggtccctgggaagggggcctgaatgagagatccccaaagtttggggattttctaggggactggtggttggtgtctgtggagaggttgtggggagggatgtctttggtgggagattatggctgttttgggtctatgggagtgagagaattctgccctctccccaccattctcatagatgtggcagatgtggtcgcattcttggatctgaagatagtggatacatcacagggacctcagtggaagtcactggtatgaggccagatggggagggagagggcagagaagtagaacccagactatatgagaaagcaagtaagggggtctggagccactgggaagggcagaggttcccaaggccagggacagaagtgggtacccctagcccatttgtgtctccacccatgcatctgtccaaatgtttctgcccctcccaggaggcttttcatgtaactgcctcaaggaccctggactctgctcacccccccaccactctgcctgcctcctgctgatgaggactctaagttcccaggatacaaaaggggtggcagtgtatggtcaggaatgctgaatatgggaagcaggggtgcttgtgaccctaataaattccaagtcctctccctgccacctccggctcttcttgtgtccaagccctcagacccttccccacctccccccctttccctttcccgaaggattgttccctttctctgcctggtctcccagggcaacccccccgccgggtgtgagaggaaagagtatgtgtcactgtgtatgcgtgacactccgggtcttttgaagggaggggttcgtgcgtcacccctttccactggttctgcagcaccagtcccctcccccaactccctgggttcttatggtccccaagggtgatttgttcatggccccatcttgggtccagtctggccttgaaagggggtcttggaacaggtggccctcccccacccctctccttctctgagtccccccctcccctttctctccaccttacaatagctgcagccggcctggggcggatgggggggattaggggagggggccaggattaggggaatgaaccagccgatgaaagggctggagagagcaggagggagggggctgggaagaggaggagaaggggagggggtctgcctaatcgactctggcgcccacataaggactggccacggactgaaggagaggacagggaataggggggaactggggtggggggcgagggcacccactgctgccttgtcccagggacaggcaccccctggcagccgcagcccaagtccgggagcctcagctcgggcggggacaagatgccatcagggtctctaactgccccccaccccctcgccctgtatccctctcattccctacaccaatggggatcgctctgccccttcctcttctctttcctccccatccccttcgtttactcagagtcctcgaagaggcttctgcccacttcccactccagacattctgcccctgtgtacccacccacacgcgcacccccccttcccaatgggagctccatcttgtgtatgtccctgtttcgcgtggtgtctctattccccctttcctcccgtgcgcctccctcccttccccgccccggccgcggctcctgattgtccaaacgcaattctcgagtctatggctccggccgagagttgatctggacgtcccgagccgccgcccccaaacctcgagcgggagagcgggtcggagggtctgggagagccaaagcagagggtggagggagtccccagggtggtaaggggaatcccgggcaatcgggacctaggtgtgttctcaggactagaaggctaaagcggcagatcttttgcagcctttcccccgggatcctggaatgggggttacggagaagtgaggggggttgatccccagagcgccagggtacgcagagtgggggaggtagcccttttcacgagccctctgtcccctcctgggtcccagatattccaggccccggccccccggagctgaggccccgcgtgggggcctctgaagggaaccgaggctaaggttgttggccgcgcgacggtgctgggccgggggcggagacctggttccctaagtggcgcagaactcccgggacgcaggatcctcacgcgggacgagcccgcccgtgggcgggagaaccgcggcgtccacgtcccgtcccacccgcgccgcgaatggtggtgacgtctccgccggcggggggagcgggtgtagcggaggagcaggcggaagtgacgtaggccccagcgcccgggccatggcggcggcggtggcgggagctgctgtctgagcagcggttcggaccgagcgaacttggcccaggagcccgggcctagggagaggcgcggcggcggcggggcgcgaacggctggagctgggtgaggggcagtgccggcgcgggggcgggagcgggggcgagaggggcgcttctggaggggcggggtctacgcgaggggcggcccccctgacgccctccccccttccccccacccccagccttcttcgccttctcctcggctgtggagccctggtgggggtctgcgcccggtcaccatgacgacgccggcgaatgcccagaatgccagcaaaacgtggaactgagtctgtatgagctgcaccggaccccgcaggtgacaggcattctccctttcagcttaccccctcccccaaacccttatatccacagaccgcatcacacagcttcttttccgtatttgctctattctgccttgcctggccctacctttgaatcaccttaatctttccaaagcctttcgcatttagctcatttaatcctcaaaacagccctgccagagaggtggaacaagtatattatcttcatttgaaagatcacaaacacaaaaattaccttccctgttcctcattcaggtcataagtcagtgcacataagactcactttgggagtttattaaaagcagagcttcatgcccccaacattctgattcagtagtgaattgggttctcagaatctgaatttttaacaggcccctatggggttctaatacaggtagcaccaggactttaaaaaattttgttgaatagttttcccaaccacagatttgtgccatcttcactcctaggccacttagccacctcagatcctctattccaaagctcctactcttagttaatggacactaaagtctgtcttttctccatttgcccaagtcatcagtccttctctttctcagaattcttgtctcctatagagaccaacatgggcttctcactgtatttctcaaaattcttattttatgggctgctgtttctaaaacccctttcctctaacccacaccacctttctactcactgatgccttcaggaagccataatggatggccagagattgctgtttcccctcggtcactgcattcagaactcatgtgccctatctgcctgacatgctgaagaatacgatgaccaccaaggagtgcctccacagattctgctctgactgcttgtcacagccctacggagcgggtaataggagagacatgtttgagatgagatgaaggggacaaagttagggccctctcactggtcttggttcagcctaggcttcagttcccttgactgccactcagggcttcccttctcctaccccaggaacaaggagtgtcctacctgccgaaagagctggtgtccaagcgatccctacggccagaccccaactttgatgccctgatctctaagactatcctagccgggaggaatacgaggcccatcaagaccgagtgcttatccgcctgagcccctgcacaaccagcaggcattgagctccagcattgaggaggggctacgcatgcaggccagcacaggtgtgagggtcaggagagaagcagaactgatgggatgggtccgtgggtcagtcttgttgcctgctagcttctaagcctcagcatcctaggagctgaccacagactgatcattgggctggaaatcatgggtgtaaattgcagtttcttagtaaacaactggccctgctcttctaagaaaaatatagggctgggcacagtgactcacatctgtaatcccagcactttgggagtgaggatgggaggatcacttgagcccaggagtttgagaccaccttgaataacatagggaatctcatctctacaacaaattaaacatttagctgggcatggtggcacatgcctgtagtctaccttcttgggaggctgaggtaataggatcacttgagcctgggaagaaagtggatgttcagtgaaccatgatcacaccactgcacactgcactccagcctgctgggcgacagaacaagccctgtcacaaaaaaaaaaaaaggaaaaatgtagtttaccccatgactttctagaagtagaacagtagagcgattttgagaataagccccggattcatactgctggaagttaaatcactcctaggccagcatctctcagtctttcatgtgtatccagattacctgtagatcttcagtgcaaactgtgattcagtaggtctagagttgggcccgagagtctgcatttcacaagctccaggggatgtgtatgctgctaccgcactttgagaggtgacagcctatgatcactaacaattacttaacctctctaagcctcagtttcctcagccataaaatagaggtaatataattactgtgtcataggattcattgtattaggtaaggggattggtgcaaaacacttagtatactggtgcttagcacattgtgtttaataaatattaggtatcgtcattaggatttttcttatctttaattctctgaagtttaaagtctaagccctttatcctggatgccttctaaccttaacccttgcttctacagggcccagcgtgtgaggcggccgataccagggtcagatcagaccacacgatgagtgggggggaaggagagcccggggagggagaaggggatggagaagatgtgagccagactccgcccctgactctgccccaggccctgctcccaagcgaccccgtggagggggccaggggggagcagtgtagggacagggggaggcggcactggtggggtgggtgggggtgccgttcggaagactctggtgaccggggagggactctgggagggggaacgctgggccccccagccctcctggggcccccagccccccagagccaggtggagaaattgagctcgtgttccggcccaccccctgctcgtggagaagggagaatactgccagacgaggtgaggagccctgtcttccccagccactgagaaaccaaagatcacctagatttccatcagaagtgggctttgcccaacccaaaataccaccccaacccagaatccattttggaaagcccctacctccagtcctctctgaggcgctctggctctaagcctgtcctccctcccattccaggtatgtgaagacaacgggaatgccacagtggaccacctctccaagtacttggccctgcgcattgccctcgagcgaggcaacagcaggaagcaggggagccaggagggcctggagggggcgcctctgacaccggggacctgatgggtgtggcggggagggtgggggtgccggaggaggtgacggtcctgaggacctgctttgcccagcctggagggcgtcagtgaaaagcagtacaccatctacatcgcaccggaggcggggcgttcacggtgagagcttctgagggcagtggtagaagaggggagaggaggagggtggtctgggccacatagaaccatgagcctggtctaactcatcagcactcttccctatacatcctctatctctttctatgtcccctctcctttcccatcatccatgtcctttttgccttatcgcttttattattccttttttctttcctcctcccttggtcaccttttgcctccattcatttccttttccatcttctccaactttcctctctcttttcccctctctccctttaccccctcctcagacgttgaatggctcgctgaccctggagctggtgaatgagaaattctgaaggtgtcccggccactggagctgtgctatgctcccaccaaggatccaaagtgaccccccaggggacagccagaggaaggggaccatggggtatccctgtgtcctggtctatcacccagcttctttgtcccccagtacccccagcccagccagccaataagaggacacaaatgaggcacgtggcttttatacaaagtatctatatgagattcttctatattgtacagagtggggcaaacacgcccccatctgctgccttttctattgccctgcaacgtcccatctatacgaggtttggagaaggtgaagaaccctcccattcacgcccgcctaccaacaacaaacgtgctttttcctctttgaaacctgcagttctgtgtgtctgtttatcaggggtgtacaagaaaaagaaggaaaatagattggggagggaggcctagaaataatgtaaaatcagccttggaaatgggggaaaatgtcgggttattcgagatatgtcgtcggaaactccaaattagcaaatatgtatgaaataggaaccatctatgaagctggaagagaggataaaaaacagaggtgccaagttagacccaaactttcccccctaaaacctgagtcgcccaggctgaaatccagggtttcaacaccaagggaaagcaggaaaatggctcaaaagagaaagggatgtgtgtagatgtgggaatgacgtgatgtttggaagtcactgcgagcagccggtttctatagctggaaagagggagggaggggagaggactgcggagaagctccctgttcgacatcccagtccccgggccacctcccaaaaagggcaggctgggctgcagactcggagtgtgagtgcacagcctttgcccgccgggcagggggctgagcggagggagggtcgcctgggaacactagttctgtgctcgtccaggcagcgctgagagcagaggagtgggggcatcaaggaaagccgcggctgccttactggcctcgagtccgcgagcggggctgggcaccaagcctgaggctggggggacaggggcgcacgactgcaccccggtccggggcagtgcaggtattcggggaagaggaatcgcctctccagaaccgactgtgttccttccaccacccgtaacctctctgcccctcacttcctgtttcctctgctctgggacccccagcccctctggccccaaattcctcccccatgctcagttctctgtctcactggcgaggagccggccgtgtttccccctaaagcccgcttggccctcccagttccgcagctgcgggcccgcccgccgatcccatggctcccttctccacccttgggatttctcgtttgttcgctcctctccggtaccctcaatcccgtagatgcaggtgggcatcctccagccccagcaagtctgcggaccagttgggctggctggcccctttcctgcagaagcagacaacacccacttctccctcgtaggagcccctttctacactcacttccctggaacccgtgatcctgactcccctctcccggaccccaagcatccaggacgtgtacggtataaggggaagttgtagtgggaggcggtgggcgttgttcctggagtttcagggtagagaagcaggtggggaggagttgggtgagtacagaggtggaagccaaaagtctggagttaacctgacttctcttctggctccaggggcgccgggatcgtctgtcctcaccctccttgtcctccccagccctaaccacccggcagcctttctctgtctctgctgcccgtcctgccttcactctgaaacagcctgccccctcccgggtcccagtcctcacctttgccccacacgcccccctctctatttatcacatttcctttcgtgccccctaaccccatcgcttggtgcgagtgctctcttgccctcctctccccatgactgaactcacagacatggctgtttatttaggtgacaccatgtgggagacacagaggaacccattccatcctggctccactggggcatttcctttccaagtccttcagtccctcccaaccaagctatgttactgggtcaggcaaggtgagagatataaagtatgcaaaagaaaacgttactatttgttgaggaacaagatacatgtggaatagttgacaatgcagaggaacagggtagaggaggagggttgatacagtattagagtcagacaaacgtgggttcaaatcggctctgccacttcaaactgagccaccttgcacaaggcactgggtcttccctctgtttcttcacctgcaaaagggggagagtaacaggttgccctgagaattgagagataatacaagtaaagttacacgccaacagatcagtggctctcccagtgtggatcccagactagcagcatcagcatcgcctgggacttgttagaaatgcaaattcttgggccccaccccagatctgctgtttaagaaactggaatggggccagcaattgcattttcccaagcccccaagtgcttctgatgttcacacaaggcgaggacactgaagaagatgccccacaaaatgttacggccttgccttatactataaagaaggcaaagggcccgtgtaggggtgctctgtgactcccaagcaggaggatcactgcaggccgtagggaggtgaggagcggcctcacagaggaggtgggactgggctggggaaggaaacaggaagcctttctgcagtgggtgagggagatggggggaagctccctctcccttaccctaccaccacccagcacgattttacctctcaggcttctcagtctccaaagcagagcagaccatgatctgaacgcggaagctgagctctggagcccagagcctcagggccctgagggaaggttccccaggagacccctgcccaggcaaggcctaactctgagggccctgtccttgcctggcagcctcaacaccctgggaagctgctcacaggaggctgtgctctgggcttctccaccttcacgtccacctcagcgaggagggaggtgccgctgaaaccgccaaccacttcttcagttgggttggggcttagcctctcctctcccacctctgtctcctctgcttcctcctcccccatgctgtctcacctctctcccctctccctgcaggctgggagcaaagggagaggaggaggagaagaaggacagacccagccctctacctactatggcactcctttacctgccagctgtcacaaccacccttccccaactcccctacccgggacccccatctccacccacaaatccactcaaattcctgcctggaatgtggagtctcttcccactgctctcacctctctcagcacagcctgggcaggggcccttctcctccccctaatataggaagtacttcagccaaggggcccacctgacctgtgcgaacactttcacacaggtgataggccctactcctgcagaaagtgtggccacagccttgccacagctcacacctggcccagcactgcggcacacacctgcctgaacccaatcacgccaccagtgtggcaagggcctctccccaaggctccagcccgttgcagcctgccactctcacacaggcaagcagccttacgtctgtgccacctaagccttcttgtggtagatgagggtctggcccccactccaacctgcaacaccagcagcagaaccatacctgggggcgtccccatacagtgaccagtgaggcaagggctatggacattgctcagggctggtgcagcaccagcaatctgcagaagcaaaggctgcaggcatggtttctgatacagccccaggctggtgcagcataccagggccacatcagggacaggctctactgcttgcctctgtggctgtggtttcacttgaacacccacctgccatgacaccaggcctcatatgtggagaggaatgagatgaacacagtgggaggcagggaatcagagcccctgtggctgcatcaccgcccccaatctgcagcgctcttgagggtggcagggcagcctcagagacagacttcctccacctgtgggaggcataacagacagagatccacccactcccagccagggtgaccttcagagcaaccataaggggtagctcggtgtctcgcctgaacccactcaaagctggaatggccaggtccacttcactctagaccaagtgccaagtcctaagggagctcccaagccaggaacttttctctggagaagaatccatactctcagggtcttaaaaaattttgttttttatataaataagaggtcctggggcacttttcatctcctgtcctccatcggagaaatttcactaggctgtctcagacgtgctgttgtcgtgatggattagactccttgggactttcttgaagggtcattttaaagtgatagcttaggctggcatgatggctcatggctgtaattccaacactgtgggaagccaaggtaggtggattactgaggccaggagttcaagaccagcctgaccaaacctggcaaaaccctggctatacaaaaacacaaaaattagcaaggcgtggtggcccatgcctgtaatcccagctactcaggaggttaggcatgagaatcacttgaacctgggaggcggagtttgcagtggccgagatcacgccactcactccagcctgggcgacagagtgaacctctatctcaaaacagaacaaacaaagaaaaaatgcccttaagagttcttttataaaaataaaaacagaaaaaaaatagataacttaatttcagagatctccaggacaaccccctaccatcaaatcctagtcccccaactaatcccacccacccccagaggctactgggttcttcctgcctcaggtgttcacactacacccggcgccccatttgatgagccatcttcctgtgcctactccttgcttcaccaggtcctgttcttacgagttactgttactcttcatgttatagggtaagtgagaccttattcttgtattaacttgcccagagtatactctttggaactcggcaatatttctccctatgatgtaccaaggaggttgatactgacacatgctagaagaaattaaatacgcttagtggtcaaaggattacttgagagacgctaatcatttccaccctttcgggaaatgtgtattgagtctaccatgtgtcaggagttgtctgggacctgggtatcatagtcatgtggcatagcccctgccttcgaaggatttgatgtggggcggtttagaatgagcatctcaatattgaatccagcacctagtcctatccattttactgctctaatatatctcaagtctgtccactcgttttcatccctccacatccctgggctaccaccatgtggaccatgtggccttctctgagtcattgcagtagctgaagaggctgggaaggccttctctacagtatgacacacacctaagagggatcctttaaaaatgcaaatctgatgtttcagtcagcctccttaaacctattcagtggttttccattgatcttaggttaaagaccaagtccttaacctgacctctaaggccctgcaaggggtggcccctcctctccagcctcactcccaccacaccccctcactcgtgtgctccagttgctgtccaccttgtgcttcctcctcacagagtctccagggaggctggaccctctgtggaacggctccttcctctgttcctctctcttagctcctcttcattcttcaggcctcaccttctcaatagcctcagggaagccttccgaccttcttttcagggtcaaattctcctgttatgagcgctcacactaaggtgtacctttctcagaggcacttggccctgttggagttctacatttgttgatgattatgtacagactgagtctgtctgccccattgaatgtaagctccctgagggcagggactatgactgcagatgctactcttgccactccctggacctaacactggatactttataaatagtggttgaatagatgattcatggcaggatctgggcaggaggctagatatttcaggatttcagaggtgatgaattaggccatgattctccctcctgtagctgcagcccaagaatcccatgtgctattacctaacctgttacttcctccttaattcctggcatcattcaggtccacagccctgccttcatcccagcttcctccatcttgcctgtgagaccctctccctctttaactttttagttcccctttctgttttgcctca

SEQ ID NO: 2889 - DNA, 67467 bp, Homo sapiens
  misc_feature 10902, 10903, 10904, 10905, 10906, 10907, 10908, 10909, 10910,10911, 10912, 10913, 10914, 10915, 10916, 10917, 10918,10919, 10920, 10921, 10922, 10923, 10924, 10925, 10926,10927, 10928, 10929, 10930, 10931, 10932, 10933, 10934: n = A,T,C or G
  misc_feature 10935, 10936, 10937, 10938, 10939, 10940, 10941, 10942, 10943,10944, 10945, 10946, 10947, 10948, 10949, 10950, 10951,10952, 10953, 10954, 10955, 10956, 10957, 10958, 10959,10960, 10961, 10962, 10963, 10964, 10965, 10966, 10967: n = A,T,C or G
  misc_feature 10968, 10969, 10970, 10971, 10972, 10973, 10974, 10975, 10976,10977, 10978, 10979, 10980, 10981, 10982, 10983, 10984,10985, 10986, 10987, 10988, 10989, 10990, 10991, 10992,10993, 10994, 10995, 10996, 10997, 10998, 10999, 11000: n = A,T,C or G
  misc_feature 11001, 11002, 11003, 11004, 11005, 11006, 11007, 11008, 11009,11010, 11011, 11012, 11013, 11014, 11015, 11016, 11017,11018, 11019, 11020, 11021, 11022, 11023, 11024, 11025,11026, 11027, 11028, 11029, 11030, 11031, 11032, 11033: n = A,T,C or G
  misc_feature 11034, 11035, 11036, 11037, 11038, 11039, 11040, 11041, 11042,11043, 11044, 11045, 11046, 11047, 11048, 11049, 11050,11051, 11052, 11053, 11054, 11055, 11056, 11057, 11058,11059, 11060, 11061, 11062, 11063, 11064, 11065, 11066: n = A,T,C or G
  misc_feature 11067, 11068, 11069, 11070, 11071, 11072, 11073, 11074, 11075,11076, 11077, 11078, 11079, 11080, 11081, 11082, 11083,11084, 11085, 11086, 11087, 11088, 11089, 11090, 11091,11092, 11093, 11094, 11095, 11096, 11097, 11098, 11099: n = A,T,C or G
acaaaagtaaatttataaatgtaatgtaatccttataaaaacgccgcatgcttttccccgatctagaaaactaattataaagttcatgtgagagaggaagtgcacaagagtgtaaaaaagccaggaaaactctgcaaaagaaatggagaggtcctctgcccctgaaccatctcctggctccgtaatggaaccacatgacaccaggacccatgtaggcaagcaggcccagggacatgaaacccggggacagaccccagtgcctagaacattcagtctataaggtagcatatgatacggtgaggaaaggatggacttgttaatacaagtggttaaacgttaaccacttggagaaagcgaaaatgaatctgcacttcataccatacactaagacaaattccaaatgggtcaaaagtctaggaaaaagtgaattccttcatcaccggggagtgggcaaaatcttcttaaatatgactaaaacccaggagtgataaaagacaaaatgtatactgggaaaaaagttttataacatagacattttcaaagtgtcggtgacttgagtgggaagcagggcagtgactgtcggggactgaggtggggggatggtgttgaacgggcgcggggtctccttctggcgtgatgaaggctttggagcacacagaagtgatggttgtacgttatgaatgtattaaatgctgctaaattgtagacttaagagatggttaaaatggtgaatttttttaaccatctataggactctgataaaaatgtgttttatgtatattttacctcaataaaaattataacttaaaatgagaaatattaggataatattccttattcaaacgagctcatgagtttggaaaatcaagaaaatgattaaaaaaaaaaagagagagagaaatgcaaaccaaaaccaccccaagactccatttctcacctacaagttgacccaaatccaaatttgacaccagattcggctgctgaggggggcagggacttcctaaatgctgtggggatgcagaacgcctggccccttggggacagggacaacacccagacaagcagatgagcctctccccgccgactggcaatcccacttccagaaatgtatccttaagatagatggccagaatccacaaggatgtggaaatgcccttctaaccagacttagaagacaagcctctgcagtcccaacggaggtgctgggtccaactctgacatttgattggccaaagactgaaacaacccaaggcccagcatgaggggatctgctggctaactcacggtgagctaatccaggcgagctaacccacggcgagctaacccacggcgagctaacccaccgccagctaacccaggcgagctaacccacggcgagctaacccacggccagctaacccacggcgagctaacccaggccagctaacccacggccagctaacccacggccagcttacccacggccagctaacccaggccagctaacccacggccagcttacccacggccagcttacccacggccagctaacccaggccagctaacccacggccagcttacccacggcgagctaacccacggccagcttacccaggcgagctaacccacggcgagcttacccacggcgagcttacccacggcgagctaacccaggcgagctaacccacggcgagcttacccacggcgagctaacccacggcgagctaacccaggcgagctaatccacggcgagctaacccacggtgagctaatccacggcgagctaacccaggcgagcttaccggagcactcggtagctgtgctagaggcctgtgtggagcaaatgtgccggttttacagttctgacaagaaagccagtcaaatgatttgtattcacaaaacaaattatacaatttctagaatttaaacaaatggacttgtgtatcaagttggtgacagaagcgcagatagttaatccaattacatcatattttaactttgtatcttcaaagggaaaggtctaaaaagctagcagaaaaaaactttgaccagtagtcattgttaacaataccttttttggtagaggggggtcttactatgttgcccaggcttattttgaaatgattatatgcatttatatgtagataaagcaaataatgttaatgttgtaatgaaccaagattttcagcttaagaggtaaaatcaagaatatttaaaaacccttataatcttaacatttgaatggaaaacagtatgaattcattttttcaaaaatacatgtgtatatcccatgctaaagtagttaagggtgaagggtcctgactctaatacaacctcacgattcagagaaaataaaccagaaattttttttttttttttttttgagagagagtgtcttgctctgtcgcccaggctggagtgcaatggtgtgatctcggctactgcaacctctgcctcgcaggtttaagcaattctcctgcctcagccccccgagtagctggattacaggtgcccgccaccatgcctgactaattttttgtatttttagtagagatgggttttgtcatgttggccaggttcgaactccttacctcaggtgatccatccacctcggcctccaaagtgctgggattacaggcatgagccaccgcgcctagctgagaaaataaattttagacaattttctggttttgtccatggaaaggctgggaggtagagcagcccagccatcataacagtcagtgctcagtctgtggcctccaattcccactccctccaattcccactccccactacgagaaccagggctctggagaaatgggtagttccaggttctgggcaggaaaagtcagagcagctgtggccccagagcaaggaggcatcaaagcccactggatggaggggctcctctgccaattacgagataatctgagcatctcctgtttgccaaagatatacgcagcacttgattaaatgatatcaaatacagttggccctccatttctgtggattcaactgtgtataaaaaatttcctggccgggcatggtggctcacacctgtaatcctagcactttgggaggctgaggtggtggatcacgaggtcaggagatcgagaccagcctggctaacatggtgaaatcccgtctcactaaaaatacaaaaaattagccaggtgtggtggcgggcgcctgtagtcccagctactcggaggctgaggcagtagaatggcatgaacccgggaggcagagcttgcagtgagccgagacgcaccactgcacttcagcctgggcaacagagcgagactccatctcaaaaaataaataataaataaataaataaaaataaaaatattccccaaaagcccacaataaaaaaccccaaaatatacagtataacaactgcgtacagagcatttacactgtatcaggtattataagcaatcagagatgacttaaggtatatgtgagaatgtgcataagttgcatgcaaatcccatgccatttatacaagagactcgagcatctgattttggtacccgtgtgggtcctgtaacgcaccccgtggatactgaggacagactgtatacatgaaagcattaagctcgtaacatgagtagggagcgggaagggtaagtgcagtggtgtgaggaactcccagtcctttggcaccactggaggggccaggacattcttactccaaaaattgatcattaaagggaaataattaagtgcttatgcgcctttctagtatgaacgcacttcagggtaacctgacttaccctaatggataaagggaagtctgagagaattccagccactaaatgtccttctgatgagacagaagacgagaattctgagtcccagtgaaggttctggttctagcaatggtcacccacaggtggcaaaactgtcagggaacagttgaggggaaactgacgataaaggggtcaggctgtcgccatccaagcttattatgcttcaacaaagtgacacaattggacatgaggctgtgacacgaggaactgagcaccgtcgggtgtgattccagccacaactttagatccaacttccagacgacaggatatagaggggcagaggaacaagttaaacactacaaggaggatgctaagtccagactggggacaccttcgggacaagtgaccagcttcaccaacaagtcaagggcacaggggagggaagagggggactttaggatcaaaaggatcctaaaagactttgtagccaaacacaaacgtgaataaagctttgtaatccaatcgtgtgaggatatttcttaggcagtaagggaaatacgaataggactgttaagaacattacagaattcttatgcattttgtgaaaacagcactgtgccgtcagttattgattcttgtctcttggcttgtctgtgctctgccctgagtgctgcccttccacacacccttcagctgggtgtgctggagccctggatgcaggagttggggctgggacctccctggtgttccaggttatttcagcatcactttgggagcagagacagctctgagcccagccaccaggtccctggtgcccccttggctcctggagtacagtcctaggccctcctgcccctcttgcgagaacaagcacatcctgtaagctctgaggtccctgaaaccccaccctggtaatactttttgtcccaagccctggaggtggtacctgcggttgctaccctggatgttaaccctgcgcagcctgttgctacctattctgactctgcttcccaacacccgtgtagcctcgtctccatgtgcctgggagacttctgatatggcaacgagttaagagaaagaaaatggctttgtgttgttttgtgagcctaccaaaggatttaggggcaagtgacaatatgtctggaatttgcttacgtgtattccgcagaagtgggggaggaaaagatggaagtgctttgggcaaaatgctggcaggtgctgagctgggtgacaggtacaagggtttagtgtatgtttggaaactttcatagtgaaaaaaacccacaaaaacgaaagctgtattagagttacaaactaaaacttacatgatgatgttaagacacagctagcctcttgggaatgctccatctgtaggaaaatatagactcggctctttaaagtaatgagaaaatgactgccatcttttttttttggagacagggtcttgctctgtcacccagttggagtgcagtggtgtgatcttggttcactgcaacctccaccacccgggctccaggatcctcccacctcagccttctgagtaggtgggaccacaggcatggaccaccatactcggtaatatttctatttttttttgtagggatggggttttgccacgttgcccaggctggtcccaactcctggcttcaagccatttcctcgccttggcctcccaaagtgctgggattataggctgagccactgcgcccggccaactctatagaagatttacaaatattttagatcttgtcaaactgtaagaagaaagaaaaggaaagagattcatcccttcttaattttttttttttttttttccagacagagtcttgctcttgtctcccaggctggagtgcagtggtgcgatcttggctactgcaacctccaactcctgggttcaagcgattctcctgccttagcctcccaagtagccggattataggcatgcgccaccacacctggctaattttttgtattttaagtagagacgggtttctccatgttggtcaggctggtctcgaactcctgaccttaggtgatccgccagccttgtctcccatagtactgggattacaggcgtgagccaccacacccagcccccttcttaattcttagggaacgctttggaaaacaaacatcagcagataaaaaaaaaatgtacagcctacgaagtgataatattcaaaatcctcagccataaaaataaaggccttttatttggtttttcttgccagtacagaaacatctggacaacactcttgagcctgcagaggctcacggccacaccacttctgccgcagggactgtctgttgaggagccgaaccgttgaggcacagtagccaggcctcccgagggctccagaagctctaggtttacggggtcaccttcttgtaggtgacgtgaaatgctgagtcattggctgtgtcgtggttgccatggagaccgtctgctcaagtttgccttagaattcagcctgaacttccgggtgatctgagcaggagaatggaacaaagatagcttagtttatcttcaaaagattcaatcaatgcctgtgcgcccactgcatgccacacactcatcagggctgtgagccaggcagtggccctgccagaggagggtagacacacagcccagggccccgggcatgtcacaatccaggtgcccttcagctgcctccagaagaccaccaggggaacacaggattgtttatttagaagtcaccttttttgtcgacggccataccaccctgaacgcacctatctcgtctgacctcggaagctaaggagggtcgggcctggttagtacttggatgggagagtcacctttttttggtctctacaaatcatatacctgatcagacaagcgctgagcttccatgcttcccttctccactgcctcccactttcactgtaactagaactgatgtccaatgtgtcttggaaagctcagaaataccatctttggaacagtaattcatcagaataaattatagcactgtttccaacaagaatccaagcctatggcagctaagtcccgaatgagtcagccctatagcccagaatgtttgccggcaaattgtgagagtgaccactgtcaaaagacaattctctgagggcactatctctctagtgccccagatgtgtggggggtcatgtggggtggggggcaccaaagtggatgaaacggagttctgcttatggccatggctgactactctgtaactgaccaacctcctgcagataacaacccaggttttaagaagtttctttaaaggtgtcagagaaccaccagtcagcgaggaccagcaccccaaagagaaggaagtgtggaggtgagacccaatttggacaactggccccgatgcttttgctgcccggaagtcaaggggttcaaggggtggaggctgaagggatgtggtagctaagaggctgagaagctaagtggggccttctcagactcatggagcggagggacaaacactggaattcagtgtccatctaggaggagaggcgcagccgggcatggggtatgcacatgtagtcccagctactcgggaagttgaggcagcagaattgcttgaacccagaggtggaggttgcagtgagccgagatcatgccactgcacttcagcctgggtgacagacaagactccttctcaaaaaaaaaaaaaaaaagaaaaaaaaaagaaaaagaaaaagaaagaaaaaagcaccctgaggttgggcacggtggttcacgcctgtaatcccagcactttgggagccgaggcgggcggatcacgaggtaaggagatcgagaccatcctggctaacagggtgaaccccgtctctactaaaaatacaaaaaaaattagccgggtgtggtggcgggtgcctgtagcccagctactcaggaggctgaggcaggagaatggcgtgaacccaggaggcggagcttgcgtgagccaagatcgcgccactgcactccagcctgagcaacagagcgagactccatctgagaggaaaaaaaaaaaaaaaaaaaaagcaccccagctttgggtggggtccctgaagggtccatcccaggagtaagagttaaccagaaacaggctgggaagtccggtttcaaaccagctcgcctctactgaacacgagctgtccatccttgaccaacaggcagaagcacagaactgctcttggtgaggataacatcaaaggaagcctcaagtcatctctacaatttttcacacatatttctagaatccaagaaaaaaagaaaaactccttaggttactaggagataagatcaaaagaaaaacaggaaatagacacctcccccaccctcacccaggggataccaatactggagttatagaagacaatatggagaatttctgcaggtaatcagaatttatcaaaaagattaaaatataattctacaactgaaaaacataataactcaaattaaggccccaataatgaaatagacaattagacacagatgaagaaaggattagtaaaatggaaaatgatcagtaggaaatatccacttgaagcttagagaataatggaaaatatggatgaaagcataagggacacattgaaaattcaaaagactgaacacatgtgtaaccagagacccagaagaagataggaaagacaacagaaacaagcaatatttgaaaagatcatggccaattttctgagcctaacaaaatatatcaagcacaaattctaattatatcacagcaaaactttggctgataatcaaaggcaagaaaatagaacttgaaagcagccagaggtgggtgtgggtgtcatggttaattttaggtgtcaaaggtcaaggtgaccgattaaggaacacctagaaacccggtaaaggattattttgagtatgtctggaagatgtttccagaggtgactgaccaggtgaggaagatctaccctccatgagggtgggaccatctaataggctgggggcccagataaaataaaaacaaagataaggcgaatatgtcctctgtttgctggagctgggatacactcttcctcccccgtccttggacacctccaggcccccgacctttggactcccagatgtcaccagcacctcctctctcctcagggctctgagaccttggcccaggaccaagagtgacaccactgacttccctggttctgaagcctttggacttgactgagccatgacactggcatcccagggtttccagcttgtggaggggacttttataactttgaatgctacattcgttaagtgtacatgaaatattcatgaagttaggccatatactgggcgtaaaataagtctccaacattttttaacagactaaaatattagagggtatgttgtctggccttatagaattgaatgaaaaatcctgagcaatagaatctatttaaaaaattctcaatatttggaaaataagtaacatatctctaaataaccctgttcaaagaaaaaaaaaatcacacaaaattagccgggtgtggtggcacatgcctttaatcccagctactcgggaggctgagcaggagaatcacttgaactggcgaggtgggggttgcagtgagccaagattgcgccactgactccagcctgggcaacaagagagaaactccatctcaaaaaaaaagaaaaaaatcactaagaatagccactctactccagcctgggcaacacagaataccttgtttttattgaaagaaaaagaaaaaaggagagaaaagaaggaaggaaggaagggagggagggagggagggaaggaaagaagaaaaataaagaaacaaactacagaaatgaatgaatttaacaaagtcacatgatcgagatcaatatacaacagctaattgtacttctatatacttgcaacaaataagtggaaattaaaaaatcatttataatagcatcccaaaccacaaaatatgtaggaataaatttaacaaatgtgtgcaaaaccaatacgttgaaaactacaagaaaatataggatgagactgatctaataaatggagcaccttaccatggcactggattggaggactcagtttgcctaagatggcattcttcccaaattaatttagaaattcaagtagttccaatgaaaatgtttctagaaactgcaagctgattctgaaattcataaggaaatgcaaagggtcctaggatagccaaaacaatttggaaaaaagaaaaagaagaaaagttgggtaacttctatcacctgattcaatataaagcacaatgatcaagacagcatggtaacagtataaagaccgaaacagagaagagtgggacagagagagagtcctggggaagaaccacacacacaaagtgagttgattttcgacaaaagcacgcatactttaataaattaagggttctcttttcaacaaatggtgctggaaacgaggtatcgtatgaggaaaaatggaaaaaacgtgactactacctcataccatctagaaatagcaattcaaatagcatatatcttaaaactataaaacttcttgaagaaaatgcaggtgaaaatcttgctgcctgggctaggtgaaaaattttaagacaggacacaaaaagcactgactagagaaaaaaatggtaacagaattaaaacatttggttctagactgcgcatggtggctcacgcctgtatctcagcgctttgggagaccaacgagggtggatcacctgacgtcaggtcgagaccggctggccaacatggtgaaaccccgtctttactaaaaatacaaaaaattagccggccatggtgtgggagcctgtaatccgagctacttgggaggctgagagaggataatcgcttgaatctggaggtagaggttgcagtgagctgagatcaggccattgcattccagcctgggcaacgagacaaacaatgtctcaaaaaaaaaaaagaaaaagaaaagaaaccccccacccccaccaaaaaaacaacatttggttcttcaaatggtactgtctaggaaacagaaaggcaaggcacaggaaggaatatcgtgttggcaagtacacctgataaaggacttatacccagaacaaacaacagctcttacaactcaggaataacacaaacacttaaacaaatgggcaaaaaatctgaatgttatttcacaaaacaagaaatacaagtggcaaataagtacaacaaaannnnnnnnnnnnnnnnnnnnnnnnnnnnnnnnnnnnnnnnnnnnnnnnnnnnnnnnnnnnnnnnnnnnnnnnnnnnnnnnnnnnnnnnnnnnnnnnnnnnnnnnnnnnnnnnnnnnnnnnnnnnnnnnnnnnnnnnnnnnnnnnnnnnnnnnnnnnnnnnnnnnnnnnnnnnnnnnnnnnnnnnnnnnnnnnnnnnnnnnnnnnnnnnnnnnnnnnnnnnnnnnnnnnnnnnnnnnnnnnnnnnnnnnnnnnnnnnnnnnnnnnnnnnnnnnnnnnnnnnnnnnnnnnnnnnnnnnnnnnnnnnnnnnnnnnnnnnnnnnnnnnnnnnnnnnnnnnnnnnnnnnnnnnnnnnnnnnnnnnnnnnnnnnnnnnnnnnnnnnnnnnnnnnnnnnnnnnnnnnnnnnnnnnnnnnnnnnnnnnnnnnnnnnnnnnnnnnnnnnnnnnnnnnnnnnnnnnnnnnnnnnnnnnnnnnnnnnnnnnnnnnnnnnnnnnnnnnnnnnnnnnnnnnnnnnnnnnnnnnnnnnnnnnnnnnnnnnnnnnnnnnnnnnnnnnnnnnnnnnnnnnnnnnnnnnnnnnnnnnnnnnnnnnnnnnnnnnnnnnnnnnnnnnnnnnnnnnnnnnnnnnnnnnnnnnnnnnnnnnnnnnnnnnnnnnnnnnnnnnnnnnnnnnnnnnnnnnnnnnnnnnnnnnnnnnnnnnnnnnnnnnnnnnnnnnnnnnnnnnnnnnnnnnnnnnnnnnnnnnnnnnnnnnnnnnnnnnnnnnnnnnnnnnnnnnnnnnnnnnnnnnnnnnnnnnnnnnnnnnnnnnnnnnnnnnnnnnnnnnnnnnnnnnnnnnnnnnnnnnnnnnnnnnnnnnnnnnnnnnnnnnnnnnnnnnnnnnnnnnnnnnnnnnnnnnnnnnnnnnnnnnnnnnnnnnnnnnnnnnnnnnnnnnnnnnnnnnnnnnnnnnnnnnnnnnnnnnnnnnnnnnnnnnnnnnnnnnnnnnnnnnnnnnnnnnnnnnnnnnnnnnnnnnnnnnnnnnnnnnnnnnnnnnnnnnnnnnnnnnnnnnnnnnnnnnnnnnnnnnnnnnnnnnnnnnnnnnnnnnnnnnnnnnnnnnnnnnnnnnnnnnnnnnnnnnnnnnnnnnnnnnnnnnnnnnnnnnnnnnnnnnnnnnnnnnnnnnnnnnnnnnnnnnnnnnnnnnnnnnnnnnnnnnnnnnnnnnnnnnnnnnnnnnnnnnnnnnnnnnnnnnnnnnnnnnnnnnnnnnnnnnnnnnnnnnnnnnnnnnnnnnnnnnnnnnnnnnnnnnnnnnnnnnnnnnnnnnnnnnnnnnnnnnnnnnnnnnnnnnnnnnnnnnnnnnnnnnnnnnnnnnnnnnnnnnnnnnnnnnnnnnnnnnnnnnnnnnnnnnnnnnnnnnnnnnnnnnnnnnnnnnnnnnnnnnnnnnnnnnnnnnnnnnnnnnnnnnnnnnnnnnnnnnnnnnnnnnnnnnnnnnnnnnnnnnnnnnnnnnnnnnnnnnnnnnnnnnnnnnnnnnnnnnnnnnnnnnnnnnnnnnnnnnnnnnnnnnnnnnnnnnnnnnnnnnnnnnnnnnnnnnnnnnnnnnnnnnnnnnnnnnnnnnnnnnnnnnnnnnnnnnnnnnnnnnnnnnnnnnnnnnnnnnnnnnnnnnnnnnnnnnnnnnnnnnnnnnnnnnnnnnnnnnnnnnnnnnnnnnnnnnnnnnnnnnnnnnnnnnnnnnnnnnnnnnnnnnnnnnnnnnnnnnnnnnnnnnnnnnnnnnnnnnnnnnnnnnnnnnnnnnnnnnnnnnnnnnnnnnnnnnnnnnnnnnnnnnnnnnnnnnnnnnnnnnnnnnnnnnnnnnnnnnnnnnnnnnnnnnnnnnnnnnnnnnnnnnnnnnnnnnnnnnnnnnnnnnnnnnnnnnnnnnnnnnnnnnnnnnnnnnnnnnnnnnnnnnnnnnnnnnnnnnnnnnnnnnnnnnnnnnnnnnnnnnnnnnnnnnnnnnnnnnnnnnnnnnnnnnnnnnnnnnnnnnnnnnnnnnnnnnnnnnnnnnnnnnnnnnnnnnnnnnnnnnnnnnnnnnnnnnnnnnnnnnnnnnnnnnnnnnnnnnnnnnnnnnnnnnnnnnnnnnnnnnnnnnnnnnnnnnnnnnnnnnnnnnnnnnnnnnnnnnnnnnnnnnnnnnnnnnnnnnnnnnnnnnnnnnnnnnnnnnnnnnnnnnnnnnnnnnnnnnnnnnnnnnnnnnnnnnnnnnnnnnnnnnnnnnnnnnnnnnnnnnnnnnnnnnnnnnnnnnnnnnnnnnnnnnnnnnnnnnnnnnnnnnnnnnnnnnnnnnnnnnnnnnnnnnnnnnnnnnnnnnnnnnnnnnnnnnnnnnnnnnnnnnnnnnnnnnnnnnnnnnnnnnnnnnnnnnnnnnnnnnnnnnnnnnnnnnnnnnnnnnnnnnnnnnnnnnnnnnnnnnnnnnnnnnnnnnnnnnnnnnnnnnnnnnnnnnnnnnnnnnnnnnnnnnnnggcactaggacacacagaactgcccggctgcgatgatgggcactaggacacacagagctgctcggctgacgatgatgggcactaggacatcagagctgcttggctgatgatgatgggcactaggacacgcagagctgctcggctgatgtaatgggcactaggacactcagagctgctcggctgatgatcatgggcactaggacacacgaactgcccggctgatgatgaggggcactaggacactcagaagtgcccggctgatgatgggggcactaggacactcagagctgcccgggtgatgataatgggcactaggacacgcagactgctcggctgatgataatgggcactaggacactcagagctgctcagctgatgatgatggcactaggacacacagagctgctcggctgatgatgatgggcactaggacacacagaactctcggctgatgatgatgggcactaggacactcagagctgcccggctgatgatgatgggcctaggacactcagagctgctcggctgatgataatgggcactaggacacacagaactgccggctgatgatgaggggcactaggacactcagaactgcccggctgatgatgagaggcactggacactcagagctgctcggctgacgataatgggcactaggacacacagagctgctcggtgacgataatgggcactaggacacacagaactgcccggctgacgatgatgggcactaggcactcagagctgctcggctgacgatgatgggcactaggacactcagagctgctcggctgtgatcatgggcactaggacacacagagctgctcggctgatgatgatgggcactaggacatcagagctgcccggctgatgatgatgggcactaggacactcagagctgcccggctgatgtgatgggcactaggacactcagagctgctcggctgatgatgatgggcactaggacacacgaactgctcggctgatgatgaggggcactaggacactcagaactgcccggctgatgatgggggcactaggacacgcagagctgctcggctgacgataatgggcactaggacacgcagactgcccggctgacgatgatgggcactaggacacacagaactgcccggctgacgatgatggcactaggacactcagagctgctcggctgacgatgatgggcactaggacacacagaactcccggctgacgatgatgggcactaggacactcagagctgctcggctgatgatgatgggcctaggacactcagagctgctcggctgatgatgatgggcactaggacacacagagctgctggctgatgatgatgggcactaggacactcagagctgctcggctgatgatgatgggcactggacacgcagagctgctcggctgatgatgatgggcagtaggacactcagagctgcccggtgatgatgatgggcactaggacacacagaactgctcggctgacgatgatgggcactaggcacacagaactgcccggctgacgatgatgggcactaggacactcagagctgctcggctgcgatgatgggcactaggacacacagagctgctcggctgacgatgatgggcactaggacaacagagctgctcggctgacgatgatgggcactaggacactcagagctgctcggctgacgtgatgggcactaggacacacagaactgcccggctgacgatgatgggcactaggacactcgagctgctcggctgatgatgatgggcactaggacagacagaactgccaggctgacgatgtgggcactaggacactcagagctgctcggctgatgatgatgggcactaggacactcagactgctcggctgatgatcatgggcactaggacactcagagctgctcggtctacagtggcaaaaccaggccgggggcttgagagggcagcgggggttgcctgtggagcacggggactttcagggtgctgggactgttctcagtcttgactggcgcagcgttacaagattatatatgctttccaaatgtatcaaactgcacacttgaagtgtatgcatttattccatataaagtatacccaatagaggtgatttttaaaaagtagaagccatgataatgaagacagtgtggtattggccagggactgacaaacagaccacctggaaccagagagagggtgagaagcagacccctgataaggatactgaggggctcagggggcagttgcatgggtgaacaggggggccgggctcttctgcagggtgcagggtagctggccctcatctgagaacaaggagaggggacagcacttcacctatacacacaactcaaccccaggtggattaatgacctaaaggaaagattttaggttgactgtgaagcttccagaaaaattcagaatacatattttgacctgttagtgaggaaagactcttaactaagacattaaaaacagaatccataaaggaagagattggcaaactgaaccacaaaaatccagaacctctgttcttcaaaaacaatttgtaaaactcaaaagataatcacagacgaaaaagctatttgcaacacatttagctaacagagctttattcaaatcatataaagaatctgacatgtcagccagaaaaggcacagtggaaatggtcaccagacctgaacaggcacccgctggaggatgacccagcaacgacgtgaaaagatgctcaagctcgcaggtcaccggtgcagcccaggctgcaaagctaggtccagagccacccacataaggcaggaagcggggaggcctgccaggctgggggcctctctgagcctcactgtaaaatggggcctggcctggacctgctcgtctcagggctgctgcaaggcacgtgctacacagactgcatggggccctgaagttacaagcacagacacacacagcacagggaatgtgcaggtcagcgggagcctggggacccctcggccctcccaaaaagagtcacacgagcctcttccaacacactcagttctcccctggggttgccaccactgctcagtcaccggacatgagtgacaagctgtccctggggcaagctggccgggaccctcggcagctcacaggctccaccaggctcagtacacagctcattgaggcattgtaccctctgtggggcctgcagtctgggccatgcccaccaacacccacacaaacagtaaaacactcacacgtcccatcccagcctgatcccccagatgccacggagcagctaaaggaaacctcacttccccaacataagcctcggtctcttcgagaggttccagcccgctcctccagacgagggggaaaaaccgggtgcttctgcatccacatgcagacaccgtgtctgacgctatgccggcagcatcaatcctgacagccaaggagggaaatgccccaaacagcagtcagcggggcacagtgcctaacaagggccacgggacgtctgtacggggaaaaagggaaaatgggactgtacctcacactacagagaaacaataatcccaaataccatgcatcttaaaaggaaaagctgccaggcacggtggctcacacctataaccacagcactttgggaagctgaggcgggttgacacttgaggccatgagtttgagaccagcctgagcaacaaagtgagtcccccatctctataaaaatacaaaaaattagcggggagtggtggtaaacgcctgtagtctcagctacttgggggaagatgtgggagaatcgcttgagcccacgaggtgcaggctgcagtgagccgagatcgactgctgcactccagcctgggcgacagtgcaaggctctgtctaaaaaaaagtaataataaataaaaagtaaaaaattaaaaaaaacggtaaaatgtagatgaaaatcttgctcacccacaagccggcacagagctctgaggtgaggcctcccgggtgaggacagcactgtgtctcctcaacagcccccgactggaatggcagtgaaggaatgctgtccacagcatgaatccgcagggaaagatgggaggcggcacacagccacagaacgtgaggggctggaaatgagacgcacacgggacccgacacagccgacccaggaaggccgaggctgaatgcagcactggggacaggcgacagcctgccttaacaccccacaaaagctccgtggcgtggcctgagtgtctctaccagtgccgtggatgaaggctgaaaacagcaggtttgcttgaaaatgtgtttcagaggcaattcgtattatttcatgtatttattttgagacagggtctcactctgtcacccaggctggagtgagtggcacaatcactgctcactgcaacctccggctcccaggctcaagcgattctcccactcaccctctcaagtagctggaactacaggcatgcctccccaagcccggctactttttgtttttttgtgaaaccaggttttgctatgttgtccaggctggtcttgaactcctgggctcagtgatctcctgcctcagccccacaaagtgttgggattacacgcgtgagccaccacgcgagcacagtattcttcttaacagccaagattcagtaacgaacaacttgcccatcaatgaggatggataaacaaaatacagcacatcaccaatggaataattcagtcatgaaaaggagtgagcctgaggcatgctccaagttggatacactctggaaaccttacactaagtgacagtctaggccccaattctatgaaatgctcaggacaggcaatctacagagaaggaagattagtggtgccaggggttgggggagatggaagttggggctgacagctaaagggtaccaggtgtcttttggggtataaaaaatgttctggccaggggttgtggcttatgcctgtaattccagcacttgggaggccaaggcaggaggattgcttaagcccaggagttcgagaccagcctgggcaacaggcaaaagcttgtctctacaaaaactacaaataaagtagccgtgctcattaggtggctctgcctgtaatcccagcatcttgggaggcccaggtgggtatactgcttgagttcaggagtcaagacctgcctgggcaatgtggcaagaccccatctctactaaaaatacaaaaaacaaacaaaacaaaacaacaacaacaacaacaaaaaccgggcatgctggtgcatacctgtggcccagctacttgggagggcgaggtgggaggatcgctcaagcctgggagccagaagttgcaggagccaagatcttgctactgtattccagcctaggtgatggaatgagaccctctcttaaaaaaaaccccaaatcaaaaacaaacaaaaaaatgagccaggtgtggtggtgcgcatttgcgtcccagctactgaggaggctgaggtgggaggatcacctgagtccaggggggttgaggcgcagtgagttatgattgtgccacagaagataaatgttctgaaattaactgtagtgatggtacacagtgctgtgaacatactaaaaaccacagaattgcacactgtgagcaatctgaatgtatgtgaagatctttttttttcttttctgataacagagtctcgctcgnnnnnnnnnnnnnnnnnnnnnnnnnnnnnnnnnnnnnnnnnnnnnnnnnnnnnnnnnnnnnnnnnnnnnnnnnnnnnnnnnnnnnnnnnnnnnnnnnnnnnnnnnnnnnnnnnnnnnnnnnnnnnnnnnnnnnnnnnnnnnnnnnnnnnnnnnnnnnnnnnnnnnnnnnnnnnnnnnnnnnnnnnnnnnnnnnnnnnccttggcctcctacagagctgggattacaggcgtgagccaccgcactcagcctgcattatatctttaaagagctgttaaaaatacatgagacagccgggtgcagtggctacatctgtaatcctggcacattgggaggctgagctgggcggatcacctaaggtcaggagtcaagaccagcctgaccaccatggagaaaccccatctttaataaaaatattaaattagccagcatgatggcacgtgcctgtaatcccagctactcgggaggctgaggcaggagaatcgttgaacccaggaggcagaggttgcgatgagctgagatggcgccactgcactccagcctggcaacaagagcgaaactctgtctcaaaaaaaaaaaagaagaagaaatacatgagacatgtgagtgacaggtatatggcaaacaaacatggacacaaacaaggcagcagcagtcactcccagcttccaccaccagctccccgtaccgaggcaactgtgcctccctctaccagcagaggtgacatgagaatctgggcctcagctgtgcccagacactgggagcaagaaccaggcagagctgctgtaagaccagccccggaacgaccctgggcactgaggttctgaagggcttccctattgggacatttcactcctgtcgctacaatgcgatgctgggcaatggagcgcgtcccgtggctgcacgtggaaaggatgctggaagctcacacctgtttcctccagactctgccccgtgcctgccctgtgctgaccgtgctccatgtccttccgctgtaataagtcagctcctgccactcctatgaggcctcccagtgaacctggctgggggtggtccaagggaccccagacatctaaggtggcctataagatccaatccagaaccaaaacaaacaaacaaacaaacataaaattaaagcaacttggggcggggcatagtggctcacgcctgtaatcccagcattctgggaggctaggagggtggatcacctgacatcaggagtttgagaacagcctggccaacatggtgaaacccatctctactaaaaatataaaatttaggtaggcatggtggcataagcctgtaatcccactacttaggaggctgaggaaggagaaccacttgaacctgggaggcagaggttgcagtgaccgagatcatgccactgcatgccagcctgggcgacaagagtgagactctgtctccaaaaaaaaaaaaaaggccgggcgcggtggctcatgcctgtaatcccaacactttggggaggctaggtgggcagatcactgaggtacaggagttggagaccagcctggccaacatggtgaaacctgtactctactaaaaatacaaaaattagccagnnnnnnnnnnnnnnnnnnnnnnnnnnnnnnnnnnnnnnnnnnnnnnnnnnnnnnnnnnnnnnnnnnnnnnnnnnnnnnnnnnnnnnnnnnnnnnnnnnnnnnnnnnnnnnnnnnnnnnnnnnnnnnnnnnnnnnnnnnnnnnnnnnnnnnnnnnnnnnnnnnnnnnnnnnnnnnnnnnnnnnnnnnnnnnnnnnnnnnnnnnnnnnnnnnnnnnnnnnnnnnnnnggggtagtggggagggagtctcagggatggcagctctctccttggtcttaacagagcagatcaagcagctctgagagttccgcaggtggaattcagtatcacatctgagtacccaagctgagttttagataccggcagaacgcatggtgctgactagggataagcatgtaaacattaagcaaaccaaaaaaaaataacatttttaactcaaaaaggtacacggaaaaggaacagccatcgtggagcccgtgatctggctgtgagcgtggggaccggctgtaacagtggcaacccagtaaaatcaggacacacactctccgggaaggcgggagaggacatgcatgggaaccgagttggggtcttgggtacgggagcagaatcttcttcatcccggtgagcagacgctcggtcagtaaggcgtagtcagcaatgttaagaggaagcaatcaaacacctcatggctaaatatggagctaaaaactaaatgaatcagttcaaagagttgagacgtttacctctaacgaacaagaaataagggtcagttgagtgggaacactacgtagcagaatcacaaactgacagatgaagaagaaaaaagggccaaagagaatttcaatcacgattaggagtctcatttaaagacaaatagccacgggttgcttaaggacagatacattctgagaaattgccattcagtgatgtcatcattgtgcaaacatcacagcgtgcacctacacaaacctagtggaatggcctcctccacacttcggctctctgggacagcccatgactccttagctagaaaacctgcacagcatatagttacgtgtatatgtatacgtacggtagacagactgtcctattactataggcaactgtaatacaatgcaaagtctttgtgcatctaaacataggaaagctgagtaaaaattcagtataaaagatttttaggccaggcgtgatggctcatgcctgtaatccagcactttgagaggctgaggtgggcggatcatgaagtcaggagtttgagaccagcctgacaacatggtgaaaccccgtctccactaaaaatacaaaaattagcctggcgtggtggcgcggcctataatcccagctactcaggagtctgaggcaggagaattgcttgaaccccagaggggaggttgcagtgagctgagattgtgccactgcactccagcctgggtgacacagcaagatctgtctcaaaaaaaaaaaaaaaaaagaaagaaagaaaaaaaaatctaaattgttgcctcaaaacatttgcggaaaaaacaaaaaagataaaaaggtccacctgtcgcccaggcgcagggctcacgcctgtaatcccagcacttcgggaggcagaggtgcgcagatcacgaggtcagagatggagaccatcctggctaacacggtgaaaccccaactctactaaaaatataagaaatagcctggcgtggtggcgcgcacctgtagtcccagctactcaggaggctgaggcaggagatggagtgaacccaggagacagagcttgcagtgagccgagactgcaccactgcactccacctgggccacaaagcgagactccgtctcaaaaacaacaacaacaacaaaaagtccaccttctggggcaggcaccatgagtggagctggcgggactggcagttgctctgggtgagtcaggagtgagtgatgggtgaatgtgaaggtctaggacatgactgtacactaccatagacttttaaatacagtacagttaggctgcattaaatttataaacatatttttatttttaaaaagtattgtgctacattagatggcttctttcactcatgaagtgagaaatttttcagctccattcaatcttatggcctgaccatcataagtggggtctgtcagtccgtcactgaaggaaacttttttttccccaagatggaatttcgctcttgtcgcccaggctggagtgcagtggcgcgattcggctcactgcaacctccgctgcctaccagtttcaagcgattctcctgcttcaggctccaagtagctgggattacaagcgcccgccatcacgcctggctaatttttgtatttttagtaagacagggtttcaccatgttggccagactgatctcgaactcctgacctcaggtaatcccctgcctcagcctcccaaagtgctgggattagaggtgtgagccactgcgcccagctggaaacttctttatgcagcacataaagctacagaactctgaacctaacaaggaagacacattcccccaatacatattggaaagatgataaacactgactttgtatttggctacaaacaaagcccaggaaattcccccaacactgtaataacagggacagctcctttcacccccgcacaagctagtaggactggccctccaagacccagctcttcttgcctcctgctctccttctagcctaaggtccctgccttctgtgtgtgcttcctggcttcctcaatcctgctgatgtcaacccatggggaggcccagcccctcaggttgtgcttccagcttctgtccattaagtcgctcggtaaggtccccaaagcccccagggtgcaggggctgcatggcacagagccttcccctaagcgcatgcccaggcttcgcaactccatcgtctctgtctcctccctctatttgcagaaaaagagcactttttgttaaattaataaaacccaaatctagttatttagcaaaaataaacatgcaacaaaaaaaaaaacaaaaaaccctggtaaaatagataacctctgacaagtatgatcaagaaaagagaaaacacacacaaaacatcagtaaaagagaagtgacatagaacagcacatcaaagaaaacagtatctattacttcttccaaaaattctgaaaatctcatgaaacggacactttgcaggagaacatgaatttgcagatggagccaagtaagaacgtggagagacaagcagtccggaacaaagtaaaagcacagcttaggtctggttaccagataccttcccagagaggccgccaactcccacggggccaccctttgccagagaacatttgcaaaagctaagaagctcccactagcctgtgaataactccaataccaaaatggacaatgatgtctaaaaacaacatatcagacaactcagggttatcccccaaaaacaaccatgatccaacactgatgagctattaataaatttattacagcagtccccaaactttttggccccaggaactggtttcatggaagacaattttccacagctgtgggggtgggggtggttttgggatgaaactgttccatcttagatcataggcattagattctcattagaagcaaaacctagatccctcatatgcacaattcacagcgggttcgtgctcctatgagaatctaatgctgccacctgatggacaggaggtggagctcagaggtcatgcccactcacctgctggccactcacctcctgcagtgaggactgcattaacacttcaagaggaagacaagggggaaaaacagattcatccccaacaggttataaaagcattgatgaaattcaaaattcatttctgaatacaattcttggcatactagaaactgaatcttctaacctgaaaaagactgcctttaccaagatacgcacctgcactggaaaaaaaaaaaagtgaaaaattttacaactaaaaaaaaggctatccggctgggcgcagtggctcatgcccaatccaacactttaggaagctgagccgggtgggtcacttgagatcaggaattcaagaccagctggccaacatggtgaaaccccatctgtactaaaaatacaaaaattagctgggtgtggtgtgcatgcctgtaaccccagctacttgggaggctgaggcatgagaatcgcttgaactcagaggcggaggttgcagtgagctgagatcgtgccactgcattccagcctgggcaacagattagactctgtctcaaaaaaaaaaaaaagctaccttcttatctaccagtaagtaatctacatgagcatcttacaggtggtgacacacagaactatttccactagagtcagggacaagcatcaacaaacattcacgcctgttgttctatccatgctgtgcctaagatcctggctgtctgaagttacaccagtggcccagttcaacacagagaaatcagaagtgtccacacaattatcaaaatcaatctgaagattaaatgggaaaaaatctatttacaagcaacaaaaatgataaaaccttgagtttaccctaacatgaaatgtacaagacctgtataattaaaactataaagaaataagcttttctatatactaaaatacacaaaacatgacctaaagtcaccgtaatacactgtacgctgcatattgctacccatgaaaatatgtcaattctacccaaattcattcatgtattaatgcagtcttgatgtacattttataagccttgagatgtttattcaaaagttcatctagagaggaaatgcttaagaatgagtaagaaaatttggagaaaaaatgtgggaaacgttccctagacattaacatgtaatatacagctgtgagagctaaaaatgtgttactggtaaggaagggacaagcagacgaagaaagacaaacgaggctgggcacagtggctcatgcctgtaatccagcacttgggaggctgaggcaggcggatcacttgaggtcaggagtttgtgaccagcctgtcaacatggctactaaaaatacaaaaattagctgggcatggtggcacatgcctgtaatccagctactcgggaggctgaggcaggagaatcacctgaacccgagaggtggaggctacaggagctgagattgtgccactgcactccagcctgggcaacagagcaagactccttctcaaaaaaggaaaaaagaaaaaaagaaacagacccctatatttatgtggatgtggtttaatgtagtatgacattccaaatctgtggagtcaggatggaattcgatgaatggtgttgggactacgggtcactcatctggaagagttagaattatacgctgcgtcactcaaaaaacaaatgtgaagagattaaaggtctaggtggtaatgtaaaaaggaaagctgtaagaatacaagaaatgaagaacaggctgggcgcggtggctcacgcctgtaatcctagcactttgggaggccgaggcggtggatcacaaggtcaggagatcgagaccatcctggctaacacagcgaaaccccgtcttactaaaaacacaaaaaaatgatctgggtgtggtggcgggcacctgtagtcccagctaccgggaggctgaggcaggagaatggcgtgaacccaggaggcagaacatgcagtgagccgaattgctccactgcactccagcctgggtgacagagtgagactccgtctcaaaaaaaaaaaaaaaagaaagaaaatgagagaatatttttatcattttggagtggacaacaacttccttacaagaacccaaatccagacattgtaaaggaaacagcccagaggcaacaacaggaaagctagcacctgtggggcacagcccatcatggaccaggccacagactagggaagtatgtgtcaaaataaagcagacaacagattaacccatggcatacagaaagctcctacaaatctttaaaaaaaaaaaggacaatctggccgggcacggttgttcatacctgtaatcccagcactttggaggctgaggcgggtggatcacctgaagtcaggaattcaagaccagcctgaccaacatgggaaaccctgtctctactaataatacaaaattagccaggcgtggtggcgcatgcctgtaacccagctacccaggaggccgaggcaggagaatcgcttgaacctgagaggcggtggttgcataagccgagatcccacctttgcattccagcctgggcaacagagcgaaactccgcctcaaaaagaacaatccacagaaaaacaggcaaagactttaaatatcaagtgcacagaataagagcgtaaacagccagtgagcatggggaatgagccctcctgcttctaagttagattcaaacatgagtgagatttcatcttttatttctcagatttgaaaggaccgaaattctgaaaataaccatgttgttaaggagtagggaaccagctgccctcatgcaagagatagtgggaggatatcatgaagaaatacaatctaacagtgtgtatcaaatttaaaatgtacctgtcctttgatcagcaatttaactgggaaaaatttatcaatagatatggatatatctgtaaacgtggacacccaaatgcaaaaggatgtttgtgacaaacaacaaacctcaaaaaaaccacaccactgacagccgaggagggggcaatgaatttagggaacatccaccctggatggtccgagaagggaaagaaggagacagtgaagacaggcctgtgagacacagtggcaagacacgcactacctcaggaagaggaagaggctgactccacagaccgctgcaaacagaagacaggagcgtgctggggcagggctgggctcacctgctctacgtggggctccttggcgaaggagatcctggcgatgagtgggatgcgatgcacagctcctgcccgttcacctcgccctcctccacttccaccacgctgcaagggaagggcagtcagctcacccagcagctgctcggcttgcagagaggcagcctgactctccttgcctgcaagccgggactccacaggaggccccaactctgcagctgtggaacaacgatatttctcctcctccccacttcaccctgtggatacggagggaaagccacaacttcctcacagaacaggcaggtgctctatggaaggccaccctctccagactgggccccagcctcccacctccacccaccaatcagcctggcagaaccacccctagcacatacagtggcagagtcgcaggtgggaatggacgtccaggaagaaacactgatctagagtcacgcaggctggttttttttttttcttttttttttgagacagaatctcgctctgttgcccaggctggagtgagtggcgcattcttggctcaccgcaacctctgcctcccaggttcaagtgattctcctgctcagcctcccaagtggcttgggattacaggcatgcaccaccacacccagctaatttttgatttttagtagagacgggatttcagtatgttggccaggctggtcttgaactcctgacctaagtgatctgcccacctaggcctcccaaagtgctgggattacaggcgtgagccactgtgccaacctgttttccagcaattcctaatgaatgcacacagctgatggccatttctgcagagtggcactgggtaaacgggccctcatggtcagggggctgcacgcacacaacctgtgtgcggaggcccctacagctacacagtcggccccgcaggctcccaggaccactctcaacactcgggccatccccacggtccccaccagcacatgcctcagcagggtcgcacatgggcatcccgcacccctgcttcgaatgcaggcagcagcctcccatggccagccctcccgccccgcaagtgggcctcacctgtgttctgggcgctgacaaaggccaccttgttggtgtcgggcttgagcgaatgaagccacactctctgtgcatcggcttgcgcgtgtccgggtggaaggagttgaactggacgggaagttggagttgagaagcccaggcactggcctccaagatggcgtgggctggtggatgccagaactgtccagggtgccctccaggtggctgctccagccacacccgcacactgtctgcccctaccaccaccttgctcattttggctgtgtctgtcttacctgctgacccccactcctgaagacgggctgttccagccacgcccacacacctgcccgccccctccaccacttgctcattttggctgtgtctgtcttgcctgctgaccctcagctcctgaagacagcacgttcttaatcacctcagggcatatccttgccctgggcccgttagcccaggcctcacacatgtcagccctcagcactcccttgcagtaaacctcaccctaacacaatctttctcttttggctatgctcttgtgtaagaatctaatcaattcctacggtaaaaaacagaacaggtgctggttatggtatggtttcttatcacccttcatcattagtgcaaattctcaacagtaaaagaaggcacctgcatcttgaactgagggcacaaaaccacggcttaaaaactaactcgctggctggtgactcaaggccgtaatcccagcacttcaggggcccagtcgggtagatctcttgagctaggaatttgagacagggctgggcaacacagaccctgtttctacaaaaataaaaacaaaaaaccaaaccaaaaaaaaaaaagcctcatttatcatttcaccaaccttatgagtttcttagggaatccatctctatgattcttagagataaactttatttatttatttttttgctcttcacccaggctcgtcgcggtctcagctcagtgaaacctccgcttcctgggttgaaatgatctcctgtctcagcctcctgagtagctgggattacaggcgcccaccacacccggctaattatttatttatttatttatttattttttgagacagagtttctctcttgttgcccaggctgagtgcaatggcgctatcttggctcactgcaacctccgcctcctgagttcaagcgattccctgcctcagccttaccgagtagctgggattacaggcatgcgccaccatgcccggctaatttgtaattttagtagagaccaggtttctccatgttggtcaggctgatcttgaactcccacctcaggtgatctgcccacctcagcctctcaaagtgctgggattacaggtgtgagccatgtgcccagccacacacccggctaatttttgtatttttgtatttttttttagtagagaccaatttcaccacattggccaggctggtctcgaactcttgacttctagtgatccacctgcttgacctcccaaagtgctgggattacaggcgtcagccaccgcacctggccaagataaactatttatttattaaaacaaatttttttagggtctcactgtgttgcccaggctggtcttgactcctggactcaagtgatccacccgccttggcctcccaaagtgctgggattacaggcagagccaccgcgctgggccaagataaatttctgttgggctagtgatggtgctacaccttcagaatggtacatgctcactaacataaccccgacaaagaaatacatttataccatattctggacacacacacaaacacacataccatcacatttactgaaatatattttccactctggtcatttttcttcgaatgctagtcacaaaattgactttctgaccttttcgtgggttataattatagtttaaaaaagactgcttgggttctgggttattttgtattacccagaattctcacttttggtttatgtgcagatgtattactttgacctcatgcattcaatcaataataatataaaaggtaggagatatttttaaaaacaatgagatcttctaaaaggggatggagggtctcaagctgggggtctgagagccaggtgcccagccccgttctgaaactgctaggcattatacaatagtaccaagttggtttaataagattcttaacatatagttgtgtaatggagactaaggagggtttgctttttatattttgtttaaactttaaaaaaactgtgtattacttctataataaaaaataaagatacttcaaccactccccatccctggtggctctcctctacttcagaggctacactgctatctccctaaaagcaggcaatttctccacctgtggggtgcaggtggtggaagggatactgagggacctcaaggggcttttgctttcttgtacggtaagaatatgagaacacatactaacagcttccttgtgaccccaaatagctcaggggtacgtgtaaaatacaaaatgcactattattttcagtaatattgggtgactaatttttttctttttttttttgagacggttctcactctgtcacccaggctggagtacagtgttatgatcacagctcactgtagcctggccctccctgggttcaagcaatcctcccacctcagtttctcgagtagctgggactacggcatgtgtcaccacacctggctaaatacttttcagtagagacaaggtctcactatgttcccaggctggtcttcaattcctaagctcaagcaatcctcctgactcagcctctaaagtgtgggattacaggtatgagctaccgcactggccagggtgattaattttgatacataaattagtacatgcatttgtttttatgtttggattaacaagcctgtaatttggtggtcagcttatatctccaaaaatataacagaaccagaaagtatcatttttaccactctgtgtctcagttcacattcaggcaagaggacacctttctgaaatagatggacaagttccttttacaccttctgcttggcctttgtctttgatcagtctggaattattttcagagacctaggcggcccatggtcaagcagggtggggtggagggagacaacttacgagaagttcagcatgggctggcccagtgggagatgtgaacctcctccaggtactggaagggctgcagtgtggggtaggtcccggtccaggtgggtccgacagccaggtgcccagcatccaggacagtggctccaccactgggtcatcttggggggctctgaggacaaaagaatgagactatcagtggcctccctccaaccatccttgctgagctttaagcagaatgcacgttccatatcgacgcttgcttctggtggccacgctaatcctgggggacctgtcaagagcgggagaaaatggtcaagcaactgtaaatgtcaagtgaaagatccagcttcagaagcctctgcagttcctgcagagaaaagagatccaacagggccaggcagggcgcaagcaaagaggcctacactgctatctccctaaaagcaggcaattctccacctgtggggtgcaggtggtgggaagggatactgagggacctcaaggggcttttgtttcttgtacagttaagaatatgagaaccacatactaacagcttccttgtgaccccaaaagctcaggggtcctacatgtcctacagcaaggctgaaagcagctcacacgggaggcacgtgccctggtgtgaagagtgtgtgaaggagacaaagagcatcagggagaaaatgaaagggatgcagggtctcggagcagccagagtgtgagggcccaggggcaggcggggtttaaaaggaagtaagaccccgcttccctgaggaggggctggggcttcacagcagcctgtgtagtggcaggagacccctttagaaggtctcctgtggggttcagtctctcatcccactaagtgtgaagatgacaccacaggcctggaactcagaggtgggggtgcagtgacaggacagcagggagggccgctgggttggctgttctgctgggcgaactcaaagggacccctgcttcctgcctcgccagcaaggactgggtgctcccgagcggcttttcaggattcactcacatgaccctcacccggctggatgcacgggccctgctcttactcattttctaagggagacctgtgcggggaccaaggaaagccccactgcatgctacccatcaggggcgctggaagagaaggactgatccccaaggcaatcccaaagacctgcttcccaggcctgcttaaccctcaagtctcagtgcttcaatgacagaacggacactgacacccaggagcagcagcagggacagaagcagctctgtggcccacaagcctcatctacggagcccaaagatgcccaagcacagagaccggcctgcacatcagactgacccccggcgtctcctccaggcccacgcaagcagaagacggactgacggggacggatcaggactgacccccagtgtctcctccaggcccgcgcaagcagaagacggactgacgggacaggatcggactgatgcccagtgtctcctccaggcccgcgcaagcagaagacggacgatggggacaggattggactgacccccagtgtctcctccaggcccgcacaagcagaagaggctgacggggacaggatcaggactgacccccggcgtctcctccaggcccgcaaaagcacagacagactgatggggacgggatcaggactgacccccagtgtctcctccaggcccgcgaagcagaagacggactgacggggacaggagttcttggaaccatcgcagcttctgaaattcacaacctttggattataaattccaggaagtctgggaaaagaagatcgggggaaaggaagcaaaggctctgggggtggaggagaccacgtccaagaacagcttggaaccaaggagggcgcacatgtggcctggcccagtggccgagccctggggcccagagtgagaaccgagggtgggagcaggtaatgagcactctgcctgctggctgcacagggcaaacataggtgacctgaagaggagagtgggagagtccgctccttttccagactggcctgtggtctttcagtatttcctttttgtttttcttaaatgatgatttaaaaattttttatatcagtatttcctcctcagaccccggtgaaaagtgggaaggtgaggatgggaatatttggacttcaataaaactttcctattagacaataagagaatttttaaatcaagattttcgttgcaatctttcacggagataagaatagaagcttctgaatccaatgtgtggcctctggaacgaggcttgtgatctatcatagtgatcaattctttcatcattcaacgtgctggacactcttccagggagaagctgacggaaagtcatacatccctacggagcatacatcctagcgagggcagacaatacacaagaaatgatgaatgatgcagaactgaatgtacattaggagatgaggcagaaagggagacagggctgtggggcactgtgaaaacctacccaaaagggacaaggacaccctccctgagaagtgtgcacgaccaggcaggggatcagggtccctgcagctaccctggagaagagcagaccaggtggaatgccagagacggaggtcctgggtacgtaggcctggtcttgctggagaggaacaggaggcagtgtggccaggggaaggagatcctcacccctcggaagggccgtgaccttgactctgagagacagaagccctcgagaaggctgagtgggagggacgaggtctctgactgcaaccacagaagccagggagggcaatggcaaaaacccttgtggcagaggagggtggcctgggccaggtgccgtggtggaggcagtggaaaggacctagcttctggatctatcttgaaggcagagccaccggatgtgctgatggtttggatgtgaaacacgtaagaaaagatggtaacggaggtttcggcctgagcaattgagaagacaagttaccattaatggagaaaaggaagaatgagaagaacttgggaggtgtgaaacagcaaaactcagtcacctgggatagcccaagtcctaagatggctaaacaaacaccataatttctcagacagccagctatagccttggagacctttcagtttgtagactttatccagctcagcactgaaaagaaagaggctttgggccgggcgcaatggctactgaacctgtaatcccagcactttgggatgccgagacgggcagatcacctcaggtcagagtttgagaccagcgtggccaacgtggtgaaacgctgtctctattaaaaatacaaaaatagccgggcgtggtggcacacgcctgtaatcccagttactcgggaggctgaggtacaagattgcttgaacccgggaggcggaggttgcagtgagccgaggtcgtgtcactgctctccagctgggcgacagagacgttttctcaaaaaaaaaaaaagaaagaaagaggctttgcaaacccaggtttttgggccggctctctggcctgtgcggagcacaccccacagcgactgccacgggctctggctctcctgggaccgggtggacccacttccactggtgagcgcagcctgcatggagctgaaccctgtgggaagcggcaccccgggcgctggggagcagcgatccagagtccagttctgagctgctgcaccggggccgcgatctccacccctcacgcccgagtccccggcacgccaccaccggcccctgggtcccgagggccccgaggaagaggccaaggggcctggcggcgcccccagggtcccagtggaacaggggcaccagggccgcggcgccgggcatggccttcacctccccacgaggcaggacagccccgggctagggtgaggggcacgcgccgcaagtcctgctctgctcccgggcggccccctccagcctccgccggccccgccccggaagcgcagccccgctcaggcgccgcatctccgccctctcttgcgcctgcgggaccgggagggccgcgctcgcccccagcgccagggtcacgccaccgcgccctgtttggggagcggcagaggagtcagggcgaggctgggcggcgctgggcggtggggcgcgctcactggctgccacctcacctagcagggtcacagggctcactcaagagctccagcaagagcagaggcgggagcctcgccagcccctcacagaccacagcgaccgcgcccctcggcccggaggccccgccctccccactcctgcttcccagccacggggtcttctcccggcccctcatctacttggcagacgcctctcaccggcacctctgcctccccctggtctttccctcccaccacccaccgtggagtcctctccgggaggcctgtcctccatccagcgctcctcagaggggaccggagaggaggcgctccttaaatgggaagaaagacggacagagccagggacagcgagagacgggacggggacagagacacagagaagagagacagggccagagagacacggggatggggccagagacggggccagagacagagaacagaaagggatcttactctttcttcccttaaaaccagcttctgggggtctccgaggggactctcaggtaagtaacaatattatcaccttccctcccaagaattaaaaaaaacaaaaaaacgaaaaaaccttttccctgaacttgattttgagggaaaataggtcacagatacaaccacagccaccaaaacacacatacggatgctgtgagaagtggtgggtcagtgcctcgctggggacaggaggggcctctgggagctgggggggtggcccctgagaagcctcagggtctggctggctcagaggcctggggcggagtggggagccctggacttgggaagcctggaggctctttggcccccgctctgccacagggagctcctgcaaacagcaggcccagggcaccccacgcgctgcccaggacaccccaggtgttcgcccaggtgctgaaggcccaggctggcctccatgcgggttacccaccacccgccatagagaagtaatgcgccactccgaaagaaaggggtgctgcggctggacgcagtggctcacgcctataatcccagcactttgggaggccaaggcgggtgatcatctgaggtcaggagttcgagaccagcctggccaacatggtgaaatcccatctctataaaaatataaaaaactagccgggcgtggtggcgggtgcctgtagtaccagctactaggaggctgaggcaggagaatggcatgaaccccggaggcacaggttgcagtgagccgnnnnnnnnnnnnnnnnnnnnnnnnnnnnnnnnnnnnnnnnnnnnnnnnnnnnnnnnnnnnnnnnnnnnnnnnnnnnnnnnnnnnnnnnnnnnnnnnnnnnnnnnnnnnnnnnnnnnnnnnnnnnnnnnnnnnnnnnnnnnnnnnnnnnnnnnnnnnnnnnnnnnnnnnnnnnnnnnnnnnnnnnnnnnnnnnnnnnnnnnnnnnnnnnnnnnnnnnnnnnnnnnnnnnnnnacaaactgcaaatgttgatggggcaaaggtgaaactaagagaaagggtcttgctcagtcacccaggctgagtgcagtggcatgaatacggttcactgcggcctagaccactggggctcaagtgattctccgcctcagcctcccgagtagttgaatgaagctgctccatgaagaaagaccactaactaacatgtaagaactcaggagagaaacggcaaggaaagaggagaaggtgaaacatgacctgcagaagtcgagaaagtaaaagaaaaaaaatcaagccaccacccaaatgaagtggagattgaagcagcacagggagaaacaaacaccgggaaacacagcggaacacagaggacagaaatagttaaaaaaaaagacaaaagatagagaaatggaaacaaagttagaaggacgggaacgctggcacactgctgatggggacgtgaactggcacagcctagtgaagaccatctggcatgtcctgagaggttaagtgtggagcagtggcccaggactgccactcctggagacatgcataccagcagaaatgacacacctgtccccacaggacgctgcccatgaatgtttacagcagcacattcccaacagccccaaagtggaaacaacacagatgtccgtcaaccaatgagtaaacaactgcagtatatccagacaatggaatgttatttggccataaaaatgaagcactaatataactgcaattcaaatggcccttgacaacacaccatatgaaagcaatcaggctcaaaagagccatattctgcaattccatttctgtgaaaggtgcagaacacacacatctacagagacagacgtgggtcagtgtttctccacagctgcgttctgtggcagaagacgctagagtcacacgtgaaggcgcatgaggagggaaggtgagtggcaaggatgctacggctggccacagcgatcctccagattgcaggcgcgtgagctggctcactgacacgtgcagtgagtgcgagctacaaatagattccgaaaactcagtccaaaaagtcttcaaataattcaataatcttatagtatggtggttgcctgttgaaataatttttagataatatcgggttaaataaaatatattattaaatcgatttcacttgtttctttttacctttttaatgtagctattagaaaatattaaactactaagagactcactctctagaccttttcgacagtgcaggaatggagttttcaacccttggacccaaggagctttgtttctatgtcttctccctgaggacattaccagcagctggatgtctcaggagacaatagggaaatgatgcggaaagaaacctccgtaaacactgaatgtactaaccaaaaaaaaaaaaaaagcggttatagaaacaacaaaaaaaaactggttataggtggtaatgcctggtcgtacaggcatgacactcaactcataggacccttgaaggggcagaactcccactggtcttgtccctgagagctgacaccacagaggcttacaaatgaagtagcagtggagatttcattttaaaaactgggccggttgcagtggctcatatctgtaatcccagccctttggaggccgaggagggtggattgcctgagctcaggagtttgagaccagcccaggcaacatgcaaaacactgtctctaccagaactacaaaaaattggctgggcgtggtggcacgtgccttcgtcccagctactcaggaggctgaggtgggaggatcgcttgggcctgggaggcagagacgcaatgagccgagagcacatcactacactccaacctgggtgacagagcgagaccctgttcagaaacaaaacaaaaacaaaacaaaaaaaagtaaaacacaacaagcataatataaaaaagatgacagaaccaagactaaaaatgcttgaacttacatatgaaaaagcttttcaaggcgggcatgatggctcatacctataatcccataactttgagagaccgaggtgggtggattcttgagtccagaaattcgagaccagcctgggcaacatagtgaaaccccatctctaccagaatacaaaaaaattagccaggcatggtggtgcgtgtctgtagcccccgctacttgggaggtaggtggggagaatcacttgcgcccaggaggttgaggctgcagtgagccaagatcgcgcactgcactccagtctgggcaactggagagacaccctgccttgagaaaaaaaaaaaaaaggcttttcagattggaccacaaagcaagaccctcacctcttttgctgtaaatgagagatcacctaaaataaagcaattcagagagagagtccagaaagctgggcaataagcaataaggagcaggcttcccaatcttagcatcacgtaaaatgcatggaactagacaaagaatggctccccgaatgaagggcagaatgcacaatgaagacgtaaccgtgagggatactcatgcaccagcacagcaacatctataaagcagaaattactgatgacacacgaagatgtcgagagaaagaactaaatgaaattgcaattcacctctaagtctgaatgaatacaaataaaacaaaattccaaataatataattaataaggtagttctgactgatacatattgaactctgtagcttaaactagggaataccgccgggcgcagtggctcacgactgtaatcccagcactttgggaggctaagtgggtggatcacctgaggtcaggagttcgagaccagcctgaccaacatgatgaaacccgtctctactaaaaacacacaaaaaattagccgggtgtggtggtgcatgcctgtaatccagctactcgggaggctgaggcaggagaatcgcttgaaactgggaggcagaggttgcgggagccgagattgcaccattgcactccagcctgggtgacaagagcgaaactccatctcaaacaaaaacaaaaacaaaaacaaaaacaaaactaaggaatgccttcttcaagttcctctgaacagtcatgcaaactggccttctaaatggtcaaagaaagcctgtaagttccagaaagcgaaagaagtctactgtctgatcacaatgcagtgagactagaaatgaaaatcaatcaggttcccttgaaaacactgcgcgaaaagaaagaagccagacaaaaacgtatatattctatgatccaattagatgaaattcgagaccaggcagaaaggatggagggtggggaatctgaacgggacggggaggggcttggaggggagtgcaaaggagaacctggaccgctggacgtgggtgtgctgcacaagcgcctgcacctgccaaaactcaccacgggaacacctaggagcttgtgttcacttatgcgaattacacctcaataaaaatgttataaagaaaaacctccccaaacaaataatatttcaaaaagcagaaaacttaaaaaaactaaaagcattttatcccaagagtgtttctatgttactgcagcacagggttctgggtggcctcagagcaggggatgtggtggggagtaggttggcctcacagctcagggccttggctcctggccccagggtctgctgccatccaagtgcagcacctactgcagatctaatatttcgagaaaagccagaagctgattttaggctaaatatcccaatttctaaacatctgttcaaattaaaacaaatgacaccactgtggtgtgagcgcataccttggggcaggtgcagagggccagagagggctggagccacacacagcgccctcccggtgcctctcacctcccacctctcctcttcactcctctcttctcccaggtgggagtaggacgccactggcagccacccagcacatccccgtgccccaagcccacggttcccgacaatcaggagagctcttcgccgccctcagccgtgtttctgagtaggtttcgcgttcctcagatgctggggagctggttctagacacaggcccagcccggctggcctggaagcaaggaggggcccatggggacacactctgccccagtcctgcagctggagcagcccagagcccctgccaaagacgcctgggagaactcagtcagggggctggcaaggacaggtgagcacagctggctctcagaagaactgggcttatctgaagtctggtcaagttgaactggaccatctattcccccagtgggcctggatgggccagaaccttttacgtaggagggacgtggcccgggctttctgctcgacgactagcccaagggagatggaaatgagagtgagataagagggatgggtgggctgagatggccagcagctggcattgctggcagcttggaaggcgacccgtgacatcagtgagagggcgggtgcaggcgcacgagagctgagggcgagccctggcatcaggaccagagaggccaccacagagcgggtaagcagtggcacctgagcagggggatggtgtcctggtaagaacagtagggagaggctgcctcaaaaattctggctaaaagtgagcttttgagtggactttgctagtgcatgccaggtcagggaagcaagtcccgcgggccctggagagaagctaccctgcaggggctgctgcttcaggggcacagggcccacaccacacttggggacaggacaggacgcagccttatgtggcaatttctttttaaaaaactagagaattctaagatagctctgaaattcagagaaacgcttttgagcagaaaaaataacatcagactggaaaggaaggagcacgcggctagcaactagatggaggcttacggctgtgagcaactaatggctgtgagaaatacttcccttctgtcgccctcctggcttgctgttatttgctctgaatcttaatggagtttaatttggacgggacaacaggtcaggcagtaaacaagcagcggcggcgcctccttctgtctacactgcactcaccaggttaacctgctcctggggccgctccccctgcaccctccaccacttcgggcccgtggaacgtggcagcagcctagccactgtccctccttgttgtcactgaagcatgggtggggtgaggacgaccagtaagagaattttagaatccaaacatcaggttacttgagcctagtatatgttaagatccatcaaactgtgacctcaatatctgtgtattttactctctgtaaatatacttcattagaaaaaaataaatttaaacatgaaacaaaaaatactataaaggacctgtctatttgtcactttccacctctttaaataaaccagacaggcttttctaggcatttctttctgatttcatttttcttttattgaaatctcaaccaaaacacaaaaacaaaaatttaatttcctgcaagaaatttaaattttcatgttttggcccaagacactgaaagcaggcttaccatccctaagttttctaaactccggacactcgtcaaggttcctcaaggttgttttctgcaattgacgggaaatgtttgcacctggctcttaatggctctgcaggaagtgaatgctaacttaaatggtgcattctgggaattgtagttccactatgaaagatcacgtctcagaagaaataaaagacaatgacagcccagatcacagaatttcagagctggaaggagctttggaggttggtgaattttatgaaagagggactggccagaggtctgggcggagtgacgagtgcggctttaccctcagcctcctccaccagctacagcagaggaaggcaacaccacagagacaggcactcctaaatgctttctctctccagagcagtccctctggccacccctggcatgtccttttcgtctcctagagggtggctggagactcatcttcacctggacatggaggctccagagactgcctgtctcctggcaagcggcccgggaacccaggacaggaagtgagcaaatgcacccactggacctggggacggctccttcctggagctcccaccctcacatctctttgtgttagtgaccggtgtttcctgccaaggcacacacagaaagggacacttactgcttagtacaacagggtcatggaagctgagggtgcgcggcccgcaccagctgtcccaaggtggggaggagctgtccggaacaccgtgatatgtttgggtccactgacaaggcataccagcagggaactgttgtttaaagtgacatcaaggccctcaacttatcaaccatgaaacggaaggagttgcatgcccagggaaaaacagaaatcatgatggagagaaaatacagcaagtatttctataaaatataaaaggccataaagtggatacaaataatttgcaaatgttatgtttgatttccctcgttaatctagtatcaattgaagaactattagaatcggcnnnnnnnnnnnnnnnnnnnnnnnnnnnnnnnnnnnnnnnnnnnnnnnnnnnnnnnnnnnnnnnnnnnnnnnnnnnnnnnnnnnnnnnnnnnnnnnnnnnnnnnnnnnnnnnnnnnnnnnnnnnnnnnnnnnnnnagtgaaaaatcaaaacttttcttggatccataaggaagtgaggtcacagatgtctctcctgccacagagaatgcagtgagatcagctcacgtggagcagaatctacagtctacaggggaaggaactggtggaacttgatttggacaaaatgctggaggctgaacatggcaggtgtgagaatctcctggggcctacattttcataggtttcacctccaggaaccccatcaggttctccccacgaaaagccagaaaaaaaaaaacacctcatgtctctgggatgaggagggggaggtgaccaccttgaaagagcccagagcgttctccaggcaaaggccaggcctgctctgtagcgaagctgacttcacaggacctcatctcagctgggaagggcatttcactgctccagccccaccagtcttccgtccacccaagcggggaggagaaagggaaagacacgtgtgaaggtcacggctcagggacacggccactgaagggcttaaatcgagtcacaggctggagcctgcttcccctcccagccctgcggctccagcataacatcctgggtgggagtggaaagggcccaggcgcaggctgtggaaggatgctcggagaaactccacgacaacagggagacaaaacaaggacactcgaggaattttaagccactgcaggattaaacacagcccgagtgccagccaggttaaggggatggatgccctcaaacaaggcacacttacttcacctttcagtcaagcagcacttactgatgggggatgtgtgacaaacacgtcatgaggcaagttcatcattgtacaaacgtcacagagtgcacttacccgtaccacgcacctaggctgtatggcacagcctgtgctcccaggctacacaccccagtggttactgaatactgtaggcagttgtaacacagtgccaagggtgtgtgtacctaaaacactctaaacatagaaaacctacagtaaaaatatggcataagagacaaaaaatggttcacctcataaggcacttaccagcactggagtgtgcagcatgggcagttgctctgggtgagttgggagtaagttggtaagtgaggggtgaggggtgagtgagtcggtgagtgaagggtgagtgatcggtgaggggtgagtgaggggtgagtgagtcggtgagtgaggggtgagtgagtcggtggtgaggggtgcgtgagtcgtgagtgaggggtgagtgagttgtgagtcgtgnnnnnnnnnnnnnnnnnnnnnnnnnnnnnnnnnnnnnnnnnnnnnnnnnnnnnnnnnnnnnnnnnnnnnnnnnnnnnnnnnnnnnnnnnnnnnnnnnnnnnnnnnnnnnnnnnnnnnnnnnnnnnnnnnnnnnnnnnnnnnnnnnnnnnnnnnnnnnnnnnnnnnnnnnnnnnnnnnnnnnnnnnnnnnnnnnnnnnnnnnnnnnnnnnnnnnnnnnnnnnnnnnnnnnnnnnnnnnnnnnnnnnnnnnnnnnnnnnnnnnnnnnnnnnnnnnnnnnnnnnnnnnnnnnnnnnnnnnnnnnnnnnnnnnnnnnnnnnnnnnnnnnnnnnnnnnnnnnnnnnnnnnnnnnnnnnnnnnnnnnnnnnnnnnnnnnnnnnnnnnnnnnnnnnnnnnnnnnnnnnnnnnnnnnnnnnnnnnnnnnnnnnnnnnnnnnnnnnnnnnnnnnnnnnnnnnnnnnnnnnnnnnnnnnnntcagtgagtgggggtgagtgagtcggtgactgaggcagtgactccggcggtgagtgaatgcaaaggcctggaccatgactgtacactatggtagactttctcaatactgcacagaggctacactaaatgattaaaaaaaattgtactacgatgttacaatggctacaatgtcactaggtgacaggacctttcagctccattataattcttacgggactaccatggtgtatgtggtctgtcattgacaaaacatcatcatgtagcacacggctggatctgatatttcatgtctactttgcaaccaaaataacgagacatgctaaaaggcaaaaaaaaaaatctgaagagagagagtgagcatcagaccagactcaggtacggcagagattttagaattaccacacggagaaattaaaattactgttagtttggggacagtggctcacctctgtaatcccagcactttgggaggccaaggtgggggatcacttgaggtcaggagttcgagaccagcctggccaacatggtgaaaccccatctcactaaaaatacaaaaattagctgggcgtggtggcgggtgcctgtaatcccatctactcggaggctgaggtaggagaattgcttgagcccaggaagcagaggttgcagtgagccgagacgtgccactgcactccagcctgggcaacagagcaagactccatctcaaaataatagtaatataataaaatcagtacaattaatatgctaagggctctaatggaaaaagtgggtgataggaagaaaacatgggcaatgtaagaggagtgatggacaaaagaacaaaaaggaaattgctgaaaccaaaaatgctaactgaaatgaagaatctctaagggctcatcaataggatggatatgctgaagaaagaatcactgagttgaagatatgtcaatagaaacttcccaaactgaaatgaaagagaaaaaaacggaaaaaaaaaatcagaatattggagaattgtggggcaaaagtgtacatgagcataatgggaatgccagaaagagataaaaggagcagaagtatttgaattaacatagttcagagttttccaaaattatcgatgacaccaaaccacagatccaggaagctcggaaacatcaagcaagataaataccaaagaatctacacataggcatgtcatactcaaactgagaaaaccaaagactaagagaatcaaaaggaaaaaaaatccttacatgtagagcagaaaaataagaattacagcagacttgtcagaaaccacgcaagcaaaaaaaaaaaccaaaccaaccaaaaacgtgcaactctacatccagtgaaactattcttcgggtgcaaaggagaagtaagaacttacttttttcccatttttttctaaatctctgaaaaagaaactcaatataaagactatttacgcgggcgcggtggctcacgcctgtaatcccaacactttgggaggccaaggcggtggatcgcctgaggtcaggagttcgagaccagtctggccaacgtggtgaatccctgtcctactaaaaatacgacactggggctggtggcgggcgcctgtgatcccagctacttagaagctgaggcaggagaattgcttgagcatgggaggtggaggttgcaatgagctgagatgatacgccactgcaccccagcctggcgacagagcaaggctctgtctcaaacaaaacaaaacaaaaacaaacaaaaaaatttctttaaataaaaacagagaattcactggcagtacctcttcctttgagaaatattaaaagttcttcagggagaaggaatatgatatacgtcagaaactaaatgtatgtaaaaaaagggagagcatcagagagaagtaagtgaaggtaaaataaaatctttcttattcttaattgacctaacagaaaacaaaaaaaaaaaaagttttctttttttgagaagggttttgttctgtttcccaggctggagtgcagtggcataattacggctcactgcagctcaacctccggggctcaagcgatcctcctacctcagcctcctgtgaagctgggactacagtgtgcatcaccatgcctagctaattttcttatttttttttgtagagatggggtctcacatgttgcccaggctggtctcaaactcctgggctcaagcaatcctcacacctcagcctctaaagctgagattacaggtgtgagccacctcacctggccctgaatatatgttgactataaaaacccactttgaggccaggcacggtggctcacggctgtaatcccagcactttgggaggcgaggcgggcggatcacaatgtcaggagatcgagaccaccctggccaacatggtgaaacccgtctctactaaaaatacaaaaattagctgggtgtggtagtgcatgcctgtaatcccactactcaggaggctaaggcctcctgaatcacttgaaccagggagtcggaggctgcagtggccaacgttgcaccacagcactccagcctggtgacacagtgagactctgtcaaaaataaaataataataaaaataaaccaccaacaaaaaaaccccactttgaatataaaaacatagataaaagtaaagggataggccagcatggtggctcacgtctgtaatcccagcactttgggagctgagccaggcagatagcttgagctcaggagttccagaccagcttgggcaacatggcaaaccctgtctctacaaaacatacaaaaattagcagggcatggtggcacccatctgtagtccacctacttaggaggctaagtgggaggatcacctcagctcaggaggcggaggttgcgggagccaaaatcataccagtgcccttcagcctgggtgtcagagcaagaccctgtctcaagaagaaaaaaggaaaaaaaaaaagagagaaggtacaaattattgatatcatttaaaaaaaaagaagggagggggtcaatcactgttaatcccatggccattaaaagcttaatagagcagatcataaacacttccatgcccacaaatttaatcatatagatgagatggaccaattctctaaagatacctccaccaaaactcacacaagaagaaatagataatctgaacaggcctatatgaatatatggaaaaaaacaatctctttctctatacgcacactcaggacacttctgtggcacatgcaggtcttttcccacactgaccaattctctgataccatttgggtgtcctgcacgcaattcagttctgacacgaactggagttcgtgcacatcccacaggttaagggctcagtccacaagactgcccccatctgaggacgatggcaagtagtgggtcccaggttactcacagctctgccccacctggctacaaatccaggcttcccacagccctttccctgggtttgataattgctaggaggctctcagaacccagaaaaagagtttatttactaataccaatttattacaaggatattttaaaagacacaaatagccaggcgtggtggctcacgcctataatcccagcatgtgggaggctgaggcgggcagatcacgaggtcaggagatcgagaccatcctggctaacaggtgaaacacagtctctactaaaaatacaaaaaattagctgggtgtggtggcgcgtgctgtactcccagctactcaggaggctgaggcaggagaatcgcttgaacccagggggcagagttgcaatgagccgagatcgcgccactgtactccagcctggcaacacagtgagactcttctcaaaaaaaaaaaaaagatacaaataaacagtcagaggaagagctcagggagaggtctgaagggtctcgggcaaggggcgtctgtccctgtggagttggggtgcaccatcacctcatcagcacacagatgtgttcaccaacctggaagctctccaaattctgtagttctgaagtttcatggaggcttaattacataggcatgatcaattattaactctaccccattcctcttcctcaggatggagggggtggggctcaaagcccctagcttctgtttatggcttggtctttctgtgagcagccctcatctgggagccccccaagaatcactttattagaacattccaagggataggagctctgtatgacgaacagagcaaagaccgactatgagaacggaaggtggtcggaggccattttgctcaggagacgacaagggttttaggagctctgggccatattctggggcaggactaaatatatttttttattatgtcacagcatctattaaagaaatggaataattaatactttccaaaacagaaagcaccaagccctgctagcttcattggtggattttaccaagcatcaaggaagaaatgaaaccagaaaacagtagcagaggaaatgcttcctaactcattctgttgtccagcagggccctaataccaaaacacgcacactacaagaaaactacaggccgggtgggtggctcacacctgtagtcccaacactttcagaggccaagctgggagaatcacttggaccaggagttcgagaccagcctgggcaacaggctgggaccctgtctgtacaaaaatattaaaaactagccagtgtgacggcacgtgtccatagtcccagctactcgaaaggctgtggcagtgggtcacctgagccgaggaggttgaggcagcagtgagccgaggtcacacctctgtacatgcactccagcctgggtgacagagtgagacactgtctcaaaaaaaaaaaaaaaaaggaaaaggaaaaagagtccaggtgtgtggatcacgcctgtaatcccagcattttgggagggtaggcaggcagatcacgaggtcaggagatcgagaccatccatggctaacacagtgaaatccgtctctactaaaaaatacaaaaaattagccgggcgtcatggcgggcgcctgtggtcccgctactagggaggctgaggcaggagaattgcttgaacccgggaggtggtttttgcagtggctgagatcgtgccactgcactccagcctgggcaacagagcaagactccgtctctaaaaaaaaaaaaaaaaaaaaaaaaaagaaaaaagaaaactacagacaaatatctctcatgaaccagatgcaaaaatctctaagaaaacatttgcgattgaataaaaaaaatgtataaaaagattatttgccatgacccagtgagatctattccaggtatgcaaggctggctctgtgctctaaattgattaacgtaacccgtcacatcaacaggcaaatcatctgaccgtaaatcacaggacacattaataggtgcaaaaaaatcatctgacacattccaacatcccattcatgataacactctcagcaacaggaataaatgggaattctgtcaacttgataaaggacatataaaaaaatacagcttggtggctcacgcctgtaatcccagcactttgggaggctgaggcgggcagatatgaggtcaggagatcgagaccagcctggccaacatggtgaaatcccatctctactaaaatacaaaaattagctggacatggtggcacatgcctgtaatcccagctacttgggaggctaggcaggagaattgctttaaccagggagtcggaggttgcagtgagcctagatatcgccatgcactctagcctgggcaacaagagcgaaactacgtctcaaaacaaaaacaaaaacaaacaaaacaaaaaaacaaaaaccaaaaaacaacaacaaagtactacagctcacatcataagaggaaaaaaaacactgttattatttctgctatttcttaacagtttttgtttttttttttagacggagtctcgctctgtcacccaggatggagtgcagtggcgtgatctcgactcactgaacctccacctcccgggttcaagtgatcctcctgcctcagcctcctgagaagctgggatacaggcacgtgtcaccatgcccagctaatttttgtatttttagtagagacagggcttcacctgttggccaggctggtctcaaactcttgaccttaagtgatctgcctgcctcggcctccaaagtgttgggattacaggcatgagtcactgagcccagctaatctggatttttgaacactttatattgtgaaaaatcttgaacattacaaattaaacagattagtgtaataaatccaacacatgtccctagtttcaccatttatcactcttctgacattcctgttttgtctgcactctccaaactcttcagcttccatttattatttattaacagattgtttttaggacagaaaatccagcaggtagtacagagaattccttcaccctctcaccccctgccctgttcccctatgttaacatcttgcattagtgtgggtatgtgtgtctcaagttacgaaccaatactgattcatgctacaaatagggtccatagtttacattaaggttcacttgttttgtacttggattttgcaatccagatttcaagaattatatgtagataatgaatccataaaggaataaaaagaaaaagattttgaagcaagtgttaaattgctgaacttaggaaacaggtgaataatatttaacagcgttggtatccttactgtatcaagaacgtttataactcagtgggcaagcaagaccgcgacacgtggttcatagacgtgctaacaatgtaccctcaaggaatcgctgctggcggagaaaacactacgtccacagaacgccaccgggcactgcctctggagcgtggcttcaacccaccctgaagcccactggcccgcatccttcagtttggggaacctgcccaaaagcagacactggtagcgagctgaatagacaagtgtgcggcgctttccacataaatccctaaagaatgacccaagagtctgtcactgaagaacaaatccacacggacagcaagaaccacagagtgcagacccagggcctgcgacgccggcgtgacagactgcaaccccagggagaggatgtcctctccccccacaccctcgctcctgccacccctgtgcccacaccgcatgcccagccgtggcctggcccacctttggaggggcacaaggcatgcagggtggtgcctgcacctgtcccttgctctccaagcctggcccttcacagccctccccactgacacactctctttggagccacactccctctgctcctgtctacttgcctcactccacttcacggccaaacctggccctgacccctcatcatggccccctctccgcccagctccaccagcctctccagtgagattccagtaaccagcgacctgggagcacatccaacccccttctctccactatcctggggcacatccagcccccttcttccattctggtcagagtagcacccagcacagcaagtcacccttctttcctgaacaaccctcagccttcccctggacccgcctcggctgccccctctcagcgaggcctgctcctgggccggcactgaagcccagcctagaaccacactcgaccccccaaggcttcaaacacctttgcctccacccccacactcacatgcccaaatcccagaggccagctgctggcctcagactgcctttcaaactctggcctcagcacccaagagcatctcaaactccgttcctcacccccatctctgctcctccccaaaagcctctcccacttagcatcctccaggtgctcaagcctaatcccttagctggcctgctgatcttttgcctctcaaccccctgaacccagccagtactccagcatgctaccaccgccacttcctccctaaagtctgagccatcgccatctaccctgggactgcccaacagtcaccagcgcccccctcaaaactgtactggaataggattttttttttttaaagcatggctgggtgcggtggcttacctggccaacatggcaaaaccccatctctacaaaaaaaaaacaaaaaacaaaaaaaacaaaaaaacaaaaaaacacacaaaaaattagccgggcatatggcacatgcctgtagtcccagctactcaggaggctcaggtgagaggatcgctggagccagggggtcgtggccgcagtaagacgagatcatgccactgcactccagtctgagattgttcaaaaaaaaaaaaaaaaaaaaaaagtcattaaatactgccaaaaaggaggggaaacttgatacagcaaacaatggtaaataaagtaaccagtaaaatgtatacttcaatctaataatatggttgcttgatgggggaataagaagcaccggaactaagatgacatacagcctccaccagggaaggtggcacacaggaccgatcagctctcaacagttacacaaagaggggctcacggtttgtttttaaaactgaaagatgggctgggcacagtggctcacaattataaacccagactttgggaggctgagacgggaagatcccttgaagccaagggttcaagaccagcccaggcacatagtaagaccctattgctacaaaaaattttaaaaattagccggatgtggtggtatggcctgtagtcccagctactcgagaggctgaggtgggaggatcgcttgagcccaggaggtaaggctgcagtgagctgtgataggaccaccacactccagcctgggtgacagagcaaagcctgtctcttaaaaaaaaaaaaagaaaagaaaaaattgaaacatatccactagaagaatataagaaaacggtgaggaagcctaacaaattaaaaaggtaggcccgaattcccacttatcgtaatcacaattgtaaatgactaaattactctacaaaaagacttttggattgagttaaaatataactataaaataagatgaaaaggttgaaaataaggaaatgaagaaataagacgttaacgggacaaaaaggagtttcttgtgttggtaacaggaaaacttatgcatcaaacagcaggtcttgaggcagaaagcaaaacttggacatacaagcagaaacgggcacctccagaacccaggggaggtctacctcacctttcctggaaatcagcagaccgagagcctgacaagaagcagggaacgctctggtccgctgactaacacaagtaagcaagtgcccagcttcaggcgggacaatataaccaaggagtggtgaggatacattcttctagcactacactgcaacagtcacaaaagggactgtgttagccacagtgaagtctcaaaggattccaaaaagcagaactccttcgtccttaccattagaccttaatgcaatcaaattttaaagtaactacaaaaaaatttgctccctcgcccaatctgtgtgcactgaaaaatctgtcaacacccttttaaataaccacaggttaaagggggcatcgaggctggaattacaaacgactcagaaatgaacagcaacaaaagcgagagaggcagatccatggcacgcagcccaaggaacagcagagccacagcctccattgcgggttaaggaacacgccaggaaccagaactacaagaaaaaacccaacaaagcaaaaagagtaaggattaaccagcataaacaacaactcagagacacgaagggctggctgtttgcaaaacctgtaatggagacaaacttcaggaagtttaaccaagaggaacagagagaagctgtctaagcagcattagctctgataactacaaacagctttaaaattccaagagaagctgggaggcgaggcgggtggatcacctgaggtcgggagttcgagaccagcctgaccaacatggagaaccactgtctctactaaaaatacaaaattagctgggtgtggtggcgcatgcctgtgatccagctactcgggaggctgaggcaagagaattgcttgaacccgggaggtggaggttgcggtagccaagattgcaccattgcactccagcctgggcaacaagagcaaaactccgtctcaaaaaaaaaaaaaaaaattccgagagaaggcctggtgtggtggctcacaactgtagccaacaggtgaaacatcatctgtactaaaaatataagaattagccaggtgtggtgataggggccttaatcctagctccttgggaggctgaggtaggagaattgcttgaacccaggaggcagaggtggagaactgcttgaacccgggaggcagaggttgcagttagctgagatctcaccactgcctccaacctcggcaacagagtgagatgccatctcaaaaaataaaataaaattccaagagaaaacagtatacaatttcaacccaagaatccgaaaatctagatttgatctgaaaatctagtcagcagtactcagtggcaccgttcctccccaggacacatctggagaacatgtcggatggctttgttttcggttgtgctaatagctgttaccctgaggatccaggaggtcctgaaaacttgtcccactatcatatacttattgacaagcattgatccagatgaaatcaacaatgtgtaggaatatggttttcctatgtacacgacaggcaaaggaaaccatccgccatatgtaaaatctagaaaccaattttaagaaatacttaacagtaaaatatgggaaaaaacagaaataggctaatatacatacaaagattacacaggaaattttgttttttgagacagggtctcactgcacctaggctggagtacagtggtgcaatcacagctcactacagcctcgacctcccaggccaagctatccttctgcctcagtctcccaagtagttgggaccacaggcgtgcaccatggtctcggctaatttttaaattatttatagagatggggtctccctatgttgcccaggctggttgaacttctggactcaagtaaccttccctcttcggcctcccgaagtgctgagattacagcaagagctactgtgcctggcttacacaccaaatttttaataacaacaaggaatagaactgggaggtggatgacaaacaataatttttttaccacttcttagtctatttctgcagttttatttttgcaacagagaatgtattgtatttctttttttttttttttctcttttgagacaggttgtgctctttgtcacgcaggctgacaaagagtagtgcagtgatgccatctcagctcatgcaacctccgcctcccaggttcaagctattctcctgcctcagcctcctgagtagctggattacaggagtgtgccaccatgcccggctgagaatgtgtttcaatagatgtgtgtctttttttttggagacagagtcttattctgtcacccaggccagagtgaagtggtgcaatcctgctcacagcaacctctgcctcccaggttcaagcaatccacctgccccagcctccccaatactgggattacaagcgtgcaccaccatgtgcagctagtttttgtatgttttagtagtatgttttgtatgtttcaccatattggccagggtggtctcgaactcctgacctcaagtgatctcccaccttagcctcccaaagtactgggattacaggtgtgagccaccgagtccagcctcacagatgttttaattgaatagatgttaaaataattattaatgttcatgatgatttaacttaaggatattccttaaaacgtgaacagaaagaacctcctcatgattttaacagtttctgaatttgctttttctgagagtttactctcttattttccatctagttcctaactcatctggatttctgttgcataaggtatgaaacagaagctatctttccctgtgcactctccacggagggttcaggcactcctggctgacgcgtgctgcctgcctccttcacggcctacatccctacaacacagatgcctcttgtgggaccaggtgcagtgaggcctgctttctaacctggattccccatccacaaggtatggttacgaccagagcttcctcctgagagcgcagggagcttgtgaccctcccagaaatgctcaggggacgctggccaccttgcagagaaacccctcctaacgggagggaacatgggtacgcgaggctccggtactgaccgcggctgggcgacagcaggctacttgataggggacgctcactctcctcagctcatccagcttctcctgtagcttccgcacctggtgtcggagcggctgaccctctgccgcaggctcttcagctcgccgttcttcttctccaccgctcccgcaggcagcacacctggctcttgttctgccgggaggagaagcagtaggagtgcgtgagtcgatgagcttgcaggcccctgacgccgacaggatgacctcgttgatggacatgggctggcgtcgctgtgctcgctctgcacggcttccgtggctggctttggggtgacgtcgcaggaggggcagaggggctctgggaaggcttctgcggtgtcgcggtaagtgatgagctggagggctctgggccaggcccttgtcgggtcccaggctgctcccactgcagcttggttcccatctttcttcagcctcttgcggtcaatgggctctcgggggacagatggcctttctcggtgtgcttagaggagaaactgtacgaatgaagtgagccgataaatttgcacgccccagatctgggggcgtaaagtcatccatagaaatgccactcttatctgtcacgcccccttcgatgaggaagtggcgctctcatcgccagcatctgtggcagacgcttctgcttttccctgactgctgccaccatggtggccagtccatctcctggagtccgttccagagcttgctgggcctgccctggctggcggcctcctgggccgccctgggtgtggcttcaccttgcagagcagcttgctcaacctgcgggactctggcttggccatcgggtttccactcgaggacggtgaccaacctcagctcctctgccggtggcggcactcgagtgtcccctcacaccccctgtggccttgctgcatcttttctccgggtgcggccatggcctccagcccccctcttcttctcggtcaggtggagatggatggcacggccgtgggcttcagcaggcgatgctggtcctccagcctcttggagagctgtctttggtgaaatgctcactacagagaaatgaatacttagtgggagtccagttaccctctgaacagcttttaaccattggattagacgttttgagtcctttagggggaacctaaggacaaatgacaaaaagtaattagaaataattaaatgtctccccttaaaataatcaacgtaaaagcaaaacaagtatttttgcacgcaccctaagccgtattgacttcatccacttaaaaaatacttcaaaaagatttaaagaacatcttctacctgcagttattactggagtagaatctgaaagacccgttgtctacccatacagagcttatagtctgtagggcggatgggaaaaaggtaaccaactgctccccaggctgtggtaaatgcccaatggggacacaggatgctgaagacagtgccaggatggcctcaggacagcaggaaatagctcctagaagctgactgctaacaaccctcccaacttgcctggaaggtaggactctgggtaccaaaaccagggccagcatcacagacactagggcgtgagaggtcaggactgcatggaggcagccctggctgtgcgcaagagctgagaatctggagacctccagaagactccagagctacagttctgtgttcctgttgctgcccacctccaggagtaaaaatgctccttttaaaagtcaaccagcccagggacagggccaatggtgctcacctgcagttccagttacttgggagcctgaggcttgagggttctttgacccagaaattcgaagttacagtgagctaagactgcaccactgctccccatcctggggaaagagtgaaacccggtcttctcccctcaaaaaaaatcaaccaactcagatgatccttgagacattatactgaatgaaatagggcaggtgccaaaaaacaaacactgcatgataccactccatgaggtactcagagtaatcaaattcatagagacaggagaatgcgggttcccagagccagggagaggaggactggggtattaatgtttaatgagtccagagattccgctttacaaaaaaaaataattctggaggtggatggtagtgacagctgcacaacaacgtgaatgtatttgtgccatgaattgtacactgaaaaagcggtaggaaaggctgggagccgtggctcatgcctggatcccagctactctggaggctgagatgggaggaccacttgggtccaggaggctgaggcgcagtgagctacggtcataccattgcactccagcctgggtgacagagtgggactctgtcccaaaaaaagttaggatggtaaatttcatgttacatgtattataccataatttaaaaatgtgagaaaaaagcaaccagcgcaggaagatactgaataggatgtttagtcatttctttatacctaataaagatccttcataaccatttcttcattaaggcaaactctgtgtttaagaaataggcctgggccgggcggggtggcttatgcctgtaatcccagcactttgggaggccgagcgggtggatcacttgaggtcaggactttgaggccagagttcgagaccagcctggccaaatggtgaaaccctgtctctactaaaaatacaaaaaaattagacaggcgtggtggcgcttcctgtaatcccagctacttgggaggctgaagcaggagaatagcttgaacccaggagcggggttgcagtgagccgagatcgcaccaatgcactccagcctgggcgacagagggagactcttctcaaaaaaaagagaaaaaaagaaaaaaaaaccaggccctaatgtgcacataagggaagggtggtcagttctaactgctatttgctccacctgaggccagtgtggaccaggacaaacctaacaggatggactgggccgttctaagcaacaggaccttctaacctcctttctgaacctgtgaggccaactgcaaaggtacccccccacccccaattccgatgtcctttcctcccaaccatgttagaccgttgcaacacgttgcctcgttttcaaaaaacaataacaaaacttctggacacaagctctgaaggaaattgtcaagaaagtgcgctggctgacttgtgaaataatcaatgttactaattcttataatacattgtaatgatttaagacttacagcaaactactgtgactttcaataaccctataaataacacgtgccattcccgtctttaaaacttaaataacacatgcaacataaaacagaaacatctccaaagtggtttttaaagtctgttcgcggttctgggcctcccgcgtgtaatccgcagaaatctcactgaaataggctgaactcacaaggccttaaggggtttgggccctgccgcgggggcccacgtgggaagcggccgagagccccgggccagctctaagggagcgcaggaggatgccgtccccagccggccgtcccgtagactctccgcgctacccgcgtcctgggctcgggggcccagtcccggaaagccctctcgggggctgtcagctcggaggcgcaggtcgcgtctgcccggtcgctcctgctcgcagacatccaggccgacggccgcgcggtccggagagtcagcagtcgcggccgagcaggacaatcggcccaggacctgcgtaccagagcgtgcggctttctgaagctaggcgccggcnnnnnnnnnnnnnnnnnnnnnnnnnnnnnnnnnnnnnnnnnnnnnnnnnnnnnnnnnnnnnnnnnnnnnnnnnnnnnnnnnnnnnnnnnnnnnnnnnnnnnnnnnnnnnnnnnnnnnnnnnnnnnnnnnnnnnnnnnnnnnnnnnnnnnnnnnnnnnnnnnnnnnnnnnnnnnnnnnnnnnnnnnnnnnnnnnnnnnnnnnnnnnnnnnnnnnnnnnnnnnnnnnnnnnnnnnnnnnnnnnnnnnnnnnnnnnnnnnnnnnnnnnnnnnnnnnnnnnnnnnnnnnnnnnnnnnnnnnnnnnnnnnnnnnnnnnnnnnnnnnnnnnnnnnnnnnnnnnnnnnnnnnnnnnnnnnnnnnnnnnnnnnnnnnnnnnnnccggggcccgcgtacctgtggaaggagacggcgcgcttctcgccctttccctgccggttgagcagttcacgaccgcacagcagatcaccatcgcgggccttggcccagccgcgcagccagccccggccctagccgcccgcccgcccgcggaccgccccgagggagggagcgcggcggcacacggctcgggacgtgggccggcccgcggcgtccgcgccgtacggcaagatggaggcgaggcgcccgcagcgggcccgcccccgccccatcccccgcccgcgtcctcgccagccgcggttcgggcgtcttcggaccagcggggcgccgcaggcccctcgcagcgtccgtcggcagggggcagacgggcgggggagtcgccccggcggggcaagtccgtaccgcgacatgggcgcgcgagcacgtccgtaccgcaagatggctgctcggacggggacagagctcgcctctgccgctcgacaactgctcctgggtcctctaagaggaggaagcgccacccatggcacacagtgtccgtcggacagcagaaccagccgtcgtcccacgacacgaccccatgccgcccgcagggcgcccggggctcgcgtcggcccggccgtacgccaaaatggcggctcccgcgtatttccgctgcgcgccgtatcgtcttcgccgcctgcgccggcacacctattggcccccgcggcgtccctcgccgcgtcgcgttgctggcccgtcggagcgacgccgctcgggtcagtcggcggccggctgggaagatggacgcaggtgaggagttgccgggggtcggtctttccgcaggaggtgctgccttatcattggcctcccctgctcgggtcgggctgccgcgactcgcctcggggcacgcggtgcgggccaggctgggccggggcggcgggcgctgcgggagcgcggggcggtgttggtggtggtgggcggtgggagcgggagggggacggcggcgcactgcgccgcggaacccgccgcggttgcgctggagcttctgcttttccggtcccgtccggagcgctccggaggttgtggcgcacaggcccttgcgccaggtcggccgtggagggcggcggagcctgccgggcggggagagcgcggcggcgaacggggcggccgcggtccgggccggggacgcgagcggcgggcgaaaggtagcctttccgcagctgagcgtgaagggatggaagctctttaacttttatgaagttatggtaggttggaggagagaaacgtgacgtgttcatcacagtatacgtatcttttttgttttgtcttcaatttagtaaccagtagattctccaagctgcttttccgtgacgagaaagagaacagtgaatttgtatcatcgggtcttagtttcttggggtcctaagagagagagaaagagaggagtgtgtgtgtgtgtgtatagggagtgttggtttttttcctatcctttcatgcttcgctccatttttgctagcaagattattttaagtcagcgccaaacccatcgctagcccagtgccctagaaatatttttacacagaagttttagctcattcattctttgtaggaactgattgccttttaccaagtatcccccatctgtaaagaaagattttcatctggtttaattctgtcttctgaatgggattgtttttactttttatttttctggtagctacaacataaatttattagatctgagttggaaaactgtaatgtgtattgccaatatctattaaaatgatttgtagcactcaccacttaaatgtggtaggtggctggaggaaacaggagccctgactccctaaggagatgttgaccaggtgtatatcttgtgaagtttgtcttttagaataaccgtcattcacggtgaactatttgcagctgtgtactatttgttgtttactattttacaactgttgtattatattttttaggtgttattgtttgtgatgcaggatttttctcagccactctggcagccagagactccggctggcgaggcccctgcccaggccttgcttgggtccaggctcgccgcaggagatccccatctacttggtccaccggtgggcacctggtttgcactatggcacggataccatggcaccatgactgtatgctcagcccctggcgggagtgggtgtgtgggtgagtgagtgccggtcccgccagctgtttcaagcgcaggcagcagagtgggctctgcagagcttacagctagaatgtggcaagcaactcccacggcggactccagcgtccagacaaagggacagtggattctgtgtccagacaaggggaaggtagtggcgcccaagcaggggtgcttacaaccctgaagccaagagggggtgttgcagagtgtcagcagccctgttactcccattgccctgctccaggcttagctctggggctggctccgtccccgctgcttccctttgctgcctcctgtcacgtgggggtcacagtgggtggctgccctttgccggcagagggcccagggccacagtgttacagcctctttgtacttgcattcattgggtccctagttcttgtcccacgtccaagaagaatgagacacacttaacactgacaatcgaagggtgaggagggtggagaatagttttattgagtgatgaacacccctcagcagagaggggactcaagggtggtcttccacccaaagtcgggtggtctccttggtgtggctgggtccagggcttttataggctcagaatggggagtgtgtgctgattgtctgtgagtatgcaaaaaaggttaaaacaaagtcactactcaaaggtgggcacaacaggtaataaaccaattagagaaaagtaggtatatgtaaaataggtgaagggtggggattaatagaggaaagcgcaccaaacaggaagagaggttcgcaatccagtctgtggatttatccggactcgtcgcttggctttcaggctttaaactgtggcttgaaggttgggtttcactggtgcccacccctctctgcctaggatttgtctgcctcctgcctctatcatttcgataccttgagctggagtatcatatgagagacttggctaaggtcaaaaacacggttcagtgtcgatcattgacctaaaatgtgaaaatcatcatgttcaagttgggagaacagttatgttgttacatgcgatactttattttatcttttattttcccttgacaactgtgttgacatggtgatactttataggacactggatgctgctgcatgtgggatcagagtagaaaaggtgtttgcatttaaagtctctgtttatgctgataaaaacgtatatgatgtttgtaggatatcatggggaattttcttctgacttgatgctgtatttcctttcagagatgattaatgatctgccctcctttgattctagagttcttgaagattctgccttccttgaccatgtgtaatacagtttctgttctgaagtcattaattcaatacactgtttgttactgactgtcagatatgtgttaggcattgttcagacactaggactagagaagtaacaacatagatgaaaaccattgccctggggtagctaagttctagacatgagaccagcattagcagcgaagtgcgtggctcctgggggatggtgattgggccaaggatgaggaggattggaattgtagccaggatggccaggaagggtctcactctaaggtttaagttttgacgaagacttaaagcagtgtaggaggaagggcaggtagcaagagctggtgtggctcgggtgcagcgggtggcggtgggagaagcaggagctgaggatagaaagtgacttaggctcagtgtagtggggccttgccagctcatagtgaggactcggtgtttatttgaacaggatggcagctcatagtgaggactcagtgtttattctgaacaggatggcagcctttggaaggtttcattctagaggaggagtcacatgatagactgtgttcaacaggcttgcctggcatctcttttgagaatgtactgcagaggggcaagggcagaggcaacgagaccagcaagagactgttgaacaagccagcaaggagatgccagtggattagctcagggtgggtaagggttgacttctgcatgtgttttggaggttgagacaatagaatttgtttgtagattggaattgggagagggatgggtagagaggggaggagttaaagatggccccatagtgtatggcctagctaagcaactcagatggaggggggcggggcgtggtggctcacgcctgtaatcccagcctttgagaggcctaggtgggcggatcacaaggtcaggagatcgagaccatcctggctaaacggtgaaaccccgtcgctactaaaaatacaaaaaattagccgggcatagtggcgggcgctgtgatcccagctacgcaggaggctgaggcaggagaatggcgtgaacccgggaggcgggcttgcagtgagccaagactgcgccactgcactccagcctgggcgacagagcgagactcgtctcaaaaaaaaaaaaaaaaagaaactcagatggggaagacttggggaggtcctgtctgtgggaagctttctgttgcgagtttggatttatgtgtgttgaatgtgaggtggatgttaacatccttgtagagcagtgtccagtgggcttttgggtctacaggtttggagctaaaagataagcctgggctggagatagactggaggtcacatcagatgaggtcacccagggtgtgaagtgggtgggaaagaaaagaggccaaaggcctctgcgggtgtggagaggtccaggaggtgcaggcagaccacagtgtggctgtgttctccaccagtccctagcactgtccctaaaagcagctccccattcagacgactggcaggtgccagcacttaaatagccacactgcccattcctgaggacagagctggtgtcttgtgcttgcatttctagtgcatcacttgtgtctggcatgtgttggtaataaaaaaaaaacagaacttgaattaataataacctacacattcccctactacaaagctttcagtttgtagagtttaacataaatccagtatgttagcataacatgtaatgatgcagaggctgctggggagtggtttttttttttttcttgagacggagtcttgctctgttcccaggctggagtgcggtgggcgcgatctaggggagtgggttttaatgtgcgcaatctcccagtgtgtgcactgaaacagtgttttctagctttctgatgtagctaaatttggagttctttctctctttctctgttttcattcaggactgaactactagcattctcatgtaaactctggagatttaaaaaaaagtagtaatcatatgcaaactgttatcttaaacctaagagcttctaaaggaaaagaagaacctttgttgaatttataaaatataaatcttttggaaaataactctaagtgttttaggaaggtttcttcgaaatgaagtggtttacagtaagctcttaaattactcgttttttttttgtagtcctctctggttgaatgaagtgtaattggtactaaatggaagaagttggttaaattcattgagtacaattccctacatttctgcctgtcagattagtagactaagtcacatgttttttctgatggaattactatattattaaaatgccatctgccctctctgcttgtgatcgcagaagtcccagggaagagggcgtggaaaatcaagtgtctgggatcagccgaccaaatgggagaactgcttctaagggggactctttcttaaggtgtacagcactctccgtctttttttttttttttttttttttttttttttttaagacggagtctcactgtgcccaaactggctggagtgcagtggctctatctcagctcactgcagccttcgcctcctggttcaagaaattctcctgcctcagcctccc

SEQ ID NO: 2890 - DNA, 100000 bp, Homo sapiens
tctccagaactcggtttgagcaacaaacttgagacaacctttgtctggaagcaagtcaacgcttaataatgcatgctgggatttgtagtttccctgctttcagagtttagtggctccaccatacactttataaatgtatgtgctgccatctagtggaattcaggtagaactatgaatccaagtggaaggtgaaaagtggaaaagcaccttagagcttacttaggatgcggaaatcattccttcacttcagtctctccacttctctgttttgtttatgcctactatatgcggtgccgggtagacgagattggctgagctggaaactgcgtgtggaagatagcagagcaacaaaatgagggaacccaggtcactgaaaattctggagccttcctgtcacttggcctggattgtttaagggagagaaataaaaaaaaaaatcctttttgtttgagatacagttgtgatttttatttttcatgctcagaatattctaacactaatgcacatttagtggcagaatgccaggagcctttactacactgggaatggggttggggagaacgtgaaacttggatgacagggtggaggctaaaagggaacatgttaacagcgaaaaaccccagtttggctgaagagaacagagatataagtcaaaaagaaaggactagatctcatgagccctctaggttaggatagcaacatgtgcttatctgtagtgccagtgagcagagtgattgtgtaggctacttgtacatgtactgtataaatggtttcctcagcacccatccaactcactttccccttttttcacttgtcaaagctggaaacaaaagtctctacttcatagccttgtttgctgctaggggtggccaagcagcatagatgtgccaatgaaatgcaggtgggaatttctgaggagggcctccttcttaaatagaaaagtagcccttctgaaaggcttttagcttttgctcctccctttctttttgcctggaatgaagatggatgccgtgggacagagcagccatttagtgagttcatctgaggccagaggcacacattacgacagggaccagcaagagaaggagcctgcggccctgatgacagcctcaaggcaacaatcctctggacttcttatgtgaggacaataaactttagtgtttttcacgttttttgttactggagctaagtgatttctaacagtcacaggggataagaacaaagactgtggcgtcagtagactagagcaagtcccatatctctctctcactagctaagtgagtaaatcacttaaatcttgaacctcttatgtttctcatctgtaaaatgaaggtaaaatagcacctacctcagggattggtgaggaggaacgactaagcctgtgaatccatcagcacaatgtttgccacacaggtgttaatacatgttagtgattcttatgatgaagacattgttggagaaatttaattataatgatggtaaaagttgcgctttttaatgttcttttaaaaactggacttagtttctgcatgtgctatatgaggtctatggtaaaattgtccctccttgttcattgtttcagcaacttctaatctggctctaacaatctgtaatcacatctagctttgttcctgctttactaataatgcccttgacttttgaggcttttggaacagactttatgagagttctctaatcaaagccaactccatgcttcttgatgtagctttcttcagcatccctctgtaatcttcagcaacaatgcttactgataacagcctaagtcacatggtattgcaaatacttgcttacccattagtattctcagcgactaaatttcttcaagggtggggactatgttttacacctttacattgtgattagctcgattaaaagagtattagttacttgttttcttatctacaatatgagttccacattggtagtcctttcagtgcctaaaacagtaattggcagatagtagatgctcattaaatatttgctgatgaatggcagtttcttaataagtttcctgaatataattctgccaggctctcaagacaattttgtgataattaattttaggtgtcaacttgactggatttacggatccccagagagctgtaagcattatttctgggacatctctgagtgtttctggaagagatcggcattggaatcaggaactgggtaaggatctacttcacccaatgtgggcaggcactatccaattggctgagggccagataaaacaaaaaggcagagaaaaggtgaattctctctcttccggaactgggacatcatcttctcctgcccttggatacctgaactccgaccagattctcaggccttcagacttgactgagccacgctcctagtttccctggctctccagcttgcagacagcctatggtgggactctcagcctccctaattgtgtaaaccaattcccctaataaacatcctctctctctctcttgcatatatatatatatatatttttttttttttcctcaagcttcagtggggttacatccaataagcccattgtaaattgaaaacattgtcagttgaaaatgtatttaatatacctaatcactgaacatagagcttagccgagcctacttaaatgtgctcagaacacttgttagcctaagttggataaaatcatttaatacaaagcctgttttataacaaggtgttgactgactcatggatttattgaacagagtacactgaacagtgtcagttgtttactcgtgatcccgtggctactgagagctgtgtcttgccgccactgcccatgatcacagtagagtattgctatcttataagagatcagaattcaaagtaaagttttcactgaatgcgtatcgctctcacaccatcccaaagttgaaaaatctcaagttgaaccatgacaagttggtgaccatctgtgtatattctatggttctgtctctctggaaaatcctaagacagattttggtaacaggagaggttctagagaacaaaattttaaggatgagtttcctgagttggttttggggttcctggaattggctcttgtctgattagatttgaaaatgctaaaggctctactctttgagatggggtcacactcttgacaggttggagtgcagtggcaccatcatagctgactgtagccttgaatacctgggctcagccatcctcctgcctcagccctccaaattgtttttttttggtagagatgaggtctcagttgtagcctaggctggtctcaaactcctggtctcaagtgctcctcctgcctcagtttcccaagtgttgagattacagggatgagtcactgcgcccagcctggctctccttttaatagtaagagagcactgattgtccaagaaatgaactgttcatagaggtatgcaaaatgtctgcatggatactcctaatcaaccacttcttagaggtgaggaacttaagtgactctatatataatcttttttttttttttccgagacagagtcttgctctgtcgcccaggctggagtgcagtggatgatctcggctcactgcaacctctgcctcctgggttcaagcgattcttctgcctcagctctcgaatagctgggattacaggcacacaccaccatgcctggctaatttttgtattctatagagacggggtttcaccatgttggccacgctggtctcaaactcttgaccttgtgatcccctgcctcagcctccctaagtgctgggattacaggtgtgagccactgtgcccggccctaaatactttcaaatatttatggaaaactaagaaatataccaatgttggttggttgcttctatattgttgggcaaaattatttaaaaaaaaaaaggatgacttcagggattcaaattcatgctcaagctccacataagtaacctaagagcttataggcgtgccctgaaagaggatcttcctcctgtagacatgaggctaaaattgctgaaaatcaaacaccagtcttcatcatttgatggtgcaattacaaaaggcctcagtgtgtctactggtaaaataagccacagtgactgggaagtgagattctataagttgggatggggacgtgtgggaagaccctgaagccaggaacattagtttttttttttttttttttttttcagtttcaccctgttggccaggttggagtgcaatgcatgatctcggctcactacaacgttgacttccagggctcaagtgatcctcccacctcacacccccgagtagctgagactatggccataagccaccatgccaggctaatttttgtatttttgtagagacggggtttcactatgttgcccaggctggtcacgaactgctaggctcaaggtcccacacctcagcctcccaaagtgctgggattacaggtgtgagccaccatgcctggcagttcctacattctgatgagtttttttttttaccagctgtagtggcctctccaacctcatggggttggtaatggcctttccacctttgtctgaagggttaaccctgcattgcctgaggaataataatggcctcccctgaggcagctgccaagcaagacaatgctgattctcctcaggcctacccccaccacccctctatgctcctagacctataactagactcaagtcccagcagaccctaatgtgaggtacaaagtgtggcccatgaggagctgcatcacaatcaaaagaaccattgagttttctaacttatataagcagaaatctgagaaaaatgtgtggggatattaaggggtgggataatggtggcagcaaaagggacagagcttatttgaagaaataatggccacaaattcccaaatttgaggaataaaatggacacccaaattcaaaagttaagcaatattctactggctggctacctgacaactagatttttaatggctttaatgtagttttatcaatcaggtaacaaccactactttgggttacttttgttcagtggagaagcagacataaagaatcaaaccgcaggcatgttagtgttttgtttggataagggtggaaagcagaagacagactctcaaggacaggtctgggggaaaagattttaggaagggatagtttccccttagtctttgttaattctttggtggtatgttaagatacggagaaatatccaatccacagactttgaaatactagattgatgcaatcaataatctctccctttgaatgaatcttaccaaagagccgagaatgacttaaatcactttacctctgttctataacctaatgcaacttgttttaagtggtttttcaaagcatatggtataaaagtaatatcaaatatcctctaaaaccatagttcttagatttttacagatcacgggcccctctaagaatatgataaaacaaagtataaaccccagtatcccctcccccaaataaatccacacaaaaaagttcataaaaaatttcaaaaattttacagattacaagagtccatccatatatgctttatctatctgtggggactccaggtttagaaaactttacttgataaaaactctggtactgtttccttatgtctacaatgaagaggtagaataaatgatcttaggttcctccaggctgggagtgaggggcaatgaaaaacaaagtctataataaaccaacaatttagagagtttgtatagggattgggataggtaggttaccagaaatgtgagaaagaattctgtggttattacagtaaaaggaatattagaactggaaagttaagaggacatagccttgctatcctttaagaatttaaatccagatccagaaaacttgtgtatattttcatagcaaatactgagtcaacaagagagactacctcaccaagaaaccattaacattatatagaagagggtgattcagaactactaaacatttattgaatgtgtaaggtattaaaaacatttacaatttgttaataaaatgatgttttatattaatgtatgtattatgctttggaatatgctaagtatgtagataactttacatttctttcaataactttattctttacaaaatatacaaataaaaaaacaattcaacttttaaaagtattaccatatgcaagaagaaggtattgctatcaccatctaaattaccacaatgcattcatttcctgttcccttatctttcaactctagtggcaaataaagactgaattgaaattaagctgcactacaacatcattaccagggatagacacataacaaagtcatttccaaataaggaatgctggatctccagagaagtgacaaagaggagtctatgagttttgcactcaggcacatccttgcctgaggaggcgtgccaaggacctggctgagatccacactctctgctcctgcattttgcacctctgagaaagaaaatgaaaacaacattcacctattacaaaaatacacaaaaaccaagcacagctggaagtggaaaggaggttaagacagagagatgtgaagaatgaaaaatggcaacgtgattcaccgtgtttggtcatgaagatgggtatttcacctcagagttggagaagtttactccccattttgtcctaaaatgaactattaacaaaccatagttaaactgagaggtaataaagttttatttggaattcttcaatttgaaatcaaagtgaatcaaacacgggctgattgagttttcttttgtcctgtttttcaaaataaaggtgtgctaaacaaatagtattttagagaatatttaatcatctttggaaagctttctgtagcctttaaaaaggactttagctgcatctatttgcttataaacaatatttattttacaatattatatttataaaagtaaatctaccataactggtcttggcaattaccttagtttaagtaatttagattaccttttataattaaaagtaaaaactcacatttatttttttaaagactgtattaattcaagctgggactatctcatttaattctgaattggtcagtttttgatttattattcttctaggctactcttttatttatctaaaaacagtaccagagagatccacatattaaaaaggactcaaacatttttatttgcagtttgatgaattcacattatgcatatgcctcggcactagcagacaaaatcaaaaggtgattacagctgggtgtggtagctagcatgcaccgtagtccttgatgcttaggaggattgcttgagcctaggagttcaaggccagtttgggcacatagtgagagagttccatgcaagtgttagctagccaatagaaggtccttaaatgtttgtaaatactatttaatgaagagaatatttcaaacatgtttttattccaaatgtttctgtgctacctatctccctaagaacacttttagactgtcaacttgatctaattttgatgtagttatgagaatggatagattttttcttaatcacaaagtagaggtttataaactctggcaaatgtgctcaaggttttaaatgatttggcaactgcctttcttactgtacaattttgttgcttagatttctacagttgcataacagggtacctctggtagggtaggcagacacactgtcacaagggctgtgcacagtagatgctatgtggtgagaaagactacaagaaatgccgtgttacctttctcctgcaagtccccccacttctgtggacaacctccatgcagagctgggggtgatcttgatacctccccactcctttgttcaatcaggtgcctggtgttgctgattttactccaaatctctcccgtcggtctacttctctccttctctactccaagtccacactaccatcatgtttgtttagacaacagtctaactcctgctcctattatttgctggtcaccttagagacgagtgatgttttcaaaatgtataactcatgttctcctgccattgcttaagatctttcaaaggttcctctacacaataaatgaaacaattcctttatataatttataaaagtccagcatttcggctcttatttctctctttggcctcactgacttcacccacacaagcttgtactcactgtctctgaccacaccatatttctttcaactcttcccctggtcatgttcccacctaccctaagctgttgctgttccatctgcctgagatgtttttccctctgctctttattaagataactctgttaaccttttagatctgatctgtttccttcctcaatactcctcaaatacttattatattctcatagtcttttgtacttgcactgctataatttcacttttttttttttttaatcactgattactgtctgtatcttccatgagaattaagctctatgaaggcagggatcatgtctgttttgcttatcaatgtgccaccaggatctaatccttaacacatagtaggggctcaaaacattttattgactgaataaatgaataagtaaatgattcatctattatctggcttgggtaagtaaatataatgctattggatattttggtccattgaattgataagacttttcagtaaaattgctttttagggtagtatcttcatgtccttgagaaagttgcttgtctctctttggacgaactaaaggcttaaagggtagactaaagacttcacttggggtaaaagtgaattgcacttactgtgtggggtgccttggagaaatcaactttcttacagagtcagcaaatgaagcctgtattgtagcttactcaactaaatcatctcttatctaaacttgccctttgggatcacatataatgataagttccaactgttaccctctgatttccaagtaaccagtatatttacttacctgacaaaggcctaaacttgagttatcaaaatagcgaactggatgaggtgatggtaaagacttgatcggctatcaaaaaaacaagattttggtgattcctttggcacaggatcttgtaaatccgttccttgcattgagagggtgtaatttgtttctttttagaagctgttccagtcacttaggagactttggagaattctcacaagttacttgtttgtgagcctctcttttaagggtttttccttccaagttttgacctcattggaaagatgctgattattgcttaaatgtgggggagaaaagagagactgtaagacttcttgattcttaagatgtattcacatttatatttaaaattaaaaataaattgtgatgaaatatatataacataaaatgtacattttatcacatttacttttaatttcaacctcatgcttcctgttttgactattttcaaagttcagaaaacaaaatgatctatataaattgaataatatagtaagtttccatgatcatggagtcttgaaaagaaactctaagtacaacattaggttttcaaatgaatcaatgatataatccagagtggcttatcattgatgctttgccacaataatttgacaaattagtctcctggatagatgaatctttgattacctttcttactgtaaaataaatattacactgtgcttttctagttacaatgctgcttctacaggagatgccaccagcatttatccagttcctccggagagaaacctgggaagcaatctagagacctcactctcttttattttaagtcatccaagtctcttgatacactctcatccttctatcaaattcacttccttgtttttatccctattggggccaagctagtccatgctaaattactttttgtctgaactaccataaacacattctaaaatttgatccctctataatgctcagcagccaaagatgctatatgatctcatcaggccactagcttaaaaccctccagtgcagtaatcctgccattacatttaggataccactccatattcttcaaaatgaactataagggccatgtaatctgaatctagttacctctggcaccttgtcttgcactttactctgtctcatttctacattctggccacactggatgtctttcagtcccaccaattagttattcttcttaaccaaagcccgtgaacatgttcccctggcctggaaaacttatccttcttccctcatctagctaattcctactcatttttcatatctattctgatataggcataccttggagatattgcagtttgtttccagatcactgaaataaagtgaatcgcggaaatcttttgggttcccagtgtgatagtagaaagataagtgcaataaaacgaggtatgcctgtttgttggcttcctgatcaacaaccctccacccctaacacctagataacgttggatctctctctttcataatataaccctttataatgtcctttttgtttttgtttcttttttaatagcactcatggcagagttagtttttgtaaaattatttaacgcttttttttctactgtatcatagtagagtgcttggggaaagattctactcttccacgtggtagaagccgaataatttgttagatctgtttataaagtaaaagcctacaataatggacgtaaggagttcctctctaagtaaagcctcactggcttgggttatggacttgtggtgtatttcagctgccccctcaaaggtctttgtttctttcctatttctgccttggttaagaattggtcagttgatagacagcaaacattggaatagtgctaccatatctcattttttaaaaaagatacttattacctgagctctaaaaattactttccccataatactgaagtgttaccacctgcaaaaaatacgtgcatataccatgtccctacatatatgtatagccgtaagcataatatccgtatcatgtaagcagatcttaccttaacaattcattctttgttttattagctgttcattttgctgctttaacttagaaatttctttttctagccttattgttcacttttcaaaataagagcttttgtgttttgtacaatgccgctgccacctccacagttaagggtttatttgaaggctgaggatcagtatgttctgatatcactgtgggaggaaatatacaaataggtgataattttaattgtctccaaagttcaaaataaaggaaatactaccagtacaataagccattatagagacccaaacagctcaagtcttatttccctggaagtcaccttgacttctgccttctaccttactccctctgcttatttgaccaaccattaattctatgctctagaatccccctcaaccaattccactaacatatcctgatcctgatcaccaagctcttcaccctgactgcagcaatagcaatcctctccacttactgctgtcctttattgatctatttttctacatcagttttcccctgaagggcttgttacaacacactgcgtgtgtggcggggggtgaggtagggtgggagggccaccccgtcattcagtgcattatatgtattcaatacatttattaactaaatatatgttacaataatattaaagcacatattaaatattctacactattgtgtaaagagactgtgttttgtaaattgtaggcaaagttgcacaaaatgtgagatagtatgaagtggattaatccattaggtcactgggaattcacaaaagagggatagtgtgtgtgtgggggtgattcttgatgtctattttattttgaattcatctacactatgtacctgaaagcatctacaaatcaagaataaatatcctcaaccttctgaaacaaagaatcctcacttctattttacccctttaagttttctcggtaggtgctgtggttatcctgtaacagacactagggagtttaagctacaacaggtactaggtaacaccttaacacctttagcaccatctatttttgaaacaagtggactataatacaagcaaatatcatcttatgttttgcttagtatttggaatttcaatgtgtttttacccacaactttcggtttgatctttatgtacgtgtgtgtgcgtggcatgtatataaataagtgtatatgtatatacacttttttaaaaaagacacttattacagagctctaaaaattactttccccatgactgaagtgttactacctgcaaaaaatatgtgctataccatgtccatatatatgtgtgagcataactatatatatgtgtgcacatgcatataatgtgtatacacttatatgtatcctgtaacatataatatacagaattctatatattctgaaatatataagtattatatataatatatattgcatattgaaaattccaaatactaagcaaacataagatatttgcttgtactatatacttataagtgtatatatatatacacttatattaagtatatatatgtaagtatatacacatatatacatgtgcacgcacaaatatacacttcatatatatgtatatacttatatacttatacatacatatacttatatatacatatctatcatatatacttatatatactaagtatacttatgtatacatgtatatatacacatatacaatacatatatacacttataagtatatatgtgtatgtatgtatatatacttataaatgtaacatacttataagtatatataagtctgtatatatacttgtaagtatatataagtggataatacttataagtatatataagtctgcatatatacttgtaagtatatataagtgtatataatacttataagtatataagtgtatatatatacttataagtatataagtgtatatatatattataagtatataagtgtatatatatacttataagtatataagtgtatatatatacttaaagtatataagtgtatatatatacttataagtatataagtgtatatatatacttataagatataagtgtatatatatacttataagtatataagtgtatatatatacttataagtataaagtgtatatatatacttataagtatataagtgtacatatatacttataagtatataaggtatatatatacttataagtatataagtgtatatatatacttataagtatataagtgtaatatatacttataagtatataagtgtatatatatacttataagtatataagtgtatataaagtgtatatatatacttataagtatatgtgtatatatacttataagtatataagtgtaatatacttataagtatataagtgtatatatacttataagtatataagtgtatatatatattttaagtatatgtgtatatatacttataagtatatataagtgtatacatatatatgtaatattagaaaatccttcacagcagttctgtttattctcctgtaaaaaagtatgtatgagatataagtacatatactcgtatatatacttctatagacttataagtataatacttctaatatataagtatttactatatatacttatatattacttatatatattacttacatattactatatataatatataacttatatattacttatatatgttatacttatatatattataattatattatatataatatataacttatatataatatataatatataagtaatatatatttatattacttatatattactcatgtaagtaataaagaagtaatagatatattacttatatttatacacttatactatatatacttatatatttattatgtatacttatatatgtataatagtgtatatatacttataagtgtatatatacttataataagtatatatataagcatacaatatgcttataagttagaaggtcaggtgctaaccccacgatttcatatagccattgagactgcatcttagttcagtacttgttctactgcgtaaagctatctcaagtactgttcaagcttctttcttttcaaatggaacatgacagacagaatatgaataaaggtagtttgaggaatcatgtatattgagaaatttgaccaacagatctaaaaagtatctcagataaatttcaaagcctttgcaagtaaatattaacttggtatttttagtttcaagaacaaacagaatagtattatttttactgtacaccaattataacttattagatgcatacaattaaaatctacgaagactgtgtttcgttttattgggaagcataattccatgttgatatagtataagtcattcctttttgcctgaaggtatcttcactaataggtaaagatttgacaatacaaaagcagagttcgttttttcaagaatctataatggataagcatctaagattacaacaaacgatgtcacaagattctggaaatatggttccaataaattcatttaaaaatagattagtggccaacttctgtttctctcgactgtcacatactacataatattagtcttcaaagtctgttgtgtgttgagaagaaaatttcatctgaaaatatctgcattttctacttacctgaggtatcttgggcctgttgcttcttctgagattttctctcaatagccttataacttccttttgatattctacagtggctttgtagcactgattctaacaaaaacaataaaaatatgtaaaaagctcagcaactgatttttacaggagaataaacagaactgctgtgaaggattttctaacacatcacattgacatatgcctgtaagtggcagtagataagccctcgtgatacctctctggtgccatgtgccttatgcattaatgccatcaaactagaagcattctgcttgggtgcagggacagtccgattttctatattgagaaaccccagttcttttaaagcttctggaggcctaattcattgtatattgaaaaaattataattacctaattattttttaccatggggtcctagaaatatttgaaggtataggagcatgaaagagaaagtgcagctttatttctgtatggtcaggaaagcaaaccctgacgcagctctggtctaaggtgctacaaaggtcaaattctgatcactgttctccagtagaaaagacattttatgagttgttagtttacgcattaatcagtaacgataaattataagacttttgcctttcttaatgactatgaattatctgtatctgctgaccctattctttacttttctttctttttttttttgagacgaagtcttggtcttgtcccccaggctggagtgcaatggcgcatctcagctcactgcaacctctgcctcctgagctcaagcgattctcctgcctcagcctctgagtagctgggattacaggcacctgccaccacgcctggctaatttttgtacttttagtgagacggggtttcaccatgttggccagactggtctcaaattcctgacctcaggtgatctcctgcctcagcctcccaaagtgctgggatcacaggcgtgagccaccgtgcccggccctgtgaccctattctacaagtaaaattgtttttataattaagaatctaatagatctatgtttactgaaaccaatagactgcttagagagcatgaaaattccaatgctacttcctgggcaaataagagatcattaaatatttattcaagatttatataggaagaatgaaaagtgttaaaagcaggaagcatcctaacaaatcctctaaataaacctttccttattgattatgaatgcgagaccagagagaataaacagtgtaaggtgatgcattagtaagtgagaacatatttcttttttttttttttttgagatggagtctcactctgtcgcccaggctggagtgcagtggtgcgattcggctcactgcaagctccgcctcccgggttcacaccattctcctgcctcagcctcccagtagctgggactacaggcgcctgccaccatgccggctaatttttttggtatttttagtaaggcggggtttcaccgtgttagccaggatggtctctatctcctgacctcgtgatttgccgtgtagccctcccaaagtgctgggattgagaacgtatttctacttcagtttccttgacttctttaatgttcttttcattatgctataccacaaagaatttaggcatgctgttatgtatatgctacctataaataaatcaataaaaagaggatttgctcttgggccctagggaactataactaaaaggaaatataatcttcacacagaaacacagtaaggccaacaaatgaaattaaagaaccaacagaagccttagtaaaactgctaaatacacacacacacacacacacacacatcttaatgttcactttcaggcatacaaaagccacttaaaattgtttatattctgtatgataagaagtgttcaaagacacagcgtgttaattgatcagaattgtgtttagttttaaaaatttgcatatgtaatgagaccagtatatttaaaatctatggatgtgtacatttttaaaaaagagctgtaacaatattttcataaattatattttaaaaagttaactaatgaaaagtatagtagtttaggaagaaaatttaagctattaaaatcacattaaattaagacaaatacgtacccttttcaaattctttggcatttttcattttctctaggtctattttcacaagcttcatttgagatcttcaatttcttctttatatggcttagctcctaaagcaactttgtcctaaatttttttagagaaaataaaaataattattagaggcgcttcagtttctccagttgtaaagaaggttagctgtctttgctctaataaggacattttaaaatagcaaacaattccaaatatataaaaagcatcaattttaactgaataactagatattgatatgaagtctatttgaagctaaatgcaattagaaacatgattttttatttggagctatcataatatgcaattagaaacatgtttttatttcttaaaataaatattttttttctaattgaaaatacctacaaaatgaaaaagttggaaataatgaaaagggtggaaaaaggtaaatcagaaaatgaaacaaaaagatgttgagcagtgatgtaaacatcaaactagaactaaatttaagccacaaaacaaagcattactagtatattttgtactgaaacagttccatccagtgattcaaaacactatattttacagcacaggtttccagaaaaatggaatggaaaatactgggagttcctacatacccagtgtccccattcctttttccccatattaacatcatgcattagtatgctgcatttgttataagtgatgatattgatacattattattaaaatctataatttccatgacagtttatttgtattgtacatctgtgggttttgacaaatgtaaaatggcacatgtccatcattacagtatcatacagaaagtttcactgtcctaaaaaaccccgtgctttgcctattcatccctctcttctccattatcctggcaactgtttatttttttactgtctctgtagttttgtctttctaaaaatgtcataacttgaaatcatacagtatgtagcctttccagattggcttctttcactaaccaatgtgtttaaaagtccactcattttctttcctttttttttttttttttttttttaagacagagtttgctctgtcacctaggctggggtgcagtggtgcgatctcggctcactgcaaccttcgcccccgggttcaagcgattctcctgcctcagtcccctgagtagctgggattacaggtgcttccaccatgcctggctacttttttgtatttttagtaaagacagtgtttgccatgttggggggctggtcttgaaatcctgatctcaggtgatccgcccgcctcagcctcccaaagtgttggattacaggcatgagccactgcgcccagccctctcatttcttttaattgctgaatactatccactgtatgaatgtaccagtttatccatttacccactgaaagacagtcttagcaatttgaacacagctgctattaacatacacatgcagccctttgtgtgcacatatattctcagccatctgagtaaataccaaggaatacaactgctcaatcatacaagtatgcttagttttgtagaaactgcgaaaccatcttccaaaatggctgtaccattttgcatttccactagcaattatgagaattcttgttgctccacacaccagcatttggtggtgtcaatgttttggattttgctattctggtaggtttgtaatggtcgattattttaatttgtgattctctgatgacatatatatgaagcatctgttcatatggttatttgtcatctgggtcttttgccaattttaagatgattggttgtttcctattgttggttttaagagttctttgtatattttgtataacattcctcaccagatttatcttttatatacagtttctgccagtctgtggcttctcttgattctccgacagtgtcttttgtaaagcagaagtttaagtctcaataaaatccaacttaccagttttttctttatggattgcacttcttgtattatatcttaaaaaatcgccaaacccaaggtcactagaacttctcctatgtcatcttcttggagttttctagttttgcattttacatgtatgctatgatctattttgagttaatttttgtgaaaagtataagttctttgtctttttttgctttggatgttcagttgtctggcatcattagttgatcagactatccttttcccattgagaagctttgtttccatctctcccagaatagaaatgagagttcttaaaatagcttacagggccttatgatctggtcctctgctacttctcaccttattttctacctctatcctcttgcttatttgctctggatgcacaaactttcttgttgttttcagtttgctatttcctttgcctggaattttctccctggctacacagttcaccctatcacatccttcagatcatcttactggtgtgaattcctcaactcctgtatatacaatcatctctcttcccacacatgtccactttcacccaaaccatgtacccccttgtctggcttaattttttccatttcacttttcaccacttgagattaatatacctcttaatatatataacatatataaaaatataccttctatgttttacattttaattaatattctgtctccttcaactagaatgtaagttccttgatggcatggtctttgtttttcattggcctctagaacagtgagtgacacatagctggtgctcagcaaatatttgttaatgaataaaaactgtgatcaattatttgtaatattaaaaaattacaacattctaaaacttacagttgaatttttttagtttctagctataacaattgttgaaaaaacaaatttaatttttcttttgcctctctgctcatgtctcactgaatagaccagaatttttagaacaatgttaataatgaataaagcaggcattcttgacgtgttcctaattttaactggagagaaaagacctggagcagaacagcaaatttaaatatgccaatttggatcagactcgagtagaagaaattgggaagtggctggaactaaaacaagagggagctgtaagtagtgattaatgagtgtgtgtttgtctaatgacattcaagttgaaaaacatttcagttacggttcttccccccaaaacagtcagattcagcccatgggatatcaggtgggactcagtaacagaggcagtaagtaggaaaaaagaatttaaaaatttacttatctaatagtattatatattttgataagcaatttttgaaaatgaaaaaatatacactaaactataaacaacatgtatatcttaaaaattattcttcaacataataaaaataatattttatatgacaatatgctcctacatttcacttctaagttagctgcttctgcttgagtactgaacttcagaaacacataggtaacagtaagttgttgtgaagggaagaatagagcacaaggagatttgctgaattcaataggttaaacaaacaaacaaaaaacaacttttatttttatgtttaagttacctgaagtacttgaattgtctcttttgtttttcaaggcatttatttgattcatgaactttggcttgaagttttgctattatgtcattagcacctcaagttctttctgcatctttataatcttgctttccttatgcatagcactttcttagcttcatgcagtgaattttccagctctcgaattttctattagaaaaagcacacattcaaagctctatcatcaagacagaatcacagtatagaaatttgagacagagatgatcatattagatattgttaatttttcacagattgtattaacaatggatagaagagaggccaaacatcttcaatctacagacatgttatttccctcatttagatgatgatttttggattgaaaatgtaaaggtttatattataatctgtctgcaaattcttaaaacatgcagttaaaaacagcacatggttatgcgatttattagttagcatagtgctaagcatattaaataggcactcatatttacatgaacaccacttaaacaaaggacattggttaattgactctctaaagtaatatatattatctttccctttaattttattaattttttttttttgagatggaatcttgctctgttgccaggctggaatgcagtggcgcaatctcgactcactgcaacctccacctcctggattcaacgattgtcctgcctcagcctcccgagtagctgggactacaggtgtgtgccaccacgcctgctaatttttgtacttttagtagagacggggtttcaccacgttggccaggctggtattgattcctgacctcaggtgatctgcctgccttggcctcccaaagtgctgggattaaaggcagaaccaccatgcccacccttattaatcttaaatagaaaaacacaaatatgtggaaaaaattcaaagacatataatgaagagtaagtctccccatctcagacccccagttgaccctgaacgatgactactaaactttttcaggtgtatccttccagaaattttctatctataaccaaaatacatgaatatatagtttctaaaaatagtatacacacaatatactaaatatagttctgtttattttaaaacttgagaacatattttttccagatctttccattatcaacacatagattctcctattttttgttttcatggacatatagaatctcatttcataaaggtatcatataatcacatgtacacactcttttttgtttttggcaaaatgtctggatttttgggggcccattagaattcatttttgtttaatgaatgagataggaatccagccttacttttttccagatggtatcctgttgtatcaaaataatgcactaagcaaaccatcttttctttctttcttttttttttttttttgaggcagtgcctcactctgttgcctaggctggtgtgcagtggcatgatcaggctcactgcagtatcgatctcccaggctcaagtaatcctcccagctaagcctcccacaagctgagaccacaggtggatgtcactgcacctggataatatattaaaaaaacactttttttttgtagagacagggtctcactatgttgtccaagcttatcttaaactcctaggctcaataatcctccaaccttggcctcccaaagtactgggattacagactcacacacctggccaataaaccatttttttttcccactgaattgaatgttactgttatcatacacctgtactaaatctcatacttaattgggtatatttctgaaccctctattctgttccactgctctacttgtcatttttgcatcaaacttgtctaatgatagtagcatgtattttattatctgctagactatttctttggtcattgaagattgaccaactttccttttgcttctttaaattactatattgtagatggatttcatctttcctctattttatctgtagcagctgactgaggtctgtaatgcctacaaatcaaaacactgtatactagtgatctagttctcattaagctggtggttgatgtttattataagtatttattttggtaaaaatgataaattgtaatttactattgggttccctcaagtcgttttgtgtgctaacaaaatacaacattttacgcatgttgttagattcccgagaagggtagttaataaggtaatttggttatcaaataatgtactggttcttagatacaagtaacctgcgtaacaatcttgttatattttttaacctcttatatttttattgtgattataaattaagcaatattaaatacgctgatgataatgagaaaagctgaattgctatttctctccagctaatatttgttctgcatacggacatagatcacagttcaacagaaagtcacataattggaaaacttttgtggtaattgtacgttaactggtagtaacttaaactatagtttatgaagtaataatcaaatgaagctacaatttatgttttataataatatcttacataatgtctagtttataattagtttagttgaacgatagccatagtagaactactagtaaaaatcaagccctcacttacaaaaataaatgtgttcatgttcagtaataagtaaatactataattttgctcaaactctgtgatgaagctgcaaactgaagaacattttataagaaattatatacctctgtgttaactgtgtagctcttgatgtaacatgaggattcttattgtcttgtgtggtaggattacctgggcaccagatgccaaggaagtcttcaatgtttggtagtttttaaatagtttttctttttctctttcagtgatttcaggtcctgttcccactctttggatatggtagcacttcttcctcaaactctgttgattcattcattatggcctattgaacagtaaaataccattatagtctaaaacgatttatagtagtccccacttacctgcaattttattttccatggtttcagtaccctcagtcaaaagtggtctgaaaatattaaatgggaaattccagaaataaacaattccaggttttgaattgcacatcattctgagtagcacagtgaaattttgagtcatcctgctcgtcctgcctgggatgtaaatcatcctcttgtccagcatacactacttgttcacttgataccaccctgattatccgattgctgctgtattgcagtacttgtgtccaagtaacccttatttaattaataatggccccaaagcacaagagtagtaatgctggcaatttagatatgccacctgaagctgtcaagtgcttcttgtaagtgagaaggtaaaagttctcaacttaataagaaaaaaatcatatattgaggttgctaagatctatggttagaatgaatcttttatccgtggaatgtgaagaagggaagagaaatttgtgctgtttttgctgtagcacttcagcctacaataggtgtgataagtgcttagttaagctagaaaaggcattaaatttgtggtagaagacaagaaagaaatgtgttccagttgatgacaatgtgttgtaccagcaagcattgagcatctaggaaacttcagcaagggatcccctgaaaaaagtgacaccaagccctttactgcaagtaagattattcatggattcaggaatacagaaggtcaatagtagtctaagactatatcaaaatgtctggtcattcatattccttcatcttatcaggtaggcactgtatcatctcacatcataagaaggagagtgcagtaaaataagatattttgagagagtccacattcatataacttttactatgtatattgttaaaattgttctattttattagctgttgttactaatctcttactgtgtctatttataaattaaactttatcataggtatggatgtatagaaaaaacagaatacatagggttggtaccatccatggcatcccctcgggggtggggggtcttgatatacatattttaaaaaacttcaaaaaaccctagaattctaggacagtgtatatgctgaagttcattatttagaaattctaaaacagtactttaaaagaatgtgaacattctttgtagtttgcatcagtttctgaatttcagatgttggatgtggatgatgacaataaaatgaataatgactagagaggattctattgatctgcaagatgataatctcactttattagatttgtactaacatatgaagagaactgaagaattatccaggttaaaatcattatatatgctatggctgataatgaaacattaatgatatctaatagcagagcacagctagaaacttaacaattatctattgtcctgcttcatacaaacctcaatgttaatagggaaaataactcactgattgttggtaattaatctgaatacttgtatttctgtacagggaataacaatactcttttatattgaaggctaactaactctgaattattgatatcttttttacttcctaattcctgcagattgtactttctgctctcatcagaatgccccattagtctcatccctaacttctttgtggctttgtggtcattctaccaggcttgtggtcattctaccagatcttaaattcgtcgtgttcctgacaccctggacactccttgctctggactatgcacctcacaccataccaagttattaatgcctactcttatgtgctggagaagccacatatacatgctgatccacatagtagaaatccctgctttctaatcacaactggtctccagtattacaagaaaaacaacaaattacaaatagacatgaccttatccaaacatggttttgtgcctttctctactgattgtggacttctttgttttttcttgaaatagccaatgctatttggctagctctgactaatcaataaacaggatgaactttccaagcgaaaacttttaaaaaaggcattgttccttatttcaacaagattccaatatgatttgcagatgaaattaattgtcagaaaagaactatccaaacatatgaactataaaatgtattttggaaactatatattaatctagctaccattgctccaatttaatataaataagcaatcttttgaatattactgttttaccaatgaaacagagaagggattacttctgaaagcagaatgaatactgcaattcttttgtacccaccaaataccaatcactgaaatgtaaaacaagttaacaaactggtcttagcaatgttggtccttatgactcagtacatttgggctgatcaccttgggaacaatgattaaaaaaaaatcaaaattttggaatttctagtttagcattttaggtgtttagaagttgccgtccaggacgggtgcagtggctcacacctgtaatcccagcactctggcagtccgaggcggcagatcatgaggtcaagagattgagatcatcctggccaacaggtgaaaccccgtctctctaaaaaaaatacaaaaattagctgggagtggtggcacgtgcctgtagtcccagttactgggaggctgaggcaagagaatcgcttgaacccaggaggcggaggttgcagtgagccgagttgagccactgcacactccagcctgggtgacagagtgagactccatctcaaaaaaaaaaaaaaaaaaaaggagttacctaacaaggaaaaagcaaaacaaatgaaaaaaatccacaacctgcttagatccatcagagaagtgaggtcgcagggcaaagggatgctccccaaactggaaggcagagaggcagatacagagaattacaacttagagcagaaaccctttgcaggaaccattatggggtaggaaaacctgaactgcaatgatgaattattggagctcagtgtggcaacttgagagttaaaaacttcggagacctagtcatacagtggccgccacacttttgtattttacttcaggagctctaccaagtcatcacagttaatattggagaaatccctttgtgagtctgcaggagaggagaaaaggaaccattttaaaacaaaacacagcattttttttttcttaaggctgacctcagcagaaactatttcaccagagcctaacatgctggggttttgtcagggcctatatatctggaggagggggaaatactaagtttcagctggctcttgccttccatgtgaagcagggaaatatactccgcctgccacccaccacacacaccttgccactacattactaaagcctatttgctacagttacttttacccagtaaatcatgcctgcttttcagcaaaaaaaatacaagacatactagagggcaaaaaacacagtttgaagagactgaataagcatcagaacccaggcagaaatgccaggaacatgagagttatcagaccagaaatttaaaaaaaatggattatatgctaggggccttagtggaaaaagcagacgacttgcaagaacaaataaacaatgtagaagaaacatagaaattttgagcaaaaaaataaagaaatgctagagatcaaaaatgctctaagagaaacgaagaatgcccttgaagagttcattagcagactggctgaagaaagaaaccaacttggaaatatgacaatggaaacttccaaaactgaaaagcaaagagtaaaaagactaaaaaatccctaaacaacatcctagaagtgtgcagtaattataaaaggtgtaatgtataataatgggaataccagaaggtgaacagaaaaagaaagagcaggaatatttgaagtaatacgactaagaatttccacagattaacaacgtacaccaaaccaggaatccagaaaactcatatgctaaacgggacaaatataaaaaaaaaaaaaaaccaaaaaaacccccgaaaaaaaaccccaaaaacaaaaaacaacatctaagcatatcatattcaaacttcagaaaaatcaaaggaaaaaaaaatctttgaagaagctagaagggaaaaaacaccatacctataggggagtgaaataagaattacatctgacttctctgaagctattcaagctagaagacagtggagtgaaaaacatactaacctataattctattccatgtaaaattattcttcaaaagtaaagtagaaataagactttctgagacaaacaaaaatggagggaatttgctgtcagtagactggtcttgcagaaatattaaaaagaagttcttcagaggaaaggaaaatgatatagccagaaactcagattacataaagaaaggaagagcacaagagaaggaataagtgaaggtaaaacaaaaacttatttcttattcttaactgagctaacttatgtatgcttatgaataagtgaaatgaataacggaatgatacaatggatgggagggagaaattataaatattttgttattataaggtacttatttatctgtgaagtggaaagtgttatttgaaattgggctcagattagttgtaaatggataattgcaaactctagagcaaccactaaaacaagatagaagtgtagttgtatgctaagcaggaaaatggaatcataaaataatttaaatcataaaaggcagaaaaaatgtggaagacaaaataggtacaaagaataagggcaaaaaatagaaaacagaaacaatatggtagatattaatcaattatatcaataatcaccttaaacgtcaatggtctaaatacaccaattaaaagaccgctgtcaaagcagatcaaaaaataagagctgactgtatgttgtctacaagaaacccatctcaatataaggacacatagattagaaagtaaagggatggagaaagatacaccatgttaaactagtcaaaagagatgaagtagtgatattaatttcacacatagcagagttcagagcaagaaaactatcagggataaagggacattacgtagtgataaagacatcaataccccaagaagcataacaatttttattttgcatgcacctaacaaaaacgcattaaaatacttgaggcaaaactgataaaactacaaggagaaatagatcaatttattatagttggagacttcaacgccttctatcagaagtgaacagatccaccaggcagaaaaatcaggaaggacatggttgaatttacagtaccatctatcaactggatgcaattgacatctattgactacttcatccaacaacacatattatatattcttctcaaactcacattgaatatttgtgaagacagaccacattctgaccaatcataccattctgctctcagaccacaatggaattaaactagaaatcaaaaacagtgaaaaatccctggataattagagatttaaaaaatacatttctaaataacatacgggtccaggagaaataaagagaaattaaaatgtattttgaactcaatgaaaatgaaaatatgactatcagtatctgtgggatgcagtaaaagcagtgtttagaggaaaatttatagcattgaaaccagtattagaaaagaggaaagacctaaaaaccaataaatgaggctttaaccttaggaactaaaagtgaagagcaaattaaatccaaagtaagcagaagaaataataaaagtagaaacaatgaaattgaaacaaaatcaatagagaaaataaatatcctaaaaactggttctttgaaagatcaataaagttaataaacctctagctaggcaaactaagaaaaagaaaaagaatacaattactaatatcagaaatggatgacaggacatcactatagagcccatggacattaaaaatattaggaacaactcaattattacaacccacaattatgaacaacccacaaatttgatatttaaatgaaatggaccaattctttgaaagacacaatctaccaatacacaagaaaggcattcgattaggcctatatctatcaaagaaatggagtcagtaattaaaaactttccaaaacgaaagcaccaggtccagatgagttcaatggtgaactctaccaaatatttaagaaatttaggaaaaaactatacccattctctacaacctacaatctcttctagaagatagaaacggaactcattctatgatgtcagcattattctaatactaaaaccagatgatgacattatacaagaaactacagaccagtatctcccataaaaagagatgtaaaagctgggtgcggtggttcaccctgtaatcccagtactttgggaggccgaggtgggtggatcacgaggtcaggagttcgaaccagcctgaccaacatggtgaaacccgtctctactaaaaatacaaaaattagccaggctggtggtgcgtgtgtgtaatcccagctgaggcaggagaagtgcttgaacctgggaggcaaggttgccgtgtgccgagattgtgccattacactccagcctgggagacagagtgagactcatctcaaaaaataaaataaaataaaataaaaaacaaagatgtaaaaaaagatgtgaaatctcaacaaaatattaggaagtcaaatccaatcacgtgtaaaaatgattatacatgaccaatgggatttatcccaggtatgcaaggctggtttaacattcaaaaatcaattaatgttcatcacataggctaaagaagaaaaatcacatgatcatatcaatggatgcagaaaaaattttcaaaatccaatacccattcataatttaaaactctcagcaatagagatgaacctctacacttgataaagaatgtctacaaaaaactacagctaacatcatagttaatcatgaggaactgaagtcttcctgctgtgatcagaaacaaggcaaggatgtcccctctcacctctagttttaacactgtactggaagtccaaattaacgccataagacaagtaaagaaaatacaaggtaccaaatttgtaaagaagaaataaaacaaaactctctttgtttacacatgacatgatcatcacatagaaaatctgaaggcatcaacaaaaatactcctggaactaaataagcaactatcgaaagttgcaggataaaaagtcaatatacgaaagttaatagctttcctgtataccagcaattacaagtgtaatttgaaattaaaaatacattaccatttatactagcaccccccaaaataaatacataggcaaatctaacaaatatgtacaagatctatatgagaaaaactaccaaaccttataaaaaaataaaagaatcaaataaatggagaaatattccatattcatggataaaagacacgatattgtcaagatgtcagttctttccatctataaattagaagcaatcccaacaaaccataggaagttattctgtgaatagggacaaactaattccaaagtttatatggagagcaaaggacccagaataaccaacacaatgctgaagaacgacgtcagagaactgatgttactgacttccagatttactataaaaatcagcagtttccagatttgctataaatgaaagaacaatagatcaatggaatagaatagagagctcagaaatagatcccacatagtcaaatgatcttgacaaaggagcaaagacaatataattgtgctgaatctggacttctacaagcgaaaaaaaaaaaaaaagaccttaagaacttcagaaaaattaactcaagatggatcattggtttaatgtaaaacaaaaactatggaagacagcataggagaaaatctagatgatcttgggtttgggatattttagatacaaactcaaaggcataatctatgaaagaaataattgataagctagattttttttaacattaaaaatctgcactctgaaacacaatgccaagggagtgagaagacagccacagattggtagaatatatttccaagacacatctgataaaagaccaatattcaaagatacaaacaattcttaaaccttaacaatgagaaaacaaataacctgactaaaataagggaacagacctgaacagacacttcaccagaaaagatacacagatgacaaataactataaaaatgttcaacatcatatgttattagagaattgcaaactgaatgagataccactagaatggcaaatactacacttactacacttactagaatggtcaaaatcccaaactgacaacaccaatgctgatgagaatgtggagcaacaggaattttattcattgctggtgggagtgcaaaatgtaccgcccctttggaagactgtctggcagtttattacaaaactaaacaaacttttactgatgatccagaaattgcattccttgatatttactcaagagagttgaaaatgtatgtccaccaaaaagatacatatgtatgtttatagcagctgaattcataattgccaaaacatacaagcaccaaaatatcctttggtaggtaagtagataaacaggtacatacacacaatggaatatattcagcattaaaaagaaataagctatgaaaccatgaaaagacatggacaaaacgtaaaaaatattactaagtgaaagttgtcaacctgaaaaggctatatactgtatgattccaacaatgacattctggaaaaggggctactatggagacagtaaaaagattaacagttgccagggttaggaaggtgaagtgatgaatacaggtggaacccagggaatttttatggcaggatagtaaattactctgtatgatactgtaatgatggatacatgtcattttacaattgtaactcatgaatgtactatgccaagtgtgaaccctaatgtaagctacggactctcttgggtgataatatgtatcaatgtaggttcatcgattgtgccaaatgtgccaccctgatgtgggctgttgaaggggagattgtgtttgtggagatggggtataagagaactctctgtactttctgctcaatttgctgtgaacctaaaactgctcttaaaaaaaaaagtttattaaagcacatgaggccctctaaagtagctggccaggcttgtctatgactttaccacagttgctgcccatagcttgaacagactcatgtcttacgatctctaaggctactcgtggaaaaggctcagttcttacagagcagtgagaaggagaagaaaaagaggacaatagtaagaggattcaagatttcacaagtgaaactaaatattatacaacaagatttcgttaccttgatcagtatgaattgataaggaagataatacattagaggaagaacacgttttatcaaatcaatttttttaaagcatatacaaaaaagaaaatatacataagttgcccttttaagaatgaggtaggacaattaaagcaaacagaacaaaaaagtagtacagcaaaaagtaatacttacaattattctgttattaaagaagttttcacttgacaaatcctatcattttctttctggatgccatttttaagcttttctatatcaaacgagtatttaaccactcttccaaaaactgtgtcatttctttcctattacttagtactgttgaaattcagtctttatgctagggaactcactttctgagaaatctttgagaatttctgtgtgaaaaataagcgtcaaattgtttaaacattaggaaagttttgatccaaatatttatttatatatatatatatatatatataaaataaaaagagggcaatacctagtggactctgcttttcttccttttaatatcatttcttaatattttaaagtaaactaagaaatataatttaagttaaaactttattctagttatttgcataatataattttggcagtatacatgatgtacagattgtacctattagaattaaagcttgtcaaaatgacaaatttgtgactaattgctcaatacctgaagtgcatcttaatttttattttttgagatggtctcactatgttgcccagctgatcttgaacccctggagtcaagtgatcctcctgcctgagcctcttaagtagctggattacaggcatgccactggggctggcttcatgaagtgcttctaaatgtagcttttcagtaatatagcagaccttacatacatgttgggaattggatgccagcctcacatagatgaatgcagtaacacattccatgtggagttgttgtaataaagcggtttctgactcccagcatagactaagttttcctgtatctattgaggtctgaagagaggctagtccattatttgccagtcttatgtctggccaggtatcactctgcaacgtatttttaatttctggtaaatgaaaatagcttaagcacatgaaaaagtacctttctacttgataaaaaggcttaaaatctaactaaatcctttaaaataaattatacctcaatatgtagatccatattctggttcaatttgagatccctaattctctggatggtacatcacaatcttgttgaaggtgctgtattttaattagcaattcttttgcttttccacttcatcaataaaatccatttcaaatttattgatggattcatgttgtcttcttttatttttgtaacatagcttaacacatacttgcagaaaaaaattaaacaaatggtaaatgaaaattttgtcacatgtagagaaagttttcatccttgagactatgaggtagatgacatctcttatttacctatatcctctcacaagtgaggaaaagggaaagagcttctcctatccccagtttttcctcttagtatcttaggagaataactaactcccagacctataatccttatttctgacttcttaccagatatacttcttggatgtcttacaagtacttcaaattaacatgtttaaaacgtaacatgatccctttctctacaagtcctcctttttctattgcccgtttttggctaattacattaccaatcacccaggtttcccagttaaactcatgagactcatttcaacatcctctcctgccaacgctgattgggtaaccaaaaagatgaagttacatgcccaagacttccttgtcggccggacatggtggctcatgcctgtaatcccagcactttgggagctgacgtgggcagatcacaaggtcaggagttcgagaccatcctggctaacacagtgaaccctgtctctactaaaaatacaaaaaattagctgggcgtggtggcaggcgcctgtagtccagctacttggaggctgtggcaggagaatggcgtgaacccgggaggcggagcttgcagtagccgagatcatcacaccactgcactccagcctgggcaacagagcaagactccgtctcaaaaaaaaaaaaaaaaaaaaaaagacttccttgtcaagcatatttagatatttggcttcagagacaataatttcaatgccaaatgtctcatggacttcatgaataattctagatgtctgttaccaggatttgtggaagaattaccagggcccgaagggcaatctacccaggtagggcaataccagcttacttattcctcaacttccaccattccttaacctcttataatctggtctctccttaactacccagttgaaactgttctctgacaatgatcactaatgagttctattatcccacattgagagaatatcttcagtccatattctgactctctgaagtatttgccactcatacttcatctttgacatactcttctccactgatttgggtagcagtacttttgctagtttcctcctgtatctttgacttttccaaccttgaacccatgtgttgctcccttttctgctactcctcttagacatttatcttttccagagttctgtttttatcccaaggctcttagtcttcatatgctttctggatgatcttacaaatgtattatctatcacctatatgctgatcagtctcaatgttagttcttatttttctcctgccaaacctcaaactcaaatctaaatgtctacttgtttctcttcttggatgttccatcataggtatttcagcccccaaacatctcaaattaaacatctcctgcctcatctaccttgtttctctttcttttttatttttgaatctcagttaatgtaccactatcgacaaacctgactaagcccaaatccaagaactccatctaaacttctctccttatgtccactatcaattatttcgacctactattttaagctgctaaatatttctttaactcgtttgtcctctccagccctgtgaaaccctccctagtagtacagtcacatataatattcatctggaccactgtaactgcctcttattgctttctgctactaggcttatctccctcaactcatttcttctgtattctttagtttagtacctaagtggtaatcagatcctgttaccacaccacttaaaacaatagtctaatgattccccatctacaaaaagaactccaagctttgtattgagtctggcttctactacagtttcatcttctgtaattttatttagtacgtcatatacttgcatacacttctatcattgcacttaatacttgtttatatgtctgtctcaccccagatatgagatctttgagatgttaactcacatctgcctcctgaacatcctgacataatgtctggcccacaggcagagttcaggtgttgctgatatcctacatattactatgctcagacccaataatctttaatttggtagtaagaatactaaatagcaaatatgccggcacctgaagcagacttaaatacattgatgtttataactgaaatatttaaaaggatattactaaaaaagatgtaccttcagtttcttcatgattctgtggaattccatggagcatctctggtttgcagtaaaagtttttcaatgtgtttggtttgtaaatagggaagtgagaggtttgctttaactctcatgaaagctctttttggaattcaatttccttctccaagtcaagagacaatctattcaagcctcataatgatcatccatctctgagtatctcttcaaaagctcctaaaggaaatgagaatcactcaatttataacaattcattctaatatcacaataagtagttacaactctagaattgaacaaaacttatgctttaacattttctgtaggagagaaataaagacctttgtgtctaaaacaaaaggaaactcttgttgtcattttggataacagaaataatagataattattatggcatttaaaaaatttaagcaaatataacaaagaaagccaggaccaaccattcttaacatttgatgcattttcttttagttttttgaatatccatgatatgaatcaacattgacaaagtctatgagaaatttgagtaaattcaattaagtatgtattgtagttcatggttgagtgctggttatgtttatagtaggcagtctgagttagcagataaaacaagtgattaagaatcaaaccactatttgtcagcttggtacagatacttcacacaatcctactatctgcctacaatctgtttctaaccctttatcagaggtagagttcaggttccagctctgccacttcttgactggggagtcactgagccattttcacaacaacaggaagactacaataattaccacaaagttttctgggtcaagtaaaatatatgatctatacctatatacctatgtaatctataaaacagacacatcatttaacttgaaggagacaaaattatgtttataaacatgtttctatacccaagttttaactaagtcagatacaagtctgacttagtttaaaattctgattctaacaatttactagcgtgtaaccttgggcaactgctaaacttcctttctgaggaaggcagtttccttgtttatgatggagcaataaagcctatatcatgaggtaaagcacccagtatggtacctggcatacagagacatgcaataaatctggacccatagactcaagtgacttgaggctatgcaggtgacacctggtcagagcacaggtagagaaacatgtaaaattcaagttactgtaatcatgtagtagtaacatgtttagttcaggctgctaaacaataaaacaagggcgttctcacaagaatgagcctttatttttaataatttaagaaaagctagatgttaatcaatctggaatgttggagagggattcctgtttttggttttaggatgaatcaactacggtatacagcagcatattgaacacgacttatgtcaggaatgtgctaaatgatgtagtcataaacaaaacaaaaatgtccttaggatcttgcattccaacaggtgtgactgtaaatcctgttggctttcccttcaatgtatatcagaatctcaacacttctcactacctctattgctccctctctgggccaggccaggatgactctgcctgggtgattgaaatcagtctttataatggtcttcctgcttccactctattttaatataacaattaagagtcatccctttaaaatgttaagtcagattatgtttctcttgcgtaaaaattccccaatggatctccacctcacttaataaaactcagtcttttttcatgtccacagcttgcctcttccctgctaactctctgatctcattcattagcagcttgccctctttcgatattccttgaaccaccacagagtcttctgcctcaggaactttgtactcgctgttcctttgcctataatggtcttttcagacatctgtatggcctgaccctttacctcgttcaggttttgctcaagtatcacttttctggtgaggacttaaattcacaagctcccattgttgttttgtatgtgtgtatatatgcattatacccacacacctgtactagattacaatgtttagaaaatactgagcactatctatttattccagaggttccttcaatcccacttcaggtttcggtagcctttggaagacaaccaataatcatttgtagttttaacagggggtacttacttttatctagagcacttttctctcaggctttccgtaaggtgctgttgtccatcacttagtaacctttttcaggttttacttggtggttctgtcggtcctgctttggtaaaaagaaaataaacaggcttttgtcatgactatattcacatataatgtctaatcgcacacttctaaattacatgaatttcaataatggaattaaatattatacttgtcactcaaaagcaatgttaaaatgatcaaaaatgaataatagtatcagtaagttttatagggagtgaccttaactcattggtaaaaagtagaaaaatcatctaatttttggagacaggatttgtttttcatagctacaaattaggtttagggccaggcatggtagctcacgcctgtaatcctagcactttaggagatcgaggcagaggatcacttgagctcaggagctcaaaaccagcctcagcaacatagtgagaccctgtcttataaaaataaataaataaataaataaacaaccaggaaaacaaataaattagattttaattctgattcctactcttccaaatctctgcattattcacttgtagttttaacagtggcactgcttttatcctaatgcactttattggcgccaaccaaatatactggcaaaaccacctgtctgtctatggtgtttcaaaccctagtcatatattcttcccagcaccttggaaaagttcaatcctgtgtacattttgcatttctgattaaaaagtataaagtgaaacaaaaacattttccccacttatcttgttcactacagtacctagaagaatatttgatgaatgaattaaatctcctataaatttagttcaggcccacataaagaaatatgagaataaaaaagatttttacagatttaataaacttgtctgaactctgttactttcaaaaagaggatttaattagatattttagatatatgattctgaatatctataaatagtcataccagaggaacttaatttttatattttcttcccttttttccttttaacttcaccaataagagcccaactctagaactccagcatgataggtagagaaatgggaatatttgctctcttacaaatctaatccttcaaatatttctcatttagaataatgctatctcttgattaaaaaaaactttaaaatgttatattaagggaaaagactgctttaacacagtttataaaaataaagaattaaatgttattttctgaaaatattttgcttcttttaaaactgttttctattgtgtaaaaattagagtaaccatttcccactgtctttactgttcataggaatttccagagaaagaaataaaaacattgtaattcttttcaaaaagcttaattcttattaatagttactacacaaaggaagactctgaactcactctagctacatttcccttaaggttgctatgaattggtccctttccattttgagagattcttttatccccttagctcatctctttctttagctacaattcttatttcttcaaggctttcatgaagttcttagtcaactggaagttatccattctcacactttgcatagataagttttgggcctcaattgcttcttcaactgttccatttcattaatttttttatgactcatattgacatcttcttcactctaagcagttgaagttcttttttctgaagttcttggatcttgagataattgtaaacaagttagaatgtaagcagtttcttcaaggaaggcaaatagtgtctacttgtgttctattgcacatatctatctacatatctgtatctatatctttttaattccacaaataattttggcacagttacttccaaaagaagaacaaaacaacacatacctttttctgtaattcatctttgatttatctaaatccttttgaatgtctgaaatttgaattgtcttttctgaaattttttcctaagtttatcaacagtttctttgtgttcttttgatagcatacgagcagtttttagttctgttgtatttccagatcctttatggttagaagaaatcaagaaatgtaatgatataaaggacgttacctttacttaatgattgagtttaaacaaaatcttaaaaattatacactcacagtaaaaacaaccattatacaacctcctaaattagaagagtaaagtaaaattttctgctggagcctcacccatagccttctcctttcataccacttggacatctttctaaatcaatatcaaaaaagaataccccattcttatgcttagttttccattatacagatagtgccttattattgtggacacttagattatttctaggttttagtcaccagacacaacgctgcagtgaacacttatttttgcccaaatatgtgaatataatggtagggtaaagagagaacacaactcactctgctttggtttcttgcaggctttccttgagttggtctctctccagtttgagtgtctcctcactcttcttagattatctctttctttcattacagatttcatttcttcaaggttttcatgagtttctgagccaaatttaaattctctatttctaatttactcagagttaagctttggtctttatttgtttctttagttgctccatttcagacacttttttctgtgtctcattgacatcttttttaacgtaataagttgatgttcatttgccttaagttcttgaatcttaagataatctaaaataatatgttaggtggctttttagggacagataaataatagtttctaaattgattagacaactgtctacccatgttactctcactgatatcctgcacaattccacacagaatttactttcttttgaggtataatatatataaagcatgctcatcttcaatgtataacttaattttcttgacacaggtgtaaatctatgaaactacaacccagattaaaacagagaatatttcagcacttcataaagtttctgtgtgctccttcctagagacagccactattctgacctttacatcctggttcagttttgcctgcttttgaacctatatatcacaatgtatgtatccatttcctgctgatagacatttgagttttcagttttttgttattttgaataaggctgctataaaattcttgtgtctttttatagaagtatgtacgtactcttttctcttatgtacatacccaaaagtggaaatgttgggcctcaggcaggctacatccagcattagtaaatactgccaaggtttttccagtgtggttgaaccattttatatccccaacaattttaggcacaaacaaattagtatccaatcaaacaatccccccataaaaataccttttcttgtaatttagcatttgaatttctaaatctttttgcatatttgatagtttatctgtcttctcagaaacaattcctctgagttgtcaatagtttcctgctgctctttcagatgcatgtgagcaattcttagttcctcttgattttcagatcctttaccattagagaaattttaaaaacagtgacatatcttaatattagttttaaaaaataaagtgatatattttcttagtaaaaataataacactgttactctatattttgctgttgtttttaaggtacaggctttctcttccctgtcctcctctcttcacactctcttctgctttccagaggcaaacacattacacatatattactttttttaagtgttgcatatatttcgatatattgttcatatttactgtttccttctgaggaacatttagattgtttcaatttttaattaaaatcactacaataaataacctgtggcatatgtatacgttgtgtttgttatacacacacactcctttaacagtatatatgtaggctaaagtccgtaaggaaaatgctattgcagacttgaacttttcaagaacagtaccaaattatctgcttaaaaggctgtatcattcattcttgccaacagtagtacttggttcaaagaagggttcattgctgtaagaacacatacattgaattgccagggagaggaatgagcttactttagcttctatttctctaaggcctccctaagttggtcttgctccattttaaagatttcctctactcctcttaggccatcatttccttagtaacaaatcttacatcctgaaggttttcatgaagcttctgagtcaatcttaattctgcgtttctacactttccagagttacattccaggcctctaactgcttctttaactgactgtttgatacatagtttccctaagatcattttttactttaagaagttgaggctgggccggcggctcatgcctgtaatcccagcactttgggaggccgaggcgggtggatcatgaggtaggagatcgagaccaccctggtcaacacggtgaaacctcctctctactaaaaatacaaaattagctgggtgtgatgacatgcatctgtaatcctagttacttgggagacttgaggcagagaatcgcttgaacccgggaggcagacattgcagtgagccgagatcatgccgttgcactcaggcgacagagcgagactctgtctcaaaaaaaaaaaaaaaaaaaaaaaagaagttgatttctttctcctgaagttcttggatcttgagataatcatacaataagttaggattatcagagatataaaaagatcaatgatagtttctaaattgagtaggcaagtaagtcttcacttgcttcaattttagggtaattcatatcttgtttcattacacaaaaagtttgattcaaactctagtaactgagataacttaaaaataaaatacctgtgcttttaaggcatcatttgagtgtttaagtccttttgcatatttgatatttcatttgttttctctgaaacaatccctcttagttatcaatagtttcttggtgctccttcagatgcatgtgaacaatttttagctcctcttgttttctaggtcctttatcaatagaaaaataaaaataatacattgagagtagtaccatccactgctatagaaaggtatagggcaggaggtaaaaatcttccaccctcttctgaggcctcctgttctcaccctctaagctacttttagatgtcaatacattctagatacactattcctgaattaccctgttccctaacaggacacttcacccttcaaatcagcactatagctctaccacatttttatttgtggcatagaattccatgacgtgaatgtgctgcacttatttaaccagtccttaccaatggatggttagaattttccctgtttttgtttgtgttatttcattattgcaactgttgcaaagaatatcctacaaatatctttatacagttgtgcaaatgtgtggaggatagtacaactggacttgtggatcaacgaataaacctttggaaaaatttggaaggtatttccaatataccctcaccaactttcctcaatattggaccaattttatcttattttattatttttattttattttactttttgagatggagtcttgctctgtcgcccaggctggagtgcagtgggcgatcttggctcactgcaacctccgcctcctgggttcacgccattctcctgtctcagctcccaagtagctgggactacaggcgcccaccaccacgcctgcctaattttttatgttttagtagagatggcgtttcaccatgttagccaggatggtcttgatctcctgacctcgtgattgcccgccctggcctcccaaagtgctgggattaccggctcgagccaccgcgcccggcctgaccaattttatactcccaccaaccctatggcagatttttctcttaggactcaatgtcaagttactagaggtgtagagagatggtaactcactctagttatagtttctctaaggttttcttgagctggtctctctctactttgagagtctcctccacactcctaaggtcatctctttttttgttacagatctcatttcttcaaggttttcatgtagtatctgagtcaaccttatatctccgtttctatgttttccaggtttaacttctgggtctcaaattgctccttcaagtgtttatttcacacattttctcctgagtctcattgacagctgtcatcttaagaaactgatatttttttcttgagattctttcatctgagaaaattataaagtaagttacaacataggcagaattttttaggaaaaggaagaactgttcctaaaataaggcaatcatttttacattgtaatcaatgtatgtagtactttctttcataagggatatgagtaacaataattagatgtcattttcaatttaacaagtcccactttttcctgtaattcaccatcagaatttcctaaatcccaataatatttgctacttgagctgtcttctctgaaatattctgtctactaacagtttactggtctcagttgaatataagcagtttttgattcctcttttatttccggtccctttatgattagggaaaattaataaaacttaacatgaacaccgtcattatcaccttaacactatttctgtaccaaaaaaaaaaaaaataagatgggaacttactttagctacaatttctttagtgttttcttcagttggtctctctctatctgaagggcctcctgtactcttttcatttcctctttttcttaatcataatttgtatttcttcttgactttcttgaagtctgttggtcaactcgagcatttactttctatactttgtagtgctgaatccttggctttgcgatgctccttgaattgtttagttcattcactttttcctgaacctcactaatttgttttatattaaattgttcctcttttcataaatctcttggatcttaaacataattataaaataagttaatagtcataaaaatattaaacacacacacacacatacacaacttaagaggaaaaggttgcttcccaaaacaattagcatgccaaatagtagtcttcataattcagttagctactccaaacccacccatttcctccactgtttcttcatccccaatttaccttgttctgtaatttatcattgattgcttctaacgcttttgaatggttgatatttcagtttccttctctgaaagattcactcttaactcattatagtttcctcttgttctttcaggcaacaatgagcaactttaagttcctcttcagtttccggtgctttattattagaggaaattccaataaatttatagaaacattataactattttgtgtaattaactcccctttccaaatatttagggtttataataatatttggttacaaaatatttttaaaaacatggtgaaagatgaaacctactttagctacaatttcttttatgttttcttgagctggtcactttcagattgaagaacttcttgcagcctctgtaggtcatctttctcctagctacagatttcatttcatcatgactttcttgaagtcttttggacaatccgagcattctatttctatccttagtagtgctgaatctttgggtttgaattgctccatctcactcacgttttggtagtttcattgtctttttctttcatatttaaggactgttcttgtttgctttgaactcctggatcttaagagaatcataaaacagtacagttgatatccagagatattgtgtttaggggaaaataaatcaggatgctttctaaaacaattaaggcaggattcagtgcctcattacagagcaatctctccattctcccactcttccattattcaggcatttaatgctttttaaaattgaggtctcactgtgttgtcagcatcttattcgaggctggagacaaaatgatgagcttacaggatctctctctttttgagacttatacttcaaggacaaagatagatatgatgtgaatcttaccaaatagagatgctggcttctcctacggcccaagtgtcaaatataatctatgtgaatgataggaagggattcctagaggagaaagctttaactgagatctgaaggataaagcattagttaggcaaaaaggagtatggaggtactgcaggtagagagacctgagaatctaaagccatgagctgcggaagagagttgctggagaacaaagaataggaagaagaatgaatgaaataagaccggcaagatctgcacctagggcctcataggccacataaaggatcctggttttatttaaaaagtagcaataagatattaaaagaatgtaagaaaggataacttaggcttgtatagaaactggattagagaagtctaagaatgagtgtgggaagaccagttaggagactctgcagatagccagggaaagaaatgatgttgacttggattagggtggtggcagtgtggaagaaaagcaggatgacttttaaaatacacactcaaatcaataagatttggtgactggatacagaataagcagagaaggaggcatattagtagggatagctcccagatttctgactaaacaatgagaaagcacagtagtgctttatgaaacattaaaggaacaggtttaaaaaagaaataaaacaatctcatatttggtttcaccctttcttgtaatttagaattattttttctaaatattttttgaatatttaagaaaacagttcttttctctgaaacatcttctctctgtttcataccttcttggtattcaagagcaatttttaattgttctgtttctagtcatttcatgattagagacattaaaaaaactggtaacataattataatacaaacattataactataacacaacacaagccttgattcttataagacacttgttaaaatgggaggaaaatacgaaacttacttagccaaagtttctctaatatgttctttcagctggtcatgtttaacttcaagggcttctttatcgttttaaggttgtctctttccttggttagagattttatctcttcctgactttctgaaatttttcattcaacctgagcctttccatttctattcttgccagtgttgttgagtcctggttgtggactgttctgttaataactccagttcattcattgtttcctgagtctcactgcttctttcacattaggcagtaactcttgttcctcatgaagcactgggatcttaggacatcataaaataccaaggttactatcaggagattatgatcataatttttttttttttgagacgcatctcactctgttgcccaggtgggagtgcagtggcgcaatctcagttcactgcaactctgcctcctgggttcaagagattctcctgtctcagtctcctgagtagctgggattacagtgtgtgctaccatgcctggctaatttttgtatttttagtagagacggggtttcaccatgtggccaggctggtctcaaactcctgacctcaggtgatctgcctgccttggcctcccaaatgctgggattacaggtgtgagccaccgcatcccactggccattatcataaatttttaaaggaaaagatcaggatacttttcacagcaaggaaagtcatcttgaaccctcaggcctacctggatcacaaactgctcattattcattttccctcaattcctgctaaagctattcatgactttctgggtcacattctgtcatacttttctttctttgtagcttagacccaaagtgaaccattatactttgctagcagtctgtttcatacttatttctccactagtttccaagctataaagaaaaaccatagctgagcaaactatatcccaataaatgtatgatctccattttcagatggctccaatgctatgtctcaatttttctatgtgtatagattgatttctctttccatgataattagtggtaccatgtaattttgcgtatttctgcatttaccatattggaattaagggatttctttctagtttataatggggggaaagaacaatgtcttatttatatctacagtctcatgtctggcatggagtaggcttttaatacaggttggcccagtaatcccaatgtttcacttctccatagcatttaccactatttaatgttttcttgttcatttgattgcttatttatcagtactttctttcactacaaatggatcagagggattttaggggttttgtccaccttgttctattgcatttctataacctaggagtgtgcctgccacattaaacactcgacaaatacttaccagtcaattaatgaaccacatcctagctacttcttactgcttatctttccttcaaaggaaaaggaaggaagaagtgacaaaggatgaaaggaataaaagacatacctcttcttgtaattggtatgggatttttctaagtcctgagtatttattatttgagctgtcttctcagatacgttcttcttagttcatcaatagtttcttggtgttcttttaggtgaatatgagcaatttttgttcttctttggtttgtaggcccttggcgagtgaaatttaaagaatattgtaatattctccaacattgctcccctctttccaagtggctcagattttaaaagaaacacttaatagatgaggaaaagggtataacttactgtagcttcaatttctcttatatatcctctaaggtggtcctctctgtttcaaatgacttctgtaattcctttagaacttttctttctttggttatagattcacttcctcataattttcattaagtttctgagccaactcaagcctctctgtttccattgttccaatgtcaattctttgttctttaattcattctttaaattctctatttcattaattttttctgcatctcactcatctcttcttgtacattaagaagttgttgctgtttttcttgagttgctggctcttaaaatgcacaatttttataattaccattttacttatattctcaaattcttacacaaaatcattaacagccttgcctcctatcagcatataaataggtaagtagcttaaaagtaaatgaaactcacaggcataaatgtctgcagtggtttgaatattgtcccaccaaaattcatgtctcccaggaacctcagaatgtgaacttatttggaaatagagtctttgagatgtaattggattaggattgagacgtgatcctactggagtaggtcttcattccaatggtgtatttataagagacataaaagcacatagagaggcacagagaaggaggtcatgtgaacagttacaagccaaggaatgcgaagggtagctgggagacactggaagctaggaagaagtaggaatgattcttccttagagccttcagagggaatatggtattgctgacacttaaatttgacttctaggactcagaactgtgacagaatatgtctctattgtaagccatcaagtttacgcaatttgctatggcagccctaggaaactgatacaggctgattaaggagataaactgataaggagataaggggaagatgagataaagtaaaaaagcaaagagactaattaaatatacaatacagctaccaaataactataattcctcatcctcttaaaaaacttttggagaatttatttcacttccaataagatgcttatgggtggctcccccaaatactgagacattaaccttcaaggctattgattttaccttttttataggagtatgaaatagacataaggttttagtaaaccaattaggtgagatagtgaaagggatcagaattaaaagaaaacacatattaagaaaaaacaggctgggcatgatggctcacacctgtaatcctagcactttggaaggctgaggcaggagactgcttgagcccaggagtttgagaccagcctgggcaacacagtgagacctcgtttctccaaaaatacaacaattagctgggtgttgtggcacagctaatttagtctcagctactcggaggctgaagtgggaggacagcctgaacccagggggggttgaggctacagtgagctgtgtcatgccactgcactccagcctgggtgacagagtgagaccctgtctcaaaaaaaaaaggggaaagaaaaaagaaaaaatattccacagaataataacagaaccgtactatattatctatatgcaagtggcactgcccttagcttatatagaaagatctctatgggtgcattttagaactcttgggaactacagctgttacaggggtcttagctcttacacaaatatcccaataacactaacttctatataagaaatgattcaggaaactgcaaacatctaagagatggtaatagtataaatcttacatttcaaaatgactaatgcatctctgcaaggaaagaatctttgttttgtgactaatatatctcaagtgcccaaaacagtgcgtggcccatgacagtgctcaataaattttgatgaatgaatacatcatatgatttgtttaaatgatacaaagccctctctcacctaagactctggaataatataatcctcataaggtatgttagtttagatctcagtgtaagttaaattgtccaaaatactagcattgaaatatgttcatttgggaggtatgtgctatttctggtttaggtctacagaaataaaaattaccaaaaaaaaagtttagttagaaaaaatggccaggaaataactttaaaaattcaccttttcctttagtttttcttcaacttctgccagtctgtacaggtcctagaaagctctccttctttctttatggcatggttcttttcttgtgcaactactcttgttgctttttaagttcatccccaagaagtcttaattcttcctggttttcaatggctagaaagaaaaaaaaagttgagattaaagtaaatattagctaacatttatgaaatcagtaaaacatcagcatttctctcagtctgcaaatgaagaaatcagggaaaactatataggaaagacaaatttcaaaaaagaaagtccttattttaataatataagatgccaagaatctgcttttatactgtttctttactgctcaatttacattcctaccatgagaattagaattgcattaacattctatcatgagagcttagcttatttctacctttaagtcaaaagagactttttcgagctatcactgagtaataatgagactacagctatagttttttcaaacactgggatggcttggttttagcacagatcactgccagcgagctcaaaatggcagccaccctctgctagcagacttgggctgatcctggttattaggctcacacagtgacattctcacgtatcaagaccaaaaaacataacaagccagagactgagaagaaaataccattgtttgtttgtgtgcttattacattctgctcttttgatgaaggagacaatccccaaaacttataaaattaaaacaatacaatggtcgcattctactatgatccacagtgaacttctccaaatatttatttaaacttatcacattgtatcacccctaaacatagaaaacctaagtgtgaaaatattggcagacatcaaaacaaacaattaaaaataaaatttaaaaattatgacagcaaaaaaaaagagaaacatttggaacaaatttaataaaatattaaaagacctatacactgaaaatctacaacatacctcttgagaacagacaaattacagaagaagatatacaatggtctagaagcataagaaaaaatgtcaacatcttagtcattagggaaaggcaaattaaaacaacagtctgcacacccattagatggctaaaattaaaagcaccaataaatatgaagtgttggtgaagaaggatgtttgagccccagaattctcttaatttgctaatgggaatgtaaaatgatataattactttggaaatcatctagcaaattctcatcaagttaaacatattcttccctgtgacacagcaattccatttaatatttaccttaagtaaataaagctatgtaaataaaaagagttgtacgagaatgtttacgcagttttattcaaaatagccaaatactgaacggaacccaaatttccatcaataggaaaagaataaaaaaattatggcgtattaatacaatgaactattccttggcagtaaaagggaggtagaaagtcaaacataagagactacatactgtatgattctatttgtataaagctctagagagacaaatgatttaaggtgaacatatcaggactgataatctggcggggaggaggtgagagggtctgtgatagaggtgtgaggaaactttctgggggtgatggaaacatcttctatctgactggggtgaagaggaaatgggtagagacatttgttaaaagtcgtcagaccatacactccaccagatacatttattgtatataaattatacctcaataaagttgataaaaatctgaacaaatgaagacaaaaaggtaatgccaagtatacagtgctaaatcctaccatttcaatatttcctttaggtcagtcttcaattgttccttttctgctataacactctctaacatttgtggagttcatttttctcctgtattaaagaaaatatcttcctttgttgctcaattatctcatatccttaacatctgcagttagtgtttgggtatttttagcttccaaatcctgttttttactatgccaaccatctaaaacataaacacattacagaagaatttcttaagtagttaacaaaactttaaaaaataataaaaatagccaacacatctattatgtgccaggtactattctcaatcttaacacatttaatcttgacagtaactttatgaggtaggtattaccataatcttcattgacagatgaggaaactgaactggagagaggtaaagtcacttgcccaaggtcactcagggtttagctaggttttgaatccaagtgatctggctccaaagtttgtgctcttacgtctgtcactaatcagaacaatatggacaactacaaatattaataattgtcttcacgtatgatagttaacatgattctgcatgtttacttatttcaatgacattaatacattaattaaaggattctgcctttagtttgtacacatcttccataaatattttccaagtttcattctagtagtatttgtttatttactactaaacgagtaagcaatcttgaactctatcactttatctatttctcctaaaagctgggaatcattccctgtctcccactccctgcaaatctttattttcagagcagtcctacttacaaaaggctggagttttattatatgtagggggataaataattttgataagatctatttcataagggtgaaattcatcttttcttaatatatgtatattttatatacgcttaagaaaaatgttatataaattcatttattcataaataagtcacgaccaaatgtaactaatacgtgaacttattggtaaagggagacagagactgaaattactattgctggtacaatttagggtattattgtatgacattacactagttcagcaaacagctccatattgcctaccaggtatttaaaagtttttataataatctataatcacattagaaaacaatagaaaaataaggataaaaatcatccactgtcaccaacttcacacaacaaactattagaattctggtaatttacttctggagttttttccattaaaggttttttttttgtttttttgttttttaaacaagctattataatgaatttatatgtgtgattctttttagtttttatcttttccacttagacatatgtattttcacatgttgttatgtaacctacaaataatttttagtagctgcttgatctctagagtagatataaactgtactttatttagcaacccccttattgttggcaatatgctgagcttctagaagataacagtgatcacagagctaactacatgagaaattaaggtagggacacgtagtcttttgggactagtctgttagatattataattcagaatctcatatctttcaatacaaagcagattgagacaaaattttctgtaatgatagccaaggtttatttcaaatcgaactcagcctagaaggtacttcaactaccacagttatgaataaaatctaatagatctattattaaataaaaaattattagaacctgtgaaaaaggaaaaaaattgtcctttatataaaataagcttactaatcataaaatatttttgttgagatacattaaaaatactgcatttccgaaacagacacatcaagtaggactaaaaatgagcattccaaggagattcatgatagaccgctagtgcagctctctggtgcctagatgaacaggggagcacctggaaatccccatttccctcttttattcccatggcagattccagcatgagcatgatacaagaccaaattgatctcaccttccatcccagactttaggatccctggtgaacagaatggcctcagaaaagccccagcacatccttttatcaacatggataaatgactccagcatatacttggtaacataggatcttgctgttcccagtgagtataactctactcttcccttcatcttctattgtctctataactgattttggatttgtttaaaacagttattgattgccatatattattgtcaaaagtctactaaaaaactttcccatcataaaagtggaagttattatttctttctttttttttagacagggctcactctgtcgcccaagctggagtgctgcagcatgatctgggctcactgcagcctcaacttcctgggctcaggtgatcctcctacctcagcctcctgagtggctgagactacaggtgattgctaccatgcctggctaatttttgtatttttttgtagagacggggtttcaccatgtgcccaggccggtcttgaactcctggactcaagcaatctgcccaccttggcctctgaaagactaggattacaggcataagccattgtgttgagggtaaatttcaaattgaggtcaaatgctttggcctatggttattccaaattataaataagctgagaacataagatacagaaaaaggagagagaagaactaaagcataaggagatggaaataaaaaaaaagttccattttccaagcagtattttgccccggagtaaatgggggaaaatgcagctcattttatagaagtaatataaaatgtacagatatttatttatatcaattggatcttactgaattactttgaaatgtgtattgcttttatttaataatgtattctgttaaaaatgcatgactgtacaaacatcagtagctttctgtacactaacaatgaacgatccaaagaagaaattaagacaattttatgtataatgcatcaaaaaagaacaaaatactaagaataaacttaaccaaggaggtgaaagacatctgtgaaaactgtaaatgttgctgagaagaaattaaagaagacacaaatggtaagacatccctgttcatggattagaagacaatatttttaagacatcaatactaccgaacaatctaccattaatgtaatccctatcaaaatcccaatggtgtcttttgcagaattagaaaaatctatccaagattaatatagaaccttaaagggccccaaatagggaaacgaatcttgaaaaagaagacgaagttggaggtcttgtacttcctgatttcaaaacttataaagctacagtaatcaaaaaatgtggtgctagcataaagacagacatataaaccattggaacagaatagaaagaccagaattaatgcttgtgtatatggtcacagtatcttcaacaaggatgccaagactactcaatgggacaggatgatcttttcaaaaaatggtgttgggaaaacaatagccacacacaaaagacgaagttgtaccctgaccttacactatatatacaaataaatgcaaaatggattacaggctaaacgtaagagtgaaaattacaaaactcttagaagaaaacataggggaacagattcatataagggtcttggcaatgatttcttggatatgacaccaaaacacaggcaacaagagtaaaataaataaacttgactacattgaaattaaaaacttctgtgtatcaaaggatacaatcacagagtaaaaagacagccgatggaatgggaggaaatttttgcaatattgcatataactgtaaaggggtaatattcagaagtataaagaactcctacaactcaatgacaaaaatcaaacacccagtataaaaatgggaaaagacttaaatagacatttctgcaaggaagataaacaaaggccaaaaagcacacgaagattcaacatcactaatcattaggaaaatgcaactcaaaacacgatgagatactgcctcacatccattaggatggctactatcaaaaaaaaaaaaaaaaaaaacagaaaatagtgtgttggcaaaggtgcatataaaccagaacacttctgtcctgttgtgggaagtaaaatggtgcagctgttatggaaaacattatggtgctttctcaaaaaattaaaatagaattaccatataacctagcaattccacttctggatatatatatccaaaataacgaaagcagggttttgaagagatatttgttcactcacattcataggagctttattcacaaagccaataatgggtagaagcaacgcaagtgtccatgatggatgcatagataagcaaacttggcatatacatataatggaaatttactcataaaaaggaaggaaattctaacacatgctcaacatggatgaagacattatgcaaaatgagacaggtcagtcacaaaagataaatactgatgattccacttatatgaggtactcagagtagtcaaattcataaagacagaaaaataaaggtggtagccagggtctgtgggaaggaaaactggggagctgttgctcaatgggtatagtttggttttgcaagatgaaaagaattctggaaattggttgtatcacaatgtgaatgaatttacactagtgaagtatatacttaaaatggttaaggtggtaaattttatgttatgtgtatttactaccaatttaaaaaatatatactactatatactattccaagctatatatttacaaagattatttcaccagtctcctattgaatattttaaaattctagcagtaaatactctggaaaaataatatgaactataataaaaatgagacatgttattacaaaattactgttaccaattatcttagaggtgttgtgggaaagtagaaaagaatactgttaataaatgaaaccctggttaacgttataaggcaatcccctctgcaatggactgaattttaaactctaagcaagtttatatagtaaatttgacataaaataagtatcagctatgcaaaatttggactaatacattttgggccctttccctttctaattgattataaacatattctatcataagttatttcaaaggcttagggataagcttgtaaaattattgttagttattaccattgtgagtaacaaatgaaatgagaatattatgcatttaagtatttgaggttaaagagtatatatacaagcatatgaaaatctgaaaataaacaccctttaccttttgctgaaattcatctttagtttctcctgtatttcctccatatgcaaattcctggaaacttcctcagaaattttcgattttagtgtattaatttttcttgatgttgtttcagagactcaagagcatttcgtaattgttcttgagtatctatatctttgttagaaaaatataaaaacaatttccattagaatatgaaacaaaattattttgtgctactacataacataatcataaataataaatgatggcctctgcaatgtttttaagagttccaatttttcaaagtttaatcaatcaaaaccttaccatgttaacagtatcgtgaatatacttttgagttggtccctctcaatttgcaagctttcttggagttgttttagatcatcttttcttgagttaaagtttttacttcttctaaagtttgctgcagtttctcagtaatcagtgtttctccctttctacagtttgcagcgtagaatctctattttctaattgttccttcagctttccatctcatttagtctttcttgaacctcacgtgttttctcctgaagttcttgggtctgtaagaaagctttaaaaaagaaaaagtaaatgtcacacagtaaaagcagagcagtctgagcatacatatatacagaaaccaaaaccccagaagactaaggagcatttctcaaaatagctcttgtaccaacctcggtcttcaaagcacccaaactcgaatcaaatttttgggcttcttagagagattaactatttcctgattcattctctcattctcctcaaggaccatcttatactttgctcaaagtccatatgaagggttttgaaattttggaattcttgatcagtgcttttatattcgactgtgtagttgctaggtcatcttttgttttcccaatttcttcaagtaaaccttaactctactctccttatgaactacttcagaaaacaatttatctttttctgatgttattaatggagctcttcagatttgtcttgtatctatggaaaagaaataaaatttagggatgttacaacatatgattcactgaagcaatttttaggaaaaaaagctttctctgcaaaaagagaattatttacattcagcaaaaatttgactgtggaaaggcaatatagtagtactcttattgtacttttccctaactcagcttgtttaactctacctttgatgttttattttctaatctcttgtattctagaaagtaaggtctgcatggaaaatagtaaaggcacataatcagattgtcttatttccttacctatcattttaaagtgttttctaactttatcatgtggcaggcatttctcgaatttgacatttttttccctaaaggctttgaatgcctctcaggtttccaaaaacttaacaatgaataatttaagtaatgtttaatcatttaaaattgttatttaagaagtatcttaatggtatggtccatgaaaaaaataaaaataaaagtaccacttaagtaatatttaaataatacataatttaaataacccatatcttgtatattaacagtttaatcactgtgaaagataaggcagagagagatgagaaaaaaagaagagataaaggagggacaaagtaaagacgggcaatcagcgtgtagctacaatcacgggtttaggaggcagatttatgtggctcaattatgagttgataatgggttattgggactaaaaaactacctatttttgaagagtttataagacgagtaatgaaataatgtttttgaagttctttagcatgatgtttgccatacagtaagtactcaaattttgccatttttcttttagacaagtagaaagaaaaactggcaggccatggatttacagaacattcaccagcctgcaaggtttgcattaacctctaaaactttatcagtgcaacctctttccctcattactgtcttttattcaacataatgatactactactaccaaaaaaaatggtaagactaagggtgggccgtaatactgtataaatgcaacatttgaggactacagaaatggtgctacatggattatattactaagtattctgttaaatacaccttgaaaaaatatatttttaatctagtagcataagaacaaattagaagatgaactatattcatttctatttctaactgtcaaaacgtttacagtatctctcttgtctgctagtttaaaataaactataccaaaatattaaggcactattatcgcaaaggtttttatttcaaaataagggataagtgcttataaattgtttacctctttcctcagcctttctacttcagaaggtaaagatttcaattctgaaagcaaatgacttcttcccgcaaagcttcattttcttcaacttctttatttagttctttctgagatcagtaatctttccttccaattccaaattacagagcaaatctagaaagttttggtaattgtataaagatccaatgttgccaaacaggtaatttaatttttaattgtccttgaatcactttttcaggatcaggtaaagtttatttgaaaaataatcccttatgatttgaaacccatgaaatctttataaatattaataccaaatgaaactaaaacgtaatattgagtttttaaaagtcagagtataatgaatttttaatcattgaaatatgcttgtcaaattgtttaggtacattctagaagaagtcagatttgaaaaaagatgtttaaaattacaaaataccttttggaacttgccatctataagggaggtgagttttgttatctcattaaaagcagattgtaattctttcccagatcaacttgcattttcttttttgcctccaactggctttgatataactgaatatcatttccatttgcttgtatgtagttgcaagttctttctattgagaaaaacattgcaaatgccaaaaatacactgatcattacaactactttattataaatattacaaaaaatacttaccatttctccttcagctccagattttcacttctaagaaaggctgattctctcttggcatcaaggctacagtttcagcatcaaacagagtctgcttcatttgttttgggtcttcaatgctttctagacagatgacaaaaggggttcactgaaatctaattttcacagagttggaaaattctaagagaacatgtatataaatgttaactctagctaatcaaaaagcgtacaaatatgctagtaccaaatatataaaaagaaataatgttttcctaataaaaataatttttaaaaattctgtcatatttttcaaattatataagcaatatatcaaattatataagcaatgtatcataattagatctgttttgtttaaaggttaaaacaactgttgttcggcaaggctgatgaagttttcatgtatttttattttgagttattctcttcagcacatgataggtaagtggctaacagttaattaaagatattaacccacaaattgaaaaggaaaaagacaaatgatctaatagaaaaatgagaaatgatatgaacaagaaacttacagatgagaaaatgcaaatgaaaaatacatgaaaaaatctacaacctcatttctaaagagaagtggcattttaatatgactttagcttatataaatcaatgatatgtccttggaaaaaaattaataaattaatacatgaatgaataaggaaaagaaatagtaatttttaaaaagtgggcagttctgcttgccacgctatgaacagacactcagaatacataaaagtgccttcctatccagggcctcagaataggatgatatgaaatggttgaacccctttgaaaagaatcatttgtcacaaataaaaggcaacaaaagaatagaaggtacaaaaactaaaaaactcaactgaaaacagaagaacagaaactagtcttttaaaagttcagctagaaactgttatcataaaaaaaaaagtattaaaaactggaaccaaacatatataataatcaggtatactgaaagcaaactgaagcgattaaatgacatcatcatcagattcaatttagttaatgccaagatcttatatcaactaaaatcatctagagctataaaattgtgaaaaatatcccagtttaatatttaagatcttgactatatactactgcatgcatttgtataaactactgaaaaaaattcggaattttaaaattttactgatttttttttttttttggagacaagtcttgctctgttgcccaggctggagtgcaatggcatgatctcggctcatggcagcctaacctcccaggctcaagcaatcctgccacctcagttacccaagtagctggcagtacctgcaggcttatttttgtatattttgtacagaccaggtctcactatgttgcccaggctggtctgaactcctgggctcaagtgatctcccacttcggcctcccaaagtactggcatcacaggatgagccactgtgccctggcctaaaacttactgatttttaatgggagcctgtccttaactccttatatttactcaaaggatgacatgatcaactttccacaaatgtgactttatctctaaatggcaaatatactaacagtccctatctcatagggttattgacagatttaatgaaattatataaatttattacaacaatacacagcacaaagtaggtccagtataagcatttgctagatgatggtatgctatatatatttatgtgattacacaacaaaatacgcctgatttttacaatgagtatgacaagtccatttttatattttctagcttttgagagtctatgtattcctgagcttcttaatctggtcttccttttctctaagcagctctacttttgaactgagttcatttaaaagaatcaaaggagagagtaacaatttagaatctgatttgaagtctaagggattaaacagaacttatatatattagtttaaattcatagtaaaattcaaagtcactaatattttaaaacataattcccttatttctgacatcatgttcagttacatatgttgcatgttttatagtctaattgcttatcaatagaaataccaacatgaatgctcacctcaagatcttgattataacttctgcatgcttaactaaattctttaagttcgaaatttcatgaattagttgcatctgaagagcatgtgaacaggtaacagagcaaaccaatagttaataaagcaaagcaaaaaaaaaaaaaaaagaaaaagaaaaaaaagggcactggttcactgcttcagaatcacccaacagtagaaaggactgagatcaattgttcaagctatcgcaacaaagcacctcattatttaaaaaactagaaatatcacccaaaacatatcaaacaaataaaaaaaaacccctcagcatgacccaccaagtagctatatcatctgttaataaagctacaataatgtcaatagcaaattagtatcactacttggaggagagatttaaaaagtggtaatcaaaccttgaaaaatacacgtttagagatttttgttttcagtcagttaagtacagaaatgtattaattcttataaagttttttctcccataaagtatccatcagctctacattagtgtactttttaataagttctgatttggatctaggtttggattagggttgtttcatgcagtgcctttacaatattattacttttcaccgtgctacacaggtatggaatgatcaactatgaccttgatttattccagaggaaatattgactccattatattgttcaaccatgtaaaagtataaaggtagaagtatttctattgaggttcctttctaccaaaatatctgtagcattaaatatctgagtaccaaaaagtttgttgaaacaagtaaaccacacataaccaagataaacattttcccttagaattatttaatcttcatatcagatgagcacttacagagtaaaagcaaattctaatagtatgtaaggggcttgaaaatgtatcttatttaaatattttctggatgtttaactgagtcctgactagttttaaatttcaactagtgcaagtgttgacattactattttaggtcagtgctatccaagagaaacataatgcagacacatatgtaatttaaaatttcctagtaggcacattaaacctaaaaagaaaaaggagaattaactttgagaacatattttattcaacctaatatatcaaaaatatttcttccaaatgtttcttcaggtaatctatccaacatgtttctttaggtaatcaatataaaaaaaatgacaattttacattcttttttatatactatgtcaattcagtctggtcccatttcaagtgctaattgccacatatggttagtggctaccccactgtagaacacagtcttagacatttgtatgcttttaatttaaattggctccttctttcaccttttcttccttatttttaacttctgtaaagaaaatcacatttaccaataagaaagaatcaaaaatcaatcttaacttttaaaaatcttagaagagatcgggtgcattcagggtagtatggccatagataatgaaaacatttaaaaatactaatttagaaaagaaaattttcctacttcttatttgaaatagcactttatcttatactggttcttatgcatagaaaataattagcttttataaaaataaaagtgtaatctcccatgacatgtttaagatgcagagcatgaagtgaaagtgtgtgaaaaggaaaaatgatttaacatatgatctgatctacagttaatccattgctaccatttaaattgcagatttaaatggaattgtcattaggtgaaatgaaatatttaacttacatctccaagtagtaaaaattataaattaaatacaccaagttaaaataggtagacggtaaagatttttctcattcctcgagtatgtgatacttgacattttccattctccctctaaaacatactatttaagcatctcatgttatatattcccactagaaaattatctacaacttgggtgatttttgacaaaagctttaggaaaccagggaaatggctccatgtcctaaggccaatttgacttttattcccttttagctaaactttccccaaaatgtaggttttggaacatattttgctacatacacatagacttatattttagtttaacatggactagatactgcaaaactggttttgaacaggatgtttttattacatatcttttaagtaaccttaaattttgtgtcgaattaaaagtaaagggcctagagcagtggtcacacctgtaatcctagcactttgggaggccgaggcgagcagatcacttgagcccaggatgtgagactagcctggccaacatggcaagacccccgtctctataaagaaaaagtttttaattatatgtcttttagattagaaagctgagctttgtgttttaaaaaaaaaaaaaagaaaaaaagaaaaagaaatttaaaaagaacggagtaggattcttcctcctcaactgtggttaaatgggagaaaaactgcagtgtgatacatgtcatatattctgtggtatttttgtaatcttctctgtgttgactcaattcaataagcttcaatttttcttattaatatattaatgatgtagaaaaatattagagaaattattaccacttatcccaaacgttagttttatgtcatgttatatcacatataaaaaacatacaaaaattagatgaaattttaaagtcagaagggaccttgtgagcatctggtctctacttcaagggtggagaaatacaggaagccctgagattcagtgattgcccaaggccttggcaacaattcataataggattggatctgcggtaagtttataagtgcaaaactgcggcttaaatccaggcaatttcactctagagaccatgttcttaatcatgaactaggccagtcccttccataaaacctagttttattgattaaagtccaatggttttgtctgcatgacattttgcacttcattaacatgcattttaaaacaagctaaatgaaaccctgtgagaacttatagacttttacctctttgaatatagtacctatgaaataaagcaataatttaatttgtaggtagaatggaaataatagctttggcatagaattcttttttcctttaaaaagaaaagaggttgagaaactgaacaatgatatcgaggaaaaagggtcatggccttttgggtagccacatagaagtctgaagagtagctgcaaattaattcatcttttaactacataaaaactgggtcttatttttttttgaaggggggatgttcacgaatcactttgcaagtctgatacaactacagattcttgttccagaaaaatgaatatgcattgaaaaattctgcaaaataattcacagcatctgtggcctctaggttaaggacactttacactaataactccctttaatctttggacaatttctgagtccctaaagtctgatggtttctggattaagttctcttaacgtgagcctaatattttatacttagaaaatgagtgatctgtttctataaattccattataacttttagtattagttatactaattttcacataactctcttagatggagaaggaaaaacaaacgtacaaaattagcttctccagctattctaatgttttaattatttagaaacatactttcaaagaaaaagaaatccattaatatgtagcatccatatataaaatagtcatctagatattaaattcatactgatctcagtaggaaactgctgtgctctaggtagcatttatatatgctcataaaatgtaatatacaaactataaggaaacaatttcaagacaaatccatcaagaggtaatacaccaacccttcccatagatgcttttaattcctttttctcttgcataagcaccaggaaagaaacatgatttaactatttttaaaatataaatgaagaaaatatttcttaaatttttaaattgtatatacatatgaaaaatggttagatcttcaacatctcaatcttagaaaaaaaatctttaagacaatacttctgagtgatgtcaagaagatgacagaataggaggtcacctctcacatccccccaaaacaacaagaattctgtacctattacagacaagtctttttgtggagcctttggattcaggtaggaggttgtaaaaccccagtagaactcaagacctggaagtgtgtttttgagagtgcataccaacacccaggtgggagtcctgccaattgtgctcccaggtcatatgcagaaatggtcccattccttgaaggacttagctacagccctgtttggcctagatctgcaaccaaaactatctgtcaaggggtccaggagaaatcacacactctagggtctcgcagatgggctcttctgcctgtcgacattggtcttggcagtggacccaaaagttagcctaaacttggctcctgccctcctcaagctgtagtcctagcttagtactgcttgcacaaggaccagaagggaacatgcccatctgagccaccaggacaggcttgccggcctctgtctcatagagattccgacggggacatgtactggctccagccctcccctgctgcagcctccctgctctacccacacagagaactgccaagagatgaacctgtctgagccactgggtcaggcttgcagcctccatcccacaatagactgaaggggccctgtctcagcttcaatgcctctttgctgcatcaggaagctatctcgactgtattgggaactgctgggtgaagcacctgccccagccaccggacaggtttcatgcatctttcccataatagatcctaaagcagtcttgtcttgactgcacccctctctactgcagcctggcagttatcctgcctgtgtaggacaggcctgctggcttcatcacatagcagttctggaaagaaccttgaatgtcacagctacagaatgcaagcaatccccctgcataaggaactgctgggagtcttgactgctggtgccaccaggttaagcttaccacattggttccatagcacattctgaattaactctgaagcttggtttcagtttctcctagcatagtctgagaatggttttacccagccggggtcctaccgggagacaggcgtatccaagtcctgtggcaggttttgcaacccttgtccatcagcagattctcaaatggccctggatcttatactgacccctctcatctgtggaataagaacagctctgcccacctggggacctaaagaaaaggtgtccagtagtgcctctgcaggataacatggtgacctcagtcatactatagatctgaaaagaccttataaagatggtgaagactaaaacaaatagctacattcatcttcaatggcagacactgctgcatgaccacaagcatcatgatcagggaaacatgatgtcaccaaaagacaaagtaagatactggtgactgatcctaaaagatggagatgtattatctgccaaagaatcaaaatagctattttaagcgagctcagcaaacctcaagaaaacatagagaaacaatccgaaatttatcaaggagactgaaataataaaaaaaccaaacagaaatcctagagcaagaaatacaatgaacaaaatgaaaaatgcaacaaagaacatcaatagaagaatggatcatgcaaagaatttgtgagcttgagacaggctattttaaaatatagagtcaggaggcaaaaaaaaaaaggatgaaaaggaatgaagtttatgggacaacatcaaaaaagcaaatatttgggtcatgcagttcaagtagagaaaaataaagggacagaaagcttatttaaagaaataatagcagaaattcccaaacctgaagaaagcaatacatatccacatataggaaggtcaaaggttaccatcaaattcaatctaaatgaccctgccctaagatatattatattcaaactcaaaagtcaagacaaggagaaaatcctaaaagcagcaaagcagcaagagtaaagaggcaaataacataaagggagttccattatggttagcagtagacttctaagcagaaatctcacaggccaggatattaaaaagtcaggaaacagatgctggagaggatgtggagaaataggaatgcttttacatgttggtaggagtgtaaattagttcaacattgtggaagacagtgtggcaattcctcaagatctagaactagaaataacatttgactcagcaagcccattactgagtatatacccaaagattataaatcattctactataaagacacatgcacacgtatacttattgcagcattgtttcaacagcaaagacttggaaccaacccaaatgcccctcaatgatagactggataaaggaatgtggcacatatacaccatggaatactacgcagccataaaaaaggatgagttcatgtccttgcagggacatggatgaagctagaaaccatcattctcagcaaactaacacaagaacagaaaccaaacaccacatgttctcacttataagtgggagttgaacaatgagaactcatggaacagggaggggaacatcacacactggggcctgttggggattgggggcctaggggagggaggcattaggagaaatacctaatgttaaatgacgagttaatgggtgcagcacaccaacatgcacatgtatacctatgtaacaaatctgtatgttatgcacatgtaccccagaacttaaatataattaaacaacaacaacaacaacaaagaggaatctcacaggccaggagggagtgcatgatatagtaaaagtactgaaggaaaacagttgtaacatcaaaagttagaaaatcaaatttcagaaagtgggaggagataaagtgtggagtttgtttgtttgtttagtaatcaatgatatctgttatcagtttaaaataacctgcataactgtaagactttttcttgtaagcctgatgtaaccacgaaggaaaaaaacctataataaatacactaaaaatagaaaggtatcaaaactactatcagagaaaataatttatccaataaggaagacagtgagataagataaaaggaccaaaaaacaaataagaaaataattagcaaaatggaagtagtaatttcctacctatcagtattcctacctatcaatgtaaatggactgattctccaattataagatagagtggttgaatgattaaaaaatccaaatatatgctgcctgaaagagattaacttcacctgtaaggatacaatagatggaaaggaaggggtggaaaaagatattccatgcaaactgaaattgtaagagagcggagaagctatacttatatcagctaaaatagactttacatcaaaaactgtgaaaagagaaaggtcattacataatgataaaggggtcaactcagcaagaggttgtaacaattgtaaattatatgcacactgaacatggcagaatatatataaagcaaatattaatctgaaggaagaggactgcaacacaataataatagaggattttgaaactacactttcagcaatggacagattttcagacagaaaatcaacaaagaaatagcagatttaaactgcagtctagaccaaagagactaacagatgtttacagaacattccattcaacagctgcagaaaacacattcttatcaacgcacatggaacattctctaagacagatcatattaggccacaaaaacagtcttaaaaaattaaaatcaaaattatatcaagtatcttttctgaccacaatgacataaaactagaaattataatagcagaaattctggaaatattacaaatacataaaaattaaacacgctcctgaacaccactgggttaatgaattaaaagagtaattttaaaaagctaagacaaatgaaaatggaacacaatataccaaaatgtataggatgcagcaaaagcagttctaaaagagaagtttatagaataaacatctacatcaaaaaagaggaaagaaatcaaactacctaaactattacctcgagaattagaaaaacaagaacaaactaaaccccaaattagcaaatggaaagaataaagatcgagcagaaataaacaaaatagggactttaaaaaaatccacaaaataaagagtttttttttttgaaagaaacaaaatcaacaaacctttagctagactaggtaaaaaagacagtcgactaaataaataaaatcagaaataaaaaaggagacattacaattgataccacagaaatacaagaacaattatatgccaataaattgaaaaacctagaagaaatgaattcctctaccacattcctaccaggactgaattatgaataaatagaaaacctgaacaggccagtaatgagaaagggacttgaatcagtaataaaaagtctcctatcaaagaaaggcccaggacctgatggcatcctgctgaattctaccaacagttacagaagaactaatagcaattcttctcaaagtattccaaaaattgaagaggaaggaatttttcctaacttattctacaaggccagcattacactgaaccaaaaatagacaaaaaaggaaaactataggccaatatccctgaagaacagacagaaaaccctgaacaaaatactataaaactgaatttaacagcacatttaaaagataattcaccagaacaagtgggatttatcccaggaatataagaatggttcatcataaacaaatcaataaaatgacataccgcattaacaaaacaatgaaaaaaagtcatacaatcacttcaacagatgcgaaaaatcatgacagagttcaatacctcttcatgataaaaactcttaattaggtatagagtgatatgcctcaacacaataaaggccacatacaacaaacccactgctaatgtaataccaatggggaaaagctgaaagccttttactctaagatctagaacaggataaggatgttccctttgccacttttattcaacatagtacaggaagttctagctagagctattaggcaaaagaaaaaataaaacataataggaaaggaggaagttaaattgtctctatttgtagatgatatgtcctatatacagaaaaccctaaggactccatccaaaactgttacaactaataaaaaactagtaaagttgcaggatacaaaatcaacataaaaaaaagtagtatctctatatgttaatgcaaactatccaaggaggtgtcagatctctcaaatgaaaactataaaacgttaatgaaagatttgaagaagacacaaatgggaagatatgcatgttcatggattggaagaatattgttaaatgtccatattgcccaaagtgatccacagatgtaatgcgatatctatcaaaacaccaagacattcttcacaaaagtagattaaaaacaatcctcacattcgtatggaaccccaaaagccctgtatagccaaagcaatcttgagcaaaaagagcaaatctggaggcatcataccatcgcctccaaaatatattacaaaactatagtaaccaaaataacatgctactggcatagaaaagacaacaggccaatagaacagagaacgcggaaataaatccatgcatatacagtcaactatttttgacaaaagtgccaagaacatatgttggggaaaggatagtctttcttcaatagtgtgctgggaaaactgaatgaatatctatatgttgaagaaaaactagatctcctgtctctatcatatacaagaatcaattcagaatgagttaaggacttaaattctaagacttgaaacttgaaactactagaaaacaagatagtggaaatgcttcataacattggtcaggacaaggaattttgaataagaccttaaaagcacaaccaaaaagaccaaaaacaaataaacggaattacactaaaggcaaaggaaatcatcaataaagagacaatatttgcaaaatatttgcaatattgcagaaatatttgcaaaatatttgcaatatttgcagaaatatttgcaaaatatacatctacacatggttaatatccaaaatatataagaaactaaaacaactcaatagcaaaaaaaccccaaacaacccaattaaaatataggcagaagacctgaacagacgtttctcaaaagaagaatacacataatatgttcaatattactaataatcaaggaaatgcaaatcaaaaccacagtaggtattgcctcatcccaattagaatggcttatcaagaaggcagaagagaacttgttggaaggatgtggacaaaagagaatccttttatactgttggtaggaatatatagaaaacagttgacggttcctcaacaaagcaaaaatagaactaccataagatccagcagtcctactactggcatgtacccaaaggaacttaaatgagtatgttcaagaaatatctgcattcccatattactgcagcactttccacaacagccaagatatggaaccaacctaagagtctaccaacagagaatggataaagaaaatttggtataaagtcacaatggaatattcttcagctatttaaaaaaaaaaaagaaatcctaccatttgcaacaatatggatgaacccaaaggacattataaacaggaacagaaagacaaatactgcatgatctcactcacatgcagaatcttaaaaagctgactcttagaagtacaaagtataatggtggttattggaggctggggtgtttttcagggagagaaaatggggaaatcttggtcagatgacataatgacagttagatagcaggaataaatttaacagctctattgtacagcaaggtgactatagttaatgacaatttattgtattcttaaaaacataaaatttgtggatactatgtgctatcaccacaaaaacaataactatgtgaggtatacatttgttagctagatttaaccattccacaatgtatatatacttcaaaacatcatactcatgttgtatacaataaacacataaaatgttatctgtacatttaaaaaaaattaaaaagcttacattatagaaaaaagagaatacttcttttaaaagtatgcttttagtttagttttcatttctgtctctcttacctcttgatcttttttagtttttctttctagagcctcaaattatccaaatcattcttttcttttaatttcaattccatttcttctttttctgttcgtagttttcatagtctaataccagattatcatagtcagcacgaagtgagttcaactcactttctaattctcctattataaacaagaacagattttccaatcagaaaattcaaatattttttgttccttaataaaatttgaattatttaaataactactttaactttgatttgatatctttctaagttctacattttggcaaactagctaacttagaatagattattttgaaagaaggagaatttaaaaatatatcaataaagtgtatgtttgcctgtgcctgacagggaattttgaccatagtcctcaagctcctcagtaataaaactgataattgaattccccaatctaactaactcttttttatgtctcagatggttctgaattcaagaatggaaacagagatattatttattgactctaaagctaatgacaactgtgttttactataaagaggcctatttctattttctatattatataagagaagagataaaccatgagttaaaaaaatacttttttacaccagagattgtaaaaaaacccaagaaacttctaatgtatgtattaggaacaaaaaaacactttatcaataatctttataggaattaactaacaataataagtagtaatgcaattatattctaaaattcaaagaaaatgtctattactttatacaactatacatctttaaacacgagcaatctacaaagtaacacggaatctaaacttactgatgtattcaccaaaattacctctccctgatatattatttatacattataaatgcctgagaattgacacttttaaaatcagtcttgttaccctaatgagtttaccaaggcaaaacagaaactttacaaacattgtgaatactaagatctgctagtaagagctagaggcaaaggtttacctactagcacatgtctgccttatgaaatttttagccttctctaggtgcctgatggttatagagtagaaatgtaaagagaaaagccttcattagagccaaatcattactgaaattaaatgagaacaagtaacaaaacctaataacaaaagaattttaaaagagtaaaagcattatatgctgtaaaatacattaagttacctgatttagtagctttgtgctggattccattctatctcacttaatgtatcaagagtgttactgaaaacatcagacttgaacagacagctataattagagaaaaaaaaaatttgtccatgaacatgtttaccaaattcctaagtcaaattaaagattactaaaaaaattcttatcagagatactaagaacttcaattaactactatgtgctcagagtatgaataccaaaagtacattaatagatatggtcattttgttattgtatgaattaagatgatcactggttggaattagtgacacaatacaggatcctaatgaaatataggttaaaaggacaaattctgaatttgagatttgatcattataagtagattaaaattcccccccaacagactgtactattgaagaaataattttgaaacagattcctagtcaatgccactcttttaagattagcaaaggcagatgccatataactaacaatttaattaataataattagaaaataaaaacacctgtctcatgtgtgtttcaactagtgcatcattctaggagattcagaataaagaacttatgattactttctatttatttatttatttatattttttgagacagagtttcactcttgtcacccaggctggagtgcaacgggtcttggctcactcaagctccgcctcccaggttcaagcgattctcctgcctcagcctcccaagtagccgggatacaggcgcctgcaaccacgcacagctagtttttttgtatttttagaattacttattttaatcatagtctccattgtaatcacatatgaaatacacagtatttaaacatgtttatcacttaactgagctataaacatagtttctctttataaggatgcttttataattaaacatagtccacttgaaaaaagcactcacattcatcaatttctcgtaataaatttatagaaagcttagtgtttttgttgttatatttgttggtatattaaattgatctgcatagtttgagttcttcttttgttaattttgccaaggcaccaagtaactcttcgttttcttttagcctaaagaagagaaatcaaaattatgtcatatagatctgtattcaaacataataaaacaagggaactagttctatttttgaaaaccattgacttggtagaattcttattaagcctagtttaaaattttatagtctaaggatattgcttaaaaaaaaaatcaaactcttgactctttacttcactctaataccattttctttttttcctactttgtcctcctcatcatttatccactccttcctcaaccttcagggacccatctcctggttcttaccttacccagctgctgtccttaccactcactcgctttgctagtttctcttcctgtgcctgcctcttaagtgtgtttctccaggtttcatagcaccattcttctcttgactctttactgggtgcaagtatcatctcatcttatttgactcttcggcaaccctagggttgtaatcacatctgaaatacacaaccctaaggttgttgagagatcaaataagatgagatgatacttgtatcgagtatcaaccttactacatctttttaacagtgagttgggtgcccaacaagtttggagaagttgcataaggttgtatagccaattggtggtgagcccattgtctattacttcagagcctatccatgcaaccattccgtcacattgcctctaagattacttgttgtccacagaatatactgcatactgtcatgcctctctgagtgctgtcttctgcttgaaatggccagccctttccacaccctgctctgcaaaagccccatcatattaaatcctcgactccaataaccttcagtttaatgccagttgctaccaaagccacacctggccttgtcattatctgaaagtcataaactagacctcttgctctcattgccgttgctgtcctccaaatcattaatttagttaatcccactatagctatttagctcatcaggggctatttactctgttcccttgttgcatgacttttttttttttttttgccatctccctcttggttctcccctatcatcttagattccatagatcactgtaatcatgtttgaaatttgaggtcaatgtctcaaattatttgacccactctctgtcccttacatgtaccctacacggcacactcaaatgcactgtgttcaagacctttatcagcctcctgagcactgccagagccacacagccagaaaccggctgacaagataaactggacctttaatgttgcatggcaatattcccttccccctttcagctttctttttcattacctacaaaggctagcctatttcaaacccttagtatctctgaaacttatgactctaccatcacctgccatctcagcagaagaattaaacctatttcacaagaaagtataaacctaaactcctaagagtactacctgcacagaagcctatcctttcctcctgtttgctccaattcaagaggtatttctcctatgttagtccaattctttctactatattaagattccatccatctaggccacctcaacacactataaggtggctttcatccccatcactaaattacttttgcaaatgagctctgtgtttctaaatgcaaataatttttgtccatcttatcttatttaacttctcagcagaatatgacactgctgaccactacctccctgaaatatttctccccttagctaccatattcactaggttttattcttaactgtacagctaaacctgggtgctttatggattcttctttctctgccttacccaattggagttttgccttctgtcacttgcctcctgttgccttctctcaacatgcaaccagaacaaactttaatttggatctgtagtgttaatgcccaaattgatatttatatctcaaatcttctacctcatattcacacatttgcttttcaacagcctgacatctcaaacaaaagaaatcccaaataaaacacccaccatttccctgctctttattcagtgtgccttaactcaaccaatattgttaccagctacccatgaagcaaggaattgcttgcaagtcattccggacacctccttctccctttctctgccctcaacatcaaacaatcacaaagtcctgctaagtttaccttccaaacatttctccaatttatccaatcactccaactccagagccacaatctttgcaggcccaagcaatctgatgtgcacagtagcacatctttctcaactataattctgatgtcacacacaaggctgttctttgttgttagcaaacatcacattcaaatccctcaaggaggtttaaaacgcccctgctactagaacatcttaatgcaaggaatgcataatgtttcttcacaactccaagcttttgtacatgtaggtctctttgaaacattcttctctaggtctttcattgggctacttcctgctcaccactcaaccaatagtcttgattgtcttctatatacctctgtacataatgcttattcacattaacaatgtacatagttgagaatatgctgtgtggaaagtgctgtgttgagctaattctacctattatctcattaattctcacacaacacttatgaggtgagtatcaagctattccacactgctacttccacggaaaaagcagcaaagtgaattcaagaaattgtccaaggccaagagtcaggaaatgacaattcaaatccaggaagtctagctccagaggtcattctcttatccatgacaccctcacacccaaaaagtctactgaataaataaattcctactcaattaaaaacaaacaaaaaatcacacaacaaagtaagaattttgttcactatgttgtttttctttcaccagagtctacattgaccaattatgttgttttatattctacaccaattttcctgagattaatatttctgtttaagtgaaaataatatttccacatattctagaaacctatggcttccaatcacccagtttctctaaatttattaagcagaatattgcaaataaattatttaaatacattccaaacttgttgaatagaatctctacaaataggaatcagaaattggcatttttaatgaatctcttaggtactataaacacaaaatcttctgggtttcttgaatatactgtatcaaaggatagaaagtgcatacatataataaacatatagaaataccaattctattctctgtacatcaagtttaagctgtcacttttaattttacctttaattcctgttgcaacgtgagggaagaagaggtcaccagcatcgtgttaagttttcaattttctcattctgtactttctgaagcaaatctttttcttccaaagttgggccaattggtctttttccattgcctgagcccgcgtctctaaagaaacctatagatgcaatattggattatgttaataataaatgtggctaagttttaaaaccttaaagtagcaaaaagaataaaatattaaatttgtatatgaactataagaattttaatttcactgaaataaatatactctaactgtagaacaccaaaatgcagttaccataatcaataatttctcagactacaataaaatacacatttcttctcatgtaactattctatataccatgtataagacaccatgctgttaatataactctattaattgcctaagaagatatgaatagtcagaagtcataaacaaagacttgaattctgatagtaaagatagagatgttctcataagattaccatttgatttttagctcattttaaaaaagatccttaatgcgtgattttttacaaaatatgggaccatatggttaaaacaaactaaaatgataagtaattatgctatattattagattgctatctaaggttagaagaggaattcaggataacatgaaaacacagaaggtggttctaagtaactctgagtttctctttttaatcgaattcatatgtatttgtgaaaaattttaagaaatgtctctattggcccatttgataatctcagattttgcccgttgaaaataaaaaacaaaatctaaaatatttcaagaaccaaatcttacaatttatagtaaattaaactaaaatttttatgagtggattcttcttctttaaaagtgattaaaaacctaagttgtagcaactcagatattcaggaataagagtctctgagcatttgggcaggtctccattctaaattggttctttcaatttaatgaataaatgattcatacatacctcctctaattgttttttaagatccattatttcttttctaaccttttcaggagagcttcatcagttgatacctcattaacataaggagtattcttcataatttagcagtactggcaaactggaaaaaaaatacgaaagtgctaagtgttcaacacttaaaaaattcgaatttaattaataatatttagctttcttatattcaagattaaaaaaatcatactctttctagttggcttaatacttttgaacaaagggaacattctatgtccttataacatgctctgtaacttatcctgggtgatagtcttcgggagaataaaaaagatatattgagaaacttaaaaacatcagcttattggaatctcatttacccctcaaggtccagtgctaacgctcctctactctgaagttttgcttctagccaaaaatatctctccttcctttaaactctatctagttattaaccacttaactactaatcaaaggcaattatgttgcaagacaagtgttattgccttgtcacagaattcattaattctgttaagccagggactctagtttctctttgcactctgacagtaccttgatctggtgctcaacagctatttaaagcaatgtttctcagagtatagtaccataagtaactttaggtgggtacaccaaggtgaccattagataacattgaatcctcattgagaaagctaccctactgatatttctcatttttcctttccttttttttttttttttttttgttttgagacatagtttcgctcttgttgcctaggctggagtgcaatggcgcgactcggctcaccgcaacctctgcctcctgggttcaagtgattctcctgcctcagcctcccagtagctgggattacaggcatgtgctaccacatctggctaattttgtatttttagtaaaacagggtttctccatgttggtcaggctggttcctttcctttttaaaatagaaaatgtagccttaggctcagagaaaatgaaggcaacagttaactaccaggaatttcagaattattttttatacagacagacacacaattttttttgttaccttctatttgtggcaagtaataatagttcccattgataggactaatattaaagtttccttttacaataaattaagtacaaaaagtagttattttaaaaatatcaagtcaatttcagtaaaatagtgttgggtgtggcaaaaatttgaaggtaagatacaaataatcgaagtctggcaaaattaaattaagaaatgctatttagagacaacatatcgattataacaggcgagttaattaaaaaaaactatgcttaattttagtggtaatgttttcttcttcaagctgatcttcccctatattaagctgagataaaaatcaaatcacctggagagcagtaagtgtttcatcaaaagatactggagtaattgtgcagataatagtgtctttgcatttcctcccaaggaattctggagaattcgtgttaacttgctatctcgaaatttatgaaaccacttagcaaggaataagtttacaggagaaaaagattgagaacgttttataataaagtagttggtttttaatgcagaactcttaaatcagccagagtttcaaaaatagtttacaagttatatgaggcagattaaaactactaaaaaatatttaaaacagaaagtaattcagtagattataatcatatgtataagtttttgaatatatggaagaaatcagtacattgagtgtcatcgaaatgttgcaatgttcaacctaatgaaaaatataagaatcagtaggtagtgcacaacgggataaacttacccaacttgtccatcactaagtttcttgatcacttgtccaaaataaataagcttcgatttatattacagccttccttgagccgcacacctgaatttttaaacaaatatgaaaactaaacttgactccttttctagatgataaacttatttatcacaagttaatgagagaaattagagggcagatgctaaagtctatgctctggtttagacatgacccatctttaatatcagtggtagaaagagctctctccctattggtcccacttcaagtgatcagaaaggttattacctgagaaaaatagtaaaaagaaaaaaatgaagagggagggaagatgcagggaaaaaaaacctgtttcctgaaagagcttctctagctcttcagttcaaatcatttttttccaacatctaaatataggcaactatgaacttacaaccaaattagcctctaattcttatttttaaattgttaatatgctcacacggttcaaaaagtttaaaaaaaaagtacatttgaaaaagctcccttccacttttatccccattcaaccagttcctatacctctaccagaaaccactgttattagtttttttctttagagatttttaaaaatacaagttcgtatgtattatttccttccttcttcactgatatcaatagtaacagtccatacatactattttgcacttgctttttctcacttggcaacatatcttggaaaaatttccatatcggtaaacactgatcttttcattcttttttaaagtataaaattccattttacggctgcatcagacttcattcaccaccccatcccctgttgaaggacatgtaggttttcagtctactgcctatacaaaaaaaatgtaaaaataattttgaacagatgttatttcacaggtgcattaattagctattgctttacattactacctaaccaaccggctaaaacaagcatttattttttgttcacaggtctgaggtggactggtttggtggatgtaggctaggctcagttgagtggctctacaataggttgcagatgagctcaagtctgttgaacaaacttctaatcttccttggatcagcagctcttctaatgcaagagtgcaggtgcaagctaaaccatttaagcattatgaactattcatttatatccttgcccagttttttgttggtttcttttaagcttttaaggcatctggactttgtatcagttcaaaagggttttcccactgtaagttgacttccaacaatttttagtttttttatattgaatttttgagctacttataatgcattccttggtgtatgatatatggatccgacttaatttttttcccaaatggctatcaattaatgaataatctatcttttctttacaaatttgaaggacatctttattgtattctaacttctgtatgtatttgggactcttgatggattttctattcttttcactgggctgacaattcacacagttttaattactatggcattataatatgttttacatcttatagtaagatagtaaaatcttaaattccactttctgctttttggaattttcctgctactcttgtctgtttttatgtttccatacaaattttaaaatcatcttacctaatttaacatgaaaatgtactcttgatagtcttattaggattgtgttaaatctagaaattaacacaaggcctgatatccttgtgattttgaatcttttccatttaagtatgcttctccattttttaagtatttgtttgtgtccttcaagtctgatttacaagttttcttaggccgggtgtggtgctcacacttgtaatcccagaactttgggaggccgaggtgggcgggtcacttgaggccaaagttggagaccagcctgaccaacatggcgaaactctgtctctactaaaaatacaaaaatagctgggcgtgatggtgcatgtctgtaatcccagctacttgggaggctgaggcatgagattgcttgagcccaggaggtggaggttgcattgagctgagatcgtgccactgcactccagctgggagacagagtgagagtctgccttagaaaaaaaaaaaaaaaaaagttttctttatacagtcttgtacaaatctttgttgagtttcttcctagatatcacatcttttaggttattaaaatggagtctttttgtctactaaatattttaacttgtttttattaatattttaactttaaaaattaatatctgcatattaattttgtaccacattatctttcttaatttccttatttgaaagtttaaatggtttttatggaattctcatgggctttcctgctgtacaatcccatcattgtataattttcattttttaattgatgctattgtagactaaaataaaaattaagcagaacagatgctgatttctatgttaaacttttatcagaaaatcacaattaatgattcattatattaataatgaatataattactttatcaatttctaaaaatgcctggtagtactttttaacctgtaaaataggaagacattaagactaacatatttcatgagttttaattacctgcagccctgtttgagcagctctttcactgcctgcaagatcaaccaaattctgtaagatagataaaataaatccttagggcagataatttgaaataataaaattcaaactactgaaagaacattttaatacatggtatatctgaatattcgatctgtatccatgtctcccatgctactgtttagcattcccttttttctctgagtcaaactgttctctatctgttcctttctttatatcttcataatgccaccagtataggttctgtttcctatacaaggtccaaaaacttactatggcaatataattctttataagctggcacttgcactgctccaactttgtatttatccatcccttatcttacctctagctgaactactcactattccccaaacaccccatgtacttctacacctcaagcaccagctttttgctatttcctttattcagttagttctaatgttctattctgtcctattctttattcaagaaccaggcacaaagattatctcctcagcatagctttgcctacttttccttcctccccgccagatttcagatgaactgctccttgaactgcataaccagaaatcttataaacatgacttatagatacgacttacatttatagcacttattttgttgggctagtctgcatgctagctgtactatgctgtagcaataccatgactttactgtggcatctttaagactggacctctctttcatttcacaaatattactgaaaagaagtggctgcttattatgctcaggaagtacatcaggtgctagggctacaaataaataaggtctctgctctcatggagcttcattctacatagaggaggaggctggtaagaagagataaaaagacaaataagaaacatgtgtgataagtgtaacagagattatttaaatagagctggaaaaggggccagtagctttaggtcataggactggatagcagtggaaggcttgtcattaagctgcgatctgaatgacctgagagaggaagctggtcccaaaaagatcaagggaaacagtagtctagacaaaaagaatagccaaacacttagtcacaaagcagaatgtgctcagtgtgttcaaaaaaatagaaaaggcagttggcacagttggtgaagtgaagacaggaaaagacagaataagagaagtagacaggggccgattatgcaggactttttaagtgagatctaaaactctgaaatgtttatattcaatgagagccattgcagggctttatgcaagggagtaatagaaccctgccttgctagattggggaagtctcctggataatatcctgcagagtgttttcctactttgttccattctccctgtcacttcaggcacaccaatcagacgtagatttggtcttttcacatagtcccatatttcttggaggttgttcattacgttttatcaaattcaggaaatacagagaatgccacaaagatactcctcagaagagcaactccaagacacataattgtcagattcaccaaagttgaaatgaaggaaaaatgttaagggcagccagagagaaaggtcaggctacccacaaagggaagcccatcagactacagctgatctctcagcagaaactctacaagccagaagagagtgggggccaatattcaaattcttaaagaaaagaatattcaacccagaatttcatatccagccaaactaagcttcatagtgaaggagaaataaaatactttacagacaagcaaatgctgagagattttgtcaccacaggcctgccttacaagagctcctgaaggaagcactaaacatggaaaggaacaaccggtatagccactgcaaaaacatgccaaattgtaaagaccattgaggctaggaagaaactgcataactaacaagcaaaataatcagctaacatcataatgacaggatcaaattcacacataacatattaactttaaatgtaaataggctaaatgctccaatgaaaagacacagactggcaaatggatagtcaagacccatcagtgtgctgtattcaggaaacccatctcatgtgcagagaccacataggctcaaaataaagggatggaggaagatctaccaagcaaatggaaaacaaaaaaggcaggggttgcaatcctagtctctgataaaacagactttaaaccaacaaagatcaaagagacaaagaaggccattacataatggtaaagggatcaattcaacaagaagagctaacttcctaaatatatatgcacccaatacaggagcacccagattcataaagcaagtcctcagaacctacaaagagacttagactcccacacaataataatgggagactttaacaccccactgcaacgttagacagatcaacgagacagaaagttaacaaagatatccaggaattgaactcactctgcaccaagcagacctaatagacatctatagaactctccaccccaaatcaacagaaatacattcttctcagcacatcacacttattccaaaattgaccacatagttggaagtaaacactcctcagcaaatgtaaaagaacagaaatgataacaaactgtctctcagaccacagtcaatcaaactagaactcaggattaagaaactcactcaaaaccgctcaactgcatggaaatgaacaacctgctcctgaatgactactgggtacataacaaaatgaaggcagaaataaagtgttctttgaaaccaatgagaacaaagacacaacataccagaatctctgggacacatttaagcagtgtgtagagggaaacttatagcactaaacgcccacaagagaaagcaggaaagactaaaattgacaccctaacatcacaattaaaagaactagaaaagcaagatcaaacacatcaaaagctagcagacggcaagcaataactaagatcagagcagaactgaaggagacagagcacaaaaaacccttcaaaaaatcaatgaatccaggagctggttttttgaaaagaccaacaaattgatagaccgctagcaagactaataaagaagaaaagagagaagaatcaaatagaccaataaaaaatgataaaggggatatcatcaccgatcccacagaaatacaaactaccatcgagaatactataaacacctctatgcaaataaactagaaaatctagaagaaatggataaatgctggacacatacaccctcccaagactaaatcaggaagaagtgaatctctgaatagacaaaacaggctctgaaattgaggcaataattaacagcctaccaaccaaaagaagcccaggccagatggattcacagccgaattctaccagaggtactaggaggagctggtaccattcctctgaaactattctaatcaatacaaaacaagggaatcctccctaactcattttatgaggcagcatcatcctgaaaccaaagcctggcagagacacaacaacaaaagagaatttcagaccatacccctgatgaacatcgatacaaaaatcctcaataaaatactggcaaacagaatccacagcacatcaaaaagcttatccaccatgatcaagtgggcttcatctctgggatgcaaggtggtttaacatacaaaaatcaataaacgtaatccagcctataaacagaaccaaagacaaaaccacatgattatctcaatagatgcagaaaaggcctttaacaaaattcaacaacacttatgctaaaaactctcaataagttaggtattgatgggacgtatctcaaaataataacagcatctatgacaaacccacaggcaatatcatactgaatgggcaaaaactcgaagcattcccttaaaaactggcacaagacaaggatgccctctctcaccactcctattcaacatagtgttgaagttctggccagagcaatcaggcaggaggaggaaataaagggtattcaattaggaaagaggaagtcaaattgtccctgtttgcagatgacatgattgtgtatctagaaaaccccatgtctcagcccaaaatctccttaggctgataagcaacttcagcaaagtctcaggatacaaatcaatgtgcaaaaatcacaagcattcttatacaccaataacagacaaacagagagacaatcatgagtgaattcccattcacaattgcttcaaagagaataaaatacctaggaatccacttataagggatgtgaaggacctcttcaaggagaactacaaaccactgctcaaggaaataaagaggatacaaacaaatggaagaacattccatgctcatgggtaggaagaatcaatatgtgaaaatggccatactgcccaaggtaatttatagattcattgccatccccatcagctacaatgacttttcttcacagaactggaaaaaactactttaaggttcatatggaaccaaaaagagcccgcattgccaagtcaatcctaagccaaaagagcaaagctggaggcatcatgctcctgacttcaaactatactacaaggctacagtaaccaaaacagcatggtactagtaccaaacagagatatagaccaatggaaaggaacagagccctcagaaataatgccacatatctaaactatctgatctttgacaaacctgataaaaacaagaaatggagaaaggattgcctattaataaatggtgctgggaaaactggctagccatatgtagaaagctgaaaccagatcccttcttacaccttatacaaaaattaattcaagatggattaaagacttaaatgtgagacctaaaccataaaaaccctagaagaaaacctaggcaataccattcaggacataggcatgggcaagacttcatgtctaaaacaccaaaagcaatgacaacaaaagccaaaattgacaaaatgggtctaagtaaactaaagagcttctgtacagcaaaagaaactaccatcagagtgaacaggcacctatagaaagggagaaaatttttgcaatctactcatctgacaaagggctaatatccaaatatataaagaactcaaacaaatttagaaaaaaaaaaaacaaacaaccacatcgacaatgggcgaaggatatgaacagacacttctcaaaagaagacatttatgcagccaaaagacaacgaaaaaatgctcatcatcactggccatcagagaaatgcaaatcaaaaccacaatgagtaccatctcacaccagttagaatggcaatcgttaaaaagtcagggaacaacaggtgctgagaggatgtggagaaataggaacacttttacactgttggtgggactgtaaactacttcaccattgtggaagacagtgtggtgattcctcagggatctagaactagaaataccatttgaccagccatcccattactgggtatatacccaaaggattataaaatcatgctgctataaagcacatgcacacgtatatttattgtagcactattcacaatagcaaagacttggaaccaaccaaatgtccaacaatggtagactggattaagaaaatgtggcacatatacaccatgaaatctatgcagccataaaaaatgatgagttcatgtcctttgtagggacatggatgaagctggaaccatcattctcagcaaactatcgcaaggacaaaaaaccaaacaccgcatgttctcaccataggttggaactgaacaatgagaacacgtggacacaggaaggggaacatcacacaccgggcctgttgtggggtggggggagggggggatagcattaggagatatacctaatgtaaagacgagttaatgggtgcagtataccaacatggcacatgtatacatatgtaacaaacgtgatgttgtgcacatgtaccctaaaacttaaagtataataaaaaaataaataaaaataaaaaacgtaaaactggaaaaaaaaagagaaccttgcataaagctcagcaatgactctcacaaggatccactatgactactgggtggaggatggattgggaaggggcaagagcagctgcaggagccccatcaggcagctggggcaggaatctcggtgagagataataccagcttgggttaggaggtggcagaggagactgcttgtaagagaagcagtgaaggggtgtcttgtttattgttttttaatctcagagcccaacaccatgctcagaagacaataacaacttagtaaatattgtagtgatttgaaagaaagtcaaagctttacgttatttctctctgtggagatttttgagacaggcaggtaaatatgtattaccagttaaggaggctaatttttcttgcacagtgtccactcagatgacacagatacataataaaagggcaaagtggtaatgaaggcagcatgagtgaagttaaagatgagaacaagcattcatattcaaagatactcagaggcccaatctatgagggagagttcatgtagagcagaaggaaataaagttagattggttaagagtggccaaatcttgcccaggaagtgatatacaaaagcaatggttagtatattcgaaatccttatgatgacttcagaaacaaagacaagggtcatggagacaaggttccaggagactgacatagtaattcaagaagatgagaaagtaaatgagtgtagcacccatggaaatgtttaaaggtaggatcagtaagaatgggacaagtggacaaagagaaaggcagaaaaagatgagtcaaaattgacttaggttccagcttaggcagctaggataatgctggttttactggaaataaggaatattcactatggaggaagaaaatagtttcgttttagacatattaaagtttgagataatgatgggacacaatataaccatctttaggaagacatgaattagaattcagagactataggtaaaatatttggcgtcatcaacatggaaatgatgacagaacatttgagagcaagaacttgagtaagaaacgtacagaatacctccaagtttttttttttttaattatttttttaggagggtagggaaaaagagccagggtagaaaacagaggagtacagctaagagaaactggatattatcatcccaccaggccaggagataatcagaaaagagccacctctaaagagacagagatgactctttagagattctttccaagaagattcttagagtaagtgggtaggctggagggttggaacagatggaaacaaatgacagagcatcacgtaacatgaggaaaatcatcaagtagatcactgaatatgcaagagtattaaagctaaattattaaaagttaaaattatatgaaatatcacagtcttggagagaaaactaaagaggttagggtttggttttttattgttaaattaaaacaagattaaagctactaaaataagttatacaattttatagcaaaatagctaaggtgaaattaggattgaaattaagtaattaataatctaattttataaaatctgaaaatgaataaacatattatagatgcttttttccctgaagttttctaatcaaataatcttaaatcatatcccacatcaagctaagaatttaggccctaaaaatgcagaataaagcaatatggtaaaagatagaaaaggagcagaaagaaacagcaataatttagtgtggaaagaaggaagtgaaggtttactaatgtggaaataggaatgtttgcataatgcatatattcgcttattcagcaaatctatattagacataaataggtataatgtgttggggctaccaggatgaatgcagtatcactcctcaatggatttaagtctaaagtactacgtttacaatacaaaatatattttattgttgtacttaagtaaaactaaagtaatgtgattactttttaaccatccaacctagatttttgttgatcacataagtcaaattacattggctgagattttacaaaaagaccctcaaattctaagatgatctaaagtgtaaatgtgtatagaaaaaaattctactgcattagtggttagaaaaaacatcaattcctaaaccctatagccctgacatttaaattttaggagatggcaaccatgacataacaggaagaagatcctctgaatttttcctacgacattttagctaggaatttgatgatactgacaagacaagcagacaatttgtagatttcctcccacatttagtttagttaacagttcttattaaacaaacatccagcaactaaattaaattttgttttggcccatacagtacattattatggttcttaatactcaccaaatgggataccttaacagatccttcacaattagaaggttcaccctttctctgctttccaaaatctagatagaaaaggcaagctgtagaaaaattagtgcattcttcttggaaagatctaacagatagatagaattacctaccatcctaaagatggtatgagaacactgcttctttgattcatttttgtttctccataatgcctgctctctgtaaaaatgagtttatttcagctgcatatataataaaatccatagaaacacaataatttttattttaacttaaaaagtatgatttgaggtccaaacgtgcttgattgaaaagatagtttttacaagtgttcaaagaaatacagcataaagtcttactttctccctttgtaatccatttcaaagccatttcgatgtatatacaacttcttctgtgagatcagcaacatacacattcctctgaaacaagttaattatggaaagattagagaaatagaagtcacaagtttgcttttcaaaagaaggtgcaactattatagaattcatttgtgaaagttaaaagtggcaaatggaaccataattctgtaggatgtaacaaataattctatgaatacccacaatttatttcacataccaaagcacaacaaatctaacctgatacttccaacttgctatttttacacttaaaccaaaatattagagctgtcgtattttaaaactattcatattgtttaaaagatgaatataaatacttcaaaaaaaccctacatactatagaaataggagacactttaaaaactatagaaattaaaggtaaacattcaaaacaataatctcaataagtcagtcaattttaaagctcccttaagtctgctactcacattacatcttctcgaataattaaaggtttcattttttgagtgccacagagtaaatctgtaatgtttcattgtatatttccatgtaagatacacgtaagagaaattccctatcaggaaactaaagaaaaaaaattatataaaaacaccaggaagcatccaattgtgaaaacctaatgctaatgctcatgtgcttaaagaggtaaaatgtatgtaaaacaaactaagaaaccccttggttcactgttgacaaaataatgaacacaaaaatataaaagcatcgttacagaaataatgaaaatgaagtaccataaagctgggagaacaccaactctaggctcaaactctaggctcaaaataaaccctctcaaaagatgttcttattttaataaaaatgctaatttgaaaccaactaactcgttgcctattctggctttctgcttcccttctttttttacctacatccactttctactgtcctttataatcactgatagttaaatggttaggtggagctaaccattctgataacattttttgttccttaatgcctactttttgttgagagtattattgttgcagaattcaagagaaagataaaagaactttaagctttataaagtaagttgtggagataaaagtgaatctatgctatcctttcttctttccccatggataatcaaacaataactgtaaatctacttcctttcatcttacaagagaaatacactaagactggtacccagtttttactagttttacctgtacgtactgaaatccagttaagttacttaccttcttaattttttggaaaatgtcatgaattgccctggtataactcccaaatgatcttctgaacccatcatggtatatgtttttcctgaagcagtcgtccataggcaaatatagtacctgcaaaaaacaaaacacacatacgcaaagattaaaaaaaacctataatgggtaaaactatgcatgcttgttgcacagacgcccaagactaaaatgttctgcagcattgagtgaatacaaaccattgtagccttgtatggcagaatcgatgattgggctgctatttcttcatacacatttttggtagtttcattaccatgaaagacacgatctaacaacaacaacaacaacaacaacacagaagttaaatcaaatgagtccactgtgttttcatccaaattagtaattattcccaaaagtaaaactgtcagaatgtaggatgatcaactatttagacacagtatttttttcaactttttggttctctgaaaatacccttccctaaggtaaaagagttcattttcacacacaaaaaatacactacaagtcaacttttctatgttctttcaagggcaataaggtatagtgtttgcacatgggggtctggaatctacctagatgcaaattagaaactgtgattataactgttttaaatgccaattggttaccttacttaaatacatgatggaaaacaattttgtttccagtgaagcagtttatagaaggcttagtctaatctttagtgacaatctaatattattgataagccttttgtacttttaatagcaaaaggataacaaggtaactttgatgctattataagcttaccaaaattgaaggatttacttccatcaacttgataaatgcattattgtcagttttccagtaaacttgggcagtttctccaagtgattcttctctaaaaaataaaaacaccgcattttaaccagtcataaaagtcatgtcataggaggaataattgaaagatttcacctgctaaagaatattttgaaagatagtaacataagagaatgacagaaagtcatctttgaggattcaactcttaaatggagcttcagtgaccttctgccgcctcaaaagtttttcttgtgaaggctttcattctcaccctctcccccagtactggtaaacaaagggatgattcaaaatgcaactctgattatgtctgtcttgcttaaaattcttaaaaccttttggaacttatgaaatcctcagcagggcacgagtcctagatcatgtcatttctctcttccattttctctgaattcctagatacatcctaagctctacctgaaggtcttccccaaatgacagatgaacctctctgtgcctggaatactctgacttccctttccattaagtaacatagggattattcactcatgaaaagcgtcaagacttttctgacaccagttcaccccacgggaagctttcgctctgatgggctaataactcctctagcaaacattctctacctgcccatcataacacttgcaaaaggtatcctaatggtttctttatgtagccgtttaaggcattagataatgagctcccaaaaataggaaattcctgatcttggtatttgcatttattaaaccccgtgttcaataaaatttctcacacacacaaagtgttagcatttcgggtcgagggccagaagctagtgaagcaaccgatttcatttattcctcttcctgctttttctccctagcacttattacctacatatcccacttaacatcctacattttcaactttactttctgtctcgtcccattagaatggaagaccactgggcaatgacgggagtgtctgtgttgtacaaagtcactaaaaaaaaattgataatatttgtagaatgatcttgagtgacgattgaatgtaatgtgacaagacagactagccctgtcttcagagggtctggagacagcagttaggtgtaaaatgactaactgtgatgagggccggaaggcacggtcccatacgacttctctaggcggggaatggggcagggaggagcagatgcgcaaggcagagcagcacagaagggaaggtctgtatgtcagcgagactgagttaaatttagtgaatctcgcagctggaaagtatcttctagatctccgatcctcccctgtcactttacgaccctgaaacgatggccagcagccgagtcactagacagcagagccgggaagcagcggccctggaaacatcgtaggcctcgcccctccggctcagggcggcgccgcaggcccagcgggaccgggccgtggtgtggcccccctacctgctgttcagcggccgcactcgcacgcagacgccacggctccttcctccgccatcctatcaggctgaactggtcccaggaaaatggccaggccctccgcggccggcacttcagggctcacaggccgccccgcctttaaatttaaaatttccaaacgccgcatctgattgagccgtggcctcgtgacgtcatgggccattccacgtgcgggcagcgcgggggacgcaaggcgggcggcgtgaccactgctaaacaggagaggggatttaagggcccagcagagagtcggaggagagggccgaagggaggggctcccaggagtgggcaggagtggtggtcctggaataccagaatactattatctgccaaaagctagcgaacgtcatctccaccccatccttaaaaagtttggaacctgtagacgaaactaggtagagatacatgtattttcactacccaaacagaattgccgtcttttaaagaaactgcaccaacagtttaaaataactttcaacagcaagagttgaaattcgctgtccagtccagaaacgtgacaagcctgtttgcgccttagaaaatctgagtttaggcttttctcctgtttctctctctctgtaactcgttccattagctgtggcttcctcagaggttgaattagggaaaataaataccgaggactgaaaactcattgagtaatgggttgatactttttttttcttcttttttttggaaacggagtctgctctgtcaccccaggctggagtgcagtggtgcttatctctgctcattgcagcctccactcctgcattcaagtgattctcctgcctcagcctccccagtagctgggattacaaggtgccgccaccacgcccaggtaatttttgtatttttagtagagacggggcttcgccatgttggaaggctggtctcaaagtcctgacctcaggtgatccacttgcctcggtctccaaaagtgcgggattaaaggcgtgagccaccgctcctggcctggtttgttacttttattaactaagaggaaagctattctaaatacagtgattttttcccaaaaataatgcttattttccctttctttctctctctcttttttttttttttttttttttaaataaacatgagttcttgctttgtcactaggctagagtgcagtaggctgaacacagctcactgcaggctcaactcctggcctcagccaagtggggttcccaccttaacctcctgagtagcttggattacaggcacatcacaagccagataatttttaaatttttttgtagagacggggtggtggggggattagggtagggagtgggtctcacagtgttgcctaggcaggtcttgaactcctaggctcaagcaatcctccttgcttggcctcccaaagtgctgggattacaagcatgagccatcgtgcctggcctagcttttatgtgtactttagaaagctatccaagatgtttcatttattaagagaaattcaaggtgcaggttatgtacacagaatatgtctggatatacatacataatttttggaaagatacacagatatgcctaatttccttgcagagtgaggactgagttagatggtagactgagttagatgaagtagtttctttcaatttaaagaaactagtttatagataagaacagtaaagaaaaatgagctattcattcaagatttgttttggttaactagctgtgaggtagtataaacaactctttttattgctagactgtaaagatacttggttgtatctagtaagaaaatacagagttaaggaagtatattttaactgttgtttttgttttaattgtgggcaaatatgagacagctgaaggcaggaacctatgaagaagaagggagatgtgattaatcaaaatttctaatgagacaagaggaattggttcacgagtaaagagaagtcatcagcctttcatagttgtgcttatgatcgttgcatgactgtctttttttatcatcacagcaggtgacatttattgaagatttactatatgccggctctctattatatgctctctatccaattttttcatctgactttccaaattgttcatcagaaatattcattgaacaactgttatgtgccagatacggttctaaggtcaggaagcacacagtaaatagaatagacacagtacctgttgttgtagagttgctattctcttagaggagagggtaatacagaaaaatctcagtctctctctctctctctctacacacacacacacacaccacacacacacacacacacacacataatgtaatgattaataggatcaggagacagagaggagtgataaggtgggttaagagtgctagtttcttatgaaacacattcttgtgggaagcacagacaatacataacaaatatatagtaaaataatgtgttgggaggaaggtttattttagtgagatgttcaagaaagacctgaggaggtgacctttgaagtgaaacctatgtgagaagatgagccagacttgggaggacaagagaaagggcgtaccagacagaggaacaagtaagtcaagaagccaaggcttgatcgagtttgtcatctgtctgagacacaaaggggagggccctgtactgaagcatttgtggcaatggagagaggtaggcaggtccaggtccaggacccatggggcttgtgggctgtgataaaatgtttggatcttattctcaagggtgaggggaagcctatgggggttttaagcaagggggtaaaaagggattcattaattccttcaaacaagacactcttttttcactatgaaaatagaagcttccagaaaagactttgccctaattcctgtcaatctggtactcactatgtgcatttgtgcttgcatactcgccttccagactgtaactttataaacactgtgtgttttccactctggaaactctccatgtgtgcactggatacagtcctctccttccactctctgtcctgcttgtcattttctcctgctctagaaaaccagtcttaacagcaaactatgccttaattcctcccatattgagtgtctaatatatatggcaaacttaaaatgtctataccaaattcatgctcttcccctcaaaatctgctcaatcagcagttttctgctt

SEQ ID NO: 2891 - DNA, 31936 bp, Homo sapiens
catttcccaaaaggagccctacccagcaatgaggaattcagatcaggctcagagtagggttaacactttcttagacaattaattactaaaatgactaacagtgtttccctgaatgagactaccttatctgaaagacttaggtgtgtcaaatacatgtggccaagttaccaaaggaaacaaccgctattttatttggttaattgatttagtaatttcattgactcatgaaggaaaacctatataatgagataagaataaaaggaaattacccctacataagggacccaatacttgcttcatcctttctattctctctcctcaccaaagtgaaatatacttactaaaagtttaaaaattatttctaggcccactaaaatcagaatctacagagaccgaatctaccccaagtgggaagacatgacttatggcctgtctaaatgccaagtgttcaggtatgccagtaggacccttccccgccctagggataagtcattattggtgtaaatcaatctctgtaacaccattcctcttgccacttattggctaaggagtgagcatgattcatttcttgccattggaatttgtaggcagactattggggcatattacataagattttccttcttaataaagacagagagagaggaggaaatcctctcctctttttgtctttaaatgaccaggtaaagaggcaagggaagttgggatgtggatgggtttcttgggacaattctagcagccatcattcacccatgaagaaaagtcaaattagctgaacacagaaagcaacatagagccctgatattactgagctactgaacaaacctggacccacctaccttcaaacatcttcatgtatgagcaaagtacatctgtatttttgaaggagttttggctgaatatcctgttacttgcagccaaaagcatcctaaccaatataacagtgattttgttgcagaaccatccctgagaagccctgatgaacagcagtgatgaggaaccttgtcttacaaactttagtttctatctttctagcttcttgttacagtgcaaaatcatcatgacaatgaatgatcagaacactgcctttgtattgaaatttctcaaaaatgtccagaaaaaacattttataaagttaaaaattagtgccaaggttttcactgccattcttttagtcaacgaaattatttggattgtaagattatgtatttcccctcctctaccctgaagttaaattgtatatttgaatactgaatgaagaaaagttggacttataaacgtttggttgttttccaaattccactcatgaaacaaaacaacaacaataaaatatcactactattgctgcctggagtttatttctgctttttctacttgaagaaattcaaaatctaactcaaatgtcaccttctcagttttcctaactccaacattgacaaactgtctccctcgttttcctctctgatgattcattcttcattcaacaaacaagagctattaagctcttgttacgtcccagtccttgagctgaggatcagaagtgaacggtcttaaatagttcctatattcagatcttgtaatctagttacaggagataaaggatgataaatgattcctaagcaatcacaatgaaatatggttaagtttcaacttagacacataacaaccccatcccttaacaagtttcatttccttttttttcttttctgagtggagtcttgctctgtcacctaggctggagtgcagtggcacaatcttggctcactgcaactgtgcctcctgggttcaagcgattcttcagcctcagcctccggaatagctggaattacggcgtgcaccaccatgcccagctaatttttatatttttagtagagatggggttttaccagttggctaggctggtctcgaactcctgacctcaggtgatatgcccacctcggcctcacaagccttaacaagtttctctggtgtgataggcacaagagtaacaaagatgactaagatgcgtctgccctttaagggatggtcagagactgatatgtgtttaccaaaatcgtttactctttgcctgggtccatagtacatttccagtctcccttgcaggtcagtgtggcatgtgactgagtctggtcaatggcatgtggacataaatagtatgtgatttccagtcctcacccataagaacaatcctcatgcaatcctctagtagcttttctttttctgtccgttgcctggaaactaagactccaaggtcttaggggatagcaaagccataatataaaaggagtttgggttcctgaaaattgagtagaaggccaacagctgaacacgtgaatggacttgacatgaacgagaaataacctgaactatgtttagttactgagatgttttactttatctcttacagcagctactgctgcttaaggttatattcttcagtcaatagcatacgatgattcttagcacctcgaggatgctacccagtccacaaaggcaacaccccctctggttaatctgagaactaaaataaaagcaagaagaaaacccacgccaacaccttacaacagtaaacagacacgcgcccgtcaccgggtgtcaaacagaaaaggctgggcccctcgctcgcgtctccggtccagcaggcctacagggtaccgccgctggcgctgggtttatttttacccttagtgtctctggggcctctcacctggcagctccggcgaagtcgaccaggctccgtctgaacgattaggaaaggggctgtgggggaggcgcggagcccggtctagccaccgcgctctggggttcccgattcgcgcatcttcccaggctagccgggaggctgcgttgactgcagataaacggtctcagggcgcggcaccgcgtgtagtggccccgcctttcgcacgaacccgctgggcgacaccgcgcagggaggtccgacccgtcgcgccggtacaggctccggagtaagcatgggttggtccggggcccgcagcggcagccccggtgccctccgccgggtttcaggtccggcggcgcgggtgcagagccgcgtgcgatgcctgtgcgcgtggcttcccccggaaaggtggcgccaggccgaccatgggcccacgtcccggggctcggagcggcaccgcgcggtctttcagctgcttatcctccctgggcgggtccgcaggctctggggccaggaccagcgagctcccgggaaagcttcccggaaagcttacccagagagccggacccaggcgccgagtcttcccggagatgacgagacaccgcgagaggagcacagcgcggctcctcgggactccgcggcgcaggccgggcagcccgttacttgttttatcgttcccgaaccaacctctaagttgtctatcagtcctccaccttttagctgtacctcttagaagtgtttctcagctgcggtgggaagataggattctttcttaaggtgaccaattaaatggccggaaaaagacttgttctgcccccctttatcgcttaacacctgcccttcttgttgtattttagtttttaacccttctatcagcagtgtgattctatttcatttaattctcatttcatgtttggtcttccttttctctgtatttcctcttgtgtgtgttaagacgcgcgcaccccttacctgttttcactcctgtaagcaagtgccaatcttaatcaccgcttttcaagcaagggagattacctcaaatttctccaccagtcagaaaccattcattcttgtctctcaggtcctcttttgtatgaacctattggataggttccatccaatacccttcttcagatcatctgaaatgattatttcctaaacggaactcttcctctcctaaagcttgtaaaaatttctagtgacattcagctcctcttaccacaggaatgacatatatttttccttttagtcatatgtacttcattaatattcacctgatttgattaacatgactttggagaacattgaattttttggctagattttactcgtttttattgctgatagtgtttataaaaatgttttatagtttatggtcggctgtgagaagactaactcagatcatttgttaatgttggagcccattttgtagaattcgttgtgcattatttaaaatttatttgttcatagctatacatatattatacatgtatacctgctcacagctaaagtatttcatgacatacttgtaagagtcagtgttctatgaattcactagagaagttcagcattttgattatgatacacgaaaagaaacccaagtcatttagcttaactccttaattcataaaccagaaaactaaaatccaagatagattgggtgacttggtctagatcacaaacaaagttagccataattcggtagtgtagtgcccggtccaaaacctcatagataatcttatatcaatggactctttctgaatgctagtcaaaatgtccttttgtgtgaattttaatgtacgtcatcaactgcatgatattcttccccatacacaaagtgttatctttttgttgtccattcagaattttccatgttaatattaaagttctaggaaaaaaggctaagaatcactgcacattattgagtatctcagtgtgcatcataccatttggtcatttgaggttgcaacaagtaaaaacaaacataaaacccttaaattaaaataaaaacaaaaaactttgccctgacaatgttacgaattaacatccataaatttacttttcttgaaaaatttattttctttaatttcgtttgttcctgttacataatttatatttaaatttacatttatttatccagaaactatgtccaaatttatgtcctcttttctgttatcctggagtttggtgaagaaatctgtacttaatttagaaagaaatccctctaactgacaatattgttagctaactatatatttcttaggcccatgtcaatatcattgcttattttaataaagattgtttagttagactaagaaaatagtaaataatagggatggcatccgttaagtataaacactggattatttttcataacataacaggtcaacatatcgttttgaggctgaactcctttactccttttactgtaagctattgaagccaaactcttcctacctttgttcatttatgatggtgtaaaattttaaaattaggatctacatacagacaatgcagaattatataaaaatatttgaatattgaaaaatgaagtggaaattattattatatttaggtacagggtcttgctctgtcaccctggagtgcagtggcatgattacagctcatgcagcctcaaactcttgggctcaagtaatcctcctgccttagcctctgttaaccatgcggtcctgaactcctggccgcaagtgatcctcctgccttggcctcccaaagtgcaggaatataggcatgagctaccatgcctagtcctgaaattactatcttcttccttaacccccatccccccacaaaaaaacaaaaacttccttttttcttcatatttacattttaattgtatatgtgcaatggcctatttgtatcaccccagagtcatgtgttgacatcctaacctgcaatatgtacattaggaggtggggcctttgggaggtaatcaggtcataagggtagtgccctcatgacaggattagtgtccttataaaaagacacatgagcgctcgctttttttctctgctcttgcatgtgaggatacagcaagaagaggaccatctgcaaaccaggaagtgggccctaaccagaactatatctgctggcacctttatcttgcacttcctagcctccagactgaaaaataaatgttgttgtctatgacactccatctatggtaatttgttatagcagcccaaagtgactaagaagatgctaacaaatcgagatttattttaaaaactattctcctgctatgagttcaatattttatttctttacaatgatttcagaagagattacaaagagattaatatacttaaagaatcgactcttgcaaacagtgacatcattaaaaagagcttattttcattaacatgtgattaacggaaggagatgattggtgagttttcttcgtaaccaggttcactgtggataggaagggccgccttccttcccaccatggagatcctaaaatcacaagctccagcctccatcaatgatgaagggttaccagttacataagcagactgcagtgataaacacaaggagacagaacaattaacaggtttgatacaggctgtattttgaaattttcctgtgactaggataactaaacaatttcccttgtcctaacaggaaacctcacttaaacacttaattcagggaaatccaaattaacattggttgatttagaactgctgagtgtcctgtgatctggaactaaatggcctctggctgggtctaagcacctgtcactgttaggtatttggtctcagaatccccaaattaaggaacagtatgtatagccattccccaaattaggatataggctaaaagcacattttcattttgaaactagaactattcaaaactagctaagttttatgccactaataaacttttgaacataagtgtacagtcataaaatggtcatattaatgaccagttttttaaaaaagacagcatatatttagtgatcaattataagtggataattgtaggagctgaagcacactaaatgtgttttaaaaattacatgaatgataataactataatccattaagctataaaaatattctatattagtttcagtatccaaatctttataaaactaaggaatttaaaaaataattactggtttattcccataatttttcattttctaaataaggctgaagtgatctttttggtagaagtttaaaaatcttttacttaaaatggataataaagactcaaacagtctaaattcatctgaagcctgaaacaatgaagaggaagtaaggatatcataatgaatagagaaattttaagagttcaatagataaaagtgataatatacagtaggtgaactagggagttattagtcacttcaccaaagaaatacctcaactcccccaagttcttttaaaagacaagctctgttacacatatgaactcctctggaaactctaaaaagccaaaggtacttttgtagcacatttcaagccacaacacttccaaatatctgtaacctaagctctggctaactaagggtaatttagcttatcagcagtacccaaatcaatgagctattctgaagatacggattcagagaaatcacaaaggctcatgtgcttcttcattaacatttgtctattaatttccccagctattaacaattgttgttaatagttgggagaagtctgagaagaaactgcgctgtcacggaaacatttcaatccctgtatttgtcacattcaccactatctggtgtgcaccaagttactgggaagaggagctatcagttgttccctcctcgctccgcctagtcccctttccttccctcttctcacacattacagttccttgttcctgtagtatcagagacataaaacagaggaggaccttcttgtgctctataccttataagcatcattttgctttcatcttaagccatttaaaagtaaacaatagttattaaggaaaaaactgttaaacgatgcaaagtggaagagattaaattaggaatttccatacacgatgatgaacaagtaagatttttaaaaatatttatttattttgagacggagtctcactctgtcacccaggctggagtcagtggcgcaatcccggctcactgcaacctccgcctccctggttcaagcgattctcctgctcagcctcccgagtagctgggactacaggcgcccgccaccacgctcagctattttctgttttagtagagacgaggtttcaccatgttggtcaggctggtctcaaactcctgaactcagtgatccgcctgcctcgacctcccaaagtgctgggattacaggcatgagccaccatgccggccacaagtaagaattaatagagaaaaaagagccagtggaattctcccaaacaagtcaaagtaaaactaaaacaccacatgcgaattctgtgtccactgaacacaaatctgcttaatctctccccatttcacttagagctcttataatcctggaggttcaattttttgacttgcattaatcagggtttccccaattataatttttgaaaggaactgtctctcagaaaattgagcatttaacttttttagtcctccattttgtttgctacaagattttatgtaaagctgaataagaagaattagtggctcagatcgaagtggtctttctttgagcaaattaaatgagaacttatcctatcttataaatgtagcatcttagcacatatatgccacaaactctctaaaatgatatattttgatgagcaaattgtggccaaatgtgattgagggtaatgaactccttgggaagaaagtgcttacttcatcagaagccaaatacacgcagagcatggctatttcttctgcagttggaatcttcccgtcttttgtctcttcaggaaatcattccgtgcctgtgaccagagaccatccagacattagtgatggaagcagctgtatgtgctcacctgcatcttgttcaaggagttaaggcaagagaatccactggcttgctgccttgatgaataatcaactagggttatggtgatcttttgccaaagttactcaaattgtttgtgttatactaaaacccacagatattgtgacaatcagaaagctaatgttaaaggatgagggcattattttttcatcttcaaaagttgtggtaagtatacagaatataaaatttactatcttaaccattttaagtgtacagttcaatagtgtaggtacattcacactgttgtgccaccatcaccactgtccatctccagaactcttattttattattattattttttcttagagacagagtcttgctctgttgcccaggctggagtgcatgttgtgatcatagctcactgttgtacctcaaactcctgggctcaagcgatcccccagctcagcttcccaagcagaactcttttcatcttacaaaatggaacctctctactcattaagattaactactcttttccctccttccaagcccctggcaactaccatttcactttctgtcttatgaatttgtctgctataggtatggaagagggcatttattaacaaaaggtttaaatacttttaaatgctagatgtacctcttcaggatttcctctggcttgtattctttcttgtagaatggcgtatcaactgttcctaaatcaaagggggatattcagcttggttactcactttcatgaaaaagaaatcgataactaaacttcctttccatatgacaatcagtgagattcttctcttgacttaaaatgacaactttacagctgcctgcctgaggcctcttatttaataggcttaaatttcttcaataacatttctatgattttaaaaacacagactatgattcttcgtgacacatgtagggactctggatgaatcacccagcattctcaaggacatatattttagtcacattcatttatatgatgctttatggattttaaatacatttatgcatatgatctcagctaatcccacaataaccctgagatgtagataaaatcgtacaagcactttgccagcttaaggagccatttgcctcaatgatctcaaaaccattctttgctgtcaagttcactgtggcatctttgggacaatcccatggctaccatagtccttggtaattcaggtggcgctaaatttttcttatcacttgcctattttcattgtttcaaatgcctacttttaaccacagtttcaagtttttaatcaaaatataatttaatctaatttaaagttattttactttaaaaaagaaaaataagaacaagctaacattttaaaattccacttagtttatggtctcctagagcacgttacccagactttttgttaacggacataaactgttcattctctttagagggccctttttcagactaaagagtctctggcaaataatgtgatctttctgaggttgtaacaaatggttttacagtcatacttccccttagatcatgttcctgagagtgccatagatttgatctttattcagaaaacatttctaattttagcatcatttgctatttttttctgatgaagctggaaatcttcaaaatcagaaacctgactccattttggaaccccctctttaggttggttatctgtctcttgtcacattttatataagcagccagcactttcaagactctgggtagaaatcaccttaattagatcacccagtcattaggaacatcttctaccttcacactacaggcaacagtgttgatgtactttctgaactgtatgacaaagacactcttttttctaattttcaataatattttcctcactttcctcatagcctccttaaagtccacagttttaccaacagtgtgcacctcaagctttcactaacacccttcagaatcttacagctttaatagctttctccctctgaggtaaatgaacatcatatctacatatgactggtactaatggctattaaataagaactgtagagcaagcccatgcctttgagtattccaatgtcactgggttcagctgtgtccatggcacagacatactatgccagggctacacaagtctggctggagatttgtgactatacaaccatcagcagcatctcagacatatcagtcctcctcaagttttcttctgtgattggttcactgagtcacagctagttccttgtccaaagagtttgataacatattttccaatctcctgataagtccagtcgctgaaacaacccattttccaaatcattttaccacttattccactgggtaaatggcaccaagaatagctagctcaagtatcgccaggatgtacattaaaacccaatgaaatgacctctcatgcattcttcttttcttagcgttacctacgtttacatttctgttccaagaaaaataaaacagaacatctaatcgctgaaattctgtagcttgggggatgtttagtttcccctctttaagtcagtgggttcaactgaagattcaatcagaatctcttgtgggtctttctaaaccacacaattctctcctgaactccttccctaaattctggcatgcccttcaggtttgaaaggtccccaggtcatatgaaatgtttccctttcacacaccaccccccattatcaattgtgcactaccaagggaaacttgatcctggatatgcaatcatttctttttaaagaatattataatccttattagatacctaagttccttttagattggtagaaccaggtaaaagtacatatcaatttaataaacacattacggttattgtgaaaatgagacacacccctatagttattaagaaaaggaaagttctgctttcttctttgctttgtatgagggatcggcacacctttcttggtaaagaggcagacaaaaatatttatggctttgagagtcattttatctgttgcaactattatactaaactctgccttgtagcatgaaaacagccataggcaataacataagcaaattgggtgtggaagtgtttcataaaactttgcttacaaaacaggtgtgccttactcacctgggcacacacagttgcacctatgccctgctggatgaaatctgcagccacagattttgtgaggccaatcacggctgccttgttgtgctgtacacacatctgttcacaactcctgagggtggaggaaaggttcaacaattaaggaataaaaaatgtattttccttcagaaaggtaacacaaataagttttcccagtagcattttcatgctttctcccacattcctccccttttaaaaagattgatatcagatttttttcttcaatagagtcagtttctggatctagggaaataatatcagtataggcacaacttaatgagacttaattgaaatgctgaacttacttaacattggtagtcttagtttctcatcatcattgccataactcttaggcagattccaaaagaaaatgaagattaataacaaaacaaaacataaaacaggaggcctaggcacttctttacattcctctcttgtgtatgttgaatatgtgttccttgcaaagagaagaaatggtatctcagcagtaactatttcattttaaactcacagaccaactatgccagattgtgacataatccacattttgtactgctgtccttgtccttcaactgacttcttgctgatggctcagatcaactgtctttgtgaagcattccacaaactcacagcagttatttccctgtattttgacagcgctttgtacaaacctctgttatatatcatcacatggagaagatgatgtttgctgccttgctcctagttttggactgtgaattcttttatggcagagcacataccggtgctcaatacactattttaaattaattaaatgttaaatggttcttctcccagtttgatgttcatttccatgtccattagaaagaataaaagggagggcaaaaatccccacattttaatttaattttaccactggctcacatcgagagcaaaagatctgtggttaggaacttaataccaattttgaaaaaagcagttttgaaatcatttcaatacttgaaatttaatctctgctatgcctgttcccaaacgcagagctcttaatgatgtgcgtgtatgagcacgcagtcctcggaaggagacagacccacctttgacgctggaagccacagaagacatgttataatattgccagatttctgagcaagcatctgccaaaacaaaacaaatacaaaaaaaaaaaatccactttgtgggctaaaatactaccttttaaaaagatttgcattttcttagggttgcagaatgaatttaattactgtattagctagtcacattaagcactattaagcagtcttacagtgaacccaaaacacctcatcaactattgctgggaaatgatggcaatgtgactgcaccactggcatttcccagggggattaccaccttcccatggtacaagaatgtcagcaagactcgagtgaatgctgacttaaatgaaatgtgaataaatgttgttattgtgtgttactgatgtgggaaacttactccattcaacacataatttttgaatacctactgaggccaggtattgtctaggtccaggagattactgcctacaggaggcaaccagtctggttagagtggctcacatatccacatccagccacagcagagacctccacagagatctaacagcagggtgagggcagaagggagcaattcaggctgggcgacactcagaggggacctcctgagaaggaaggatatggctgaattttgaacactagagtattagtcagaaaaataaaagaaaaggatgttttgaggatgggtacacaggtataaaggttccatcgggaactgggaggaggggctgggtctggctggatgcagggtgtggaagcaatgaggctgcagaggtcaacaagggctgaatttagaacctggttttaccctgaaggtgatgcagtgacactgaagggtttaaagcagagaagtggcatgtcagacttggggattgcaaggattactgtggtgcccagagactagtggaagctgatgcagcttcaggaaagagtgataaaggtggagctgcagaaatgtctatgggtagctgaggaggaagggctgaggcaggatgggcaggaccttgtagatggttgctgcagggatggtgggcctcccaatttagggcagtgtttcctaagaacaccttcttcagaattcccccactaaagtgtgatttattaagatgagggtctttggctgttttgtcctcctagacagtgtacacagtaggcgtcaataaatgttgatgaatcagaatctcctgaggtgctagtttaaaacacagattgctggccctgtcctatagctaaataaatatataataaagaaaactgctatgaatttaaaaatttttcaaactttactaattataacatgtacatagaagtctcaataggcagtgtaaagggcagagaaaaaaaatgacttctgttgggacgagtttctttagcagcttttagaaaaagagtgtaggaaaggaaaaagtaaataattgaatggatccaggattggtgtggccaagatgatgatttcttaggatattcttctgactttgttctgagatttagctactaattgcccctaaaacagaatctaaactaaccccaaggcactatgctgaatggagtaagtggatacaaggagagctgactgtaacccaaccaagctaaggaagacagcaggggaaaaaataatgtttaacttattgtgtgttttatataataaagaggatcataatgaaatggggttctcataaaaagtgtaagaatgttggtcaagtgtaatggtgttgaaaagtaagccttaaaattgttctttcttaccaatttagcaaatagcattccccatttaaaatacatatagaatacatataccccaattaatacataaagatgggttattatgtaggttcaatctctagtcctctctagaaatgcaatttatctcaggcaaaaccttagaataaagccacctaagagacattacattagtgctgcccctaacacttgcactatccattcaaccaagttcaaccgaggtccctctgctgcttctagacccctagtcagtacctgttcccatgctgccttcccagtccaggtcaggagctgtcgtcaggtgtcaggctctccctggctccccatgcaatagccttctctggcaggcatgactataagtcaagtgcctggtacatagtactgctatctaggattgacctcccagaagcttaggtagggctagaaataccccttaagagtccctggagctgtatctagttagtcttactctgacccgcccttctgtctccattggccagagctcagcccctaaccctggtggaacctggccacttggtctccagtggttcctgctggactaacaaccttgattcatttatttatttgacaaatgttgtggagcacctctatacgctgaagactcttctaagacacagcaaggtgggggaaaaagcaagcaaacaaaccaacccaaataacaaagatatccccaaatctttgccctaatggatttctcttctggtggagcctggattctgcattgacctcttcttaaagtattttcaacttgtctctgccttttgactgatcttccagtcttggaatgctttcctgtgtatctatccatgataaaaatttcctatgagtgttcctatgttctgaccagctgaccttccagagctgcctagctccaaatcctagcttcccctggaaagttctaacatgggatatgtgtgtcatagttaatatacagaggatcatagataattatggctggaagtgattgtgtaacctatcatcctcatttttagctaaaagaaatatgtactgagagggtacaagtgccatctctatggcacatggccattaggggcagggcgcagactgcacctaaggacttctgatgatagagtccaagaccaggttcgattttgtcaaggtcactttaaacaagaggcactaataccatattcctgccattaaatctcttgggatttttttttaaacaaatctgtgtttttggcccacatggataattgttagatattgtaaatcacaagcaaactcactagtttgcaagttaatgtttgtatattttaaaattaacacaagtttacatttcagctccactgtactccacacctacttcctttactaaaattgtaaagcattttagagcctggttttgcaaatgagtctcatgcatgtgcaacagtcttcccacgatgacctaagctttcctcctataccacagtctctgctctacccctgtaacctagcaaaggatctgtcttcaaaaatacattcgtgttccaaatactatagtttctcataaacccaaataggctaaaaaatcaacttacattaaaaaaaacaatttgttataaaaatttgctgttcaacattctgtggacccacccaaaaatcccttctaagcactaaacaagtagattttcaaagtcccttcattactaagtcagtttctctaattttcctgttaatgttcatctggaacttcttaacattaggttgaatattcagagtagaatatcagccctgctgtgccattaacaagctcttctcctgcccagacatggacaggacatcaaatccagctgggatggaagggaaagttgttcttctgcatttcactaggttcaatttacaaccttgagttgagctggctctgtaccagtcaacccctttcattgtctcagcctgcactgtctgctactactggtttataagctatttgaaatcagggatgtacgctgctcatgtttatactcccctagaacactttatataggatttataccaagaggtacttaatgctagtttataaaataaaattttaaacattgatgcttgtgtgaaggcttgagaattcaaggaggaatgctgtcttgagcacacactgtctctcactgcccagtaccactgtggttcagatcaaaacaagagcgaagggagaagcttcagggcaagaaaagcaatggggtacatccctcttgagagtgtgagcctagactgaaattcacgaagggctcaacgtccaggcttcaaatcttggttctaaccatgtgctagttgggtgaccttgacaagttgtctgaactctcagtttcatcttctgaacaatggatgagataatagtatctactcatacgatcattccagtctcgtgtgcctccctgctgttacctctgcctggaatcatctccaaggtacctgaatgatcagctgtctcacttcttggactgctatgccagtttcaccttgcggtggagtccagaggggccgcattgatatcctagcttctttctcttcattatatttaaaccacgccacatattctatgtctatttgattactaattgtcccatctcacccccaatatggaacctgccttatagaaggcactttgtttagttcacttatgtgtcttctgtgcctagatggagcctggcatgtggaaagtgcttaataaatattccttgagtggatgagctggaagttaaatagattaatttatgtgaaatgccttgatataaatgttcaatgcaagttaatcatgtgttagttattatcactcttcagcacatgtgggaatcccttctgtgtgcccagtacaggacctaatgtggtgcttatcctggtggtggtggtggtggtcttactttaggaaggaatgcttgatcatcaggtacatgctgcgcacattgagattcatcgagaagtcccagtctttctctcacaatccaggacagttccatgatggacaaaactagaagagtgattaaacaatggaaaataactgccattaaaatttttctattccatctgctgattatttttattgtcacttagtacttagaccactgtctctttcccttatcaagactttaaacaattcatagtatcacttagatattatattagtaagaatcccaacaacttaagctagaaatgtcatctgaaaacaagatcttgttttccaaacaaaagtatggtcaccgaacataagaagctttatattaattgtgctgaaacatcaatgccattaaaaacaaacaacaaataaaggcgaacagggctaggcatggtgcacacacctgcagcctcagctactttgaaggctgaggcaagaggaccacttgagcccagagttttaggatgcagtgagctatgatcattccactgccctctagcctggggaaccaagcaaaccctgtttcagaaaaaaaaaagagagagagaaaaaacatctgccctatttgcctagtgattcctatttcaagagcaacagtgccctcaggtggcacagatttagaattctcaaggaaatcaaaattgcaaggaaaacaagtgtctgaacatctcagagcagcaaagtgatactctagtgttctaacatactgagagatgttagtttgttgtaagagagacgttaaggcagaaaaaacaaacccgtaaagtagctttcactatttttcaagttacgttttctgagggaagctccaaaacactggaacccttactgatttggtcctctggacccaaattatgtaattcattaaaaatattgttggctgtgacttccatgtaccaaagctctgctatttcagtcagaatgtcgtttcatgacagcaggaaccacatgattatttctacatcccctacatggctgaaaatttatagatgctcagaaactaactttgctaactatttgtttcatgtttctgggtgtattcttcatgaggatggaagactatttataaaatagatgatcagaaattattgctttaatttaactccatacattgtaacacataatacagctttgtatcagtaccatctgtcttgagtagacccatttgccccagatcatgtcaaactctaaggctgtcttacctgctgaattttatgtgtatgaaaatgctgtgtaaaatctagccatatttcccaaggaatatgtcatggttcacaatgatgattttgccacattatgaaaattctttgaatgaaagtcatagaaaactttctgtaagaaagtgaaactaaaaagttatgaattacccagcaacattaaagagaacatcaagtctctaacttcattggcaaactgatcaatttgtttcttctttgtgacatcaaggacacgagtttaatacctgaaaaataaaacaagaggcactattcctaaaaatgtttagccttgaaggtttgctgttttgaagtgtgaagtgtgaagattgcaacatctatccagctaggcttcatagatgctgaccttcttactagggtcttaagaatcttcagagtctcattagtaaacttaaagtcatcttgactcctccaataacccatccgtccctcttccttcctctctgtccattttccaattgaataataagggtcctttctgagcaatggctttatagtaaagaatgactggtgtacatagatgtttctcagtaagccagcagtaataactgaaaatgggctcatttgaagttcttaaaacttcaaacattaattttctcctctttgcagcttttctcttaattttctcttctttgggtataattgagaaataaaaattgcatatattcaagatgtccttcccctatccttccccgccagagactgggttgctggtacctatacagtaatcagaattttgtctgagtgaggggtgagaagagcaagtgttctggaataagagactgtttctatttgtgagcttcccctttatgcatttccattatttattagaaatgactctgttagtcaagggtatccagtcaaatacatgatttctggactaaactgcaaggagaagaaatgagagggtcagaagaagggatgacaccctgaaggctagacatgagagatctggcatggcgggcacctgagagatacacactgcactattgctgagaaactccaaacagtgtctaacaaaagcagcagtcatcattataaatatataacatattatttataatgtgcataatatatattataacatatagtaatataatttataattatacaatgtattaatatgtatacatataatatataataatatatgaataatacatatatatatagtaatataatttataatatatacaatgtattaatatgtatatgtataatatatataatatatgtataatacatataatatataattatctataatgtgtattatattttatatttataatatattataaataatatgtatatggtttattttgggggaatatagaaataaagattcataaagaaagggaagacttgaaattttgtttcagaaacatttccttatctttgtcttccccagtgcagcagctttactttgacttgtttgaattataattcaacatattccaatcaattaactaattcaaggaactaattgctgtttgattatgtaacctgttctattttgcgtaagggttacctttcatataggttctctgttctgatttctttgggtaaactgcaattaaatcctttggtgttggagtttggttcagtggggtgaagaagtggtggtacacacctaatatctgggtactctcttagggtttctcatgatgatgtgtgattttagagctaagctgtctcagccacatgtggctactgagcacctgaaatgcagctagtctgaaatgaaatgtgctgcagtgtaaaatacacatgaattttaaagatttagtatgaaaatattgagacgttggtcaagggtacactcttgcagttataagacttaatatacagtacagtgactatagttattaatatgtattgtatacttgaaatttgctaagagggtagatcctaggtattcttagcacacacaacatacacacagaggtaactaaatgaggtaatggatatgttaattagcttgactgtgatatcatttcacaaggtattttacaacatatatgaaaacatcatgttgaacatcttgaataatgcaatttttatttctcaattatacctcaaagaagagaaaattaagagaaaagctgcaagaggagaaaattaatgtttgaagtttgtaagaaacttctaataatttaaataaaaaattagtaagaaaaaattaaaatattaattttttaacttgagtgcatgttgagattatatttagatatattggataaaagaaaatatattattaaattaattttcacttgattctttttactttttaatgtggatactagaaaatttaaaattacacaggcagctcacaacatgttactatggacagggctatcctagaggaggagggcacagaagtgaaaagctgtcatgaaaagttacctaacaactagtaaattttcacatgtaagtttgtaattaggaactgaatccctcaaattgttagctaaataaaggattttaagtattcgtcctcaaatttttctatgcatgtaagtccagatttttgtctataggttcacaaaatatagatttcatatcagagagagaatctaaaagcacggcagtggagctcagtagctagggaattttctttcaacatgtgagcgccatgcttataataccttgcagacactgaatcccaaattcaagctgctgagttgcttacccgggtactttccagttcctgaagtttggactcattaatgtctgtggctatgactttggcaccttctttgcaaaagcctagtagacacaaagtacaaataaatcctttgtttacttgaataaactggctcatgaatggaacatcatgtggtctttttctcctttatcttattttcattgttctttccctataagatagctagaattttaaactatctagtcttaccccttctccattgttattattttatcattaattagaacaatgtgacatacattgtgcttgtcatctgacttagtcccttaagtaatatcaaacaaaataacgttcttaaaaaaatgacagctgttttcaatactctcaaatactgctcttctgtaatgagactatatatcatttctgagtttgagttactaaactcaaataataagagaaaaattggttgtttcaacacttttcctactaagagtatgctagtgcttcataaatgtcaaaccataccctgccattatacttaaggtactgttatacttaaggtgcgatattagcttaagtggggtacataatgtaacagaaattgatataaatcaggagaacaggtaacctgtcttataactctggagtcatatatctaaactgacacaatttcagaaagcttgtaaccctgtttgccctctgtagcgaatatatcatgatgcagagaaactgaagtagagagtttctcagagtcaatggttatcagtgatgtcatgtactaaatatgaggtattcattcttcatctgcctggggtcaggagtagggacctatttatttatttgtttatttttataactaagacaacagaagcacaaaagtaaaaaaataaaaaagcagagcagaagtaaacaaccatgcatcagtccacataattcaatatgtcaagagttagtaggcaaacaacaaagatagtaattataacttactaaggcagctgcttggccaatcccctgagcagcggccgtcaggatgatactttcccatcaagtcgacccataatggaacctgtggtttaatctaaagacatgtgtgttaatgggttatactgtagaacatgatcttgagcaggcagtaacatctagaatgaatagtcagtgtgctcttttaagaataatttagtgagctccttcaggaacttgaagacagcaccttgtgcaagtagtcccatcatctgaattctcctagaatgcttactctgcatacctagcttgtatatcaaacacatttaccataacccactgaagtaatgactggtgacagacattggccttttttttttttttttttttttttatgagatggagtttcactcttgtcacccaggctgggtgtaatggagtgatctcggctcactgcaacctccgccttttaggttcaagcaattctctgccgcagcctcctgagtagctgggattacaggtgcctgccaccacgcccagccaattttgtattttttgtagagacgggctttcaccatgttggccagactggtctcaaactcctgactcaggcaatccacctgcctcagccttccaaagtgctgagattacaggcctgagccacttgcccagcccagatattgcactttaacctaccttatccttccttcagtacctggagaggcagcctctggtgctgagtttcctcactaccaccatcactctctccatgacccctgcacaattgctatgacattatttgtgtccttactactcagggctgcttcttgatttctcttccaaaacttttgttgaggtttgcactatcaattgcttatgattttttttctcttgaaaagattcatagttggtctcagatattcatcgaaaaaaaaaaggatggaaaaatcaaatcacatcaatactcccattttacagatgaggaaactgctgaaacatgcccaatgtcatagagccagcaatgggaaagccagaactaaacttagacttccagactcttgctatgtgaacagtccagccacaatgctgccgatcctcttataaagtttaagcatgcagtagtaacacattaacaggataatcagtaatttctaaatgattgagaaacactgacaccggggctcatgtgcatgagaatttcaccagtgcttggattatagatcacaaagtgagagaaagagctagtagtgaggctggggtggagaagagccaaatgaccatcaaatgaggctgtcttcaaggacacaggctccagtcttgctgggctctgtcattaatgtgtgcctctgacctcatacgaactcacaaagtggtgctttgtccaaggcatcatatccacatttcaggcaaaaagaaagggaggagcaaaagcaaaaggctttcagagaggtctcacctttctatttaagaaggaaaccttctcagaaattccacctgcagttcattcaccagatctatgctacttggccactcctagctgcaaagaggttgaagttgagacttttgtttccagctttgataaagtgaagaataggagaaagtgagttggtggtgttgatgaaccaacttacagtacatgcaaactagcctacacaatcactctgttccttatctgcctgattttgtacaggttgatagccttgcctaaagggcttatattacctagtctttctctttgaacttatttcagttctctctttagccaaacttttttttttttatacccatatgctcttccatttcaaacctccacacttggtccaaggtccacatggtgaagggcaattactcctataggcaacagccactgaaggatttatggaaagggtgtgaaatgatcagatcgtattttggaaggactgctgtggagaacatacctgggcaggagcatggggtgccattagaggctgctagggttatctagtgggggcgctggtgaaatagcagggctggagaaaatagagggatggagagataggtggattggagaagtgtttcagagatgagataggtaggacctgtcaccaacgtggctaatttcaaagaaatgttatttgcccagtgttttgcagctatgaatcaaacctaggccttcttgttgcaggtccaagggaagatctcatggcattgtctcatggtctcaaagccctgcgggcctctctaaatccccactgtggcaccaggagcctgtgcctcgcgaccgctgaccccaggaagtaatggacaatgaggcgcagctgctgctgcctctctgggttgtgctgaggccaccttctcggggccgttacaagccagtgcctgagcatgcatgcttacaaggcagactcatttctgggagacatagacctcctccccaacggatgactggctagagagctccttattaccttgctgaagttctcttagactgcacagctgtctgggatgcttccaccaacctggtttccttcttttcctccctcgcgggtggacttgcatcgaggtctgatggcttcacagccttacctagttctctcctcattctctctcacaacagcatttcccctaataaatccatgcatatttaattctatcttggagtctgcttcttggaggagcagactaacacaatatgtaagaactggctccagggatcagcttataatcactgacttcctctgagtttgtccaattttttaggcgatggggaagcttggctttaacagtgcctgacctactttgatgcaatgatttttgcttttttacttcttacacaaaagataaacatggaatgtttatcatttcaacaggaatgacagtttctaaagtataactttagaaagatatactttatcctccttgaatcctagcatggtgcacaaaagctattttacaacactgtcattagtgatattgggtgtatggcctgtaaagcctccagtcaaaggttttgctaggaatctttgccaaccgaagaagcacttccgaacaaatgccgaagcacagagcagcctttctatgcactctgaaaacctcctcttagctgccttcctgtctttctgggaccagattttggggtcaaagccttaacatttgataaactgaatctcaaactaaaacagatttctttgagaaaatgagagcaaacacggcctgaaatggtaaacaaggcacctctcaatatatccaatgtgaaaaccatacatgttggcttccttagtcaaaagttagaatcaaaatgttgatttttgattagcagagacacaaacagcatattcaggagccattgttttcaagagccaggaagaaaactcttcacttaggataccgtaagaatcctttttcttgggctactttataaaacatacataccacagagtttcaggctctttaaaaaccatctttacactgatctaactgctcagattaattttgaaacaggcaacgtgcagaaaaaacaacatctaaaaattaaacctcccctctttccgttctaaagtttcatttcaaaagtattggaaatcttactttaagcagcgagctgatggcgttctccagaactcggtttgagcaacaacttgagacaacctttgtctggaagcaagtcaagcgcttaataatgcatgctgggattttagtttccctgctttcagagtttagtggctccatccatacactttataaatgtatgtgcgccatctagtggaattcaggtagaactatgaattccaagtggaaggtgaaaagtggaaagcaccttagagcttacttaggatgcggaaatcatttccttcacttcagtctctccactttctgttttgtttatgcctactatatgcggtgccagggtagacgagattggctgagctggaactgcgtgtggaagatagcagagcaacaaaatagagggaacccaggtcactgaaaatttggagccttcctgtcacttggcctggattgttttaagggagagaaataaaaaaaaaaatctttttgtttgagatacagttgtgatttttattttttcatgctcagaatattctaacacaatgcacatttagtggcagaatgccaggagccttttactacactgggaatggggttgggagaacgtgaaacttggatgacagggtggaggcttaaaagggaacatgttaacagcgaaaaccccagtttggctgaagagaacagagatataaggtcaaaaagaaaggactagatctcagagccctctaggttaggatagcaacatgtgctttatctgtagtgccagtgagcagagtgttgtgtaggctacttgtacatgtactgtataaattggtttcctcagcacccatccaactactttccccttttttcacttgtcaaagctggaaaacaaaagtctctacttcatagcctttttgctgctaggggtggccaagcagcatagatgttgccaatgaaatgcaggtgggaattctgaggagggcctccttcttaaatagaaaagtaagcccttctgaaaggcttttagctttgctcctccctttctttttgcctggaatgaagataggatgccgtgggacagagcagccattagtgagttcatctgaggccagaggcacacattaacgacagggaccagcaagagaaggacctgcggccctgatgacagcctcaaggcaacaactcctctggacttcttatgtgaggacataaactttagtgtttttcacgttttttgttacatggagctaagtgatttctaacagtccaggggataagaacaaagactgtggcgtcagtaagactagagcaagtcccatatctctcctcactagctaagtgagtaaatcacttaaatctctgaacctcttatgtttctcatctgtaaatgaaggtaaaatagcacctacctcagggatgtggtgaggaggaacgactaagcctggaatccatcagcacaatgtttgccacacaggtgcttaatacatgttagtgattcttatgtgaagacattgttggagaaatttaattataatggatggtaaaagttgcgctttttaatgtcttttaaaaactggacttagtttctgcatgtgtctatatgaggtctatggtaaaattgccctccttgttcattgtttcagcaacttctaatgctggctctaacaatctgtaatcacactagctttgttcctgctttactaataatgccctttgacttttgaggcttttggaacagatttatgagagttctctaatcaaagccaactccaatgcttcttgatgtagctttcttcagatccctctgtaatcttcagcaacaatgcttacttgataacagcctaagtcacatggtatgcaaatacttgcttacccattagtattctcagcagactaaatttcttcaagggtggggatatgttttacacctttacattgtgattagctcgtattaaaagagtattagttacttgtttcttatctacaatatgagttccacattggtagtgcctttcagtgcctaaaacagtaattgcagatagtagatgctcattaaatatttgctgagtgaatggcagtttcttaataagtttctgaatataattctgccaggctctcaagacaatgtttgtgataattaattttaggtgtcacttgactggatttacggatccccagagagctggtaagcattatttctgggacatctctagtgtttctggaagagatcggcattggaatcagtgaactgggtaaggatctacttcaccaatgtgggcaggcactatccaattggctgagggcccagataaaacaaaaaggcagagaaaggtgaattctctctcttccggaactgggacatccatcttctcctgcccttggatacctaactccgaccagattctcaggccttcagacttggactgagccacgctcctagtttccctgctctccagcttgcagacagcctatggtgggacttctcagcctccctaattgtgtaaacaattcccctaataaacatcctctctctctctctctgcatatatatatatatatattttttttttttcctcaagcttcagtggggttacatcccaataagcccattgtaaattgaaaacttgtcagttgaaaatgtatttaatatacctaattcactgaacatagagcttagccgagctacttaaatgtgctcagaacacttgttagcctacagttggataaaatcatttaatacaagcctgttttataacaaggtgttgactgactcatgggatttattgaacagagtacactgacagtgtcagttgtttactcgtgatcccgtggctgactgagagctgtgtcttgccgccacgcccatgatcacagtagagtattgctatcttatgaagagatcagaattcaaagtaaagtttcactgaatgcgtatcgctctcacaccatccctaaagttgaaaaatctcaagttgaacatgacaagttggtgaccatctgtgtatattctattggttctgtctctctggaaaatcctagacagattttggtaacaggagaggttctagaggaacaaaattttaaggatgagtttccgagttggttttggggttcctggaattggctcttagtctgattagatttgaaaatgctaaggctctactctttgagatggggtcacactcttgaacaggttggagtgcagtggcaccatatagctgactgtagccttgaatacctgggctcaggccatcctcctgcctcagccctccaattgtttttttttggtagagatgaggtctcagtatgtagcctaggctggtctcaaactctggtctcaagtgctcctcctgcctcagtttcccaaagtgttgagattacagggatgagtactgcgcccagcctggctctccttttaatagtacagagagcactgattgtccaagaaataactgttcatagaggtatgcaaaatgtctgcattggatactcctaatcaaccacttcttgaggtgaggaacttaagtgactctatatataatacttttttttttttttccgagacagatcttgctctgtcgcccaggctggagtgcagtggcatgatctcggctcactgcaacctctcctcctgggttcaagcgattcttctgcctcagcctctcgaatagctgggattacaggcaacaccaccatgcctggctaatttttgtattctagtagagacggggtttcaccatgttggcacgctggtctcaaactcttgaccttgtgatccgcctgcctcagcctccctaagtgctggattacaggtgtgagccactgtgcccggccctataatactttcaaatatttatggaaaataagaaatataccaatgttggttggttgcttctaatattgttgggcaaaattatttaaaaaaaaaaggatgacttcagggattcaaattcatggctcaagctccacataagtaacctagagcttataggcgtgccctgaaagaggatcttctctcctgtagacatgaggctaaaattctgaaaatcaaacaccagtcttcatcatttgattggtgcaattacaaaaggcctcagtggtctactggtaaaataagccacagtgactgggagagtgagattctataagttgggatgggacgtgtgggaagaccctgaagccaggaacattgagtttttttttttttttttttttttagtttcaccctgttggccaggttggagtgcaatggcatgatctcggctcactacaacgtgacttccagggctcaagtgatcctcccacctcagcacccccgagtagctgagactatggcataagccaccatgccaggctaatttttgtattttttgtagagacggggtttcactatgtgcccaggctggtcacgaactgctaggctcaagagtcccacacctcagcctcccaaagtctgggattacaggtgtgagccaccatgcctggccagttcctacattctgatgagttttttttttaccagctgtagtggcctctccaacctcattggggttggtaatggcctttccaccttgtctgaagggttaaccctgcattgcctgaggaaataataatggcctcccctgaggcactgccaagcaagacaatgctgattctcctcaggacctacccccaccacccctctatgctctagacctataactagactcaagtcccagcagatccctaatgtgaggtacaaagtgtggccatgaggagctgcatcacaatcaaaagaaccacttgagttttctaacttatataagcaaaatctgagaaaaatgtgtggggatattaagggtgtgggataatggtggcagcaaaaggacagagcttatttgaagaaataatggccacaaacttcccaaatttgaggaataaaatggcacccaaattcaaaagttaagcaatattctactaggctggctacctgacaactagattttaatggctttaatgtagttttatcaatcaggtaaacaaccactactttgggttacttttttcagtggagaagcagacataaagaatcaaacctgcaggcatgttagtgttttgtttggtaagggtggaaagcagaagacagactctcaaggtacaggtctgggggaaaagattttagaagggatagtttccccttagtctttgttaattcctttggtggtatgttaagatacggagaatatccaatccacagactttgaaatactagatatgatgcaatcaataatctctcccttgaatgaatcttaccaaagagccgagaatgacttgaaatcactttacctctgttctataactaatgcaacttgttttaagtggtttttcaaagtcatatggtataaaagtaatatcaaaatcctctaaaaccatagttcttagatttttacaggatcacgggcccctctaagaatatgtaaaacaaagtataaaccccagtatcccctccccccaaataaatccacacaaaaaagttataaaaaatttcaaaaattttacagattacaagaagtccatccatatatgctttatctactgtggggactccaggtttagaaaactttactttgataaaaactctggtactgtttcctatgtctacaatgaagaggtagaataaatgatctataggttcctccaggctgggagtgagggcaatgaaaaacaaagtctataataaaccaaccaatttagagagtttgtatagggattggataggtaggttaccagaaatgtgagaaagaacttctgtggttattacagtaaaaggatattagaactggaaagttaagaggacatagcctctgctatcctttaagaatttaaatccgatccagaaaacttgtgtatattttcatagcaaaatactgagtcaacaagagagactactcaccaagaaaccattaacattatatagaagagcggtgattcagaactactaaacatttttgaatgtgtaaggtattaaaaacatttacaattttgttaataaaatgatgttttatataatgtatgtattatgct

SEQ ID NO: 2892 - DNA, 46854 bp, Homo sapiens
tttttcctttgtacttttagtagagacagggtttcaccatgttggccaggctggtctctaccttaggtgatccacccaccgtggcctcccaaagtgctgggatgacaggcatgagccacacaccaggccaaagataaccattattaactaattaactatttggtatattatgcctccgttatttgaaagtgtatgcacattcacatttacaaactcttttatattcaatttctttccttaatattttatgaacatattttcatattgctaattattcacttgaacaatataattttgatgacatagtttttgtatagtgtaactttgtatttggccattctttattagacattgttccaaatacaagaaatctttaagatgatttgccacacagatacaatcactacagtggtattctcagtctctacttgcactccattcgcaatccagtgctctgttaaatgagacagagcagagagagagagagagagagagagtgagaggttgagagagagagaatggaggaaggctggcaaggagaggcctgaatcctaatcatcactccacacttttccacacccttgagtttttttgcacttttgcttgctcttggggtgaattagctcacacttaaggctgtcactgctcccttgcctcacacccttttacttccttcatttgagtgttccaggtgagttcactgggccaaacctcctacaatctgctcaagacctagaggtttgaatggggaatgtgagcgctgataggacagggagccaggtcgtgggttggggagggcaaggatgcttcctgccctcctccttcacactagtggctactctagggcctgcctgtgtgtgccagggctgagctagggcctggcccctggagttctacagagtccctctggtacctgagccacaagagaggcacctgttcaggaatctcatcagaatctaaactttaagaggaatctcagaacttatccatttcaacattcaccaatgcttatatttctctttttcaccttcattccacaagagagaaatttgtgacatgtctagtctagccttaatgtgataagattcatataaatagatatgagaatatagaaaacattttttggactagacttcagactaaatttctgccataacattcaccaaactaagggattgctatgtacagttctgaccctgaggctgacaaccagatattcttcccgttgaaacagaaaaatcatactattccactcagcctagaaatttcctagttatgtaccagtagatattataccaccagattgccaactgtatttgaaagtcaatcagaaagcttctccttccaaaattctcacctaatagaacactcaccagccaaatcctgcatgagccgtcttcctttcactctataaactcactcgcctatcacgccccttgagtggctaccagaaggaaagtgatcatagctaactcctctagtcagatctgaaaaaacaggtttcagataattctatagacattgtctttttgacaaacaaaaatgtattcttatggattggtgatataaatgagcactgccctgtgggctaccctgacatgaacaaaggtcggcagacatgtgctcctggaccgctcccgtatcgagcatcccacccacccaaattggcctgtccttagaatggctggccttacgggttgtgcctctgtaggagtgaggggaacccttttcagtttgtgctccccactcctctattctagctccctgaagctgcatcctatgaagatgtattctcttggttccaagacagttcttcatacagccgataacatggaagaaagtccacattcctttaagaagagatgtggacccggggaataaatggtaagagttgtttgaaatgcttgttcccaggtgctgtaaagaaatagtacttgaacataaattaatttatttagtaaggccatttttacttcctgcagaaagagtacactcaccagaagtttgcccttggtgagaaatgtatccagcctatactggcttatcctcattccaaaacactaaacaactaagagggttccttggcataacaggcttctgccgaatatggattcccaggtacgggaaatagccaggtcattatatacactaattaagaaaactcagaaagccaatacccatttgtaagatggacacctgaagcagaagtggttttccaggccctaaaggccctaaccaagcccagtgttaagcttgccaacagggcaagacttttccttatatgcaacagaaaaaaacaggatagctctaggagtccttacacaggtccgagggaccagcttgcaacccatggcatacttagtaaggaaactgatgcagtgacaacgggttggcctcattttttactggtagtggcagcgtagcagtcttagtatctgaagcagttaaaatgatacagggaagagatctcactgtgtgagacttgtggctgtcagacaaccatttgcttaaacatcaggctctattacttgagggacagtgctgcgactgcacacttgtgcaactcttaatccagccacatttcttccaggcaatgagaaaaaaatagaacataactgtcaacaagtaattgctcaaaccttcaccactcgagggaccttctagagattcccttgactgatcctggcctcaacttgtatactgatggaagttccttgtagaaaaaggacttcgaaaagcggggtatgcagtggtcagtgataatggaatacttaaagtaatcccctcactccaggaactagcgctcagctggcagaactaatagccctcactgggcaccagaattagaagaaggaaaaagggtaaatatatatacagactctaagtatgctacctagtcctccatgcccacacagcaatatggagagaaagggaattcctaacttccgaggaacacctatcaaacatcaggaagccattaggagattattattagctgtacagaaacctaagaggtggcagtcttacactgtcggggtcatcggaagggaactgccaagtggatattgagccaaaagagccacaaggtgggaccctccattagaaatgcttgtagaaggacccctaggtggggtaatcccctctgtactcagcaggagaaatagaatggggaacctcacggggacaagtttcctcccctcaggatggctagccaccaaagaagggaaaatacttttgcctgcagcaaccaatggaaattacttaaaacccttcaccaaacctttcacttagccattgatagcaccatcagatggccaaatcattatttatgggaccaggccttttcaaaactatcaagcagatgtcagggcctgtgaagtgtgccaaagaaataatctcctgcactgcaggccatacatttcatccctgtatctttaacctccttgttaagtttgtctcttccagaatcgaagctgtaaaatacaaatcgttcttcaaatggagccccagaagcagtccatgactaagatctaccgtggaccctggaccggcctgctagcccatgctctgatgttaatgacatcgaaggcacccctcccaggaaatctcaattgcacgacccctactacgtcccaattcagcaggaagcagttagagcgtctttggccaacctccccaacagcacttgggttttcctgttgagaggtggtactaagaataggactagctggatttcctaggctgactaagaatccctaagcctagctgggaaggtgctgcatccacctttaagcacggggcttgcaacttagctcacaccagaccagtcaggtagaaagagagctcactaaaatgctaattaggctaaaacaggaggtaaagaaatagccaatctctatcacgtgagagcacaggggaagggacaatgattgggacataaacccaggcattcggccggcaacggcaaccccctttgggtcccctcccattttatggaagctctgttttcacttattaaatcttgcaactgaaaaaaaaaaaaagatgggctagaggcaggaaccaagttcttgaatgctgtgaggagaaacattccacccagactgaggcgtggtgggagcaggggcaaagagatgaagcaggagctgaaaagctctaaaatctgagttttagaggagatgctgaattcgcaaggtgtagaaagttgggtaggatatttgagtatgttttaccagatcctcatgacctattgtagctattacagggcagaaatttgtcttaaacctagcagagaaccactacgtagataatttgctattccataaatattcctttctgttgactcccaaatttttttttattttttatttttatttttattttttgagacagagtcttgctctgtcacttaggctggagtgcagtgcatgatcatggctcactgcagccttgacttcctggacttaagtgatcctcccaccctacctcctgagtagctggaactacaggcacatgccaccacacctagataacttcttaatttgtttttttagagatgcggtttcactttgttgcccaggctggtcttaaactcctgggcttagtgatcttcacacctcagcctcccaaagtgctaggattacaggcatgagacattgcaccggccaactccaaatttttagacagagctctattcctttaaccaattgcatattaaagatctctgaatccacctataaactaagcttctgtttcaagttatcccacctttttggggcaaccactgcataccttccatgcattgatttatgcctttccctataactcctgcttccctaaatatctaaaagcaaactgtaattccgaccgctggggcacactttctcaggacctcttggactgtgttccccaggtcattgacacttgtattggctcagaataaacctctttaaaatatttacaggctactctctgcctagggggtagcactgctctacaggagcagtcatggtgcttaacactgcctcttcagtaaagctgttttcttccacctctggcttgctcttgaattcttcctgggcaaagccaaaaacctacatgggctaagctccacgttggggctcccctgacctgatcagtttctctaatctcttactgctcaggagtcaagtggccagaggtcacaaaatttggacttccccagttgctcctatagataacatcactattgtagaacctaagattggtcaggagtgaagagctgaccccatctggacttgtgactcatgacttaattggtcctgtggccctctccagagggggactcagtgcatgaggattgttttctacacacctatgattgcattcccaccaatcagcagcatccattcccttgcccctgcccaccaaactatcattgaaaaaccctacctctgagccctcaggaagactgatttgagtgataactccagtccttctgcttggctgtttgcattaattaaactctttactgcgaaaaattttatatatataaaatattaaatatttatataaatatataataatagtaaatattatatataaatatataatattaatagtaaatttatatataaatatatgatattaatagtaaatattatatataaatatatgatatttatataaatattatatataaatatatgatatttatagtaaatattatatataaatatataatataatagtaaatattataaaatatgtattatacattacagagtctggcttttcagttaactaatcaagaaactgaaaaaagactatctctgctgaaaaataaacaaaccaaaaaccatgcaaagaaactttcacaacaatgcctacccctgttaccccagacaaattgataacacacaagagcttccaaaataacttttattactatataaaagaagtcaagaaaaaatagatgcattttttcctacaaaattataaaatattcaggatagttaatattttttccataaatgcgctagataaaaagatagaaatctttttcacttaaggttttcgagtaccttgtaggaattaaaaataataatgttctttcttctacattttcctaaagacatagcagttacagtttcctgctgagttatctaaaaaaggacataccaagataaattttctatcatattgaaataaaattagataaagctttacttctgtctttgtgcttttagattggcaactgtggtcaatcagtgctgactggaatttccaactcagcaggggaaagaatctaattaaaaatgacacacactctgtatttgtcctttagaaaacagaaactgcttgtcgatatcccttaaaaagtgcaattgcctttttgtcatttctttgtaaagtctgagatgttgtttctaaacagcacagcttacatgaaacacgcaagtaaaggaaagaaagtgctttagagggcaggttccatttgacacaagcagcaaggaagccgtacacttttgatgacagtaattcaaaaagtatattcatttgagtttctcataaacgctttgagagaaaaggctttaatgttgattcagatgagtgttaaaataaagcttcttttctgaaattagattatggggtaaaccaagccagattatctctggagatgacagaaccataattattttgggaaatttcaatcactgttttggaattgatacctaaggctttctttcccctattatttatgggctttttaatgagatatttttctcgggagatgcttaggtaggaatatcagcttttgaaagataaaggtacaattatcattagaatcaaaagcccattaaatagagtctcaaacaaaggttttctagatatattttatatacgttgttttcataaagatagaaagaaattcctataatatctgtaagattatcctcacattagcccacatgaaagataaataaagggctgagatggggggtgcttaaatactttgcaacagtgctattctagtgccaaaccataattaacttttcactgataacctgtttcttagcctatacaaaaaggaatggccactcaattctggcggcttagtcactatctaatcccttcctccaaaaaccctggaattttgtttcctctatgtaatggaacatccaacttatcaaatgatgtgtgactatgcaactactcctctatggcaccaagactgtaccatgctccacccatactgaatttaattgtgctaccagttgtgccaggcagagggctgggtactggggatccttctggctctattaccaattttggaatagaatttagtagagaagaagagaacagtgttgcagcaaggggatcttgaatggtttttatgaagtttaagggatatgatggagtgtggcttgtattcagtctttggaagtaagtaccgttacctaaaaagaaatccactaagcaccaaaatgtttagtgtatttggtgtagagttttacccacattaaaatgcttcagtttaaaattgaagggaaggcaaaaaaatcaaccaaaaatgaaaagtatcatttcagcataagcactactctaggttttaatttgtcagcccagatccagacagagatgatactccaaacatgaaaagtcacctccaagtctcaattcactactgaaacccaagttcaaaatatcccctaaaattccataaaaatcaggaaagaccctagctattccccagggaagggcagaccatgagacaggtctcttttagctccaaactgaaagttgttcgcagctaaaatcctgaagaaaaaaatattgcaattaattaacttgaaagctacagatatcctgtccaaatcttttgttaccaagacacaattttaagatcaaacaattgtcaaggtagccatggcttgttggcagtagtaggggccctatggcctatttccaggtatgggtggcccctttccttggttatctggggaatctgccacagcagacagcaaaaggtaaaaagcatcccttaataactacaccccactccagcaattgaggtttattcaggggtgggtcaaagtagtacagacaaaaatagcttagtgaaatggttagaatccagactgaggtgccagactgcctgcactgagtctcagtcccaccatgtatgagccgtgtgaccttggggtgagttactagcctcccaggcttcaaatctctcacctgtaaaatgggaacagtaacaatacctacttcatcccgttgtctggggactgaatgagctaatatgtgtaaagtgcttagaggagtgtttggagcatataagtgctgtgtgagtactttcaaaaataaaaacaagaacttggggaaaagtgctctctaggtttgtagggcagtgtatgctacttaagtgttgaagcatattttcattctaagaagttagcatctggatcataaagtacatcaaccctagggaagtcttggggctaacttcagtttggaaattcttccaagtctgaccagagaagatctcttcaaccacctgctctaatctatcataccctaacataaaccctagtctccagggacaatttgagcccaaaccagctggggaggggcagaaggcaggcatggggagaaaggaaccaggtgctttcctaaatttctttaatatacctcatcatggtatctgtgtagagtcatgatctaaaccctgtcccagatattccttatcgattttaaacttttaggactgcttccctctagttgtgaaatcattgtctcccagaattaaaggaaatgactgcatgacaacaggccagggatgctgccagtttatccaattaactactatagacacatattcacatattgagtatctattctgcacaaggcaccgtgctaatgttgtgtcctcaacaagataaaggtaacataaccacaatttatatctgctattatttatattaatacatcctttccaattcaggtcagttcataggcctcaatcaatacaaattatttcaagaaccatcctttgtgattaaagtaaatattgatactacatagcccaattatcatatggctaaaggagaagcaaaactgtagagctagttttgaaacgtgacgttatatggctctatctctaaacattttacatggtagatctctgcccagcctcatccagagctaagtttcttttccttgtgctacttcattgtttaactctgaatctgatttgtccatgttgttgccagagtaggctgcatggaacctcttgctccctgttcagtgcctccatttggatgaagaatggtagaatttgctccttaggacgtttccattgcggtctggtgactatccaaaaaatgagggccccgaacacaggatcagaaggccaagcgtatttacgaaaacaccttctggcgggaatgtactgtatgaggatctctcctatgaaataagagatgtatccaattacaaacaggatgatacagcaacagcaaaacagtcttgaatttatctgctcaaaatgcacactagtacagtttcaatgtaaacctcaaagcttgctattaaggagaaatataaattatgctacaattcactcaggaatatatatgaaattgatttaaaaataataaatatgaaaataatatagcatctgtaacacttgtttaaggcaggtagggtctggaggcaggcaacctcaggtcaattcacacggacttcctagaataaaccaaaaggaaaaccccaactttccacatctaagtagcaaaaggacccgaggctacccctttgcaaaccccgcttttctgcatggcggatggaaaattgaaagtatctctgattgttgctttctacaaccaatcaaactgactgcaggccaccacttcatttacatgcagtgaaaccaactggccaatgggaaacctctaggggctatttggacccaagaagattccctatcggccgttgagtggctgctcaggccactcccgccctgtggagtgtactttcattttcagtactctctgcttttgttgcttcattctttacttgctttgtttgtgtgttttgtccacttcttgttcaaaacgccaagaacctggacaccctccaccagtaacagttatcacttaaaattttaaaaaggatgaaacaaaaatgtatgtacactataattacaattaatataaaaacatgctatcaacaagattgaaagggaatgtataacttcaatagttgtttcataagagtaatacatttgtcagactttttggtccttctaaacttttagtaatatcatattacctatatgatatacaaattctttaaaatattttttaattttaatatctaaaaaattttgttatatttttatacattttcccagtgaacaagtatttaacattttgtggcttaagtattacaattaagaagctatgcaacttacagggaaaaaatcagtttctctgtcaatcccataagtgctgttgcaacactgttccaaagatgacaattccagaataaacatgtatgggcatgagaaatgctcggaagaaagcggagcccatggaagcagaaagactgaaaaacctgaaagaagctaaacaccaaaagtgcaaaggttatcatttaattttaagttctaaactaattttaaattatttaaaaagaatatgtgtaatatgacaaaacctttcatatagaaccaaagggtagaaaatgaagtttctcactccagttccactacctaatgtaaccccttttatcaccttctcatggatcattccaaaaatttattatccctatacatattgttctgcatcttgcttttttcccttaacagaatacttggaaatctttttcatacctatacatttacctaatttattccttttaatggctaatacctaaggctataacaatttatttatacagttctctatggatgtttctgtttggtttttgtatccttaatccgactatagtgaacattctggtacttacttgtttgtttttaccaatctctaaggttgctaagtaggaagggaaggaaaagattttttaaatcactaaaaccgagtacttaggacacagaatttagtcagttcaacctaaaaagctatgtggaatgaagttgattttgttttatgagaaagaaatgaattctgcagaaaaggtgtcttcatttccttgataatgaatcgctagtgggatacctctttgcagagaagacagcaaggttcctatataaactgaagtcgttgcgctttcacggttttgtcaccccacacgtttgcccatcaagtatcctctcttcaaaagataaagatgactttgtggttactgaattactgagtttaaaggaacattttttttcaatgcctatttaggatctaccatcctagcaaaacaattatgaaaagagaggagagtgggggaaagcactaacatcactgttcagctttcttgattgagatccaagggctaatggggagaagaagaagggaggcagggggaggggtccaacgccctaattcacactgagaatcagctcagtgtaataccaagtagtaataaatggaaactgataacaaaacaatttgtatgatttgtcctttaacagactgcagaggaaaaatcatataatcatcaaaacagatggtgaaaaacattgtaggattcaacagtcatgtatgagatgttttaacaaactaggaatggaagatgattatttaatctgattatattaggacagaacatgctataggaactaacaggctccattttcaaggcttaacatataaaagtatatttcttgctcacacacagtctgcttatggtctataggcattcagagtagctctcttccaagacatgactcagatctagaagggatttgtcttatatccttatcacctattcctattcagcatttttctgaaagtctcagctactgagttaagcaagaaaaaaaatgatgatagaaaaagaaacaaaacttattaatcacataagattataaaacacatccaaaagaatcttgagattaattactaacataagtttatcaagtttgctaggtataatttatacttgagatcagttgcactttttgtaaagaggcaacaagtgaattaatttttaagataccatttttaatagcaaggagctagcaataagttggagacaacaactctacaaagaaatataaagctttgcaatattttggagaaggctaaaaaaacaggctcaggataatgagtggaagacttgtattatacagatgtcggttctcaaattcatctatagattaaataaaatctaatagatttttggtggaatttgatgcattgattctaaaatttacatagatcaaagggcaagaatagccaagattaactgttgttttctgaagtatatcctaatacaataaattctgtatttatatttaaaaagtaataacaaatgcatttgataggttggtttgcatattttattattagttaataaccaaaatgcctgaatatattagaaatggttcagagggttccctcttggggttcagaatattcctaaatcttcttcagtgaacttcagtgattctattagtatcaaaggcaagcttcctgatgtccatgttgtgctttctatatgaaaatgggggccgagtgtggtgctcacgcctgtaatcccagcactttgggaggccaaggtgggaagatcacttgagtccagagttcaagacaagcccgggcaacatggcgaaaccccatctctacaaaaaattagctgggatggtggtgcacgtctgtggtcccagctactgtggatgctgaggcaggaggattgcttggtcctggagatggaggttgcagtgagctgagattgtgccattgcactccagcctgggtgcagagtgagaccctgtctaagaaagaaaaaagaaaagaaaggaaaagaaaatggggctcgggatatagcacaaatatatctccataaatcatcatatcttttctgtggcttacccataaaacatatatttctcattcctgctctcctattttcattcctaagattctttctgttttcctcatttcctccataatttgtcatgtgtgtctcttacaatcctgtagggctcaacagtcaagcaggtaggaggtcagaaatttgcttacaggatccctgagcaacttaactaccctaatctgactttcaccattaaacattttttgcaacaaaagaaaattacatttaaaaggaaaaaaaaacattacagaatgcttaactttgattaaaagtgttctgaatgctgcaataatgcaatttataatttataataacttataatttataaataatcattatttccttttaactatctaatcttactaccttacaagtgaaggtgataatttataacctagtggaccgaaaattatagaccttttgtctctctaagtcagtagtggaagtgctgttcacagaaggcatgcatttaagggatgcctgctgtaatcccagcactttgggaggccgaggcaggaggatcacttgagataggattttaagaccagcctggccaacatgtcaaaaccccatctctactaaaaatacaaaactagccaggcatggtggcacatgcctgtagtcccagctactctggaggctgaagcaaggaattgcttgaacccggatggcggaggttgcagtgagctgacattgtgcacttcagcctggtgacagagcaaagctctgtctcaagaacaaaaacaacaacaacaaaaaaataaaaaaaaaaagatgcctgggccacattctgacctgctaaatccaatttctggattagggcccagaatctgtatttttaacaaactgcccagacgattcttacgtatgttgaagtttgaaaatgctgctgttgattcactcaaattattctagagatatggataaacagtctggaaaaccctcaaagagaaggtagtggaatattccattatatatagtctacaaacacactaaatgccaacatatgcaaacaaagtgccccagtgtttaggaatcatcacctacaggaagctgttcttcacacagtggaagttcttaagagctaaggaaaaataaactttcataaaaagttattacttaagatgaaagtgaaaatacagtatgacccaattatgtttaaaaattaaatatctatatctcatttgcataggcataataaaagcctaaagggaataagccaaaagctaatgatatctctgattatggcagtatcagtgggttttttcattttttgtttttttatttaatttgtagcagagcagaggttctactccttgtggaacaggaataccccacaggcagtgtgcccagaatagcagggttttttctttatatctttctacatcttataaactttaacattaatgtgtattactttataattagaaatagacaataaaagtttacttttaaagtttccatgttggctgggcaagtggctcatgtctgccattccagcactttgggaggccgaggtgggtggatcacttgagccaggaatttgagaccagcctggacatcatggtgaagcaccttctctactaaaaatacaaaattagccaggtatggtggcatgggcctgtaatcctagctacttgggaggctgaagcagaaagtcacttgaacccaggaggcagaggttgcaatgagccaagattgcaccacagtacccagcctgggcgacagggtgagacgctgtctcagtaaataaataaataaatagaatagatagaataaagtttccatcttaaatgcctgggcatttctcagttaattattactattcttaagatataaatgtatactactatggcagtttctcactttatgaaacagatgagttttttgtttttatttttacagagatagggccttgctatgctgcccaggttggtcttcaactcctgcctcaactgatcttcccaccttggcctcccaaattgttgggattacaggcgtgagccacatgccatgtctggcctgaggttggttttttttcttttcttttgttttctttttttttttttagtgtgtgtaagcttttagacataacaaaagctcttattgcaaaagacattaatgaaccagaaaatatctacctggctagcttttgtagtaggtatggtttgcttttttttttttttttttttagggtacaggtagatttaatgagctttcaagtaaactgtagattattatatgaagctcctcccagctctccttcatctttgtactattttataaactcattcagtccttcttccacatacgttttgcccctcttatgacccagatgttcggagtgttgggaatgctacaaagacagacaagctcccaatgttaaagaactcacatttattttcattaatattactgttatgtccaactttttgaccattcataggcttttctcttagattaattattcagaaatattgcactaatctgaatcaccttatgtgcttgttaaagcacagattgttgggccccagcccggtctttggttcagtggatctagggtggaagctgagaatctgtctttctaatttccctaggatgctaatgctgctgttctagggaccaaacgctgtcttaggtcattgccaaattgcatcctccagtgtaatgacacttttcttccaggggttaaaaaaaaattaaaaataaataaataataaatctaaccagcaccaactacaatatgcccatagtttttttataagggacgtaacgacactcaaactggtcattaagtctcctgccaatattctacatctccttgctacactgtttttcatcacatcaacttggcaataccccaaccctggctcagccatcttcatgactaccctggtctgctaggtaatactggagtaaaccacaaccacagagactagcatcactccaagtcatgattatgagcagttcaacaaccctgctcagcaaacctctattgtcttatttatcatgagctctccattctcccccatcctcaaatgtctgactctccgatgtgcctccttactctgggggatgattttactatcacctcatgggaaaaacagaagcaacttcagagaagagcccaatttcctgccaccaaacaaaacaaagcaagaaatcaccccaagccaacaattcttttttcaattacattggagattatgtcctccaatttttcagctgtgctctgtgacctgcttccaaggacctagctatacatcactgtgtctctccagtgttcacagtgtctctttctttacggtgccatcctgttagcctttccataagcccaaacttctcacaataaaaagcagaagtaacaaaaaaaaaaaaaaaagagcacccaaatgcctccttggactcttgcccctgtccaatgtcaccctctctgtctcctcccctctcacccaaacctcttgactgagttaccactctgttcctcaccttctgctccctcttcaatccattgcagtctggctcctaggaaggaagccagaaattgctttctggggtcattagtgacttccaggttactaagcctaatgatcagttttcgactttattttgcttatctcctcagtagcatctaacactcctccagccctctcctccccccaatgtttcccttctcatctacccacttattcaaacttgtggctacccacctgctcaaaaagcctgtgagtgactctctctcattctttacatcacgcattaattctacctgctaaaatctttagaatctatccactttgctacattgctactgctactcctctaggccaccattgttctcatcttaactccataaacacctgcaagctagtctccctataattatacctgtccacctccaattcatcttctatgccctgctctggacagcctggtctcctccctactcctcaataccacaaactcttccccacatgctattccatccacctagaagactctccgccctttctcaccaggtgtgtggcttcaggtcttggtgtgaggtgtgacttcctttatcccctatatggagctctcacatactatatgagaggcctcccagaacacttcctatctaccaaatactcattgcctatcttccctgcaagctttacaagggcagagagcatgtctctttgagcccacattgtcttgtggaacaggtatcacccacagcccagcctagcaaggtatctggcatataacggtattcggttcactgctgaatacatgaatagatttgggaataaaattgcaatgacaaaaatgcatgttcttaaccatgaaggtacctatgatcaatagtagaagtggaaaatgtcatcgcaggtcataaaggggcataccacaggatttacacttataataacaacagctagtttgtttataccagtgtgctaagccctgggctggacctttagatgcattatttggctttgattctatgattttgtgaaggattataatccttgatttatagctgtgcaaaagaaattcagagagtaacttggtccacggtcaccaactatcaaatggatgaacctaatccaaactgaggtctcctaattgcaaatcctgttttcttaaacactacctgtcctctggatctgagcaaggaagagccaggtgccaaaattcctcccactaagcaaagccatgaagttgtgaaataatatttcgagaagctcggttagcacaaagacaacaacgcgagatatgaatctggatatttcagacacaaaagagaattttgagacaaatatgtttttaactcacccaagtttaaaaatagaatattttatataattgactacattaagatgttaaagaagaaaacttaaggtagggtgtttaccttagtaataatttattgtatatttcaaaatacctagaagagaagaactggaatgctcccacacaaagtaaagataaatgaaataatgggtatcccaattaccctgatttgttcattaccattgtatacttttatcaaaatatcatatgtaccacaaaaatatgttatgattattataatcaattaaaaaataaataaacattggccggacgtgatggttcacacctgtaatcccagactttgggaggccgaggcgggtggatcatttgaggtcaggagttcgagaccagcctgacaacatggtgaaaccccgtctctactaaaaaaaaaaaaaaaaaaaaaaattagccacatgtgtggcacgagcctgtaatcccagctactcgggaggctgaggcaggagaattgcttgagctaggaggcaggtgttgcagtgagccaaggtggcagcactgcactccagcctgggtgatgagcaagactccatctcaaaaaaaaaaaacaaaaaaggtatattcatctcagcagagatgcaaaagcattcaataaaattccacatccatttatgatttaagaagaaaaacaaaaccttgcacaaacaggggtaggaggaaatgtgacgcatctgtactcaatggtaaaatattagagcattctttttatttattaattcttttttagcctttggcaggcattctctttaaaataaaaatagtcaaagattctttttttttttttttttttgagacagggtcttgctgtgtcaccaggctggagttcagtggtgggatctcagctcactgcagccttgacctcccaggcttaagaatcctcctatctcagccttctgagtagctgggaccacaggtgtgcaccaccagagctgcttatttttatatcttttgtacagacggggttttgccatgtttcccaggctggtctggactcctgagctcaagcaatcctcccacctaggcatcccaaagtgctggaattatgggtatagccactgtgcctggccccaaaagtcaaagatttttctctctacttctctacttcttatgcttctatacacttctacatacttcagtacttctacacacttgaattctgtactgcactgctaggatacagaggataagatactctataggatgcaattggctttgtacataaatagtggagcagagatgattcaataaatggtgatgggaagatagtttacccatctggaaaaaaagaagttgaatcacatcacctcacacattaaaattaattccagatgaagtaagtacttaatatcaaagacaaaactatttttcatattgttggggtttttttggtttgttttttctgtgactagagtagaaaagtaaaagacaaaattttaatgctcttagtagaaagcataagatgaattttgacctcagggtagagaagaatttcataaacaagtcaccaaaagaaaacaaaacaagaatgatagtctcagaggaaaagatgattaatttggttacattaaaattgacaatttcgtttatcaaaagatgttaacaacagagaaaatgcaagcttcaaactaggagaagatatacaatatatataaatgaaaaagaattcgatatagaattcctataaatctttaagaaaaaggaaacattttttaaatagacaaaagacacaaacaggtgtgtcttagaagataaaacacagtgaaatgaacattaaaactacaagaatacatcattaagtaccaactagtttagcaaggtttaaagtttaaagagggtgcaagctggtaaggatatgggaactcataaacttctggcagaatataatctgggtcaatcacttgggaaaacaatttagcattatctttttaggttgagttgtaatttcactactatgtatatgcccagagaaacctttagatgtgaggaccaggagagtatatatgaatattcaatgcagcatagtttctaactgaaaatagcaagagaacaggtagtaaatttgtggcatatttatacagtggaatacaaaagtaaaaatgaatgaactatagcagaggaatcaatacagtttaatcagtagagttaaaaaaaagttgcaatagaatatatatagaccattttttaaaaaaagtttcatttaaaaagcaaaattaaacaatatatgatttaataatcaatatttaaacatcttgtttaattaatcaatattatttaattaaacatcttgttaatcaatatattgattcacagtatgtgattaaagtattttaaaaagcagagaatgagaaaaacaccgggagaatggtaacctctaggggttggggtaggtaagaactttatctggttgggagaagagatgaggaggaaggagaaggagaagtcagagagtttccaagccagcgagatgactggatgtccattgctggtagggagatgaagggagccgggtacaaggaagagaggacccaaggttcagggcagccccagctgatggccagcaagggaacagggacctcagtcctgccatacaaggacctggactctgccatcaagctgaatttgctttaagctgattctaccctatctcccaatcagagccctggaaggctgacaccttgatactggccttgttagacccagagagagaaaccagacaagccaatctggacttctgatgtacaggtactgtgaggtcataaattatgttgtttcaggccattaagtctgtggtaattggttaccacaatagaaaatgaattattatggatttttttttacctttattgatttacttttcctggtatattttgctgttccctatagttacctaagtaaatagcttatgtattttaagttttctttccaaaaaatataataaagcatttaagcctatattcctctgggaaccattttaattaaaccccaaagatttttattatttatttttttgagatcagggtctggctctgttgcccaggctggagtgcaatggtatatctcagcttactgtaacctctgcctcctggtctcaagggagctgtgcacctcatcatccaagtagccaggacaacaggtgtgcaccaccctgcccagctaatttttgtgtttttgtttagagatgaggttccgccatgttgcccaagctgatctcaaacgtctgggcttaagcgatcactggtctcagcttttcaaagtgctgggatcacaggagtgagcagtgcactatgcccagcaggacccacagatttttaaataggtattctctttattgctaattgttagatcagtctcctcttgatttctctctctctcgatctctctctctgtctttcctttatttgtagagacagctccctatgttgcccagtctggtcttgaacttcggagctcaaatgatcctcccacctcgccttcgaaaatgctggaattataggcatgagccagcatgcccagcctgatatttcttaatttacatattaagatatagagcagagtataagttggtttttagagaatccagattaaaatcatatccagtataagaaatctttatttcttattattttgttctgtgaattctgcaatttggtgctctctgaggggaaaatagttataatagaaacaaatgtaaagaatgtttagaaacatttacagtcactgggcgcggtggctcacacctgtaatcctagcactttgggaggctgggcaggcggatcacctgaggtcaggagttcaagactagcctggccaacatggtgaaacccatctctactaaaatacaaaaattagcctggcacgatggtgggtacctgtaatcccagcacttgggaggctgaaacaggagaatcacttgaaccctggagacagtggttgcagtgagcaagatcgcagcactgcactccagcctgggtggctaagcgagactctgtctcaaaaaaaaaaaaaaaaaaaagaaaagaaaacatttacagtctctgaattgtttttataacttgcttgaaatacactgaagtactgacctgtaacaaatagcatatgacagctatcagtccaacccactgtgcagactgtacatattggctatattgttaacattgtggttctcaaacacggccacacagagataattgcaagaatggcagcaactgcatttaaccctgcatggatggatttcataggagcttgctgcatttccaggtccacggcagtctgtagacgatgatggctagggaaagcgaaaggacacagaatgtgttttgttttgttttttaaacaacacaaaatgaacagtttgcacactggacactccctttttgaaacctttttcccttggcttttgcttctcccctcttcccatgttacccctgcctctcagtggctccctctaggggacggtggaggagttcctttgcggcattttcttcactcccaacttgtgaatgaaccttggtgcctctcaggctcggtcctaggctttttctccctctgcactccctcttgtgggtgatctcattcactctttcactgaaagctgtctccatggcagggactccaaaaaatttatatctccagcccagaactgtcttctagcttcagatctgcataatccaatgtcttcttggtatttccgtacggtgtttgcttcccaacatctcaaacttatccaaaaccaaattcctaatcttaacaatctgatttatgcctgtttctcctttcttcttaaaaatgtctcagtttggccgggcccagtggctcatgcctgtaatccagcactttgagaggctgaggcggggtatcacttgaggtcagcagttcaagaccagccggccaacatggtgaaaccccatctctactaaaaatacaaaaattagccaggcatggggtgcatgcacatgtaatcccagctattctggaggctgaggcacgagaatcgcttgaacccggaggcagaggttgcagtgagccgagattgcgccactgcactccagcctgggcaacagagaagacaaaaaaaaaaaaaaaaaaaaagtcttagtttgataagaaaaagaaaggaacagaaaacatgcaaatttaaaccatgcaatagagaaatacaaatttaagccgaatgagaatactctaccacatatctgaatggctaaacctggaaaacaccaagtatcaaaatgaatatacacagtcagaactctaatgttctgctgatgagtgctttaatgagaacaaaactttggaaaatggcagtatctacttaaggtaaagttatgcataccttattgtccagcaatttcactctcggtatatgccaaaaagaaatatttatatgatcatcaaaagatactagaatattattagcgtactatttatagtaaccaaaacctggaaactcccccaaatgcccatcatcaatagaataataaataaatttacaccatggaaagaaacgatctacaactagaactagacccagtaattggatcaacctataatgtcaatctcaagaagccagacgttaacaagtatatagtgtaatcaatttatatgaagtatagaaaccagcaaaactcatctctgcattggaaaagtcaggatgtagttgccttcgtggggaaggatacagcaattacaatggaacacacaagggattttgagactcctactaacattctgtttctcaatctaggtgctggtttcacaggtgtcatagacaaagattcatcattctgcatgtagaacaaactccaattaagttttttatggcctggcgcgtggctcacgcctgtaatcccaacactttgggaggccgaggtgggcagatcacttgaggtaggagttcaagaccagcctgaccaacatggtgaaaccctgtctctactaaaaatacaaaaaattagccaggcattgtggtgcatacctgtaatctcagctacttgggaggctgaggcagagaatcgcttgaacctgggaggcagaggttgcagtgagctgagatcatgccactgcacccagcctgggtgacagagcaagactccgtctcggggaaaaaaaaaaaaagaaaacaaaatttttttacaaagggttgtcttaagtgtcctggtttaagcaataaattatatggccacctaaccaacattcagttaatttttgttctgaagataaaatcctgcccctatccatccctcagtctgtgtcagggaaaatttagatatctggaaatgtgtggcagattgaaaaagtttatgaatacttcctcagacgatggattccactatatcagcagggtatcacgtatatttctttcttttctttctctgtcacccaggctggaatgtagtgttgcgatcacagctcactgcagcttgacctcctgggaccaggtgatcctcccacctcagtctcctgagtagctggggctgcagcatgcaccaccacacgctgctattttttctatttttagcagagatgggattccatcatttgcccaggctggtcttgaactcctgggctcaagtgcaccacccgcctcagcatcccaagtgctgggattacaggcatgaactacagtgcctggcctcatgtacatttcttaattccaaaaataaaaaggagcctcacttcaccaaaggcttttataattttaatatataaaacttcggccaggcgcagtggctcactgcgctcagtgagccactcggtgctgtaatttcagcacttgggaggccaaggcaggtggatcacctgaggtcaggagttcgagacaagcctggccaactaatgaagcccagtctctactaaagatacagaaattagccgggcgtggtggtaggcaccgtaatcccagctacttgggaggctgaggcaggagaatcgcttgaactcgggaggcggagttgcagtaaaccaagaccgcaccattgcactccagcctgggcaacagaatgagactctgctcaaaaaacaaacaaacaaacacccaagaacttcataggattataaaaatataagggatatctattcctttttcagacagaaacacatctaaacctacaaagaccaatgtgaattcacctctttaaagctttcagcacaggatgtcatttttcctattctttggttccattctaaccttaacagtcctcaccattaggacaatatttcttttacttaatcccaaccctgaaggacgctacttactaaatttagtgtgtatatgggtatcctatgaatgtcgattggttatacttcttgagaacgtggagactttttggataatcatttctatattcaaggaatcttttcaaatatttaatgcaataccttaaaaagtacacttttaaagcaaactcaaggccccctctcactctacttcatcttctctgagggcgttaatgtgtcttgctggttctccactgtatccccaggcctaaggcagccctggactcaaagcatgtagctcctccataagtattttttaaatctcgtatttttctttttgagatggagtttcattcttggttgcccaggatggagtgcaatggtcgatctcagctcactgcaacctcgacttcctgggttcaagagattctcctgcctcagcccctgagtagctgggaatacgcgcccagctaatttttgtatttttagtagagacggagtttgccatgttgaccaggctgatcttgaactcctgacctcaggtgatccgcccaccctggctcccaaagtgctgggattacaggtgtgagccactgtgcctggcctaaaattttaacttgcatataataattgtacatatttatgcggtacatagtaatgtttcaaaacatacaatgtaagtgatcagatcaaggtaattagcatatttatcacctcaaactcttttctttttgttgaaacattcaatatcctctcttttagctacttgaaagcatatagcatattattgttaactcagtcgtcctacagtgctatatagaacactagaacttattttttaaactattttgagatttcatagattcacaagcagttgtaagaaacagtacagagaaatctcatatactcttcaccagttttctctaacaccttatataactatggtaccatagcacaaccaggaaattgacattatacaatcctctgaccttattcaggtttttttaaaatttacttattttttatttttttcctccctcctcctccatcccttattcagatttcactaggttacttgtgtgtatgtgtgaccataagtattgtttaaataaacaaacacaaagcactttctacagactgatcaaatctggaactaaattgatgtcaactcaaacactgtggtttcccctcctcatgctttttctcctctagcagaccctacataattctttagtttcctgggaaagcaaatgcctctttacccaatgactagtgaacttttatctacaaagtggagccttctgcaatctgtgtgtgatcacgcaatataaaataaaaatgtgcgatatatgaagacctaataacacatctcccccttgcctgtgttggctcatttattacacacacacgcacacatacacagacacacaaacacacacacacaatgagtccttgctaggtagtaggtaccatctaagtgcttcacagtttcattataattctcactcaactctgtgaagatagaattattattactattgtacagaggaagctgaggcagagagttaagtagtttgtccctcctcaattcatggtttaaaattaatattgttgtttttttgtatcatcatcaccatcacattatgcaaacaccactccgggtaaggagtcttagatgagtgacttgaacatctacatacagaaaaaaacaatactcaggatttcaacactcgaaaagcaattatgaacaatgaaccacagtagcattttctccccaatctggatcatattatatcaaaattcccaaaataaaaactcatctctgatattaaaagtcaagagtaggctgggcgcagtagtcacacttgtaatcccagcactttgggaggctgaggcaggcagatcatttgaggtcagggttcaagactagcatggccaacatggtgaaactctgtctctgctaaaaatacaggctggcgtggtggctcatgcctgtaatcccagcactttgggaggccaaggcgggtgggtcacttaagtcaggagtttgagaccagcctggccaacatggtgaaaccccgtctccactaaaaaccaaaaatcagctgggcatggtggtgcatgtctgtaatcccagctgcttgggaggcttgagcaggaggatcgcttgaacccgggaggcggaggttgcagcgagcagagataataccactcactccagcctgggcaacagaaccagactctgtctcaaaaaaacccaaaaaattagctggcatggtagcatgtgcttataatcccagctacttggggagaccgaggcaagagaatcgctgaacccgagaggcagaggttgaggtaagctgagatcgcaccattgcactccaccctgctgggtgacacagcaagacactgtctcaaaaaaaaaaaaaaaaaaaaagagtaactatcagatatcatgactcaaaggagttacaagggttgctgggggggttctgatgtgcacagaatttgcttcttgttctgggtacccggatgtgtgcatgtgataaacacacatcccttccgattaggtacttttatgcatgtatgttgttcttcagtaaaaagtttacttttaaaaagtgtggggccaggcacagcggctcatgcttgtaatcccagcactttgggaagtcaaagtgggtaactgcttgagcccaggagttcaagaccagcttgggcaacccagtgaaacctcatctctaaaagaaatacaaaaataaaccacacctggcagtgtgtgcctatagtcccagctactcagaggctgaggcaggaggattgcttgagcccaggaggtggaggttgtagtgagctgagatcagccactgcactccagcctggacaacagagcaagactctgtctcaaaaataaataaataagccaaaaattcaaagacaaccgtgttcccagtgaagacttcttactcttttctgtctcaaaataaataaataaagccaaaaattcaaagacaaccgtgttcccagtgaagacttcttctctttctaatgctatgaagcatcacagagaaatgtgtcaaatttgctgtaaaactgaatttgccccctctgagtgtcaaaacttgatttttaaaaaccttttacatttacgcaaattgctgcacgctagctttccctgtccagcagtagaatgaatagaatatattcagtcttttatgatcatttggggtcatcaatcaaacaccaattattatcctgttactctaaagggaagccttaggggtttctgaagcaggagaggtgctcacctctgatccaaatgagcccatacaatatggtttgagagtccctgggtctctctcagagtttttctatctcgttttgtttctggctgagttagggcacctacttccaacctctctcctccatcactttgtctcatccttggttccaccagctctaagttttagcttataaaatgtcttatttttatttattcattcatctatttgagacagggtctcactctgtcacccaggctggagtgtagtggcgcaatcttggctcactcaacttctgcctcctgggctcaagccatcctcccatctcagcctccactgtaactgggatacaggtgtgtgccactacacccagctaacagcttataaaattttatgttgctgaaaatttaacatctgttaaatctgggtcgtgggtacttagggatctattatgttttttcttatgttgaaagagctcattccagttttaaagttaaaacaatatttccataagcctgcaaacccctagccaattagtcttacctactcaataggtggctcgcagagatttgaggggctctcacgaagtgaggcaggtgacctctagcacatggagttttcacagcatctatcctggctacatgaggctctgctgcaaagctcaatatgcttcaaaatgctctctggataaatgaaggataatgcaaaatgttgcatttgcataagctgtttacatgctttttaaaatgtataagtaactgaatatggtggactttgggagaaaagggcaatcttaacaaaccaagccatatttcctaaaaagaatctattctcaacagttataaaaactgcctggagagcggaatttaaatatttcttcttctttggcttggcacttacctagacaccattcctgaggttcaatgagaaggaagaaaaggtcccctaagcccacaagaaggggaaatggtataaaacagctacttgtgacggaaacaggctttgctgttagaggctgtagttggcattccatttctcccagaaaatgaggggaaaacaaacattatagatgagaaatacactttaaatcctttaaaagaaaagatattgatggtgaacatgctagcatgacaaacttaaaaagaaagaaagggagggaggaagaagtgaatactgtgtataattatcttaagacaatgaagagaaaaatacagtaacttgaatttgggtttattattagaaaatgtcggctgggtgtggtggctcacgcctgtaatcccagaactttgggagccaagacaggcggatctcttaaggtcgggatttcaagaccatcctggccaatgtggtgaaccctgtctctataaaaaaatagaaaaattagccgggcatggtggctcacacctgtagcccagtgagccactgcactccaacctgggcaacagagctggagtttctgtctcaaaaaaaaaaaaaaaagaaagaaagaaagaaaagaaaagaaaatgtctcagctccttgttgcataccaaaacttgggaatatgtgaaaatgtatactctctaaaatgtaatctctggtttgacacagctttccatccatataccattacaaaactatttatatacacaagtttgtcttagagcggcaatgcaaatttagaatctgtcaaagtgtgtgtggtaggggaagagtgcttagaggggagaaatgtccccaaacatggaaaacattttgactctagttcttctgtgtttaaatctttgattcatgaaggcgggaacatgtctatcttgttcactgtcacatcccagtatttagcaagagcttggcatatagtaggaattcagtaagtatgtttttgtttttgttttctgagacaagtctctctctttgcacccaggctagagtgcagtggcgggatctcggctcactgcaacccggattcccgggttcaagcaattctcatgcctcagcctccagagtagctgggattacagccagcactaccatgcccggctaatttttgtatttttagtagagatagagtatcaccatgtggccaggctcgtctcgaactcctgacctcaagtgatctgcccaccttggcctcccaaatgctgggattacaggcgtgagccaccatgcccggcccaaataattctaaataaagcacagaataattgctaataaagcacagtagttcattcagtattgccagcaaatgagcaaatcccttttactttttttaaaatttatttttttaatttagagacttgacaattaaaaattgcaatatttgtgctatacaacatgtttccatacacacacacacacacacacacacacacacaacatcgtgaaatggttaaatcaagctaattaacatatccatcacctcacatacttatttttagtcttctttttttttgagacagagtctcactatgtcgcccaagctggagtgcagtgcatgatcttggctcactgcaacctctgcttcctgggctcaagatattctcctgcctcagctcccaaatagctgggattacaggtgcacaccaccatgcccggctaatttttgtattttttgtagagacagggttttgccgtgatgttcaggctggtctccagctcctgggctcaagtattctcctgcctcagcctcccaaagtgctagaattacaggcataagccaccatgccaggccataaaatgcacaaatcaaaaaactcaagaaaaattgtactgctgatgcaagtattagtaatagaagaccaaatggccctttcaaataagtaaaaagcattctgcacttggacccactaacaacttgaagtgaattcaaaaataaaataagagtaagttattgagtttgaagtacatggaattttaaaacacttatgaattctacttaaacatggtgtgcccattacacttccctccctctttgaataaagtattatttcactctccttggcagaatgctcagaacaggattatagtctccacaactcatttccctctgcacgcaagagcttaccagattctatccaaaggacttaagtttaaatgaaaaagcagagaatcttctttaaataaacttcttgaaaagattcctcagtggctgtcaaagagaatcagagctttgaaacatgtctgtgcattcaaactgtctcaagcacgaatgtcatgaaactgaaaatctctggaaagtcaaaatgaaggaagtgattcagtgatttggaagatatttttagccctagaaacatctctgagtgattaaaatcctcgcaaagcagctacttggtaccaaatacatgtagaaaaagaaaaaaattcaattaattgactacaatttaaaaatattcagaaattgtgtgttttcagaaagatcagctatattttcttgtgcccatatcaatattatgacaggttagaaagagtactggctttgatactacctggttgtctgccctggccagacatttggtctctaaaatgaagggtagaacttaaggtcccagccagctcaaatatttaaggatcaatataacctacatttctaaacaaaacaacaaaaaaccccatcaaatttgagctgggacggtgcggtggttcacaactgtaatcccagcactttgagaggggtgaagaatcacttgggcccgggaggtcgaggctgcagtgagtcatgattttgccactacatccagcctggctgacagagcaagaccctgtatcaaaacaaacaagcaaaaagaaagaaacataactcgtgtccaaccaaattaaatgggaacagcttgcagaccgagctgtatcttactgttttacacagtgtctggtacacagtaagtacttaataaatatgttaattaaatggatggataatatgaagaaattgaatgaacaacaacaaaaacttagaaaagtacagccaaagttgtatagtcatttcaaagcttgttttgaccttttaaggaagtctctatataaagaaaaagttataacaaagatttctagtctttcttttttttttttttttttgagacagggtcttgtctgtccccaggctggagtgcagtggcatggtcatggctcactgcagcctcaacctcccagctcaagtgatcttccagcctcagcctcctgagtagctgggacttaccaacacacaccacacgcctggctaatttttgtatttttttttgtagagatggggtttcaccatgttgcccagcttgtctccctacttggcttcccaaagtcctgggattacaggcatgagccactgtgccggccctctatctttcttaaaaaggaagaatgttctaccttttaagggaaaaatttaaaacttgcaaagtcaagtcagaaaaccctagcaggagtcacctgtaaactggaagctatggatggaatttggtccaaagatgttgttttgtttgatcagcccaatgttttggaggttttgttttgtggctggtttactttttgtttgaaccaattttttaaaaacctggattctctcggggaatgagaagccctggcaaccttgaactggcatcctcacgtagccacgatccactggggtaagtggaagcttcctgttttgccaggagtgagcactctctagttccctacagttcccactctcacacaagtgtacacctatactctgctgcatgaggatttgacctttaattaactgcttagtaaacagataagtggtttgtcaccagttattaggcaacgctggttataataaaactgacccaattggtaaactgtgtctggactgagagaaacaatgaaaaatctgtaaatactgatgacgatgccaatactttgggcttcccagagtgcagtgataactgttatagcctatttaatcccctagagctaccataacaaattaccagaaatctagtaacttaaaacaacatattattatctctcagttctggaggccagaaattaaaaatcaaggtgttataatagcaggaggtcctgagggagaagccatgccataccctcttcggcctctaggggagccaacaattctcattttccttggcttgtggccacatcactccaatctctgcctgtcttcacatagccttctctctgtgtgtctttgtctcaaatctccttctcctttctcttataagggcaccaatcatggatttagagcccagtctaaatccagggtgatctcatcttgagatccatagttaacatcgcaaagatcctatttccaagtaaggtcacattcatggatacctgggattaggatttagaatacctttttggggggcactgttcaacccactacctatcccttgcagggatcatagaagaggtatacagagtactacaaaagacagtggttcctatggggcaaggggactttaagctcgatctcaccagtgcagatctcatctcctggtgcctgagctgttacctgaggaaaggatacttactgagggctatgatgactgctgctgcaaggatgcccactgccactgcccagccacgtcctgccagcaagctctgacttctgtcctacatccttctgagtagactggtgttcagttggtcttaatagtctctcatgtcttttttttttttttttttttttttgagacagagtttactcttgttgcccaggctggagtgcaatggcatgatctcagctcaccgcaacctctgtccctgggttcaagcgattctcctgcctcagcctcctgggtagctgggattacaggtatgcccaccctgcccggctaattttgtatttttagtagagatggggtttctccatgttggtcagctggtctcgaactcccgacctcaggtgatccacctgccttggcctcccaaagtgctggattacaggcatgagccaccgcccctggcagcagtttctcgtgtctgaatgtttagttgatccagaaagacaccctggtgggtgctgtatactaaatctacttcacctatttactttgtctccaatccttgttggtgtgaccctctggtttaaagaactggccaaacttccatcaattagtaaatattcattgaatgtttattatgtgttgggtaatgctatggatacagcattgaaaaaacagacaaaatcccttccttctgggagtttatattctagtaggagaagacagacaaaaattaatagtcagtgatcagaatttagataatactgtattttgaattcagagtctatagattttctagtgaaatggctgagaagtatggaagagaagaatcacagatgactgcataattcgtcctgaacgactacaaggataaagttgccatttactgagatggtggaacctatggaggagttggttttgcaggcatgaggaagatcaagagctgagatttggacatgcctatctatattcaagtagagagtttgagtaggcaaacagatatttggatttggagttcagggaaggtctgggctgaatatacaaatttgagagggttcagtgtatagatagtacttaaagcgaaaagagactggataagattgaccaccaaagaagtgagtgtagaaaaaaagaagtggtcagagactgaggcttgagcactctaacctgccgtcatcaggaagatgaggaagaaccagcaaggagactgaggatggggcagccaggaaagagagaagagccatgagaatcaggtgtcctgaagccacccaacttaccaggtgaagaaagagaagccaagtaaagaaagtgtcccggccaacgtggtggctcacacttctaatcccagcactttgggaggctgaggcgggtagatcaccgaggtcgggagttcaagaccagcctgaccaacgtggagaaaccccatctctactaaaaaacaaaattagctgggcatcgtggtgcatacctgtaatcccagctactctggaggctgagcaggagaatcgcttgaacccgggaggcagagtttgcggtgagctcaaatcacaccattgactccagcctgggcaacaagagcaaaactccatctcaaaaaaaataaaataaaataaaggccccaaggaggagtgaggggtcaattatgtcaaatgctgccttccactcaaacactataggactgagaattgaccaatggaattagtgacatggtagtcattagctaccatattaagacaattttggtggagcaggagatgaaaacctaattggaaccggctcgagaaagaacaggagaaaggaactagaaactgcaggtatggacaaaaatttcaaaagttcatagtaaggcaacagagaactgaggcagtagctgagggatatacagggtcaagagtgattttgttttgtttgctttgttttgttttcgaagatgatagaaattataacatgttggaaataagccagttggggagaaacttaatgatgcagaaaaaggagggagaactgggatgaagggaagaggaggtaagattgtacttaagcagcaacattctcatcagctagaggcctcagaataaagatgcgttccagtgcaatatgatgtccattcttcctggaggttgactaagccagtgcttttaaactgctgaacaggagaatcactagggaaaagcgagggtgtgtttactttagacactattgttacgtcacaagtaagtggctgtaaactgcattttgttactaacaattcaatgatggtacagaataatcactcattcattcaacaaccacttactcgtctaccatgtgccagttctcagtgtattctaggtactggggatatagcactgagcaccacagtcatatctaaaacatttttatggttgcattatttaaaaatctatgtgtatttatttacaacaaaaaatatgttggggatatttttgtggttttggtcacaaaattgctttaaatcatctctttacgctttgtaaaaaccttgtatcgctaatattgataggatttattatcaatggtgtccctgaagcttcttttagataggtatttgggacactttctccgttatcttacttgctggattttaccccaagagcctttcaagtctatttaagtaatcttggaatttggtcacttttagataaattaataggatatccaactgttttttaagaactgctcttaatttctgttagtcttttaaatgttacttaaaggagttatattctctcacgaaatcaacttgagatcattagactatttaatttctctcccttagtttatacaataaaaggagttctacacaggaaaggaaggaatatagaattgccaagactcttttcgctaaatgtagacacccgaattttctacctttcactaaagaacacattccacttgctgaaccttttaaaaggtcaacagccactttgacagcgtttatttgtttcagtctttctgtggccctcttttcaaggttcgtttctctgatttcctagtagtatacttatttcatggaaacatttctttcagagaagcacaaagcctcttctaaacccttcctcattcatgttaagtctgttagctagatttcccactagtttaaaattttattttagttttagatttcccatatctgttatactttaatttagaatatatacatattccaaaatatacttggagtatgggagtggggagagagagggggaaaggaggggagagagagggggaaaggaagggagagggacaagaggagaaaatgggacaaggagagagagggtgagcgagaaagggaaaggggaataaagaggagagggagatttgttttgtaacttctatgttagctttgcttctttggagtttatcctctttttttttcgagacagaatctcactctgttgcccaggctacagtgcagtggcacaacttggctcactgcaacctccacctcccaggttcaagcaattctcctgtctcagactcctagtacctgggattacaggtgcctgccaccacgcccagctaattttcgtatttttagtaggacagtgtttcaccatgttggccaggctggtctcgaactcctgacctcaggggatccaccgcctcagcctcccaaagtgctgggattataggcgtaagccaccgtgcccggccagagctacttctttttttttttttttttttttttttagacgggagtttcgctcttgttgcccagctgaagtgcaatggcaagatctcgactcaccgcaacctccgtttcccgagttcaagcaatctcctgcctcagcctcccaagtagctggactgtgccggcccagagcctacttcttaaagtgtttcaaaggactcatacttgttcttagtttcaaatattgtttactatttgtatattcatttctaaagcattttatacttagagtaataactgtactttagccttctcttcttcattccaaatatttgtgtattacagaagagaagaactccaatacatcgtgttctttgttagaatttgaaatctcatagcctaaaattttcctccttgcagcaatcacacacggtaaaaaagctgttataacatggcgagtctgtaacatgtgggtccctcgcagcctataaagtttatttttactccccctccttccactggagccttcctaatacttagggtgaggaatgtggatgggtggccaagatatggaagaactggggagaactatacatgtgcctacatgtatgaaaacattatgctcatgtcaattaaatgcattatgattaaagtgatttgcacatccaggatccaaaaggaaacaggatgagtaatgacgggacaaactctggaccattgatacaaatacagtaatgaacctaaagaaaacaagatcggccgggtactgtggctcacgtctgtaatctcagcagttggggggccgaggtaggcggatcacttgaggtcaggaattcgaggccagcctggccaactggtgaaaccccgtctctactaaaaatacaaaaattagctgggcgtggtggtaggcatcgtaatcccagctactggggaggctggggcaggagaattgcttgaacctgggaggtggagttgcagtgagccaagattgcgccactgcactccagcctgggcgacagagcaagactacgcttgaaagaaagaaaaaaagaaacaagattttcgtaagagcagcagatgaaaattgccaaatttacacatttttgtccaagagttaagtatgaacagattaagagaagtacaaagtttgagaaatttaaaaaccttttagaaaaccgtatattggactctaacatgaatgaagagttcaaaacatattttagatgaaggttttcgctgtctaaaaagatttggcagaaaataagcaattgccataaaagcagagaatccaactttgacgataaggtcactgaaaagacttaaaacactttcatgggtaagttacataacttctctgcctcagtttactcttacatacatgtgattgacataatgcacttagtggacacacagcatgcaatcactattagccattctgatgtctctcctctgtggcaagtcaggcaacgagcaataacacttgtgtttcccttaccctcaatttgagaagatattccaagacctccagaaagctttttggtattagaagctgctctgaagagtgggtagaagaggagactggctctactctttgagcaaacaaggtgtagacagctcggggcaaacttaagggctccaccacgaaggaaagagtgcttctgacagttactttggaacttggtatgtttttttcttataagcatagtggcaaaataactgagagttacgcaacgaaatgcttaggtgcccagtggtgctcacaccctgatgccgatctcacaccagggaagcctttgaagctgagggttagtaacaccttccactacattccagagtgggagaatgctggccacacttcgaaagctgcagtacaagtttaaaacaaccaacaaaaacaaaagccaaaatcacttttcttaggaatgaggtcagcactcttttgcacactcgtttgtggggagttaaatatttggtgagaaaaggcagcctgcccgcaggcaaagctagagatttcggccagtgggcatatctttcaaacccttgctactcctctcgattattttctgcgacatagcaccactccaccccttgctcctttctctaactactttctgaaggccgtgcctttggggaagtggttacaaataaatgggtttgcgccaaaagctagaggttcctccagctacacggcaaaccgaaggaagcagtcagacattgtgagaggcactacacaatgacaacaaacattgccagcgactgctgagcccctccccgcgccagcctcagcccagagaatgcaggcccggggctggctcgccgcgggccaaaccggacgcagcttgcgccgggggcatcccgagcagaggcatccctcggtgccaggcagcccgggccctctccgggcatctcccacccggagtgctgggccagtgcccaataggaagcccgcgggggaactttcgccactcttctgccacataaacaagtcgggctcaagaccgtccaagactgggcagggcggtgaaacacacttggaagtcctggcagcttcccggactcgactgatttaacactctaggaggagaggaacccagggcggatgcttcactcgccccccttggccacccctttacccagggccgaggatgttacaaatacgggcaaattctcgctctggcaatctttccccgctgccttcccctcctcatctgcagcctggaagcaagttcagcaaaaggctgagcgaaagtgtttccgcgcccccgattgcgcaggctcggtccacaggggcgactttccgggcgcgtgggctgcagcggcccgactgcgcggcgctccggcatcgcgcccgggctcaagttctgggtcttggaggcccctccagtgcgtcctagccagtcgccgcaaagagttaaccaatggggccggccccgctccgccgcccccagcagcgcgtctccaccgcgcacccccggcccgcgctcgcggcgatcctcctgaaccgcagctctgtcccgccccagagccagccagcctcctcccgcccagccgacttggcttcccgcgcgctcctcaccgcactcctccgggccccgcatcctccagcacttcctcagctggaaggggcttcacggaggaccctctgcccccgccgtctccccgctttcctccccgcacccccccaggaggtgccagtaccgatgccctggatgaaacgaagccggtgaccatgagcactgggtgccagttaaactctagtgcgctcccatcccaccaagcccctctcggtagtggaggacccagacgagggcgaagatcaccgacaggaagccacgagcagtgccgaccccagcagcgccaggaagcgccagtagccctccatggccatcaggccccatactccgcaccgcgggggccacaagaacttggagaggcggcggcagccctctggtagtggccgggcggcgggaccggggcgtcgacttcttggggctgtctccgcctgcgggagggactttctgggctgctggcccggaatgtggggcctcttgcgggtggggagctggcccaactcagaaatgggccccacccccgggatcacgcggccgccgagggcgctcactgcctgtggcctcaccctctccctcgtccagcatccaagctcgcagagggcttcagtaacagactagttagttgctcaaagagaaaattccgaggattttatactcaccacttgcttttaacattcccgtgtctcgtccttatttgtggggaggttgagtagggcagtggtgcgccctcttgttaagagaagagagggatccgttgggtagggttatgtgtgtgcttttaactactaacgagcctccttagccacagtgctggagaattggctgtctctgacatcaaagggtgttaaggagaacctgtaaggtggtgtaaactaaaaataaaatcctaagcccctcactgactgaatggcctccttggccaagcagaccccagaaaaaccttaaagctgagtttctagctacagccggagggaagtctaccccctccattttggaatttagactcaacagctgactagcattaatgttaaaatagaaatcataaggcggacagaacagactctttgtagcaataagacatcaaatttaaaaaggacctaagtcacacactcctacacttaagaaataaactatggtctaactgcccaaaggttttcttttcctctagaggctaaacaagcactggcttgagataagcaatattaaacaattacaacttaatcagttcacagatgctgaccagctgaacccctgttgcaccagcagaactacagctttcactgggctgatttcaggaactttttcatgataagaagaccgacctggaccggttctggccagtgtacagggattgtgcacttgtatgcattcacgtcctgaaagaccttttgaagtgtaggtttgaagtaatacatttaaatgtatttgaagtaatacaattaatgttaagtctccaccccaaagagaacatgttacatgcatgtttgttcaatatgcatggtaaggaccacctccattaatattcatagctcctcctgtaacctgttacgtatgtatgttggccaaactgttcagcataaagctcctaccccaacccctctgccttccaagtgcctgttctggtcttaggccagaggctatgtttatcagcctatggaatggcctccttgcaggctaaaccttttataagaaataaagtctcctcttttttcaaatttataattttttgttttaagtaacagtaaaggccgggcgcagtgcctcacacctgtaatcttagcactttgggaggctaggcgggcagatcacttgagtccaggagtttgagaacagcctgggcaacaaggtgaaacctgtctctactgaaaatacaaatgcatgcacctgtagccccagctacttgggggactgagaaggaggatcacttgagcccagaaggtcgaggctgcagtgagctgaggttgcaccactgacttcagcttgggtgacaaagtgagactctgtctcaaaaaaaaacaaaaaacaaaaaacaaaaaaacccagtaaaccgggtccccatgaggtgtctcacagctgtaatcccagggcttgggaggtggaggcaagagaatcacttgagctcaggagagctatgatcgcaccactgcacgcagcctggtgacagctagactctgtctggaaacaaaacaaaaacagcatgggcagcgggggcttggccttatcctgcaatgaaactacttgcagtttgctcttgagagagggaagacggaacctcctggacctggacttgccgtttagtgtgacaaatggattttcaaagtgcccgccacccaaaccaatttgaaccaaagcccctccttgatgaagtgaagcttgctccctgcctctttccaacattatcctcacccttctccactggacaaaaacaatgtcagcattatctatgctattataagaaaaagggttctgactgccagggcttccagaatgcatttgggaacgtcacttctagccctcttctgtagctcatctccaaggactactttgctatattgtcttgttccgtcttgaaagaccttagaatgtgcaggaagtatacggggatgattttcaaagcaggcaaggaaataggagtggcaagccatggtagtagggcaggattaagggctcagagtaaaagctgtagacctcacctgtgtcattatttttcccttggtggggagagtaagcaaatggaaggaaggatacctttccccagcacaaggctttctttgatctggtccagcctagcaccccctccagtctcttaccacaacctgactggccctgatgtccttggctgtaaactgctctggcacttctgaccacttcctacccacgccactgcctctaaatttccctgacccccatctccacgagaaaccttccctgagtctgcccctgcccagacttttatatcccactgacctccccatcagtgcctccttgtgtcacctgtcaggatgtaatataaggatctgcttctctggctgtcccactctcagactgccctattgaaggcatggattctctaattgatcattttattcctcctgggatgtggcagttactcaataaacatgtgttgggaggctaatgagactgagtgtgttatcagggtcctggcagaaaacaaacagcatattggaattgagtaatttcataatgaacagactgtttatgaagttgtgggcagtgtaggaaacctcagggttaggcagtgccccaggttgaagggcagagaattactggaatccagagagaaaattgtgcggagggggaagtccgatgaggccttgagtacagggatgcagccagcctgcagagacctcatagggagaaagatggagcagataaatattccagccttactcttctcccctctgatcttctgcctagggtgtcccagggctaaccagaacctaatcagaagccacagggcagtccatgtatccatcccaggtcaattagggcacagagcagaagagagaagagtgagagcggatccctaggaataaaaggaaacatccctgaatcttccggttttattttttcagacctttttttggttcctgagtgctgcaacattgcctgtttcatcttacactgattcttttcctttgcgaactttagcttgtaattcttaatgacatcattgtatccctatccctctccctaaaagtatctagtctttgtcctcaataatgttttcaccccattgacctaacaccttcactccactcttgagttaattttgcttcaagcagcagcagatgagaatctctgggattccagaccccatttaacaaaacatttcgggagatgaaaacatggccaaatggtaccaatggtgttgaatcatcttgaagttatatgtaaactgagagaatttcaacttttaaattatcttttaagaacctaactttgatattaaataaactgtcactgagaaggggaaatttttcaataaacattgttgtggcttactgttaacctttaattaattaattaattatttttctttttgagacagggtcccactctgtcacccagattgagtgcagtggcatgatcttggctcactgcagcctccacctcctggactcaccctcctgctcagcctcccaagtagctgggaccacaggcgtgtgtcaccatgcctggctaatttttgttgtttggtagaaagggggtttcatcatgttgctcaggctggtctcaaactcctgagctcggagatccacctgccttggcggcccaaagtgctggcattataggcatgagccaccaccctgcctgtgaacttttttaaaacagagttgttaaatgatagaagtttccctctggagatttaagcagtttgtcaccaaagtacctaatcagactcaataacctgtcagcaatgctgttggtgattcctgatgtagcaggtgggggagagcattgaagaagatggccttcctaaaaaccagaagctggccgggcgcagtggctcacgcctgtaatcccagcactttgggaggccaagggggcagatcttgaggtcaggagatcgagaccatcctggctaacacggtgaaaccctgtcctactaaaaatacaaaaaattggccagacgtggtggcaggcacctgtagtcccagctaccgggaggctgaggcaggagaatggcgtgaaccagggaggcggagcttgcagtgagacgaatcacgccactgcactccagcctgggcgacagagcgagactctgtctcaaaaaaaaaaaaaaaacaaaaaaacaaacaaaaaaaacacctagatgctagaaacatgctcatgcagaatttttgtccctcacacagatgtagaatgtagagtaagaagacatgttgtgagggttgtggaagaaaatccaaatcccacccatcaggagatgaggcactgggagccctagatgccatcttcttttgaacttccacaaaataatgttgcatttcttctggtgcatacagaagtccagtagctgctcttctgaggatccggcaagatggcagaagtagagcagaagaagaagcggacctccgcaagttcacctaccgcggcgtggacctggaccagctgctggacatgtcctacgagcgctggagcagccgatgcagctgtacagtgcgcgccagcggcggcggctgaaccggggccgcggcggaagcagcactccctgctgaagcgcctgcgcaaggccaagaaggaggcgccgccatggagaagcaggaagtggtgaagacgcacctgcgggacatgatcatcctacccgagaggtgggcagcatggtgggcgtctacaacggcaagaccttcaaccaggtggagatcaagccgagatgatcggccactacctgggcgagttctccatcacctacaagcccgtaaagcacgccggcccggcatcggggccacccactcctcccgcttcatccctctcaagtaatggctcactaataaaggcgcacatgactccaaaaaaaaaaaaaaaaagaagtccagtatgctaacaaaagtcgtaataagctgcacacagtggtttgctttgtgggataagccgaacatttttcattctgattgttgactgtgtgttggttcctctctgttttcccctccactctccaccctttccttggcttgtgctctgggaggctgacgcctacaactgtgtcatctgactctccttgtctctggcttccaattgggtttggctgatggctggtgctgactggggattagaaggcaggagccaggtcagcctatttatcccactgtgactccttgttgggacatggttttgcagtggcgcattcctctttgccacgggactttcaagtgttcccttctccacagctgtggctctcacggggtccagtaacaccatcaccacttgcttctacgcgtctatgagtggcattggcttccgctgtgcttgtccctggttcttcaccactctttgccgagttcccttaaggctgttgcactctgttaatagtccatttattaaactcacttcaattaaatcctttgtgcaaaccagctattcttgcaagaccagatacaagtggggaaatattctgacctgatactactgttctcctaccttttgttcatgccttctgaagacatatgatgaatggaggaacggacgcagtgtgagaaatcacaggcaggagggatgaactcacatgctttcccttcccactttctcttttcctccttcttctg

SEQ ID NO: 2893 - DNA, 12323 bp, Homo sapiens
aggacattgtgagaggcactacacaatgacaacaaacattgccagcgactgctgagccctcccccgcgccagcctcagcccagagaatgcaggcccggggctggctcgccgcgggccaacacggacgcagcttgcgccgggggcatcccgagcagaggcatccctcggtgccaggcaccgcgggccctctccgggcatctcccacccggagtgctgggccagtgcccaataggaagcccgcgggggaactttcgccactcttctgccacataaacaagtcgggctcaagaccgtcaatgactgggcagggcggtgaaacacacttggaagtcctggcagcttcccggactcgacgagtttaacactctaggaggagaggaacccagggcggatgcttcactcgccccccttggcagcccctttacccagggccgaggatgttacaaatacgggcaaattctcgctctggcaacttttccccgctgccttcccctcctcatctgcagcctggaagcaagttcagcaaaaggcgaggcgaaagtgtttccgcgcccccgattgcgcaggctcggtccacaggggcgactttcggggcgcgtgggctgcagcggcccgactgcgcggcgctccggcatcgcgcccgggctcagtttctgggtcttggaggcccctccagtgcgtcctagccagtcgccgcaaagagttaacaagtggggccggccccgctccgccgcccccagcagcgcgtctccaccgcgcacccccggcccgcgctcgcggcgatcctcctgaaccgcagctctgtcccgccccagagccagccagctccctcccgcccagccgacttggcttcccgcgcgctcctcaccgcactcctccgggcccgcgatcctccagcacttcctcagctggaaggggcttcacggaggaccctctgcccccgcgttctccccgctttcctccccgcacccccccaggaggtgccagtaccgatgccctggataagacgaagccggtgaccatgagcactgggtgccagttaaactctagtgcgctcccatccagccaagcccctctcggtagtggaggacccagacgagggcgaagatcaccgacaggaaccgacgagcagtgccgaccccagcagcgccaggaagcgccagtagccctccatggccatagcgccccatactccgcaccgcgggggccacaagaacttggagaggcggcggcagcccttgggtagtggccgggcggcgggaccggggcgtcgacttcttggggctgtctccgcctgcgggagggactttctgggctgctggcccggaatgtggggcctcttgcgggtggggagctgccccaactcagaaatgggccccacccccgggatcacgcggccgccgagggcgctcactgctggtggcctcaccctctccctcgtccagcatccaagctcgcagagggcttcagtaacaacctagttagttgctcaaagagaaaattccgaggattttatactcaccacttgcttttacacttcccgtgtctcgtccttatttgtggggaggttgagtagggcagtggtgcgccctctggttaagagaagagagggatccgttgggtagggttatgtgtgtgcttttaactactaagaagcctccttagccacagtgctggagaattggctgtctctgacatcaaagggtgttaagaggaacctgtaaggtggtgtaaactaaaaataaaatcctaagcccctcactgactgaaggacctccttggccaagcagaccccagaaaaaccttaaagctgagtttctagctacagcggaagggaagtctaccccctccattttggaatttagactcaacagctgactagcattaagtttaaaatagaaatcataaggcggacagaacagactctttgtagcaataagacatcaattataaaaaggacctaagtcacacactcctacacttaagaaataaactatggtctaactccacaaaggttttcttttcctctagaggctaaacaagcactggcttgagataagcaatataaaacaattacaacttaatcagttcacagatgctgaccagctgaacccctgttgcaccgccagaactacagctttcactgggctgatttcaggaactttttcatgataagaagaccgccatggaccggttctggccagtgtacagggattgtgcacttgtatgcattcacgtcctgaaagaccttttgaagtgtaggtttgaagtaatacatttaaatgtatttgaagtaatacattaaatgttaagtctccaccccaaagagaacatgttacatgcatgtttgttcaatatgctgtgtaaggaccacctccattaatattcatagctcctcctgtaacctgttacgtatgtagtttggccaaactgttcagcataaagctcctaccccaacccctctgccttccaagtgccgtctctggtcttaggccagaggctatgtttatcagcctatggaatggcctccttgcaggtataaccttttataagaaataaagtctcctcttttttcaaatttataattttttgttttagttaacagtaaaggccgggcgcagtgcctcacacctgtaatcttagcactttgggaggtaaggcgggcagatcacttgagtccaggagtttgagaacagcctgggcaacaaggtgaaccctgtctctactgaaaatacaaatgcatgcacctgtagccccagctacttgggggactaggaaggaggatcacttgagcccagaaggtcgaggctgcagtgagctgaggttgcaccatgcacttcagcttgggtgacaaagtgagactctgtctcaaaaaaaaacaaaaaacaaaaacaaaaaaaacccagtaaaccgggtccccatgaggtgtctcacagctgtaatcccagggtttgggaggtggaggcaagagaatcacttgagctcaggagagctatgatcgcaccactgactgcagcctggtgacagctagactctgtctggaaacaaaacaaaaacagcatgggcagggtgggcttggccttatcctgcaatgaaactacttgcagtttgctcttgagagagggaaacaggaacctcctggacctggacttgccgtttagtgtgacaaatggattttcaaagtgccgcccacccaaaccaatttgaaccaaagcccctccttgatgaagtgaagcttgctccctccctctttccaacattatcctcacccttctccactggacaaaaacaatgtcagcattattaatgctattataagaaaaagggttctgactgccagggcttccagaatgcatttgggaagttcacttctagccctcttctgtagctcatctccaaggactactttgctatattgtcttttgccgtcttgaaagaccttagaatgtgcaggaagtatacggggatgattttcaaagcagctaaggaaataggagtggcaagccatggtagtagggcaggattaagggctcagagtaaaggctgtagacctcacctgtgtcattatttttcccttggtggggagagtaagcaaatggagagaaggatacctttccccagcacaaggctttctttgatctggtccagcctagcacccctgccagtctcttaccacaacctgactggccctgatgtccttggctgtaaactgctctgcagcttctgaccacttcctacccacgccactgcctctaaatttccctgacccccatctcactgagaaaccttccctgagtctgcccctgcccagacttttatatcccactgacctcccatccagtgcctccttgtgtcacctgtcaggatgtaatataaggatctgcttctctggcttctccactctcagactgccctattgaaggcatggattctctaattgatcattttattccccttgggatgtggcagttactcaataaacatgtgttgggaggctaatgagactgagtgtttaatcagggtcctggcagaaaacaaacagcatattggaattgagtaatttcataatgacaagactgtttatgaagttgtgggcagtgtaggaaacctcagggttaggcagtgccccagtctgaagggcagagaattactggaatccagagagaaaattgtgcggagggggaagtccatagaggccttgagtacagggatgcagccagcctgcagagacctcatagggagaaagatgaagcagataaatattccagccttactcttctcccctctgatcttctgcctagggtgtccaggggctaaccagaacctaatcagaagccacagggcagtccatgtatccatcccaggtaacttagggcacagagcagaagagagaagagtgagagcggatccctaggaataaaaggaactatccctgaatcttccggttttattttttcagacctttttttggttcctgagtgctgaaacattgcctgtttcatcttacactgattcttttcctttgcgaactttagcttgtaatctataatgacatcattgtatccctatccctctccctaaaagtatctagtctttgtcctcattaatgttttcaccccattgacctaacaccttcactccactcttgagttaattttgctcatagcagcagcagatgagaatctctgggattccagaccccatttaacaaaacatttcggaggatgaaaacatggccaaatggtaccaatggtgttgaatcatcttgaagttatatgtaaactgagagaatttcaacttttaaattatcttttaagaacctaactttgatattaaataaactgtcactgagaaggggaaatttttcaataaacattgttgtggcttactgttaacctttaattaattaattaattatttttctttttgagacagggtcccactctgtcacccagatggagtgcagtggcatgatcttggctcactgcagcctccacctcctggactcaccctccgcctcagcctcccaagtagctgggaccacaggcgtgtgtcaccatgcctggctaattttgtatgtttggtagaaagggggtttcatcatgttgctcaggctggtctcaaactcctgagtcaggagatccacctgccttggcggcccaaagtgctggcattataggcatgagccaccaccctgcctgtgaacttttttaaaacagagttgttaaatgatagaagtttccctctggagttgtaagcagtttgtcaccaaagtacctaatcagactcaataacctgtcagcaatgctgtgggtgattcctgatgtagcaggtgggggagagcattgaagaagatggccttcctaaaacctagaagctggccgggcgcagtggctcacgcctgtaatcccagcactttgggaggccaggcgggcagatcttgaggtcaggagatcgagaccatcctggctaacacggtgaaacccttctctactaaaaatacaaaaaattggccagacgtggtggcaggcacctgtagtcccagcactcgggaggctgaggcaggagaatggcgtgaaccagggaggcggagcttgcagtgagagagatcacgccactgcactccagcctgggcgacagagcgagactctgtctcaaaaaaaaaaaaaaaacaaaaaaacaaacaaaaaaaacacctagatgctagaaacatgctcatgcagattttttgtccctcacacagatgtagaatgtagagtaagaagacatgttgtgagggttgggaaagaaaatccaaatcccacccatcaggagatgaggcactgggagccctagatgccactgtcttttgaacttccacaaaataatgttgcatttcttctggtgcatacagaagtccatatgctgctcttctgaggatccggcaagatggcagaagtagagcagaagaagaagcggacttccgcaagttcacctaccgcggcgtggacctggaccagctgctggacatgtcctacggcagctggagcagccgatgcagctgtacagtgcgcgccagcggcggcggctgaaccgggcctgcggcggaagcagcactccctgctgaagcgcctgcgcaaggccaagaaggaggcgcgcccatggagaagcaggaagtggtgaagacgcacctgcgggacatgatcatcctacccggatggtgggcagcatggtgggcgtctacaacggcaagaccttcaaccaggtggagatcagcccgagatgatcggccactacctgggcgagttctccatcacctacaagcccgtaaagccggccggcccggcatcggggccacccactcctcccgcttcatccctctcaagtaatggccagctaataaaggcgcacatgactccaaaaaaaaaaaaaaaaagaagtccagtatgctacagaaagtcgtaataagctgcacacagtggtttgctttgtgggataagccgaacattttcacttctgattgttgactgtgtgttggttcctctctgttttcccctccactctccacccttgccttggcttgtgctctgggaggctgacgcctacaactgtgtcatctgactctcctttcctctggcttccaattgggtttggctgatggctggtgctgactggggattagaaggcagaagccaggtcagcctatttatcccactgtgactccttgttgggacatggttttgcagtgctgcattcctctttgccacgggactttcaagtgttcccttctccacagctgtggctctacaggggtccagtaacaccatcaccacttgcttctacgcgtctatgagtggcattggctcctgctgtgcttgtccctggttcttcaccactctttgccgagttcccttaaggctgttgacctctgttaatagtccatttattaaactcacttcaattaaatcctttgtgcaaaccagtatttcttgcaagaccagatacaagtggggaaatattctgacctgatactactgttctctagccttttgttcatgccttctgaagacatatgatgaatggaggaacggacgcagtgtggaaaatcacaggcaggagggatgaactcacatgctttcccttcccactttctcttttcccccttcttctggttaagagatttggaccagtggctgggcacagtggctcacgcctgtaaccgagcactttgggaggcagaggtgggtggatcacgaggtcaggagctcgagactagccggctaacatagtgaagccccatctctcctaaaaatacaaaagattagccaggtgggtgctgtaattccagctacttgggaggctgaggcaggagaaccgcttgaacccaggaggcggagttgcagtgagccaagatcgtgccattgcactccagcctggacaataagagtgaaactcgcctaaaaaaaaaaaaaagatttggaccagaaagctgccccagatgaccaagacaaaggactccctgccggcaccatgactcatgaggcaagccaagccccagagtggtcagaggcttttgatgaaataaagcaaggattactgctttgaagagaacatagccaaacccatgttaaaggggggaataaactttcttcatgtaaggctggactgtgttgtctaaaacaaacacctgcttgctgagggatttttcctctgagggaactggagagattagcttctgctctcactgtgggatactggctgtggaagcagccctctaccagttctccaattcaagaggctctgggtccactgccccacgtgggcagggctggggcagtggaaggtttcatttgtattggtccatagcccttcctttgagaagaggcaggaagaaactctcttactaagggaacagagtaagacactgactgacaagcagacacaaggataagaggaaggtttctgggagaatggggagtgagcagacatctttgagaggcattccagcaaaatgtctaattcagtacagcctcttttgtgctacgggggagcatgggagaagaagagcatgggaagaagagtaggttagacctaggcatgactttgttccctccacactatactgctttgtaagatctgcctgatcctccatttaaattttaatacttctgtgaactccaagtatctgagacaggtcccagtcaatttggaaagtttattttccaaggttaaggacatgtgcccatgtcatagcctcacgaggtcctgacgacatgtgcccaggtggttggggcacagcttggttttacacattttagggagacatgagacattaattaaatatgtaagatgtacattggttcggtctggaaaggcaggacaactaaaaatggggagggcttccagattatagaaatttgcattttttaaagtttctgattagccttttcaaaggaggaatcagatatgcatttatctcagtgagcagagggatgactggatagaatagagaggcagtttgccctaagcagttcccagcttgacttttccctttagctgagtgatttgggggccccagagttactttgctttcacacttccgtcaccatccagtgcaagtttggtttaaggaaaatggtaaggcaggaagcactcaggaaagacattggtaagtcttcctaatcatctccctcccctcctttttttttttcttttgagacaggctctcccactgtcacctaggctgaaatgcatggcatgatcacagctcactccagcctcaaactcctgggctcaagcaatcctcccacctagtctctagagtaactgggagtacaggtgtgtgccagcacacccagctaatttttaaaatttttatagaaacagagtttccctatattgcccaggctgatcttgaactcctggactcagggatcctcctgcttcagcctcccaaagtgctgggattacaggtgtgagtcaccacaccattcctaatcatcttgcatcttcctaatcatgtggcaagataaaattaaaaggaccccacctggtcgtttctccccagcctaggcattagtaggtggagtgtgctctaggcagagtctgtctttatccaggcaaaagagaattaggattaaatccttgattccccaattctcatctatacctttatcccatatgttagcagaaaatacccagatggggaagaaaaggatggtgcttatcacatctaggttctatttattttagagccctcgctcatgcaaatgtataaaccctagctaaaatataagctccttcaaggatcttcagcttttcaaagacagatttggtgtgtcttcttgctgctgttcttccagcctattgtctaaaaatttacctggaaattgttttgagcagtatagtacaacacacagacacaaaatgccatgaaggaaggaggttttttatgttcacagcccctagaaacaggaggcaaggcatggcaggcagggccacatagggaagcaccgaagccgatgagcaggcagaaagggcagaagcctttattgtggcttttgaaaagaggaaaggggaagcaaagtaagcaagcagaacaaccttatgattggacagtttaaataacttcagcagggctgtagtgatctgataaaagcaggtaggttggggcgtggaaccctaattggttggtctgatatcaaagatgtgctggcaggcaaattcttatctctaggaattagttaactctgggagagtggttccccaggtccacaaggctccacatgccagagatctaagaatacagacaaatattaacatagcctagaacagttgtcaacagagaagaggccgttaaaaacacattcaagcatgactggctgacagactgatgagaagtttagagagcctaagacagagaattagcaaggaagaaatgccctggcacatttttcttataaccaaattttacgacattggactgtttggatgcacattttagtatgtaagaactgggttatacgattattatagagtagccagaaacattttttacctttggagaattttttttttttttttgagacggagtctcgctctgttgcgcagctggagtgcagtggcgcaatcttggctcactgcaacctccgcctcccgggttcaagtgatctcctgccttagcctcctgagtagctgggactacaggcgcatgccaccacattcggctatttttttgtatttttagtagagacagggttttaccgtattagccaggatggtcttaattcctgacctcgtgatccgcccacttcagcctcccaaagtgctgggattacaggcctgagcaccacgcctggccctggagaacttttattggatgctttcttgtttggctttgtaataaaggaataaatgttctaattataatctctgtcacatggattttttaaaggacgttcactgcagtgtctcagaattttggctcatagatctgagggccttattgaagtatgaaggaatcagcaagtccaaaaagaactctgaatgtagaccagagaggccctcttaataggtcaagtgttggctagataaattttgcctacaaactttatcttacacttcagtggatcttaggaaggctgactacatttctgttagcagataaagctttttttaaaagagaaatcaaatggtataagcagcattttacctttgttggaaaataatttagcttgacttctgtcatttgcatgttgctaagccaatgctgaatccttgagattctagtcaacatgaagcagtttggaataagggaatgatattgttctaggccttcaatctgctactagtttactttgtcatcaaacaattcacagggtcaaaaactgggctgcagtttgctaatccgtgacaggacactttgggactagattaggttcttaacccggtatatgtggacagaacatggatgaggggaaattgcatctttattttagtaactcctaactgaaatttagcaatctctttattatgaatgcagacaacaaaccccatagtattcataggacctgtgaccttgtcaccaatataaatcactgataatttcatgttgatcagaatttttgcagatatctcaatttatcaattatacccagcacttcttcaaagtaacctagttactttgtagggagggaggagggggaagttcttacttgatttactgtcataggtggcacacatgcaaagctgaatacctctcatggaaaaacacccatgggttctttgggggtcccctgctgagcccctctagctgtaattcccctgtcactgctgtacagcctattcctcgctactgttacccgctcagctctgggtttttcattcagactcttcctattgcaacttcacatctgcttcctcttccctaaggcaggagcaaaaacacttgttccacagaaatgacctattactctgtcctgacaaactctgggagagacaggctgagctgaacgcagctgcagacctcatcctctgaaaccaaagcagatcaccagttcatctttcttgccctttaggtttcctgacagcagttagactcagtcctttgtggccccaaactcaaggggatacagactaagttcttaagcccctctaattagtgaagggaaggggaagttaccctctgtccccctctcctgctggagggagagtgcaaagtcacagctctgcccaaagaaaacctcacaaagtagtccatctctcttttgccatctttctatatcttcctttgagtttgagagccacatcatatgttctaggcatccacttggaaattcccacttggtattgtggcatgcatggtggccttgaccatttatttgttacagtgcagtattagttttccattgctgctgcaacagatgaccacatggcagcgtgctaacacaaatgtattatcttacagttgtggagcacgtaagtctgacatgggtctcacgggccaaaatcaagggttcacagggctgctgagctcctctctgaagcttctaggggagatccatttatctgcctttccagcttctacaggccactgacattccttagctcatggcccctcctccacttcaaagcaaacaatacctgcatctctctgagcctttcttccatcatcacactctttctctgaccctcttctcctgccctcttccacttttatccactcttaaatgttcccctagataattcaaaataatctctactttaaagtcagctgattatcaaccttaataatttatctgtaactttaattctcctctgctgtgtaagctaacacattcacaagt

SEQ ID NO: 2894 - DNA, 15694 bp, Homo sapiens
gcccatctaatgagggagtattgtggggaggtctctccagttttgggggtgggcatgcatccagtgctacatcccgaaagtttagctgtcaacatgcaggcaaagccaaaggccagcttctcctcccaagcacttggggtccaaatctctgaacccctgaaggagaatccactggagctctgcttccctgtgggtggaggaggggaaatgcagaggaaggcactagagtaaagggtgctatggtgatggaagttttaaaacaaggggagggggaggggagatgtgttggtcaggtccttcttcaagaatttcctgagaccttagcctggctgcttcttcaaggttctgtgacccggtccccatcaagaaaggggaggtggggagatggagagaatttagaaaaaagagaatgggcagagacacagacaaagacagaacctgtgatggaagaggagcaaggagatgacaaagtaaagggacacaggcacaaagggcaggaaaggggaggtggacgggagttctgaagggggcgatgggtgcccagcagagccctaaggcctccatggcgatgtgctctaaatccctgggccggagctatccatggtactgggaccttcgagactgcaccctcctgtatcccccaaacataactgaacttggtgtaggaggcacagccaaaaggaggccagctccttggagcatgttggtgggaagaggccagctgctgcagccccccagtcaggacagttcccagcccgtctctctgcatcacggcagcttaggtaaagcaggtccaacatgttgaaggcagacgcataggggtatgaaatgaggctcggatgcctggctgcttccctttatagtccctcttctcagttggcccagtgtacttagaccctcccagccaacccctcccccatctgctatcctttccaggctttgggccccagagcccctcttacagctctgcttaatcccctctcaccaacccccaacagcagatctgccatgagtgccagaaacggcaccacaagcaacccagaaacaggataaccacacagccttcacctccccatgcctcagtttcccctaatggaaaccatggaatctggccttctcccgggcagaggactgcttgcctgcctgtgaatggtggccagggcatggggctggagagtaggccatcagagatatgtgaacagccagcctaggagagcacctgaagggtccacaccaaatttagaaaagggagacccttgccccaccctggaaaccaacctgactctgagtggagacacagttccccagttgaggaaactgaggctcagaagtcgctggagctgccaggaatcaactcgagggtgggggagggcaccaggtctctaaaggtagtcctgggggctcaaagcctggactgggggtaaggggagtacagcacagggactggactactgcagactctgagcttttagtgtggacagagggccctgatccttaggaaggaacctggtggagcaggatctgcctgggaggtcggacaaaagcaatttggcagagctatgcggggagggggctggggctcaagagcccaggtctctgccaaacagtacaagctggggaaggcagaagctcatgctgtcactatcccagcccctccagccaggggccctgctccccaccgtgctgccaccctgacccctttcccaagtgcgctggctcgcccccgctggcacagcaacacacatgcggaaagcacacgtgtgagcaccagccccgcacctcccagcaggaacatgtgcgcccccacccccaccgtgcacgtgggtccagcactggacccccagctggcacccaggtgaaggcttggaagctgaattttggctgggggctgctggtccccaggggcttggagcttcctcccccaccccgcggcagccccgcccagcccctccgggttgtcgcccataaagaactctccgttgtcatggaaattagtgactgctaaggggagggaaggggcccggggacagttgggaggggctggaggcggctctgggaacggggaggacggctcagctctcggcccctatcctcacgggggaccacgaatcttcgagggttaatttttcacaattccgagccgcagaagcttccccccagaacccccaagccgtccgaggtaaggggaactttagcccgaccccgcactccctcccccaaatctgcaaagcccgcgcgctctaccccgccaggacctcgagccctcgctgcgcccccgcgcactctgcatcccgaacctcggccagggaaacaatcccccaaggccccacaacctgcgttcgggaagcgcccccagcccgcccgccccgcacctgcagcgccggttggtcacagggaggaagtgatcgcgggctcagcgggcgccgagggctccggggacggcgggcagaatccgctccgagcacgcggggcagacgcgcgccagatgcagccgcttcggctagcgaacctccagcatcgccagccgcttgccggcacggattcgcaccccgggccgggggcgggctgggggcggggcctcccaaccggccccgcccgaccctggcggagccttaagggcagaatcccactggagagcaggagcgcgcgggatggagcggtgctggtgagcactggcctgcttagccctggccaaggttctcaatggctcccttggccctcagcctggggccggaggaggcctcctatgcccaatgtaaggggtggtgagtgggagttgggggaaagcctgagtcctggagctgcataggatcgcttgccagtcattagtcttagggaacggggctttgcccagctccccgaacccgacccaaaaggcaggaccaacttagaaaaccagatgggcagtcgggctagggcaggctcccctagctaggagcagtaaacacacgaggtgtgtgtttgcaggtagtcagtgtggcatcccctagcatcccctagctacgcatccctagctaggagcagtaaacacacagaggtgtgtgtttgcaggtagtcagtgtgaaaacgtgagggccctagactgtagtagcaaagtctcctatcccaccccatccccaactcctgcaggccagagtctttcccaaacataagtaccagcaagggtggcagcacagtcagccccttctgtgtggcaccaaatttcccaaactataaaagtcacctgtgacatggtgtggcctctgtttcttttcagtctaatcactgtcaaacacttcatgagttgtatcactctagtggcctgcctgggatatggggacacaggagaactgtggcaccaaggtatcccacctggcctgggtgtaatcagagggaggaggctcagaaccaccaggaggaagctttaaaggaagtccttggcctttctctgtcccttgtcagtgaggctcacggacccaaagcctgacccacacccctcacagccctgaggaccatcctaaggccagtatctgaagaccagactcaggcctctcagtgtctgagctgggttttatcccacctcactcctcccagtgagcctcctgaccctgctgtgggaggggagttggggtcatccccaaaccctcagccatcttgaggctgccctggccacccatggtgatgacaggagggactgtccaagtccagaagctggggctggggctcagactgaaggctgcttaggaaatgaccgcctcaaacaaggttcctcaaaattttcctccagagggggtactagcccttcaccttcctccctggcttggtgttacctcctctaggccaggctggtgccactctggggtccctgggctctgagtggtctcgggttatgggacccaccccaccactgggtagaatctcctggcaggctgggtatctgcaaggcagaacccgtttctcatctcagtatgctcgctgatgtctgcagaatgaatgaatggcctggcactgagtccttcctgccatctgcccatattcttgaaacaatgggtctctgagttttatggtgtagccaagctgtagcttgctgacccacacatgccacatacatgttttctgtctttcctgagggtcatggctatccaggcatggggtcaatgagaagctggaatggggatttttaggcaggggaaggggtggctccttagcgcctgcctgctgctggcagtactccacctcttcttggtcctaagcacgctctgtgcatgtggtgagagcacgtggcagggtgtgtgtgcacacgtgtacgtgttgtgtatgctctctttgccgagggagatgcaacagcacagtgtatgcagtggtgcccaggggcacgtgtgtctgcttctttgtgcacccaggcatgcttgctggcacgtgtgtgtggacgctgtagctggtcccggagttatcagtccccttcctgcctgacacaagtctcaggattgtggaggctgaatcagctttgagagctggacatgggaagggggctggaccatgtccagcagtgggcagggtctgtctgaccctacatcattggctgttttcaggctccccaccagagcagccccttgatctctgtgtatgtgaagatagacaagtctttgccatttgtggagggcaatctgaagacaagaaccagggctaggattgagccatggcttatccctcagcccctagacaggaaggcacaggcaggtaggaccggcttcaatgttttggcttcaacctccagctgcctttcaggcaggagatagtacatcagctgaatgccatcctcttagctcttccagggcagggacgggaccaatgctgagtttgttcttacttccactattcaaagccagacggggtcaggggacatgatttctcaccatccactggccagagtgatggcaggaggccctttagcacagaccagagtttggaacaagacagaggcaatccagattagcattgcctagtagcctttatgaggaccctcctaaggaggctgtaccctgaagacaggggctgcctgggttgggaggctgaggaggagaagagggcccaattcgtagttctggctcccaccaaagctagaaagtcagaggggcagaataaggtgcgagcgcagtatccacagagcttcatcccccagctcaggttgggcctcctacccaggatccaggcttatctgtgcccccaactcccagctctagggtgccaaaggccggcactcctatgccctagattctggctggctgatagaagcccctgctaacccagcatagcgctccagcaaaggttagactctaggaggtacctagattaccagtgcagctccccaagaagcctgaactctgacaaaccctcccaccccaggcccccagccatctttgaaactgcctgactgttgtccatgttgttggcttcagtccccagaagagggcccacaatggggaagggcaagcagtcttttcctctgagccaggggagggggctgccccccgccccccaccttgtgactcactccaggctgtgtggttattacattatgtttgaaattgccatggcaacaagctggcaatcaagggtaattgcattgtcgtcagggcaacggggcaaaacccacagcagccactgtctgtggttgcccttgggtgcagtaaaggtcaggccagatcagagccaatgccagtcaaggggctccggggctgtctgaaagggtaggttgccagggcccatggagttccagagtgcagaggcagggcatgccttggagagagccagggcccccatccatgaccccatgcctggactcctgcttttcccacaccacctgtggctgaaacatgccacggtgcttaaagaaagcagaaccagaacttttatatgctacagctggtacttatagatagcccatgggccctcttcctcatattcctggcagctgagcacaggctctggaaagagctccgggatgccatgatggagcccccaagccaggcagcaactcacggtggggagaccccagcacagtggcaccagggcccagctcctgtctcaggcgctcaggaagccactcatgagggtgctgccaccgtccagtaccacattggccagtagctgctccgctgcttggcctccaaccggctgatgcttaggagggccagctgtggaaggcccagctggtgagacctatcagattgggttggaagagggcctcagggcagcagaagcgctcaggccccgcgtgataacctgcttgtctggaagcacaaagtccacctcggcctgcgcctgggtgtggccctctcagctgccacatccatggccacgtagcagcaggcctctttcatctggttgatcgtcctgcctggggcagtgagtggccacttctctgcagcagctgggccaagtagtcagtaggtcagcaccagccacatccagccggtaggtgtcaagtggggccagatccccagtgaggtgggtgccacataggaagtgccatggccactgcccagcaccagcccagtggtacgtccaaagcatagagcgccagcagggcctgatgcactgtctgcatggctgggacatggaaatgccaaagagtatttcagccaccttttctcggttggtgagtggtgagatgggcgagtcggctcgagcacagacagcttctcgggctgcacacccagccttcaatagaacaggtgctgccatgcacctctagtgcatcccagtcatagaccacaccacggttcagcactgaataggatccccttggttttcaggcactgcatatcgtggctggccctgggctgggtgctgcagcagctgactcgtgagggtatgacactgaggacatggtcctctcccgccagtccacatttggtgaatctgtgcctgtatcaatcaccacggccgccatgtcctggaagggtcccagtgagtggcagagagcactggcgaccgaactggcagagcatccatggtggacaccagttcatagcaggcccgtggggcagtccaaggtgtgcaactactgataagtgtgtaagatcctcagctgtcagctgaatggggcactctggggctcagtggccaccatggccatgggcaagaccttgcgtccatgccaggtgtggtaaatgtgatcaagggaagctgctcctcctgggtcctaggggagttgcaggttgctgctgatgcgtgatggagtgctgagtattactgatgccaaccttgtctctatcatatagatacaggtctcctcaggggtcaggggcacctgaaatacccctacatgagtagcaggcctaagggctcatcttcctgggtggagacctggccaggttctccagggttggggaccatcttgaaagagtgggctctttggtgatggggggttctttagataaagagggattctagcaaggggtgtctgcccagtgagagggggttgatcagtaagggggtgctcaggtagggtggctgtccagcaaggaggatctgcccagtgaggagagtctgtccagcatctttggccgagggttatcagggtgagcaggaatgacctcttcgtggctgcctatgtcttcctggagggggatctgggcacttcctgggtatcggctggtgcagcaggctctgagttcatccactgcgtttcttggtctggactatggaggcatctggcatcctagagggtgccatggaagggtctgcatccagatggtatgactaggttcatttttttcaccatcaggcttggaccagctagtatagggacatgggtcagtatcctctcatcaaattggaggggcatccccagtggaacaggccagtcagcatcccaaccctgatgggtgtctcagtaccaggggagtcccatgactccaggtgagcctggcctccttgggaatcagggctacctctcggtagctgccagatgagaggctgagggcactgggctggacagcatgggtgtgatagaccaaaagctggagtgattgctgtcagagacaggatgggtttggccgacagctgggtggacagcatattttcagggacatagatgatgggtggctgggcatgaggcccacaagcactgcccgtgagcccacagggtcatggcacgcagccccatcaaataccagcacacggtcctccacaacttcctgaagctggcaggttgggcactggagagggggatctgcatggcttccttcggagactggaatggggactgcttgtgcaggttacttggtaggcagacagtggcacattagagctggtattgtcacagacattgggagctgcttctgtggctgagagctacagatctcctggctactcctctgggacttggagatactgggggctctgggcctggcattgggctgcctggcctggaggtagagactggaagtttttcatggggttctcagcctcctcagttggcaccttccttctgggcaccttccttctggtacctcctcctcctgggcatggtctgggcgctcttctagagtaggctttgggatgggagctcctctttagagtggagattcactttgtcctggcaagatgcaactattttggaagactcaagacagttgaccactgattgccacacttcctgagaaggaggtcttgagatgggcccttgtgactgcagtggtgtcagtcaggtgatcaatggtatggatgtcagtttcaactgcagtggggttggggtaacatccagagctggagtcgtagcccaagctggaattggaggagtcaggacagaaaagaaggtgtaagtccgggcacggtggctcacacctataatcccaacacttcggaggccaaagcaggtggatcacctgaggttgggaatttgagaccagcctgaccaacatgagaaacccagtctttactaaaaatacaaaacttagttggatgtgatagcgggcacgtgaatcccagctacttgggaggctgaggcaggagaatcgcttgaacccaggaggcggaggtgcagtgagctgagatcgcgccattgcactccagcctgggcaacaagagcaaaactccattcaaaaaaagaaagaaagaaattttaaaaaagaatgtgtaactagggcagcagcctgagtggacacttaccctggtcctgatcttgggctagatcctgagctggagccagaagagcacttgggcttcgggagcaccattctctcctgagaggaggaagggcagccaccgactcttccgctgcccaaggaggctatctggtcggagctgcaggggcctttgccccagcctaccaggacttagctggacgcttgccttcccccaaattctgcacctgaaaccgaaggtggcagggtcacactgggctatgtcactggtgctgtcactgtgcatgcactctggtaaggtcagggtgaatcctccatgatgagatgttgttgggctcccacaatgggacttgaagatacactagtggggagagtctcggggcatcctgggaggcctgctcacagcagcactgggagctaacccaagaggatcctggagtagctggcaaatggacccagggatgcaggcctgggaggctgggccacggcaccatcagtgatggtcttggtagacaatgacaacccctgcttgaagtatagggatttgagcttatccgtggtccctgagaccctctgaggccactccccagctgctggctgccggtgaggggtggtcctggggacccgatggatcagggccccccaccttcttggtggcttccaagtcctcctgctccatgccctaggtgccctgccctcactccattgccatggtgaccttaacatcacagccccctggggattgacttgaagattctgagcagaggatccacccccaccctgctgcgcccatccctaaccctgcaggatactggtcctgggcttcagggacatgtggcttgggaaggggtgacatcacagtgacctggggagtgccagagtgtaggaaaccagggtcccatgctcctgaagaatggaggcttgcccagggaaccttaggaggcagggggccaggggaaccagtgaagtcagtcagctgcaggccagcctcccctatccttcccagccaggtgcacatctgcccaggctagtcccacagtgagggccaggaactgtcaggataaggccagaggaaaaggtaggcaggggagactctgaggaagcccctggcacagaacctttggatggtgtgcaagtcccttcaccactcagccctgggaggcagaagtgggtgagggacccaagctcagtcccagctcccctccttatgttccccggctcccgctccagggacagcagctccttggcagtcttgctgctccagatggttctcctctgcctgtgcctcatggagccccctccccagagccactgtccctgaagcccaggaccagtatcctgcaggggtagggatgggggtggcaggggtggggtggggcctctgctcagaatcctcaagtcagaatttctagctcttgtcacattgtgtcgcttcatcttggccataatgggggcagagctctgggcacagggctgcaccacagcagcccagggctagccaagtggcaattacaggatggtaagaccacagtggtctcagggctagcccacagtggggacatagtgggtggaggactgagtacacagtgggcatagagctgcatataagcaaggacaagtcagacaatgaattagatggggcgatgcataggaaatataagctaccgaccaggtgggcaattccaccctccatttctttttttttttttttttttttttttttgaacagagtctcgctctgtcacccggctggagtgcagtggcgtgatctcggctcactgcaactccgcctcccgggttcccaccattctcctgcctcagtctcccgagtagctgggactacggcgcccgccaccacgcccagctaattttttgtatttttagtagagacaggctttcacctgttagccaggatggtcccgatctcctgacctcgtgatccgcccgcctcggcctcccaagtgctgggattacaggcgtgagccactgtgcccggccccatttcttaaatagagagaaaaaaggggggcagggaggagtggaacctgcctggagcagcagcctaggctcagagctgcctatagccacaaggacaggcctaggcaacagtttggagagctgcacattgccacaggcccggtctggaggttctaacctgtggtagggtcaggccctcctccttcccaccagatctgagtctgggcctcctccctctgtctggcagggctgtgttctttcaggcctcagtctttccaccaggaaacaggtttgtggacaatataactgtaggtttgttctctgaaactgttttcacaaggttaaaaatagtgtttacagttggctgtggggtgtgaggctctgtgaccagggacaaagttaacacaaaggtgctgcatctgcagcttgctaacttggcactgggcacagccaggcctgccacatctcaggccccctgggctcccacccctcttcccttgatgctgcctttggttagaatggggacagggccaggtgtggtggctcacgtctgcaatcccaatactttgggaggcaagacaggaggattgcttgagctcaggagtttgagaccagcctgggcaacgaagcgagccccgtctctataaaaataatttttttttttgagatggagtctccctttcttgcccaggtagagtgtaatggcacgatcttggctcactgcaacctctgcctcccaggttcaagtgatctcctgtcccagcctcccaggtagctgggattacaggcacccgccaccacgccaggctatttttgtatttttagtagagacaggtttcaccatgttggccaggctggtcttgaactccgacctcaggtgatccctctgcctcagcctcccaaagtgctaggattaaaaatgatttttttaaaaagttaaaaaagagtggaaaccgatagctctggacaccaagggggagctgctcacctctcatgcgaacgtccaaagcccaagggtctgcctgtgcatatgtgtgcctacattctgtacacacatacttgctgcccactattaatgtcattaatctttggcttaagcaagctattttctgtttacaacagagatgctagtaacagcctctagtgcctgtgcagcatttgagcggactgtgccttggagggttggagaggcatggagagaggtcctgagagcctctggcctgctcaccactgagccatcgtccacctcctgcagaggtggggcataacactcctttccagactgtggtcctttgtaaacaactggcctgaggtctcctgggggaagggagcagaactggcgaagcgtctagcccatgaaagaaggcccaaaggaagcagccaggatagagaaggccctttttttattttcatttttagaagcaaggtctcactctgttgcccaggctggagtgcagtgcattatcattgctcactgcagccttgaactcctgggctcaaacaatcctcaccactcagcttctgagtagctgggatagtgtgagccaccacacctggctaattttttttttttttttaatagagaagggttctcactttgttgcctaggctggtctcaaactcctggcttcctcccccttggcctcccaaagtgctgggattacaagcatgggccaccatgtctggctgcaaaggccttatagcaaacaccccttatagtaataataacaataactgatattgatggggtccttctctgtgccagcacaacgtggagcactcacaacccagactcacagcaattcaatgagctggcactgtcatacctcattttacaaataaggaaatcaaggcaaggaaagaaagggagagggtctgtctcagctagtgtgtagtggagccagaatctgaagccaggccaccaggctctgattcatacttcaggatcctgtgttgccaccactgggtgccatgctcagggccaggcagtacagaccctgctggaggggagctaaaatgactccattgtgggttctgcagcagcaagcctacacccaagctgggtcctgcatggacctgctcctcctcctgatagcttatcaggtagccaagcctgagaggaggcccttccaggaacctggtggtgctgagtatgggccagactgaaccttcgtattcagaattcttagctggccaaagcctgctcatctcatccagctggggagagagcagcagggcaaataaagaggctttcaggctgggtcccttcttcccagcccctagggtagcgcccctcggcccctcccccaacatgtttttaaatagtgtctcaccaggaagaaggcgtccaattctatttctgaatctgggaagtgaggagggccaacgtgttgccatggcaactggagagcccctcccccagactgagcccattccccaggctgagggctgtggggtgggaggaggtggcaaggaggagctgggaggagcttagtctgtggatgaggccagatggcgtcccgtgagggcaagtcctgcatgaccttctcctcacacttcacctcacccctctaggcaggctgctaggaaggccccaacctctgcagagagggtcaagggtcaaatcactgtgagaaaccttctcccctgtggatcaggctggaaccctcccacttaggaggtcttgaggatagtagagggtggcaagaagggcgtcaaggggagaggcacagcgccacaccctattaggagctctacgctggctcccacacctgcttcaatacagacctattttcggctcccttgtgttctcaggagcagctagctttgtcaagcccctggccttgcacccgtccggtctgcctgccttctactgattgggaagggtctggacatctccaaaagctaggatcagaaagagccttaaaggactccagtgcagcccttcacttgataatggagcaaaaagggaggcatgtttccccacgggttcgaccccagccactgtccaggggttcatacatcagcccttctaccccagaggtgacagatggtagcatttagatctgcagagggagggcattcccctccctcttgagcacagctcaagcaaggcaggcttctgaacagactcaaaggtatcttgattcaaccctctcttggtgctgatggaagctgaggccccccaaggaggaaggaatgcactcttggtctcctagctctatggccccactccttaccttcctctccttaccttcctccctggagctatccaagtgacctgtgaacctagacctagacctcctgcttccctgacatttctcctggccaggatacacccattccacgaggcaggactatgattaaaggagctggcacctcctgctccatggcccccctgtctgacccagaggaagacaggaagtatcagagaaccccagccttaggggaaccttaggcagggttggggagataatccactcctattctgaaatgtggaaggcagaacccactagtactagcagatatggcttctgagctctaaggcacagggaaatttaaataacagatgtttaaacaatctccctgcaagccggcagtgcagtgacccctctgctgtgatgtgttgcagcttaaaaatagccacaatgaactgctctgagccccaattgactcgagcttacgtaactctgcgtgaaaggggccagccgcatcagcccagagggaaggcaacagcacagccgccctgactgctgcccacgctgtcttaggggctgggagagctcctcaccctccctgggaacagcccccacatccagagccagcaaaagtggaggcaaaggtggtactgccaaaagcacacatggcttcatgactgcgagcagagctgacctctagtcacacctgcagagggaatgtgagcagagctgccctccttagggttcctatggaacccaggtccggtggacagtgggagtgactttaaattaaacagatactgggtcgaagagaccagggcaggagcccatgtgaacagggtgactggagccacccaaagattcctttccctctttgaagagaaggctccctggctttgagggacatgtcagcaggataatgcttggctaaagctgccactgccatggagcccacgggtggagctgactcctttgggcctctgattctccatggtccagggtgcagtgtcccacgagggacttgtggcatgaggagggataattagtttcaagggtgattgaatcccatgatcttgaccgcctgctgctttaagtccctgccttccctaatgcatctccagatcccaaacgccgagtgcaagactggctacaaagtatgcaggtggttggtcaggtgaggtggctcacgcctgtaatcccagcacttcgggagctaaggtgggtggatcacctgaggccaagtgttccagaccagcctggccaacatgatgaagcccatctctactaaaaataaaaaataattagccagggatggtggtacacgcctatatcccagctactcaggaggctgaggcagaattgcttgaacccaggaggcggaggttgcag

SEQ ID NO: 2895 - DNA, 96109 bp, Homo sapiens
tgaaatattcagaggatatatgtgtgtgtatatataaacatatatacatatgtgtgaattatatgtgtgcgtgtgtgtgtgtgtgtgtgtatatatatatatatatatattttttttttttttttttttttgagatgcagtctcactctgtcgcccaggcaggagtgcagtggcccatctcggctcactacaacctccgcctcctgggttcaagcgattcacatgcctcagcctccaaattgctaggattacaggcgtgcatcaccatgccctgctaatttctgtattttttagtgaaacagggttttgctatgttggccaggctggttgcaaactcctggcctcaagtgatcccccgcctcagcctcccaaaatgctgggattataggtgtgagccattgcaactgaccaaggaatatttttgaatattaagagaattaccaaaatgtgacacggagacacgaagggaggattttgctgttggcaaaatgatgccaatagactcactcaacacggggttggacacaaccttattttgtgaaaaaaaaaaaaaaaaaaatctgcaaggcacaataaagcaaaccgaaaaaaaaaaaagggggtatgcccagtgtctggtatgtaacaggctcagtaaatgaattcaaagctagtctggctctgagcacttcttctccaaaggcatccttagtttaggtgaagtaaacatgaaacttcccaacaagttattttggcttttcaggtttttttaaaacaagttttatgtaagagaaatatgcactagcattttacaaaataaattttatatgacttgaaactattacctcttttctcaaagtagtctaatgtaagtttaagtttcctgtaaataggccagaaatgcctctgtaaaggactaagaggtttaaatgagattgtaaacgcaatgcttgagtgagagcagcctggcctaaaaagacatcaccaaatgcttatggaatttagaagacagcaagatttgtccttcaggcaggaaaattcgggcaaattgcctaaagaataagattctggaagagttgggttcactatctttaacacagtgaaaaatgtacaaagcttagcacctagttaagataacatagttatgcacagattactgataagaaatgaatgtccttgttagcttcagtaaaccatgagtttgggcttgctgttttaattttgcaggtatagcctttttaaaaggaaagacaagagtgtataagtgaactgtgtttccatagatgttctaaagaccagccaactgaagactacaaagtgatccaaaagccaggtcaacctaattagttttcagattaattccattttctttttttttttttttttgagacggaattttgctcttggcgtccaggctggagtgcaatggcaggatctggctgtgcaacctccacctccaggcttcaagcgattctcctgcctcagcctcctgagcaccgagattacaggtgcccgccaccaggcctggctaatttttgtatttttagtagagatgggtttcaccacattggccaggctggtcttgcactcctgacctcaggtgatccacctgcccagcctcccaaagtgctgggattacaggtgtgagccaccacgcccagtttttttttttttttttttttttttaatgagacggagtcttgctttgtcacccaggctggagtgcagtggccgaccttggctcactgcaacctctgcctcccagattcaagcgattctcctacctcagcccccacgtagctgggattataggcacctgccaccacacccagttaatttttgtatgtttgagagacggggtttcattgtgttggccaggctggtctcgaactcctgacctcatgatccactgcgttggcctcccaaagtgctgggattacaagcgtgaaccaccacgcacagtcccatttctattaatatctttaatggactctgcatcaacttgggagataagttacttgtaaattttagcagggcatggtggctcactctcagaggctgagacaggaggactgcttgaggccagagttcaagactagcctgagcaatatagcaagaacccatctttacaaaaaattaaaaattgccaggcgtggtggcatgcgcctgtaatcccagctacttgggagactgaggcaagtggatgcttgagcccaggagttcgaagctgcagtgagccatgactgcaccagtgcactccagctgggcaacagagaaaaaccctgtctcaaaaaaataaataaataaacaaaaataaataaattttagatttttccactactaaggaactctcaaatgtacacaatctccctatgttggcagaatgagcttgctaactctggacttgaatctatatttataattcataggaaaagtcatgcagaattaactacattaaaaaaaaatgttagacaatgcatttagtcgccaaggacctcactcacctcagttttatattttctttctcatcaaaaacaaaaacacatgcatttatactgatcaatgtattttaataaacagagattctttttgttggtaaagtattaatacttttttaacaaactgacatcaaacatccatttcaataataacaacaatagcacataggcaggtctgtagaatctgcctacctgatttcagatccaggctctattactttctagctgcatgatcttggcaatttacctctctgagcctttcccatttgtaaaacggatataataattaatagtactcatagagaggagtaaatacaattatatatatatatatatatatatatatacatttctctttgtaaaatgggcatagtaggtaaaattatttcatagagtagaagggaggaataaataaataatgtctatgtatttcttagaacagtgtatggcattaagtaagcacagagtacgtattatatacttgtgaacacatcctattatctcaaaatgtggttcaactcagatacccctgaagggtgaaagcatgcttgattgacacggaagttgacctgcaaccataaactggtattacattaacattaaaactacagaactggcaaaggtctcaaagtttatctaggtcaaacctcttattgaataggttggggtatggagggacaaggatggaagataatctgtccaaagtcacttcctaactggggatagaatcaacatttgaatctaggctttttcctatcttttacagaatcaaaatgctttctgatgatcggttaatttatctttctaccatctttagactggtgattatcattactatgctaatcggatctgcctacacatacctttataatctaaaacaaatataacataattggccccttaaaaatgctttgtgattattattcctggattgattttattctatactaaaataaaagtttcttaggggcagaaactgtgccttattcctatctggattagctaagccaagtactattagttcattactattacttcccacaacggtgaggaatgggctaaacaaactaacaaacaaaaacaaggctcctgattactacttctagattaatagtaaactctagaggcctagaaactcagaaggcagattatcagatactcctacttctattaggcttgaaatccttcatgaaatcaagcaaatcatgtgtttaaatcaagagacttggaacttaagcaatatacttacagtaatatatggctataaaagaggaagtgaaaagtagctgcagtattcacgtcatatgttctacttccttagagaaaaccaaaaaaggaatagctaaatcagagaattgggtgaaactttctgtattctcagtgttaaatttgatttggttttcctgataactgtgggaacaaaaataaactataactttcctcagtatgtcttttaccatcaaattagctgttgtcatgtctaggagcacagtcacatgcctagaattcaagtgtctcagatccttgagaagcctctcaggaaaaaagaatagttgagccaccaagaatttatctctggccaggaatctggaaagagcacatggctgtcattacctatcccataattttcagtcagcttggactgattgttgctgaaaattgggagccctaacattacagacttctcccaaatactttcacatagtgaagaagcgaatttaaagtggaatagggaaaaaaggaacaaaagcacagcttaactgtaaaataatgagaaacggaaagaactcaaagtggaactaagtgaatgcaggccatctaaagacggggaggaagggaacagagtggtgagagtgaaaaagactaaaaggtaggtaatatagagctagcagtgtaaatcaaaagttcctacttaaggacaaaagaaggccagtgtcattttatggtcttcatctattaactcatttgtttatgtattgtctatgactactctcaccctacaaggcaaactgagtatttgtggttgcgatagaaaccacatggcccaacagatctggaagcaacttagggcaggcacagcagtttaatcatttttgtaacctcttagcatttagcagaataagggcatatgtggtgcatttgtcatttttccagtacattcttcagcacgcacaaaatttgttagcatatgttcaaagaaaagctctgcaatgatcagagcttggtagctcacaagtttggagaagtcaagctgtccactggcacaacacaatggaaaaggctaaactgactactaaaagagcaaaacccttcctctctttaaagatttctattccaggctggtatatattaatataatgctggggaaactggagaatgacagaagtctgttacgttggttttaagctttaagctttacaagtgcaatttcgcagctattattcattcaacagccacttcctgagcactcactatgtgcaggtaccatgctgcatgctagacagaaatgaacaccataagcagtccctgtccggtgagactcataatctaataggtgcggggtataagaatagaggcaaacacacctagctgcaggataaggaagagaaagcaattcattctgcctgaggttgcagaaggaaaagcatccaaaacggacatccgagctgggccttgaagaatgctagagctgacccaccaaggcctggttctaaatgtcttcgccttctccatggagaaaagaagtctcacatcagccccagctgactcctataaaattctgaggcaggaagtctcatcagcaatcattcccatttcaccggagaaattgtgaccagaatgcaaaaggcaaacccagggctatcttcccgccaagagagatgccgggtcccgacctcagatcggcagggtcagcacagttgcaagttctgcccagattctgagaggtgtaggcaccggaatgtggcaagggtctccccccggaagttgggaaaaggcctgagaagagatcacccccctccaacaatccgccggtatctctcagccacgccctccagcgcatacttctcatcactcacccgccgctcggcgagaggaaatcggtgtcgtcctcgtcccccgcaccgaacttgcgttggctttcaccgggttgcggggaggaagctgggtattcccagagtcccagggctgtcaccgccgacgtcgtaaaatgccgcggcggcgtgctgctttccggcagggcgaactcagcacggtctctggaccgaaagtagactgggctctggagaaggtggggcaaaggcaaagagaggctcgcgcgggcacgagcgccgagtgacgtcaggcctctccagcccgcagcgggcggagcttcacagccccttgcagggattggtcggtaatgctagggggcgggagggggcggaaatcctcggcctcggtggcggtggtggacacgtcgagccgggtagaagtggaggggcgttcgaagagtcgtgagggggtgacgggttaagattcggagagagaggtgctagtggctgacttgacctggaaaggtaaggcttctctcggcccctctttcgcacccctgtgcatgggaccgtccttttcccagcgggacaaggaccttcctcgccgctttcctcagctccgcggaagagaaagagctcgggactggagggttaaagactggggcttcggcccggcccctgcagtgcatagccagagtgaccttgggccggggtgctcggtgcctcagtttccccgtgtatgcaacggccatttgtccagttcttccatgtgcctgctggtccagaagattttagagctcagagccatggatttcaatcccggcctcctcgtaatctcagaatttacagatagggagacgaagaactaagcacccgggtgactagtccgaggtcacaaagagtaaagggcagactgagactgattcctcgtcctttgattcaggacatagtgagctagtgggtgaacaagaaccttatcagccttaagcactgtgtgcccttacagagtgactattgaaagactgtagcatacacctcgagaaagtcccctttctagagtccacctgtattctacgcggatgaggtgcagaagagctaaatattctggcggtgggtgatggaaaggaggatactttggaggcagacacatccccacccaactttggcgtgggtttccctgggtcttcctgcgacagccctaaatcaacatcaattgtgcggactcctctgcctccagtttccaccctatctgtatcttacataagtatttctttggtaacctggtatcattctcgaaacaatcctggggtagtcctggcttagacaaggtgtggcaaggagatagtgtcccagcgtagcgtccacagactcactggagttcttgggcttcccctacagtcaggttggtactacaggtgtcccttacgtgaatgtttcaatctgtcagtatgaattgaaatgaaatgattggtagctccctcccagagaactttgcacctcctggcaaagatgtaaagcagcgaaggctcacagttggaatgatgcaactggaatctaagcactagaaccggactggaactagaatctaaggactagcactagaactgttgcagtagctctgtttagtgtggaacttggctacctcttggaggtgttgggggagtaactggattaagtaccatggcacttctaatccctctccccaacaccggtcactgtgattgcagcactgaaacatctaaatgtttacagaaagagcttgctagcccctggcttacattatctatggtatttttaacatggaatgatacttaaagtcacttgcaaagcagtctcactgcagaatctttctaggtgtttatgacagtccttccagccttttctttaaaaaaaaaaaatggccaagggaatatttgaactcttatttgtattcttgggtggagctgattttatcctggatgtttaagtagcttttgtaggtactaggaatcctaaaatcaatagcctttttggtgattggaacatcacgaacatgcatacccaattatcactgtagaaacacagctgctgattctcattagcagtatgaggaggaggaagatatggtgagtcttgccaggctttgaactgcaggactgggtgcacctaaaaaaaaaaaaaaaaagccactgtcttcctaaattcgtgtatcttcagattggtaatactggactaggaatcggaaatctgaattcctgtcccagcccttataactcactctgagtttgggccaggctcccaagcactgtaaaatgagtggattagacctggacttctactgagtaactgctggggatacaaggtaagtaaggcacaaccttgatctcaagtttaaagtaagcatttttgtttatttgtttgcttaagtatacaacttttagaatactcataaaatatattgtcaacccccagaagatggccaggaagcagcaattttttttctccaccctccactccccttactccctcagggaagagcaattttaataattattttcaaattatcagcaattttgcaacagagatgacagtcttatatacgagtatacccatactaatctgtaatgatgcatgcattttaaaattagtagtttaagttataaccaagttatatcaggcataatgataggaatatgaattaaatgcaggttctggggatctataacattccgttcactcagtcactgaaagcagacttagggccattagttgttaactgaagaagtaagttaaagcagggaatcatacagataatagttatatgcataacatttaacgaacacataaacattcttttgccattcttttaacataaggcctcagccttttctggagtgtaggaccctgttgcctgtttttataagtaaagctttattagaacacagccttctcatttgtttatgtattgtctatgactcctcttaccctccaaggcagaattgaatattgtgattgcaacagaaaccacatggcctgcaacatctaaaatgtttacttttggcccttttagaaagagcttgctagcccctggcctacgttatctatggtatttttaacatggaatgatacttaaagtcacttgcaaagcagtctcactgcagaatctttctaggtgtttatgaaattccttccagacttttctgttgtctcccacacctaacagcaagtttatgtgttatctgtagctcacttttttttttttttttgagacagagtttcgctcttgttgcccaggcttgaatgaatggcacaatctcggctcaccacaacctccacctcccgggttcaagcgattctccagctcaccctcccgagtagctgggattacaggcatgtgccaccatgcccggctaattttgtattttagtagagacggggtttctccatgttggtcaggctggtctggaactcccgacctcagtgatccacccgccttggcctcccaaagtgctaggattagaggcgtgggccaacgcaccggccttgtgtgctcacttttatctggtctttcgaaagcattcagtgtggtgttttagaataactactagagagtctatgtagtacagtagttaagtacttgagctctggagccaaattctttgccacttattagttgtataggccatagacaagttactcagtttttgcctttgtaaacaggcataatggtagtatccatttctaggtttcttgtgaatattataggagttaattctgtaaagcatttagaacagtgcctggcaggtagtaagtactcagtgttaattgctgctgcatttttctcttctcatttatacttcattgctttacatagtatttacgtactttcagtataagcacaactggcataaataggtttgtgaataaacacactgtcacgattgataagcaccttcacagagggggaaccagaagtgttgttcccatcacattggagaatagcctaatggttgatgtcagttaaattggataagagagttctgtgggatagtttgctaagagtataaggcacagttcacagaagaaagtaatggattaaaattgaaaaggaatccaggaccatatttgtaaataccttgaaggtcaaggtgacaagtttgtacttagattggtaggaagtggaatttttattctaaatggcatgattgatgtaaaaaagttcaaatggcttaggagtgtatgaagtaaaagttacatttccctagctccattccatgtcagtagccacttcattttctaatggccctagaacatgaggttgttgtgaaggcatggtaaacaccacttggggcactggtattaatcgttaaaattttcaattcagctttcctttggattataatctcaattttgaattgagaaaataaagtttccatactaaatgtgaataaaatgaaatgactgttttgaaagtagataccatctcataagagtctttgattcctaagtctttctctacctcttttgtccaacttggaagtctggtagagaaggacttaggaatcagagactcatctctactgttaattcctttttgcaccttcccaccagaagtgctacaagagagaaagatgatataataatcactagaaaagcaaaggttcggccaggtgtggtggctcccgcctgtaatcccagctcaggcagatcacctgaggtaggagttcgagaccagcctggccaacatggtgaaaccccgtgtctgctgaaaatacaaaattagtcaggcatggtggcgggcacctgtagtcccagctactcaggagacggaggcacggaattgcttgagctccggagaggcggaggttgcagtgagctgaggtcacgccactgtgcccaacctgggcgacagagtgagactccatctcaaaaaaaaaaaaaaagaaataaagaaacaaagtgtttacagtgacaagttgatttcaactagcagttgtcagttaagttagtaacaggcatcacccaaataactgcattttaaagtggacagggcaggcctgactggggaaaaggagggaaggggtagggggttcctgatgcctgtactcccacatgcagctcttaaatccatttaaaaacttaaaagttttctgtagttttgtgacttaagtataacaagtcatcaaaagtcgatacttaatacattacaatgaacagtttatgccaaaagaaatcttatagtagggcctggaaggaaatgcttttgaagttccattgctttgagtaatatcattttatgatttaggtaaatccccaagcagaggaggggcccatccttaggaatgcaaagccctgcagagaaggaaaggttgagaagggtccaccctacctcttttcctttacacaatggccctaggcttttgtataaacctgcttttgtaggcttaggacattatgaaatacagcatggtaagatggaagcctgatctcaaaagtaaatatgagaaatgatttggagggaacatataaagagagcaaaattctacaacaggtgacatatttccctagatagaagagttattgtagaactatgatgagtgtttaataattttgaagcagtttacagcatctagaatgtagtcatttaatttatgaaatgaaaggaaatggtgtaactcatacacccgcatcctctctcctaccttttctgatggctttttatagttctcacacaacccctatgcataatctataccttagtacattttacattatttttaattatttacatgtgtccctctttcaccagaatgggtttcttatggttagagtttcatcatgtaccttcattcgataggtatgcaataaatagtgaaagaatagtctgagttccttgaaatgcatagcaaatgagacctaagagccagatctagaatgcagatgtagaacctctttcagtcctagcccagtacttttactgccacaccatacagcctctatctgagatattgaacaattttttcttttttcttttattttttcttgaaacaggatcttgctttgttgcccaggctgggtgcaggagcacaatctcagctcactgcaacctctgtctcccaggctcaagcaatcttccatctcagcctttcgagtagccgggactacaggcatgcaccaccacgcccagctaatttttgtatttttgatagagtcggggctttgccatgttgcccaggctggtctcaaactcctggcttaagcagtctgcccaccttggcctcttagagtgctgggattacaggcatgagccacatgtccagcctcatttgcattcttgtactgcattttcattaaatcattcaagttcctttatcttgtgtaacatatttaattgcattttcctactgaataaaaaaaagggaacagttcaatgttttctagtttctgtcttatgccatattaatttccaatattactcataggcaaaccacaacattattatccaaacagtttaaatgctatgtaatataactaaagcaaagtttagaaaggaggaccattgtctacatttgattataacaataaagcagttaaagcaatgctttgcaatgtatatttgtctgactagctagttttgtttaaatcaaactgtgaaaggctgtatactcaagaaacatgaaagtgagccttatgtgtgacttagttcctttcagagattaattttgcatctaatgagcaagcaagctattatatttcatatttactgtaccttaaaattggaaagatttaacatattttatttgacccttacaatactatgagattggcagcgtaggtattttatatctgttttgcaaattttgcaaattttggtgatttgcctaatgtcacatggctagtattggcaaatgtgggtccagagctcagagcctttgatgcctcgtgctgcatgctttctccatctaagatactatctagaaaacactgaaattgtcacataaatcatactaaagcacagttgcggactggaagtgcgtcaaggctacaaaaggatcctgtaagaggagcatgaaagggtgatcatgtgattacattattccaggatgtggcttacccaacaacaaaaggtatcacagaatggagtaaagtagctgggagatccactccccattggacttaggccctgttatcattacaaactaaaagaccttttcagtttgtttgtttgacatatcaaatttgagttgtcctattagaccaggcaaataaaagcttttgtaaaggcctttggaagaatgtagttgtacacttgatctctttgtacagaagggtgggagtgggcaagagaaataggagcttctatgttatttgccacagaacaggatatgtaaagctcagaaacccatcctgcttagctgcttcccagcaagccaccggagaaatggggctggagaaagcggttagtctagtgttatggagccttctatcagaacagatgttatggattcacctaactaaagaatgttagtgtcatcatttaataacataagctcagtttccacatctgtaaaataaaggagttggatttgatgatacttttttttttctttgagttggagtttcgctcttgttgcccaggctgaagtgcaatagtgtgatctcggctcatgcaacctctgcctcctgggttcaagtgattctcctgccttagcctccctagtatctgggttacaggcatgtgccaccacgaccggctgattttatatttttagtagagatggcgtttcccatgttggtcaggctggtcttgaactcctgacctcaggtgatccgcccgccatggcctccaaagtgctgggattataggcgtgatccactgcgcctgactgataatttaattttttaataggaaatatattcatatggtttgtaattcaaaaagtacacaaggatattcagtgaaagtatttcatttactcctacccacttctgaccagctctccttagggaccacggtcctatttgcctcccaggctcaaccaacaactttgttgtttccccccaactcccctgcagatagtaaggtgtataaaaataacatgaacatactctgtttcctttttaagttttttacaaattatgcatacagtatattctgcttttatttcatttcataatacgtcttacagatcattctatacaatatatatgatcgttctcattcttattctgctaagtattccattgtatgaaaatatgtaactcatttaatcagtgccctatcaatgaacatttaggttgtatttttaatattttgcattacaaacactcctgttataagtaactttgtacatacacatttcacatatgtgccagttatctgtagaatgaatatttagaagtgggattactgtgttaaagaatgtgggcagactgtgactgttctagttttgatcttctatgagactttaactgaaaatgattagtggaaaagaaaagtatcattttcttggtaatatcttaatttttatctcttactattcagaactaagtctaagtaagagccaagaataggtaatctctccaaaattatgttgaattgcagacttcactaagtcacctgcatcatggtcttgtagatttttctattgcttttcagtataatactattcagctatttgcaaggtgaatattataaactcagaacaaaaggagactgtctcccaactattttactagcatttaccaagtagaggattcagaagatttgctctttattacaatttatgtgggagtgaagatggaaagatgaaacaaagagagcctaacaaatatctgcctctgtctgtttttactgtcttcccaaatttttggatggttatgaggtgtgtgataactttacaaagtgatgataccataacaattactaatcttttggggatttgtttgtttgttcgtttgtttgaggacagagtcttggtctgtcgcccaggctggagtgcggtggcgcgatctcagctcactgcgcctcaacctccctggctcaggctatcctcctgcctcagcctaccaaagtagtacaaaatagatcctatggcctcagcctatagctgagactacaggcatgcatctccacgcctggctcttttcttgattttttgaggagacaaggcctcactatgttgcccgggctggtcttgaaccctggactcaagagatccttccacctcagcctcccaaagttctgggattataggcatgaccactgtaccctgcctgttttgtttttaattaatacataataattgtacatatttatgggtacagtgtgatattttaatacgtatataaattgcataatgatcaaacgatggtgtttacgtatacatcacctcaaacatttatcatttctttatggtaagaacattcagaattctctttctagatattttgaaatagccacaataacattgtttactatagtcactagtcttttgggaagctagggaccataaagcagatcagaattgtatcagcccctcatgctttcttgactaaacctactaacttttcttttctccccatctcacctccctcattctctttctaggtacaaaagccatttgtgaaattttccctgttcaatagcaagtttaagccagagcctccatccttccatctctgaattccctatagcctctggggcagagggtacttcataatacttgttgagtgaattgaggtagatgtcaaagtgatctgacctcactttgctcccctctcaagtgccataccttccttttccctgctcagccttgacacacctatcaagccatccctttgcatgcttaattggttcaggaaaggacaagagaccaagtaaattatcttgaagaggagtctgtgtctgctatgtttaagtaaatgcgcacacacacctatctttctggctcctgctgccattctttgtttgcgcttaaaaattgggggccgggtacggtggcttacacctgtaatccgagcattttggagactgaggcagaagaatcacttaagggctggagttcaagaccagcctgggcaacataggagaccccttctctacaaaaagttttaaaattagctgagcataatggtatgtacctatttcccagctactctggaggctgaggtgggaggatcacttgagcccaggaggtgtaggcccagtgagctgtaatcatgctactgcactccagccgggacaacagaatatgatcttgtctaaaaaaaaaaaaaatggggaaattatttatttagttatgcattagtggtagctgtggagtaggcacacctggtaggaacagcattggaatgtataattcaaaatacacatgtatcttttattcacatgaattccattttatgtgtatgaaatcatcaagatcaaagtgaatattagagaatatgaactctagcttattggacatttagaagatagagtttgattagtgttgattttttttattttagattttaaaaacttgtctatgggccatacgttaagtactcatagtatcttgtggaagagttctgataaactctgggataggcgatagccaggcccacatgtggactatactcctgtaaagttacagataacagaattatatggtctaacatgcagctcacttaggcatcctacctttccaaatgttttcttcaatgccatattcccagggaaaattgctgctgggtgttgaaactaggtgcctcactggacttcttcctattatttgggcaacttgtaaaagcttcaaactttctagaaagtagccctgaaaacagttccttcgttatgtttttagcaataccaagaatacatggttctatgttatagcttagaattgctactactcttacaaaattggaacaagaaaagatggacaaaaacctagtataatgtatcattatttccatttcaagatggcgtttgaactcatctcttttccttcccaaaatcctagtgaaattatcataggaatatgaagaacattatttatagtcagaaaacagggagaaagaagccagaaactttaaaacatttcaaagaaatgtgatacagatgggaatcaaattgaaaaaaatgactgaccacctgattcaacataataaaggccatctctgtcggtaaatttaaatgggttagattcatttgcacacccctgcagctcccaaatcaagaacagcagagatggccaggcacggtggcttacactggtaatctcacactttgggaggctaaggcgtgtggatcacctgaggtcaggagtttgagaccagcctggcaacatggtgaaaccccatctctactaaaaattaaaaaaaaaaaaaaaaaactagtcagtgtggtggcgggcacccataatcccagccacttggtaggctgaggcaggacaatcacttaacccaggaggtggaggttgcagtgagccgagatcgcaccactgcactccagcctgggtacgagagtgaaactctgtctcaaaaaaaaaagaacagcagacataaggaagaagtgttactatggggtagttggtggacaaatcaaggatttgaggaattgcacttataccatatataagagaacagtagattgagaagtaaaaatgagtatttatcaagaacttcctgtgtttagaactgtgcttaagtaagtgtttaagtgtatactgtcaagaggtagttgctataaacatcctagtttagaggaaactaacttaccctcttaaccactgtgctgtggcctcagtgaactccgctaataattctttaaaacaatcctatgaaataggttagttttattttcccaattttaggctgaggcaagaagatattaagtaatttgccaaagggcccacaaccagtaggtacagtttaccggttagagaatgagtagatctccttgtgtatttgaatagctgccataataaagaaggggaaatatcttttctacccacagcttcctccttgtgtttttttgtttttggtgggctttcaggatctcagatcgaatcccaatctcagaaagacagttgacaaaccctggagaggtagctgggaacaaatgtaaaagtctcagcaaaacggtgtacttcctgtttgaggtctgtcttctggtagttcaatccctgtatttcacaactagtctacaaaaataaaactacaaaaattttaatttcccctccctctgggatttagagattttacttacacagtgcgttagaaaaccctctcaaatcccaaagacgagtgatttggtattaaattcagtgttaacccccaagttcttgattattaggtggtggtctgtgcaaattttatgtgagactgggctaactctgtgaccttttggaatttcaaaataaacaaatgcattattttagttcctggttgaatcttggctttctttctttattactgatacataataattgcacatatttatgggcacaataattaataattcacaatgtataatgatcaaatcagggtatttaggatatccatcaccttcagcatttatctttctttgtattgggaacatttcaaatcttctaattattttgaaatatacagtgtattgtgttgactatagtcacccttctgtgctgtcaaacactagaacttactccttctatctaacatctatttgttctgttaacccatctgtcttcaatcccaccctcaccccaccttgagtaacacatatacacccttcccagcctctggtgactgttctactctctacctccgtaggatcacttttttggctcccacttatgactgagaacatgcaatatttgtctttttgtttgacttttttttttattttttgagactgagtcttgctctgtcacccaggctggagtacagtggcggatcttggctcactgcaacctctgcctcccgggttcctgagtagctgggattataggcactaccgctacgtccagctaatttttgtatttttagtagagatggggtttcaccatgttgccaggctggtctcaaactcctgacctcaagtgatccacccacctcagcctcccaaagtgtgggattacaggcatgaaccaccgctcctggccatcatttttttttttttttttttttttttttagctctcacttgttgaacatccagttcttagattctgtgtactaagtatctatgtgtacatctctgtaattcagaactgtggttctcaagctttagcatgcataagaattgtcatggaacttgataagcacctaaattttgaggccctactccctaagaggtgattcagtgggtggcatagggtccataatttttatttttacccaaacttccctgatgattctgatccagtggtccttggaccacactttgagaagcacttgagttaggaaagtaattaacatttattgttactatatatgttattaacatggcagtctcttcaatatgtatttttacatttgatattatactgttgtgagatttttatcccagttttacgtgtacttattatccttacaaagttttgtaacttgttacgagttttaaggatggcagtgccccttaggataacaaataaagcatgaaaatagactacattaacagtaaaaacttctgttcgttcatctaaagacacaataaaagaatgaaaagggaagccacagactgggagaagatatttgcaatgtgtgtgatgatagaagatcatccagaatatgtaaagaacctttgcaaatcagtaagaaaaagacctcacagaaaaaaagccacaaacttgaacaaatagttaacaaaagaaaggatatccaaaagccaatacatgatgaaaaagtttccacttcaatagtcattaggaagatgcaaattaaagttcaatttataccaccagaatggctaaaattaagtagactgactctaataagtgctgagaagaatgtgacaatcttggggagggaaagtatttgcaaatgttcacagcagtgttattaaaaaccctgaaacagtttagatgccaagagcagaaatgaaaagttaagttgcatattgattcaaaggaaatatagagcaatgaaaaataacaaactgctgctacacacaatatggatgaacctcccaaaattatgttgagcaaaggacccagacacaatagtacattctttctgcttccatttatataatttcaaaatcacagaagactgtgtatgattttagaagtcaggagagaagatccccccgagaggaggaggaagcatgactgggagaggcaggaggggagctcctggagtactggcaatgttactgttctgggtaacaattaaataaaatatacttactttatgggggaaaaaagacgcaatgccctgcaacagtgagcagcctgactctgagaacagagtgggctcttgcccttgcgtttctgctttggcaaggtgcctctcagagcagatgattgtttaagattggttctggaagtaatatgaacagtatgttctggaatgtgtttaatcaatgttaaagccactgaaatgttgaatggctaaagtatatcaatcattattcagaatgcgtttcatttttttgttttgttttttttgagacagtcttgctgtgtcgcccaggctagcgtgcagtggcgcaatctcggctcatgcaacctctgcctcccaagttcaagcaattctcgtgcctcagcttcctgagttgctggattacaggtgcacgccaccaaacctggctagtttttgtatttttagtagagacagcgtttgccatgttggccaggctggtctcagactcctggcctcaagtgatctgcccgtcttggctcccaaagtgctgggattacaggtgtgagccactgcgcccagccctattattcagagtgatttcgacaagtcaagtgtgcatttgtttctcactgaaactattctttttttgttgtttttgtttgtttgtttttttgagatggagtctcactctgtcgcccaggttggagtgcagtgtgcgatctcggctcactgcaagctccacctcccgggttcacgccattctcctgcctcaactcccgagtagctgggactacaggtgcctgccaccacgcccggctaatttttgtattttagtagagacagggtttcaccgtgttagccaggatggtttcaatctcctgacctcgtgatcgcccaccttggcctcccaaagtgctgggattacaggcatgagccaccacacccggccccactgaaactattcttatatgtacctaaacttttcagaccgaaataggctctaaagatgattagtctgttccttgactcaggaagctatgaccagaaaggctaaattacctaatgtaaagaaaaccagggctagaacaaaaatttctagtcttacatttttcaaattgtaatcattaaaagattaaggtgggcttcagcccaccaattccccttgcctgggaattatccagaacacgttgagtcagtgtttgagagtgacagcactgtgacaacattcagcatatgaaagttcaccaaagccatgataatcagagatgatctgatattttaaaggagtagaataaatggtgacattttatgaattattctcaaaatttctgtttctgaccctgaaaatacaaatagtagaaagcatttggggcttttatgcattattcacagaatgccaaaatgtagcctagagcttggggcgtatggaagtccattttcaccccacttagagccacttagaggtagagcagccaagagtatgcagataacagttgtagcgcatactgtatgccagaagcatggcataaagcattgcaggcacaactgctctggaggggggtaacgattagatttagctcctcctggacaacttaatggcaaggatttcatagacttgtcagagcactaggatagcttgacattggtttacccggaattagagaatatccaattgtgcctcaacaggaataggtctacgttttttttttccaagccttctcaaaactacagctgtttccttgcctccgtttttctgagttgcccttagaacgcaaaaaagcttacttgatgttgagagactaggaacataaagacaggagatagttggatagaagaccatgctacgaataatgaaaagaacactgggcttgaggtcagaatcaggcttctaatgtgaccactagactaactgccctgtgaccttggctagccttttaacctttatacctcagtttccatctgaaaaatgaataactattcttgtttaatctaggcctattcttttaagtggattaagtttggaaacatactacaatgttgtggctcagcaattctcagaaaaagcgtgcataaagcaaaagtaaatgaacttactgttggacccagacttagaatcaatcaatcaacaagatttattgaatagccacctaaagggtatattagactgcatatagcctttacctaagcctatagtgaattctgtaaacaagatatgaatgcattaacctcattgctgagctctcacagacataatgataatattaccacagagtaataataaggcttttacatatatggtcttttctccctctttttccccattcattatcttatttgaatcatatagtaaccctgaaggaggacaaatagatgttatctccatgtttccatgagtttcagatgagacattgaaattcagagtatgaaatgcttctcaagggggtaggacaaattgagaaatgtctggagacatttttggttgtccaactggggcaatgctactggcattgagtcggtagaggtcagggatactgttaaacatcagtgatacacaagacagctcagacaacaaagaattatccagtccaaaatgttgttaatatgaggttgaaaccctgagataggtgtttccccaaaagaactcaaagtgatagagtcggaccagaatccacatctttgactcactctagtgtgttttcactatgtctaaagcagggcataaaatctggattttaaggctgggtgcggtggttcacaccttaaatcccagcactttgagggccgaggcaggtggatcacctgaggtcaggagctcaagaccagcctggccaacatgataaaccctgtttctactaaaaatacaaaaagtagccgggtatggtggcacacgcctgtaacccgcctacttggaaggctgaggcacaggaattgcttgaacctgggaggcagaggttgcgagatcgtgacactgcactcaagcctgggcgacagactgtgactctgcctcagaatccttttaaattaaaaaataagtaaataaaatctggagttcacaagtcttagattaatcactatgttttgatgaggtatgagtgacaagtcgagtttgtttagatcactgttgaaggtgtatgtatagattatgtagtctattaaacacttgctgtgtgtctcacagtctgctgcccatgtcctcccagaggctagttcaccttcatcgtatttattgattttttattgagcaagtaccaatttgaatcatttgaccaaaatgctgttgaaatctggacacgatccctgtagcaatctcatgcgtaggacctgttgccaaactaaaaacccatgggacttttacaggaaatgtcaccagagactcagctagaaattagtagagccgggatttgaataccttctgactccagactttttttttttaactcctacccctagacctagactcttaacaatagtctgtaagatcaaatgtacctgcaaagggtggcatgtgacttttagaagctcttaaaatccaggaataaattcttctactaattcttgtagaatagtcttaagttgtgcccctcaaaccattttatgcccagaaatagatgattcttctcatcttcctaaagttttaacagatgccattctggatcctggaaaataaacagctgtagccataaggatttaatctataaagatttttttccttctgtaaatctgctcaaagaagaacttaagcaggaaacatgagtgcctgcatattacctttaaatagcttcaattgccctggaaataaaatttagaatccttaaaatgacctttaagattttttttttgaacacagtctcgctctgtcacccaggctgcggtgcagtggtgtgatcttggcctcactgcacctctgcctcctgggttcaagtgattcttctgcctcagcctcccgagtagctgggagtcaggcatgcgccaccacgcccagctaacttttgtatttttagtagagatggggtttcacccgttggccagtctggtcttgaactcctgacctcaagtgattcacccttcttggcctccaaagtgttgggattacaggcgtgagccaccatgcctagacattcttaattgagtatccttatgcttccctcttcaacctcattagcctctcctccgctcactcagtatgttctgttcaactaaccttgatcccttatttcttctctcgactcaggaaggctcttacctttccttctataaactccaataattaatttatcagtctgtttaaagtcagctcctttaagaaagctccttctttcgcttcccacctgtcctccatctaaattagttctttcaccgttattctctgccaagttcatttttgtacctccttcataccacttacacaaatgataattatacctacctataatatttatttgcttacatttttactgagagagccttcttcctcttgagtagccccacaaggcaagtaccttgtctttttgcatcagactccttataggtagatattgaaacctacatgattttgtaagaattaataaatactttttgaatgaatgaatatttggtaagtattcttccgatgctgtaaggaagtaaaaattagaaagtttcttgcgctcaagaagcttgctgtgtattatggcattttttatcttgtattttaaaaactataagtcaatttctgtaagagaagattctagggaaattcaaaaaagggagatttcttaggaattcaagaaaaacctcctggaatgattagattataaatcaaaaagatcaaggtccatgttttagctttatccttaattctggcaatttttgtgcatgataaatgttgaataaataatggcaggatttgtacatatatagaaaagaggggaaaaaataaaaggaattccagggaattacaaaagcctgaaaacgcatacaaattcaaaatgctgaattttattgaggggccaggcacggtggctcacacctgtaatcctagcctttgggaggccgaggcaggcaaatcacttgaggtcaggagtttgagaccagcctggccacatggtgaaaccccatctctactaaaaatacaaaaattagctgggtgtggtggcgcttgctgtaatcccagctactctggaggctgaggcaggagaatcgcttgaacccaggaggtgaagttgcagtgagccgagatcgtgccactgtactccagtcagggcgacagagcgagacttgtctcaaaaaaaaaaaaaaaaaaaattattgaggaaaagtgagtaggtcagtttcagtgaacatatgaatgtgaagcggagtagattgagataaggctggaaagataagtctgtaacgacttaaatgccacatagtgagcttaaaaatcagtgtatcaatatcagaagttgggggtaagatacttaggtttctttttgcaggcagaaattagtttttcggagtgcagcctaagaacaaattatagcttgagaaatacatgcaagtagtatctgcagtacaaatactggtttagctggagtaccggttcatcagcatcatcactgtcaaatagcaagattcagattccaatgggcatcttctgtatttggcttgactagaaagagaactttgcttccttatatttctggaaggagcaacacacttgcctgacaagtccccagaggtatttgaacagttattatagaatttgttattactgaggagcaccatgcaatgactgctaaggtccttccaattcttagtgggattcgtgacccgcaaattaagagacagaacactcaggtttcaatttcaggtgatctacatatactgaagaaatggctcatccatctctttgcagaccgaattgtttggagccagacttctctcttggctgactcaagaaagagtagcatccaagaggggctcattaagcatctgcagttgaaaagatgagaaggaattttagaatactttgattcaactgtttctcctaccatttctcaaaccattctatcagtgtgatatatgggcactgattcaaaatatcataaaaacattttcgatattttgtgagacctagttccagttagaattattaggaaaggcacaatatactatggctttcagagctcttaaaactagaggatcacgaggtcaggagatcgagaccatcctggctaaatggtgaaaccccatctctactaaaaatacaaacaattagccaggcatggtagcgggcgctgtagtcccagctacttgggaggctgaggcaggagaatggtgtgaacccgggaggcgggcttgcggtgagctgagatcacgccaccgcactccagtctgggtgacacagcgagactcgtctcaaaaaaaaaaaactagacgttggagtatggcatggatttgttgcactagagatttaaggatgggcatttcagacttaagaaacaatgtaggcaaagataccagacagaaaagtggggatgtgtttcctaggagtgctagaaacttttggccattggacttgtttggctggaaacaaagtacatacaggcagaagaggtaggttgggttctttttgttttgttttgttttgaacagagtcttactcttgcccaggctggagtacagtggtatgatcatggcacactgcagcttgacttcccaggcttaaagcaatcctcccacttcagggcctccctcagtagctgacacacaagtacatgacaccacacccagctaattttttgcttttttgtagagatggggtctcatgtatttcccaggctggtctcaaactcctgggctcatgtaatcctcccacctcagcctccaaagcactgggattacattacaggcatgagccaccatgcccagcctaaaatcatttttagttgatcttatcttatagtttgttccatttccccgatgtcattttatgtgacacttgtaaggcttcatgccttagagacttaattcacataaaaagttttggtttagcatttcagacacttaaaggtcaatagcagccagtataatctcttcccttcttctactcttagaaacaggatgagttttgtttacagtctctctcatatttttcacaaaacacatattttccaaaagtaatgaaggtaaatttggcgagaaaatgtaaatgttcagatctcccaagagctttgtgtttatacgctaggcttctaagcctcccaagggctttgtgtttttatactctaggctttttttttttgtttaagttttagctctaggtggaactttatggattatgtaattcagtattcttaagttaaggaaaatgaagctctaaaatataaaataacttacccaatgtagtatatgtcactgtgtcctctctcacatttaaactaattctttgcctttatattttgttgtttatgtagtattacatggtccattcatgtttactcagaagacataggtgacctagggattggacaatggcattttaaaaattgagtttgactttagcatgttttctcttgcaaataatagccttcaaggctgtataattcatcacgttatcactttttccaggatttgtcttgcctcaacaggttttcatctcctttgctgagtttgaacagcttgataagctggagtgatgtagaaagatgaaattatgatagaaggggatgaccttcaaccgatatctggagataaagtgtttctttgtcttttccttctttttaagagatgtggggcgggggtgggtgtgggtctcactatgttgcccagctagattcaaactcccaggctccagtgatcctctgagtagttgggactgcaggcatgcacactgcccccagctttttcctgtcttgttctgattagaattaaatcacaggttttttgttttgttttttatctttccataagtacagttaaagtaagattctcagggcagctcctgagtatcgtccctttttgctaaaatagatatttttagccaagagtttatgagtaaagaagctttcctactggccaagcgcagtggctcacgcctgtaatcccagcactttgggaggccaagcaggcagatcacctgaggtcaggagtttgagaccagcctggccaacatggtgaaacctctctctactaaaaatacaaaaaattagccaggcgtggtggtgggcacctgtaatcccagcactcgagaggctgaggcaggagaatcgcttgaacccaggaggcagagcttgcagtgagcgagatcataccactgtactccagcctgggtgacaagagcaaaactccatctcaaaaaaaaaaaaaaaaaaaaaaaggctattcctactacttcatagcttctgttttattcttttaaaacttgtcagtccatgcagcatttcttgtttgcctagatcattggccactcataaatgaagcacttaaaagttttaagtgtaattatttgaagtagttttctcctttatgtctctgacattggttactttttatgcagcttattagtctgatgtatgagtaattcatccacataaatttgctattacttgagtatggcatagtttggcttttttacatgaaaagtgcttcagggaagtatatggtgaagaaagagaaaatatctccatctgtcagggtcagaaaaaaacaagagtggagagagaataatataaggattattgaaatctgcagataatcactaaattaattcttggcaattctattaatatccttctcagccccaacattgctatgaagaaaagcaagtaagaattattatagatgatcccttggagttattatcaacaaaggcaaaaggcaaaacagtagccagttttattggagaagttttaaaaagataaaatctaagatttgtatgtgggcgtgtgaggaattataatggtgggtttgggataactactttcctgagtgcagactatccttgtaagacacagttgtagcaagtgccgtgtggactgctgtcacttgacagacttaatctggggagaaaatatgtgtttgaatgtatataattgtaaggtattttacatttcttttttttcttgttgcctgacctattttcttagtacctccactcatcgttttacttaccatttttaatacattgtatggcacaactttaggagtctttaagtttttgccagttctggccgagacccatagtttatcaaggctaccctttataagaggaattgatcaaattaagtatacctacgatcactgtactcaagaaagacataggcaagggaaaggcagctagaatatcaaaaggattatatggttaattcatccaattatggtcacatttctgttggttaatttgggttttgttttgtttgttgtgttgttttgttttttgtttttcttagtagagacaaggtttcaccatgttggccaggcagtctcaaactcctgacctcaagtgatctacccacctcagcctcccaaagtgctgggattaagcactttgtaatgtaaaatgggattgcattttatacactttataatgtaatgggattaagctcactttgtgagccatcgcacccggcctctgtcagttaatttggaataggaatatgagccagcacccggggaatgagtaggaaacattacagccttcaaagggaagtcttctcccaaatatttatcaaattgtatttcccctcccacttactgggagctactacgttttttccagcaactgcactattttggcctagaatgccactaagtttttttttttttaagacaagacatcctgttgcccaggctggagtgcatggcacaatcatggctcactgcagccatgacctccaagatcaggtcgattctcccacctgagcctctcaagtagttgagactacgggcacacataccacacctggctaacttttttgtatttttagtagagatggggtttcctcatgttgcccggcgggtctgaaactcctgggcttaagcgatctgcctgcctcggcctcccaaagggttagattacaggtgtgagccactgtacccagctctaagttctgtttattgcagtattatatcaggtctcccctttgttttcctacatctcctttgccaccactcctccccaaaaggtgtgtggatttattgagccatcatcaagataattgttgtttttattttttgagacagggcctcacctgtcacccacgctggagtgcagtggtgcaatcaccactcactgcagccatgacttccaggcacaagcgatcctcccacaccctctcaagctgggaccacaggtgcacaccagcatgccagcaaatttttatatttttagtacagacgaggtttcaccatgttgcccagcctggtacaaactcctgggttcaagcgatctgcctgcctcagcttcccaaagtgctgggattacattgtgagccaccatgcccggccattaagattttttttttctttttttgagatggagtctcctctgtcacccaggctggagtgcagtggcacaatctcagctcactgcaacctccgcctccggattcaagcgattttcctgcctcagcctcctgagtagctgggactataggcgcgtgcaccacgcccggctaattttttgtatttttagtagagacaaggtttcaccatgctagccagatggtcttgatcttctgacctcgtgatctgcctgccttggcctcccaaagtgctgggatataggcgtgagccactgcacgcggccgataatttttatttttattttattttatttatgagaaagaatcttgctctatatcccaggctggagtgcagtggcactatctcagctcactcaacctccacattatcgtgcctcagcctcccaagtagctggaactacagacacaccacccatccagctaatttttagtagagatggggttttgccatgttggccaggctggtctcaaatcctagcctcaagtgattcacctgcctcggcctccctaagtgctgagattacaggcgtggccaccgcacccgaccaagataattttaaaattcacctataggggcaatcaaaacaaagcagagccatttctgagagtatctactaaccccatacaggtcgtcaaaaggcaagattcgccagttaaactggttgcttgatcatgtggacatagtccataagcacgcatccctgtttaggtagtgtactgtctttgaccttgaattttctgtataagtgcttgccagaaacttacagtaccaattataagtaatgactacagaaagcagaagagaaactagatagatttctctttgttaatgttttcacaaatctaaaaaggaatatgaccctaatcgttttaagaaaaaagacttcttccttatcatggaagccaggaaagacaggcaggctccaaaagaactgtcccgggctcagattatatctgtctgagctagagaaaagagcccatgtgcagatgtatgactacttcttgtagtctttttgtgcaatctaatctccatagtccctatggattattatatcttattctattgtaccatagaaataaggccaatactcaatgctaagactcagaataggcatcagaattagccgtcttgctaattccctaacttctgaccataaattcatatgtatttttgttaaactattagattttacagactgtgtctgtcttgcaggtgatggggcaggtacagggaaaactttttgataatcttcagaggttgactgtgaaacactcttgactataaggaggttttgaaactgtttggaaaaatatcataccatacttattaaatgggggagaggggaaagcaacagaatgctgagctcttcaacagtcaatatagcatttactgtttcctatatttaatagcattcaaacaatagaaacaagttggcacatagccaacttcaggtacctaactgaagataaatgttcctagaaactgaatagtttaaagccttcctgagaaagaaactccttttattaactatttatgtgaactaaattccacataaactcctgcttaattttttaaaatagtcaattcctagacatttctcatcttccttaatgatccaagaagatggccaggcatggtggctcacgcctgtatcccagcattttgggaggctgaggcaggcagatcacctgaggtcaggagttccagagcgcctggccaacatggcgaaaccccgtttctgctaaaaatacaacaaaaaaattagccagtgtggtggcgtgcacctgtagtcccggctacttgggaggcttaggcaggagaatcacttaactcaggaggcggaggttgcaatgagctgagattgtgccactgcactccagcctgggtacagagactctgtctcaaaaaacaaacaaacaaacaaacaaaaatccaagatttctgtgtagaaggaagagctcttatgaactattcacatgagtgttcatagccacttcatggtctcggaaatcaggacaggcagaaagatacttgaaagcagtcctttttttttttttttttttttttgaaacagagttttgctcttgttgcccaggctggagtgcaatggtgcagtctcagctactgcaacatggcctcccaggttcaagtgattctcttgcctcagcctcccaagtagctagattacaggtgcccgccaccacacccggctaatttttgtaattttgtaattttttagtaagatggggtttcactatgttggccaggctggtctcaaactcctgacctcaagtgatcctccaccttggcctcccaaagtgctgggattataggcatgagccactgtgcgcaggcttgaagtagtcttgacgcaaatactttgtaggagagaagctaacagacaagtcaagggttgtctaataaagtcaagtgaggagagaaacccagctaatattttgattaatgccttctcccacaagttcactcattggattttccctactcaagttcttttatcccctaatattccacataagataatagctgccatttatcaggtactttggtagatgctttatgtatgttatctcatatatcctcccaagaatcctccaagttgtacaggctggaaaccagctccagaaaggctaagtactttcccaggacatacaatcagatcaccttctttttcttttaaaattcaccttcacctccaaattctttttacagatgtgttccagttaggtagttaagtcctgtcactccgttatttaatgcaaaggtgattctccagtattgcaaagatgattctccagtattgaacgattttgattctgttaaagaaaactagtatacctcaattggcaaaaaaaaaaaaaaaaagtaaatgaagggcagtacagtaattctaatctttctttgttttttttttatttttttattttttttagatggagttttgctctcattgcccaggctggagtgcaatggcaggaccttccctcactcaacccccacctcccgggttcaagcaattatcctgcctcagcctcccaggtagttgggatacaggcacgcaccaccatgcccagctaattttatatttttagtagagatgatgtttcatatgttggttaggctggtctcgaactcttgacctcaggtgatccacccaccttggcctccaaagtgctgagattacaggtgtgagccaccacacccggccacagtaattctaatcttttaccctagttataagctcaacttggtaaataaaatattttaggtagattttatcatagataaaggttaggaaaattttcgcaacctactcatctgacaaagggctaatatccagaatcacaatgaactcaaacaaatttacaagaaaaaaaacagacaaccccatcaaaaagtgggcaaggacatgaacagacacttctcaaaagaagacatttatgcagccaaaaaacacatgaaaaatgctcaccatcactggccatcagagaaatgcaaatcaaaaccacagtgagataccattcacaccagttagaatggcaatcattaaaaagtcaggaaataacaggtgctggagaggtgtggagaaataggaacacttttacactgttggtgggactgtaaactagttcaaccatttggaagtcagtgtggcgattcctcagggatctagaactagaaataccatttgacccagcatcccattactgggtatatacccaaaggactataaatcatgctgctataaagacacatgacacatatgtttattgcggcattattcacaatagcaaagacttggaaccaacccaaatgccaaaaatgatagactggattaagaaaatgtggcacatatacaccatggaatactatgcgccataaaaaatgatgagttcatgtcctttgtagggacatggatggaattggaaatcatattctcagtaaactatcgcaagaacaaaaaaccaaacaccgcatattctcacttatagggggaattgaacaatgagaacacatggacacaggaagggggaacatcacactctggggacgttgtggggttgggggaggggggagggatagcactgggagatatacctaatgctagatgcaagttagtgggtgcagtgcaccagcatggcacatgtatacatatgtaactaacctgcaattgtgcacatgtaccctaaaacttaaagtataaaaaaaaaaaacttcaaaaaaaaaaaggaatcctaagggtttttttattgtttgtatttcagttctgtccctgagttatatattcgatttttttggttagtatttgtaatggtggtgagaactggtaggcatttgggtcattaggatccaccctcatgagtaaattaatgtccactctcaggagtgagtgagttattgctctctaggaatggattcgttcctgcaagattgggttgctataaagtgagcccgtgtctctttgacatgcccacttgcctttctgcttctctgccagaagccccaaagatgctggcaccatgccttggactgtccagtcaccagaatcatgaggcaaataaacctcttttctttataaattaccagcctgaggtattctgttatagccacacaaaacagatttagacagtattcttctttaaaataatttgtaaatttggcctggcatggtggttcatgcctgttatgccagcactttggaggccaaggtgggcagatcatttgaggtcaggagttcaacaccagccttgccaacatgggaaacctcatctccactaaaaataaaaaattagctgggcatggtggcacatgcctgtaacccagctactagggaggctgaggctggagaatcgcttgaacctgagaggtggatgttgcgtgagccaagatggcaccactgcactctagcctgggtgacagagtgagactctatctaaaaaataaaaaataaaaaataaaaatagagcaaagattgtatgaccctggattttaacttttgttacatgagtacccatttttattttggaagaagctgagcttaagtcagattaaagcaccaaaggaaacaggctaaaaagaaccaatgctagtttacctcctgtaagttgaatttcattctagagagaatgggttaggtgtgttcgattgctttagaagataacttatccaaataatacagcacatcactgaaaatttaagtgggaagagaaaaaaatataatcacttttatttttatgctttaataattaatttgtaagttttaacttttttgatgtaatttagctttggcaattcccgtgggatcttttcctaaaataaagcttttagtgagcgtaaggacttatcaggatggtttgtgtttgagcctacagtgtatgtttatatattaatctccaccggctttgtatctcctattcatacaccattcggtaagccttgcataggattccattacaatatatccattgctactgacaatgagagcaagtagattctgctcttgttctatctcctagtatatttggattgaaatatatcctgcacaaatgacacttcaaaacaggtgcatactttgaaaggttttctgggatttgtatataccttgccctgggtcactgatatgtctgaagagatttgataatgtgcatcattgagtagatttctctaattgataatgagggacctgaataattaagaacctgtggtcttcaaaattagttcatggtaataattaatgttataaaggttcatcaaggaaatcataaggttacaacttttagatagtttgtggtactatagtcctgcttttttttgagatggagctcggtctgtcacgcaggctggagtgcaatggcacaatctcggctcactgcaacctccgctcccgggttcaagcgattctcctgcctcagcctcccaagtagctgggactacaggtgctgccactaggtccgggtactttttgtattttcagtagagacggggtttttagtcaggctgtcttgaactcctgacctcaggtgatctgcccgccttggcctcccaaagtgctgggattcagggtgagccaccgcacccagcctagtcttgcttttttaacagtcctctacatgttatttatatctcaaaatgaaaattatgactgttcagtttccctttctagcttttagccttaagctccttgaggaaagactccatgtgatgttcatttctttatttcctttggtcttaagaagcactcttgcaaatattcattccctcctcctgaccaggattcatattgataatatggaagaagtaaatcctttgtggttttcttatgctataatcatttttcagactctcattggaaggaacagtatttgtgtcttctgcctctagctctttatgaggatgtgtcagtagtcttcctgctagcgaaagtcttttcttttctttttttctttttttttttttttttgagacggagtctgctctgtagcccaagctggagtgcagtggcgcggtctcgctttactgcaagctccgcccccgggttcacgccattctcctacctcagcctccagagtagctgggactacaggcacccccaccatgcccggctaatttttttgtgtttttagtagagacggggtttcacccatgttaccaggatggtcttgatctcctaacctcgtgatccgcctgcctcggcctcccaaagtgctggattacaagcgtgagccaccgcgcctggccaagtcttttcattcttattgcatttgttggttcaatatcataatttatgatcactcagatgccagtgatctctccatcctaccataatacctctttatctgaaaacagctgcccacctgccatttgccccatcactgacactttgacatggtctttattttattgtgtattgtattttttagtgtttactctaaaaacattgtagcaaagactctgttttatatctttttatacctctgatgtaatctctttatggtaatggtacaataataccagattgtcgagctctgtaattttttttttttttttttttgaaatggagtttgctctgctgaccaggctggagtgcagtggcatgatctctgctcaccacaacctccgctcccaggtttgagcaattctctgcctcagcctcccgagtagctgggattacaggcgcgtccaccaagcccagctaatttttgtatttttagtaaagacggggtttcactgttgagctcataattataaaataatgtagtgtctggcatgaaagtggatctttgattatgcctacctgtgctttgccttatccttcactagaaataagaacctatttcttaagccagctgtcatagactatggggtaggagttaacaaggagaaaataaatagatggctccctgaatctatataaattcctacccacagtctttttttttttttttttttgagatagtctcctgtcacctaggctgagtgcggtagtccaaccttgactcactgaaacctccacctcccaggttcaagtgattccatgcctcagccacccgagtaactgggattacaggtgcatgccaccacacctggctaattttttgttttagtagagatggggtttcatcatgttggccaggctggtctcgaactcctgcctcaagtgatctgcctgcctcagcctcccaaagtgctgggataacaggcatgagccacgcgcctggccaatttattctttacctcttggtaattgtgtcttatttctcagcttatttcttcacagcatgaaattatatttattgtttctctccctatcaggaaccttgtcttattcttgttgaattattagcacctagctcagagtttggtatataataggagcttgataaatatgagtgaatgaataatgaaaagcatacttggtttcatgaacatgaatacctacttggaattttaaaaccactttttcttccacagactggacttgagggacacataaagagaatccaccacacctccccctccacacacaccagcttcccattctcccactccaactctagctatagggttattgttcctgggccgggcacggtagctcaagcctataatcccagtactttgggaggcgagttggacagatcacttgagctcaggagtttgagaccagcatggccaacatggtgaaccccatctctactaaaaatttaaaaattagccaggtgtggtagcatgcacctgtaatccagctactcggcaagctgaggcatgagagtcacttgaatccaggaggcagaggttgcagtagccgagatcacaccactgcactccagcctgggcaaccatgcaaaactctgtctcaaaataaataaataaaaggaattattgctccttggtttatgtcccagatggacttttgcagcatacagtgatgtggtagtaaagatacaaggctgaatttgcagttgtctagacttaatttatatagagtatccaatttataccttgtttttcatgttcttcactctaatgtcctggtaggttgaaattgtatctgaagtctgagcacactgcgtgcctagggccatagtagacctttctcaaatttaaattagctgaaggctggttgtcctgtatgtgaaaatgtaatccaaatatccgattaggcacaggccatcccaattaggtgaattatctgaagtccttgctttttatctgcgacatttatgattagaaagccttaaagcagttaaatttcattaatggcattcatttgtacttattacagattgcctgtttcctgcaacccaaagaagctgctttccttctccttatctatatttaagtttgaacatatattaagcatacctattaaaggaactatactggtggggcaagtggcttacacctgtaatcccaacactttgggaggccaaggcaagaggattgcttgagtcaggagttcgagacctgcctgggcaacacgagacctcatctgtacgataaaacaaaaattagctgagcgtggtagtggtgcaggcctgtgattccacctactcaggaggctgaggttaggctgtggtgagttgcactccagcctgggtgatggagcaagaccctgtctcaaaaaaaaggaacaattctgcagaataaggaagggttaggcatctgtagccctacgtgtaaacccttctgctacagtctccaaaagtgatccctattagcacgagttctttctctctccatctgtgattatgaaaaataattctgagtaaagatgctaggagagcattcatttattagatgcatccatatagacaaagtatttaccaagaaacaagcccaggagcagggaaccaccaggttgctggtgaaccagcctagatcagaaatggagcaggtcaaaactcctgtactgatcagtagtggatcatgcctgtgaatagccattgcattccagcctgggcaacatagcaagattccatcctaaaaataaaaaaaagagataagatttttatatccttaaattattatatataattcttctcttaaaagaatcttctgctgactctcaacttttcctggaaaaaatggatcattcccacatatggggatgagctatatggactccaacagtaccatgcaaccttctcaccatcacccaccacttcagcctcacactcccatggtggaggagacagcagcatgatgatgatggtgaggccataggaggggcaatgcaggccctttcccacccacttgggtaatagaaataatggaatttagtactggaagcttattatctttaaaggtcagtttaccagtgaggataactaaagcgacccaagcaagtcaagtcatttgctccagattatgtggcaagctacttacagagtcacccagaaccaagattttaggcttctttctttggtggtcccttctgaaatcgactcttttcgaattaggggttctggtctttatgccttgggtggaaaagagaaaaagacaaaagttggcaggcacagtggctcatgcctgtaatcccaacactttgggaggccaaggcaggtggatcaaaggtcaggagatcgagaccatcctagctaacacggtgaaaccccatctctactaaaaaacaaaaaattagctgggcatgatggcattcgcctgtagtcccagctacttgggaggctgggcaggagaatcgcttgaacccaggaggtggaggttgtagtgagccgagatctcgccacgcattccagcctgggctacagagcgagaatccgtatcaaaaaaaaaaaaaaaaaagataaagttgatggtgggggcccaggagaaaagttgatggtgggggcctagtagaatactcatctcggtgcctgtggtggtaacgctaacatgagggcaaaagcctcccactcacgtgaatgctcttattatccagatcttctacttttaaatgttctaagcttctttgccccaaattctctttagaattttcattcatctctaactgacttgttttggttttctggcagcctatgacctctactttggctttaagaatgtggaactactgttttccggtttggtgatcaatacagctgaggtgagtaagccattaggtagtgttggaaggtgatagtcacatgagagacagtgacaataatttggaagtccagcacctctttctgtcctaattactaagtcaacatggtaatgatgataaccatcttggttcctatttcctacctagaaggtaggaaacacagtacttttttggtctctggtaaacctctgttaactaacatgtatgttttggagctctaaaaaataatttagaaccagatagaatcttttgcaatccattttctttcattcttttccagagtgtttaattttttttttttttttttttgagacggagtttcactcttgtcacccaggctggagtgcaatggagctatcttggctcactgcaatctctgcctcccaggttcaagcgattctcctgcctcagctcctgagtagctggagttaaacaggcacctaccgccatgcctggctaatttttgtattttaatagagacggggttttgccatgtttgccaggctggtctcgaactcctcacctcaaggatccacccacctcagcctcccaaagtgctgggattacaggcatgagccaccatgcccgcctcagagtgtttacttatttgataagttattagtcctggacataagactaactcaaataagtaccacaaaataagtttaaaactattgttctaatacttcaattttacaataaattagtgccacaaattgtgaaatgactcgccatcaatcatagagttaatatgtcagagctaggcaaggacccagaccttctagagctacctagaccagtgttcttttagtctaccaaactatgcccacatccttcctgattcttggcacggcccatcttagacactcctagttttgaggtaatgattacccatctgtttgtgtctattatgttgtatggtatactttaaatttaacttgccaaactcaatagtcagttggactgccttaggtaccagatgtctgtttggagccataaaacaatttgttttgggaagaaggagagcatttagttcaggtaatgtgttaaattagcagttgaatacatttatatcattaccaacacttcacagtgtgaaagacttagaattgaaatgccattcaggaaatgtagtcagccactgatgaaactaaattgttttattccctgttccatatctacattgtgtgtttcagtgtaacaaacctaatttaatgatatcaagcagtctgaccaaaggttattgttgttctgattatttttcttatcttaatcagaaagtaaatatgttcttggagaggcaatagttttcagttacaccatcttagccgttctcctatctgagcaagagaagagtaaaaatataatgtcttcaaaagctgagagtagcattttttctatgtgtctttctagcggacagcacattggctaatgattttgcacatgtttgacagtacctccatattttccttcatacttagaaatggctggagcttttgtggcagtgtttttactagcaatgttctatgaagactcaagatagcccgagagagcctgctgcgtaagtcacaagtcagcattcgctacaattcatgcctgtcccaggaccaaatggaaccatccttatggagacacacaaaactgttgggtagaactgaacagatccagatgaagtcctaaagaactcgatcagttaagcagcaaagcgcgctgtgtgatcagcagcagccctcttcttgagttaggagttctgtatgaccttgatcaaactgtccttggaggtttgggtttgtaggtcatgagcaggccaaaggaggaatgagaggggtcttctgcaaatatgaatgtttgttctgagttgtacggattggccactttggaagaaggaagtgaggaatccatattttaaaatatttaccaaaataataatgaacaagttaagaaatcagatcaagatataaaagaatggcagattgcagttgattctataaagttacacctagtagccctgtcctctttttctttacaatgtaagactgtattgatttctgtgttctgtctaaaaagtatttggatgattattggtttttcccatagattggcaaatgttttttgagattgtttaataaaaatgtaagtcttaaaaccaaattggaccttaagaaatcctatagactgatacctgctttcaaacaagcagtgttatttattgtactgatgagcttactggggcccagaagattgtgacctacctaaggtggcacaggggatgagtagccaggtctccttatccctaattagtaatttcttctatactacccaaccctcaattctatttttttttctttttttctttcttttttttttttttctggagacagggtctccctctattgcccaggctgaagtgcagtggcctatcttggctcactgcaatctctgccttccagactcaagtgatcctcccacctcagcccctaagtagctggaactacaggcatgagccaccacacccagctaattttttttatttttgtagagacaaggtttcgccatgttgcccaggctggtctgaaactcctgagctcaagcaacagcccacctcggcctcccaaagtgctgggattaaaggcattagccaccacccccagccctgtttctgtttttgtagaatgtaaactttgcaaaggtgggaagcctaaaaatattcggcagatgagcgtgagagggtttacggcttccctttcaggatctaaggtggaggtaagtcggattactcctcgtccttttctcctcctccggaaaagggttccttctactggaggaaccaagccatatctggccaatgtttataagcctgacagccctgtgctgtttcatttccatggacaatcaaagaacattcaagtacccatgagttgccagagtggctgtccagttccagctgactcatggcaagaactcttccctctttctcctgatctgcagaactcctaggagtccctgatgttgtgtccctgtttactctccaggcaacagatgctgagctttcctcacctcctgcaacagtgctgcacatcatccaggtggtcataagctacttcctcatgctcatcttcatgaccacaacgggtacctctgcattgcagtagcagcaggggccggtacaggatacttcctcttcgctggaagaaggcagtggtagtggatatcacagagcattgccattgacatcaaactctaggcgtggccttatcgattgcagtgggaagttgttgaagacttgaagacgtgattcctgcccaatcatcccttcttgctcctctttgtgcacgtacacacacacacacacacacacacaacacacccctgctcaacagaggtttagtttacagtctctgaactaaagtagtaacctccaaattgttttttctaataagctgagattcccatttctcttaaggagaagccacccatgaatgtcttttccttctccatcatcttagagccaagttatatgttcttgtctaatccatgtgctttttgttcaatgacttgatcatctgcttcctttttgaatttttaacagatagtaagaaatttggtggttttttcccctgggtcagtgatggaaaggggttaacttcagccaggatgatggcagctgagggaaattcttgcccaactaaacccagaactcaaacttaacattagaaataaggtccagggccggacacagtggcccatgcctgtaatcccagcactttggggggcaaggcaggctggatcacctgaggacaggagttcgagaccagtctggccaacatggggaaccccgtctctactaaaaatacaaaaattagccgggcatggtggtgggcgcctgtaatccagctactcagaaggctgaggcaggagaatcacttgaacctaggaggcggaggttgcagtagccaagatggcgccattgcactccagcctgggtgacaagagtgaaactccatctcaaaaaaaagaaaagaaggtccagcttttggattcaatgagtgggaaatacattgtgcctttcctagatgtgatacgttataccaaaatctttgtagtgtgcagagcggtggtttgagactaatacaggcttagaacttgcagagtgtgtattcttggatggctgatgcatcgacttgcatcccacttaacactttgattagcatgaacttgccaatcaaaaaatgacaatcaatttgagaaatagaaatagatatttttaaataaaaccattcacagtttactttgtcttgataccttgtttgtcccagctgaagtgaagcaagagagtttgaattaatttttccattataatgtttcgcatgtctgcctctaaaactgtgattttcaagctttagcgtgcatcagaatcacctgtgggcttgttaaaacactaattgctgggcctcaacccaaaagcccccaaagtggcacttcgagttcctgctgatgttacaagggaccacacttttgagaatctgtgctttaagctaaggaatattgcctggtgggttggctgcctggtattgggcatggaaatttgaattgctgattgtagatggtgtgtctggacttaactcacgtagtaaatactgctgatcaatacctaatcatccacatttattgagctccacctgtgtgtatgtgtacccaagcacacatgtgtgaagggcatagccaaagtatttttactagcctgtatgaaatcactagtccttatttttaaaggtcttggtttcttggaagtagtttgattgttgagagagacctttgatctgcagtgtaaatctacagtcatgggccagaagggcaaaagcccagctttctctttggaaagactcaggctgtggttgttgatggccaggttttcctcaggctccaacaactgtgcttataccaagcagatcctatcctccatataatcatctttgttattcgtgggggtttaattacattacaagtggccaaacccctgttctcagtgaagaaccacattggatttgtattctgttcagttgtagtctacatgcagtcttattcctggttcaaactacctctttaaattgatttgtcttgtgctggtctgtaaatcctgccctccttggtgctagatccagttgtgcctcagggcagaggaaacaaaaccagctatcctgttggcctgtgttgtggttttgaagtttgtactttctctgtgggtgccattaaatattggagagcaaggaatgtggacttgtatggctttgaaccaagagagggttatagcctactggattgaggttaaaatccaagaaccaacatttagagctttgtgcttttctccattccatcactttgtaatgatgatacttaacatgagcagggtgaatgacaggtactgagaagtccaacacaaaggtataatacagcctgttgtctaaagccaaggagtcataaaacctgagaaataaataggaatcaatagttagtagtgacattggtgctctctagaaatctcagatgagctgctatagaataccctcccagcaacaaaacctaatcagtaaggccagctagaccaatggctcatgcctgtaatcccaacactttgggaggccaaggtgggaggatggcttgttccagaagttcgagaccagcctggacaacatagtgagatcctatctctataaaaaatcaaaattagccaggcatggtggtgcatacctatagtcctggctatttgggaggctgaggcagaggattgctttagccctggaggtcgaggctgcagtaagccatgattgcgccactgcaccagcccgggtgacaaagcaagcccctgtctcagaaaaaaagaaaattcaaggccagttagacaaaatgctatgactttgaaattcacagaaagaaataacagtttagattaggtcttcggtattcaggatagagataatctcctgaaaaacctgaatttcagagattcttagactggtgccaaaggatgaagctagtgaaggagaaaaagcttaaattccatcttgagctcttggatgtgataatacaatgatttcattaacttttcatttctgtatacctgttcatttggaattaatgcttgacttctttgttcattttggatctaaacttctcttttcttccttccccattccatctattagaagactgcatcaccatttctttggcccccttactctgttgtcctttccctttctttcagtttttttaatcgcatgtctagtatattaagtctccatagccctcctgatcagtagacagtgctatgctgtggatataataccaaccagaaattggcatttataaacctttaagagactttaagcatgcttcaagaggcagttgacccactggaatttctataaggctgtacccttcccagagttacagaatcttaggtgccgtctctagtctgtgagggaggaactccagcatccccattgcccacaaatggaatcctcactgtatccactaggagattagaaataaggtttcttcactacttctatggtagggttgtctgaaattccctttcaggctgtgggtctggtcttgggttctagtcataaggggttccttataaggagcaggcggaggggagtacatttcatgtgatttaattttgatcctgccctctccagctgctccttcaaaagatacatcaaagatagaaactctgggctgggcacagtggctcacacactttgggaggccaagcggggggcagatcacctgaggtcaggagtttgagaccagcctggccaatgtggtgaaaccccatcctactaaaaatacaaaaattagctgggcgtggtggtgcatgcctgtaatcccagctactgggaggctgaggcaggagaatcgcttgaacccaggaggcggaggttgcagtgagccaagtggcgccattgcactccagcctgggcgacaagagcaaaactccgtctcaaaaaaaaaaaaagatacaaagtctgcatttgatataatgccttaattactgggtctacaattaatgttgctgttttagattgtaagctcctggagagcagtattgctgtagtaggaatgttttaacaggtcatatgaaaaagaacaaaataaatattttgattttgtgattctatgcaagtctttctcccagagtgataatgcaataagctagtcttttcatagtctgcatagagtctggccattacatcagtttttaagatgtccatattgtggccgggcgcggtggctcacgcctggtaatccagcactttgggaggctgaggcaggtggatcatgaggtcaggagatcgagaccatcctggtaacacggtgaaacccgtctctactaaaaaaaatattaaaaaattagccaggcctggtgtgggcgcctgtagtcccagctacttgggaggctgaggcaggagaatggtgtgaacccggagtcagaggttgcagtgagccaagattgcacctgggcaacacagcgagactccgtctcaaaaaaaaaaaaaaaaaagatgtccgtattttaggtggtatgatccttttaggttttcattcactctccccctactcgacttaaaatgacatgcctagtacatgccagaagatccatgtaccttctgcacaggagacagggtcttcatgaagccacaagtatttcagtatactgaggatcctcagtttaaaagccaacttttgtcacatcataatcccttccctgtgtctgctgttagcaagaggctctgagctgggcctataagaagttcaccgcccaaccttgagatgcacagtaccctgccagtccctttggtaatgccaaaatgctgacgttacttgctcttcccactggccccagtgggcatcttgccatcaccaccattcctagtctcttccgagtgtagtgtcatgacatggacttagaggagtcaatgagtttggattctggttccatcacctactagcagtatgccttaggaagttagtctaatgatccctaagccttagttttcttatttagagatggagtccactccgtcacctaggctggagtgcagtggtacagtctcggctcactgccacctccatccctgggttcaagtgattctcctgcctcagcctcccaagtagctggggctacaggcacacccatcatgtctggctaatttttgtatttttagtagagatgagtttttgccatgttggccggctagtcttgaactcctgagctcaggtgatccgcccgtctcggcctcccaaagtgctggattgggaaaggtgtgagccactgtgcccggccataatacctgtttgaattaggcacctgcacaaaataggtattcgagccttagtattttttttattatctacaattgttgttactcagctttcagaatgaaaagtaacactcttcttgataaggttaataggttagtatttttcttttttgttgttgtttttgtttttgagacggagttttgcccttgttgcccagactcgagtcaatggtgcaatctcagctcactgcaacctctgcctcctgggttcaagcacctccacctagcctcccgagtagctaggattgcaggcatgcaccaccacgcccggctaattttgtattttagtagagacagggtttctccatgttggtcaggctggtctcaaactctggacctcaggtatctgcccacctcagcctcccaaagtgctgggattacaggcatgagccaccatgcccgcccttcttttttttttttttttaattttatagagtcagggtttccctgtgttgcccaggtggtctaactcctggactcaagcaatcctcctgcctcagcctcccgaagtgctgggattcaggcatgagccaccacacctgtccctctccccctcgtattactcagacttaaactacccaaaaaggctaaagtcctgctaagagtctccgtagaactgatgattcaagaggctcttagatcacagctggtgattccctgtgttgaattagtgaaaacaggccaggcacagtaatccagcactttgagaggactgcttaatgtcaggagctcaagcccagcttgggcaacacagatcctgtctctacataaaacaataaaaatttttaaaaaaaatttttttttaatgcccagaaaatagggcatgattcaaaattatcctccgagctgcctctctggttctttctgggaaaaaacttaggcaagttgagaaaggaaggaaagttggaataatggcaaaactgttagaagcatcctctttcctccattgcctgtcctcccaacattatacccaaactagttacaaagccatttgtaaagagatcgggtacctacaatttcttcagatttacacaatatccactagaatttatttctacaagggcagggatctttgttgagtggcacatggtagacactcaataaatacttttgaatagatgggttaagtgaaagtggcagggatcaactagagtgtcctgtgcttagggcttttaataaagatggaaagaatgatgttaatcttgtagcaattatcttttaaagtctggaattaacagtactgttatacttcattaaggatgcctcacatttttccaaaaatatattatttttaaaaacagaaaatcagatcagttttatagagtcaaattttcaagagacaaaccgagtttggattccagcttagagtgcaagtgaagcatcagtaatctcatgcagaagattttctctgcaggaggtacattctgcttgactgcaagcactcaattctctaaatctggtttgacttctgccatcattttattccattccagcgctctggcatgcaagataatccatctctaaattcaagacttccaaattgagatgaacgattattgggcttgggttggggtttataaccatccgatcattgatcatttgttcccggctcttgggatcactgctaagcccaatggctcctctccatcactgcctcctacaacttccacatcttccttctgtttcttacgggtctgaaatataaaagttttaggattaaggcaacattctttcaattagcaaatgtttatttagaacactaccatgtactaggcatgggctaaatgatagagttagggtgtaaagaacaataaactgaatcctaggtttggagtacttaggggcacaatgaggatatggtgttaaaagttgtaaccctgatcacttgaggtcaggagttcgagactagcctggcaaacatggtgaaaccctatcttactaaaaatacaaaaatttggcggggcacggtggctcacatctgtaatcccagcccttgggaggctgaggcgagcggatcacgaggtcaggagatcgagaccaccctagccaacatgtgaaactccatctctactaaaaatacaaaaattagctgggcatggtggcgcatgcctgtatcccagctacttgggaggctgaggcaggagaatcgcttgaaccaggaagtcggaggttcagagagctgagatggtgccactgcactccagcctggcgacagagcgagactctgtcttaaaaaaacaaaagatgtaacccctaccctccaggatgtcacagtctaatagggaaacagcaaacagacgattatagggtgatcagggctatgacctatgacagagagaagtctacactccaaagagacaagaggtaaggagttggggtgtggtggtacaacaggaagctacaattggaagctgtaagagcagacaagtgagagcaaagggcatttcaacaaatttattattctagaaatagaaaaataaattgggtaaagaaataaccaccaaaaatctatagcctgactgatccatgagattaaaagtaactcaagaaggttttatgctatcttatcaaaaggtctgggtttttggcttcattttgttttcagataaaaggtttggctcctaagtcacatgtgactgcagaaccagaaagtatgtcttagtttgatcattttcaaaaacagacacttatcccataacagccctacctgactgtaaggataacagatgataactttctctaagagagtgaaatgatgtttttccaaagttacttaatagaagaatggctcagctactcaaatcactggaattaccaccatcttcaccacttgctgctgaactgtgggcatttaaatgccaagcatcaggctgaccgcagggctcatgcctgtaaatcccagtgctttgggaggccaaggcggaggattgcttgagcccggagtgtgacactagcctgggcaacatagtgacactccatctgtctccacaatttttttttttctttagactgagtctctgtctgttgccaggctggagtgtagtggcgccatcttggtcactgcaacctccgcctcctgggttcaagcgattctcctgcctcagcctctcaagtagtgggactacaggcgcatgccagcacacctggctaatttttgcacttttagtagagacaggtttcaacatgttagctaggatggtctcaatctcttgacctcgtgatccgcctgcctcgcctctcaaggtgctggggtttacaggcatgagccaccgcacccggcccacaaaaaaattaaaaattagccaggcatggtggcgcatgcctgtattcccagttattcagggggcctgattggtaggatcacctgagcctggcaggtcaaggctgcagtgagctgtgatcatgccactgactccagccagggcgacagagcaagaccctgtctcaacaataaaaataaaaaaaaaaaaaaatgccaacactcacaaagtattacagggaataaaataaggtattgccttttatgtggaaatgaccttcctgattactagtaagtgatgttagaaagttctacctaaatacctttgtaaaacaagttcgaaaaggcaaacaactctatcattctgagaatatccaaatggaatgaatcacttaaaaggcttcccactttgagcaactgctgtttcagaagctagagtcacagtagataatcaaactcatgttggtaataaatgaaacaggccagttttctactggtttcactttgggcatgactgtccctgcttcctaagttactctaaaacaaggtaaaacccactagataatgtctttagtggaaagactaactcaatagtgagctgactgtagagtcaaagttcagcatctagcattttatgagattcgttacaactgaagtttaagccatactttaaagctcatgctaataatatatgagtttttagaaagcaaaaattacgatacttagagaacactaaagtctctgggatgaagcagggggaaagaaatctaagttattagtcttaatatgaagcatatacaaacataataaagctgttggtgaatatatgcaaaacgtactgtcctctgccatatagtacagatacctactaggacagcaaatgaaaatagacttgcattgagccctcctttggacctggattgcagggaacagatgcagagagaaatatactaatccctgacttcaaggagcttatggccagtgagggaaaacaaaagcaaacagacaattacaacagagagtgaccgtgcctatgaagaggttagcacaggaggataaggttgagcctaacccagctgggggctggaaggagtaaagttagcctggcaaagaaaaagaaagggcttttctggcaaagggaacactgtgtataggactgagattaaagataacccagcagtgaaagtggagagataagcaaggaccagctcacaggagctcatatgccatgctagggaatttggaatttattctgtagaccactgaagaatttagtcttattaatggacatctaataccatgtagcaaggccacagttaaaaatacatatgggcccctactatgaactagatggtaagaactcaatggtgaagcaaacagacatgatttctcaatcaacgtccctaatgtaaatgattttacaataaaaaaaattgtaaattataataaagctatgaaaaaaatatggtgctttgtgagagcctacagagatggaggcagcatggacggaatgacacatgaaacttggatacggtcaaaagtggcctcttaaattgaagagttgacattgaatgaagactggaagaaagggagcactccaggcagggggaaataatatgtggaaagtcatggaagtgataaatagattggcatgttcaaggaaatgaaagagagccaatgtggctaggtatagagagcaaggcaaagaatggcacaaaatgaatctggagaggcactagaacataaaaatcttgtaggccatggtgaagaattcagattttgttataagtgcagaaaactactgggagttttaaacgggaatgacaggatttgaaaatttctgaagatcattcttgatactggtgcagaatgcactgaaagagacaaaaatggaagtagaagaccagttaggatgccactacattatacagggaaagacggttacttagcgcaggactgtaacagtggagatgaaaaggtagggtggattccagacatattctgaaggtagaatcaaagggtctacagacagatcgaataaaagcgtaagagaaagggaggactcaggaatgactgctaggtttctggcctgaggaactaatcaatactgagatgggaaacactggggaagaatggaagggacgactggttcaagggaaaatcaagagtttttctctcttctttttttaacatgttaagtgtagtaggctgaaaaatgcccccaaagctagcaggtcctaatcctggaacctataaatgccttatatgggaaaaggcctttgcaggtgtgactaaattaaggatcttgagaaggggggattatcctgggttagtcggtgggccctaaacacaatcacacatatcataagaaggaggcagaggaagttttcacagcagaaaagaagacaatatgactctggaggcagagactggagtgatacagtcatgagtcaggaatgccagcagccaccagaagctagaagagccaaggaatggattcttccctagatccccatagggaatgtggccctcctgacacctaaatttcagcccagcaatactaatttttggctataaaactgtgaaataataaatttctgttgtcttaagcgatgaagtttgtggtacttgttacagcagccacaggagacatacatgaagtttgagatgcctgtaaagcatccaaacaagatttcaaataagctgttggcttaagagtctgcagttcagaagttaaagttattgtgttgtatgtgtgtgtatatacatatttatgtatgacagagagtctcactgttgcccagtgtgagtacagtggagccatcatagcacactgtaacctcaaactcctgggctcaagcaatcccccgcctccgcctcctgagtagctcaggcatgcgccaccctgcccaacatagagacaagtctcactatgttgcccaggctggtctcaaactcctggccagaaaatgctggcattacagtgtaagccactgtgcccacacaagaattattatcttaaatattccttaagctttgaaagtgtattcatggctgggtgcagtggctcacgcgtgtaatcccagcactttgggaggctgagtggatggatcacttgaggtcaggagttgagactagcctggccccaacatggcaaaacccaactctactaaaaataaaaaaatgagctgggcgtgctggcatgaacctgtggtcccagacgcgggaggctgaggcagaggaggcagaggttgcagtgggccaagatcatgccactgtctccagcctgtgtgacagagcgagactccatctcaaaaaaacacaaagttgtattcatactccaggtcctttcgaatgttctcaaactcttcaatgtcatcaagctttagctctaggctgttggtttccgtctcagcatactgaagtcaacactaagggccaaacccagtgaactatagctgttaaaaatgaaagagaggaggaaaatctgaaggtgataaagtctcagatacaaacataaaatcaatttgcaagcatgtatactaaagtgaatggaaatattaaaaatttatttaatttacacatagacttctaaagtctttttttttttttttttaagagataggatcttgcctttgcccaggctggagtgcagtggcatgaccttagctcactacagcctcaacttcctgactcaagcaatcttactgcctcagcctccagagtagctgggactacaggcgtacaccgcatacctggctaatttttgtgttttttgtagaaatgggatctctctctgatgcccaggctgtctcaaactcttgggctcaagtgttcctccctcctcattttcccaaagtgctggcatttaggcaagagctactgtacccagccaacttctaaagtctttaggtatgtgattattacattttgttacattatggagatctacagctctataaaatcaaaaactctttctgtaagaattaaaatagcaaactgcctataagagagaaattctaggcaaccatcactttaatctcatgtccagtcacattcaaagaactactctagctaaaagaataaactatcacatcttagtatattagaggaaaaagtggacaaaccagtgaatttaatctaccctacatgagaattgtcagaatttgtgatcactcttgaatgctaaaatcagtttgctaaatctcaggaaaactccaactaccaattcacaggattatcctccgcgtccaaacagatcttaaatgtgtacgtcattcataaacaaacacttcttgtgttccagctacaaagttaaaaggtacagtcataatctgtgggaaaacaaagagaaaactgtgatatcatgtaatgagaaccctgatgaggatactagcactgcatcacacaggcacctaatccagtctgggctgagtgtggggtggacaaggatgtcaggaagccttcctggagaaaatgatgtcttagttgacttctgaaggtcaggcagagagaagatgcacaaggaggctcaagtacagctttggtaacgtagcaagaccctgtctctacaaaaagtaaaaaaaatagctgggctggtagtgtgtacctgtagtcctagctactcaggaggctgggtggaaggatcacttgagcccaggagtttcaggttgccaccgtgagccatgacctcacatgagaccccaactcaaaaaaaaaaaaaaaaaaaaaaaaaggctcaagagagcattccaagcctgaaatcccaaggtaatactatgttaacaaaaaccattttgttttgttttgttttgagaaaacacaaccccccaactgagtttaatatctgttgatggcatcatttgtatattcccacagcatcccctagagtgtatctataaaaacagtcagtaaatgtttgttgactagaagtgagatcattcttgagcaccgtgctgtttttccattcccattctttacattcttatttaacacaaaaaccctgtgaagttgacaaaatgattcctatttcacacataaagaagtcatgaagcaagctgttcagtttggttaataattttagcctcctataaaaattataaaggtcacatgataagcattaagtgaaaatgatggaagtgaaaactccttgaaagtatgtacagatcaaattattacacgtatctaggatgaaactaaggactgtgaagtatacaaaggaagaaaagttccttctcccatgaagcttaggatactacaggtgatattatcaacacaaaacactgcacattacatttcaaattcctttgtactaaatcaggcattatcttctaccagattccaagcagacaaatggtagagaaagccaaagttccaaagagggaaagagagggatagggatactaaaagggggaaaaaaaaatctatacattttaccttttctgcaaactgcaaaaaactggcactagggagcagtatagattaacagttaaaagtgctggctgtagaggttaaagggcacggttttaatcccactacaccaccgatcctgaacaattcgtttcatttctcactagacctagttccctcatctgtatcctactctgctgttgtaggaagtcaataacgtaatacagagtagctcttggaatattatttggcatttaataaatgttcaataaataacatctattattgcgtaattgttctagggggttgcatgaggatctggccagctagggaaacgtcaatattttgggatctcccaccgcccatgtggggataaaaaccttatcctgttcgtctctaatgccccacatccagcagggcagagagacgtacagagttacctgacaccttcctatccatcatcttatctcaatctgatacaaagaccaggctgaagacaaatcaacaaaatcaggccgaagctccccgccgggtctttatttgactttggcactagcgggctcttctagcttaatctcccgccgagcccaaatccaccgccgagccatcaagctcagagggggagcctgggaagacttccggacatggaggagaacagtcctcgtcccctagctccaggcctgtacctcggagcccaggcaaggtttctatggtaacatggtcctcggctccaagaagacgtaaacgcccccgtacgcccgggggcacagcggaccccggaagcccttgactcgctccagagttcagccccgagccgcgcagtcgactcacctacctcttttcaagccggcctagccccttcccggaacctcggctccccccaacgaaactactgctaagccaactggactacacttcccagactgcttggagcctcttctccgcagaacctcgtcttccgcgagcttttcctggaggttctaggagggatgcccctaatgccacgacgccatttcctactacgacttccatcatgctccgcgccgctccgggggcgtgacccctcttggcccacgtcttgtcagtgacgcacttcctgtcagtgacgcacttccctctgctgggcgcgcggtggacggtctgaaagggagtgttcgggtttcgctggggcctccggctccagagcccagcatggcttcctcgcgagcctcttccacggtacagagcccgggacccagctcactctggcagggagcgctaagggggaaggggatctctgcgggaaggggccgtaaggagcgggagaaggcggtggagggctgaggaggaaggctgcgggactcagcggtgtctacacagcggaccaccgttttcctgatccctaagcgctttcgtggactgtagcttattgcacctctcccactacagccccaaagggcaagcatctcttccgactcatccagtaacgggctctgaaatagggaagtgtcttggccaaggtttatgcctttggcagatctcagaatttaatgagacctactaactcctactacctcacgtctaggaacgtttgaaatgtatacactttaatgttgtaacttgttatcctttagcaccgcgttggttatttcatctatccttagtattccccagtgataagcagtaatccgggaagcataaaacacgagattgaacacttccaacgaatgaagtaaacagatttcagagcaaacctttcataggaaaatacccgagagaacctcatagttttattaatcccatcaaccaaagtgagggactgaaacaccctcaccctaccttcactcctcaaatcaatgaagagcgtcttaagtagtgtccaatttgtcctttcaattacagagaaacaggactgtgaaactcagggtgagcttcatcctctggtgaagtccggtaaattgcaagattaaaccttagtttaatgcagatctttgatttagcaggcaaccaaaactaaagcaccgacgacttagttgctccggtcgtgaagaaaccacacatctattatggaagtttggaaagaaggagagggagcgtctggccaaaggagagtctgggattttggggaaagacggacttaagcagggatcgaagctggaaatattaatataacctctggtaagatgcaaattgtgagccatctttacctctttgtgtaatgaatacctttctaaacttaaataccacagttttataagtcaaaaaattacaatttttttttttttaaacagagtctcgctctgtcgccaggctggatgcagtggtgcgatcttggctcactgcaacctccgcctcccgggttcaagcagttctccgcttcagcctcccgagtagctgggattacaggcgcacaccaccacgcccggctaattttgtatatttagtagatatggggtttcaccatgttggtctggctggtctcaaactcctgacttgtgatccgcccgcctcgtcctcctaaagtgctgggattacaggtgtgagccactgtgccggcagaatttcaattcttaaacttgcagctataaggctgtattttgcctacccccttttatcatgcagagagcctttttcttacaatctgttatatagtttttcttctatgagtgacagtcttatcaaaaattcagtgtacatttggattcagattgattccatttgtcttctgggatctaacatagttctggcattggtttgcagctagagtggttcatgatattctccctttgaagttttgtaattattttttacccaaagtgaaatctttttgtgtgtgtgtgtgtgtgtacagggtctcactctcttgcccaggctggaatgcagtggcgtaaccttggctcactgcacctctgccttttgtgttcaagggattctcctgcctcagcctcccgattagctgagattaaggtgcccgccaccacacccagctaatttttgtatttttagtagagactgggtttcacctgttgcccaggctggtctccaactcctgacctcaaatgatccgcccacctcggcctcccaagtgctgggattacaggcgtgagccactgcacctgactgagctatctttttttattataaagtaatagtggccaagcctggtggctcacacctgtaatcccagcactttgggaggctagaagcgggagtctggcttgagcccaggaatccaagaccagcctgggcaaatagtgatacccatctctacaaaaagtagaaaattagctgggcatggtgacacgtgcctgtattcccactaattggggttctgaggtgggggttcaaggctgcagtgagtcatgactgtgccactgcctccagcctgaacaacagagcgagaccctgtctcaaaaaaaaaagttattttcttttaaagatcaatgtataaatgtgtgaagtagaaaatcctgtatttttaaaattaattgattgttatctttctgagaattttaatacagctaaaaagtatgtaattttttccataaatgaaaaacaatacgtaaattgttgtataacccccatttttcatttatataccattgaggatatcttccatgtcagtaatgagaggtctactatattttaaaaataaaattatgcatatttgtccaagaaattcagacaatgccaaagggcataaaatgaagactcctctgcagtagggacatcgtcaggtttcttattgatcctcccacacattttctaaacacatgcactgtagcctagtgctttttaaacttttaatactgtttttaaacataacgtcaccactgtacctctcatttttatcacacttgtattttggtgtgggtttcaaaactattgctagattatccagaaatcctttagttgtggaactctcattttcctggtaattatttgcagtttagtagttaatgatttgtaagtatccctatactgggtctcctttcgagaataaatagctttggctgttgttacaatatgtttctgttacatcttctggatagacagcctagttaactcatttgcaaaagatgttcttactcttacttgctggtctcagccaaagtgtgtgtttatataggcacaaagttaataaagaaacaagaggtggcttgaaccattttcttgccttttgaagctgtgtcatttaggtttagtgtttggcataatttaataaactgaaaaacagtaaactataaaatgtgtaatagacagtacttttccctcagggcatacacagactgcaattactagaaattatttctctctatttgagaagatctgctgatgttgcctgttttctttttaataggagaagtgtttgaaattgaaggcatatcagcgagcgacaggcagaagtattggctgagtttgagagaaggaagcgagcccgcagatcaatgtttccacagatgactcagaggtcaaagcttgccttagagccttgggggacccatcacactttttggagagggtcctgctgaaagaagagaaaggttgcctttctaaaatttactttttttctttattataatcacagggttctactccaaattttggttgatcattagttgaactttaatagaatgtctcaaatcatgttaacaatatcttactgtgtttatatggttagcccataatctgtcttaggccaatttttaccgcactattaatgtttcttttttgttttgttcgtttttgttttgttttgttttgttttgttttgttttgttttgtgttttgagaagagtcttgctctgtcacccaggcttgagtgcagcgtcgtgatctcggctcactgcagctccgcctcccgggttcaagcgattttcctgcctcagcctcccaagtggctgggattacagcacctgccaccacatttttcttttttgtatttttagttattttttatatttttgtattttagtagagacagggtttcaccatgttggccaggctggtcttgaactcctaacctcaaagatttacccaccttggcctcccaaagtgctgggattacaagcgtgagccttcgtgcctgcccgtttttctttatagacttggaagagggtgctaacatgctcccttgcctcccctcccagtgcgagttttgaattggataaacatttgttgttgggctttgaaaattgagacatcaatgcattccatatcaatgacatagaacaatgataaatgtttcttggattttattgaagagggtaccatcctcagataatgccctcttgttatttgcaggttgcgaagtcttagttgtggctagtcacacacaattatgaggagcccctctggtctctctgtccactgtctcatctcccttcatcatccagcttgttggaagggttttttctattactcccttgaggtccttaccctttttactcttcaacctgctgcaaactgaccaacccctaccacattaaaattgctctttgtaagatcaccaatccacctttactaagaatagccctagtatactgccagccactcctcctgaaatactccctccttgaactactccctttccttcactctcctaataacaaatcctcttattttcctcttctctcactagctaattcttctcacttaccttctaaacctctttttctcgcctgccctttacaggctgcctttttctctacttgcccttggtgatcagctctactccctggcatcattcactgtgtgttctgatgattcccaaatctctcactgcagcttaggtatccacaggtacttcaaacttgagacatctgaattgaaatatttccccacctctctcctatatcatacaattcttagttgaaaatctgcctagcctcctttataatccattagcaaaatctgtctgttctacttgcgagatacaactccagctatcttctttgctctatctttactgcttcaaatctgcactgttgtgatagccccaaacatgttgtgttaattgcttgcttaaaatccagattgtcttctcatacttggagtaaaaaactcttaccatggtctgtaaggtcttcagcttactcatgtctcccttccccaatttactagaatagccacattggtccttatggaatatctagttctttttatgtctttccacataattggtctacttttattcttctgtcttgtctttagaggctttttttcttcctttttttttctttgaaacggagtctcgctctgtcacccaggtggagtgcggtggtgcaatctcagctcactgcaacctccacctcccaggtacaagccatctcctgcctcagcctcccaagtagctgggactacaggcatgtgccaccatgcctggctatttctgtatttttagtagagacggggtttcaacacgttggccaggtgttgaacacctctcaagtgatcctctcaacacctcctcaagtgatccgcctgcctgggcctcccaaagtgcgggattacagatgtgagctaccgcgcccggcctttcttcttcattttttattaacctggtccctgtcaaacttcttattctttcgtttcagcatagatgccacctattcaaagaagccttcgtcacacctaacccctctgttctctgtcatagtatgttattttattagccttttcaagggtatacttttttattattgtttagtttgttttttccaccagcaaagtctatcttatcattattatgttccttaaatgaatcctttgagtcactactgctactatctgaatttcagccacggttgtgactcagagcgtcactacaacagtactgtctgatttccctgccattattttcccttttaatccattctttgtactgtttcagggatctttctcatctgtaaatcctccgagcgtggcattagcaattctttgtgacctggctcctccttgcatttgcagccctattctcaccagtcctcttctatgttctacgctccagccatattgaattatttgtgactgcaagtcaacatgtttttcttacctccaggccttatttgtttaaccctctgcctgacattttctattcttgacccccttgacctgattaactgaggactcaatttacatattacctttttttatgaagccttccctgatcctctaagcttagttagatgcccgttacaaagtcccctctagcctctgtgcttactgctatagtgataggtaatataatggattatagtttgccagtactcttgttgtttccccaggactaagctacttgaaatcaagaactgattcctagtcatcactgttagttagcacctgagtcagtatccagtacattgtggcactgagtgaaagttggcagtctcacagaccaagtggtagcagtgtaggggctcattgactctaaactgtatagagtaattgttatagttgaattttggaaatttccaaatagagaagactgagtgggagaaaccacactggagtttagccatccccacttgactcttaaagaaggttcctggagggccgggtatagtggtcatgcccgtaatcccagcactttgggaggctgaggcaggaggatcacttgagcccagagttcaagacttgcctgggcaacatagcaagcccttctctctacagaaaaatttaaaaatagccagttgtagcagtgtacatgtagtcccagccactcgggaggctggagtgggaggatgcttgagctcaggaggttgaggctgcagtgacccatgatcatgccactgcactccacccgggcaacaacaagacctcatctcttaaaaagaaaaaaaaaaaggttgctaggtggtttgacagtgagagaatagtaaaggcttgctcccatcttaggggaactttaataacagtgtttaaactgtgttaaagtgtactttaaaaacagtattatctcaaccatgtttaaattctgattttttttttttttttaacaggttaagaaatatcctctcagttgtcggtactgatgccttaaaaagaccaaaaaggatgatgagaagtctaaaaagtccaaagaagaggtagaacatgttttaacttcacagtataaacatgaaggaaatgaggggataggtctctcgttttctgcttcaatggtttgttttgctgagatgttgggggaaatgtttttgaaggctctaccattcaagagagttgctggcagtagttttggttcctttgtaagtatgaatggagctaagtgagttttcagtcaggaaagaatcatggcattcctggtataaccatgtagttacatatcatagaaaaaattcagtagaaagtcctctgcctgatttcatcctattaccgaatgaattcaccttcctctgggcagttaaaatggagaaatgacagttataagaggagtagaatgcttcagatttgactttctgctcttaatttgcctttcagtatcagcaaacctggtatcatgaaggaccaaatgcttgaaggtggcaagactatggattgctaattattcgttgcccaggtaaagagagcctcagtagaagaaagaagcatattttttgtgtgtgtttcctctcaggaactgagtgctggaaatgactatggttgttaaatgaaattgaggggtagagtagggatacatgtgggtccttgttacaaccctgttgctcctggtgatggtgtttctgtgtcgcagggcaatgaaacgcttgaagaggcccgactccataaggagattcctgagacaacaaggacctcccagatgcaagagtgcacaagtctctccgggtaagatgctcccagcaattgtcccacatcttaaaggttcttatgtttatttgatttttctactttggctcacctctgggaaggtagaggcaactagagtgttcctccctgcttaagttgagctgctgtgacatggaaggagccatcagttaatgtggcagagcttactgtgctttgtattcagcagaggcctatggttctattctttatttctccccgtaatatgtcagagtttctctggggttttctgtttatatttagctgactcagaagttgtgtcctaagactgtagaaaacatctgggcacagtggctcagtcctgtaatcccagcattttggaggcagaggcaggcggatgacttgagcctcaggagtttgagaccagcctggtcaacaggtgaaaccctgtctctactaaaaatacaaaaatttgccaggtgtgatagcatgtgccttaatcccaggtacttgggaggctgagacgggaggattgcttgaacccgggaggcggaggtgcagtgagccaagatcacgccactacactccaccctgggcaacacagcaagactctgttcaaaaaaaaaaaaaaaaaaagactatagaaaacagcatgctggagtttcatataacttatttatcaatgtatgtgtcttctaacagcagcaacaaaaccatagaagaatcttgggatggttaaaactgaaaagctgctttgttgttctttttatggtggaaaagcaaaggagctctagattaacctattaatgatcaccgtgtgtgtattttttttctttttaagtctttgaatatttttgcagtcagattggggatgatcggcctatctcctactgtcactttagtcccaattcaagatgctggccacagcttgttggtaagttccattttacaatgacattttttcctaaaggggaacaggctcaggaagaaaattagcatttgcgttagacgtctatttctacgtcctcttctctgcttctcatgatcacaccaaactacagatgtcagtcagtgctctacctgttgttaatacaatgtagccttggtttagccgttctcgctcttcaccagtgaccccagagatccttacacaaagcactctgtcacattcttgacactagtattttggaacaggtcctgtagtggtttatagaccaactagtatccataactcagtctggcttttctttttcagttatgtgactcgctaagatacttaatttctgtaagcttcagtgttcttacctgtaaagtgggatgaggagtgtttgcaaggcattttgccttgacagtgcctggtatgtagtaaggactcgttaaacttaattattggtttatctttgttttattttcttatcaccacatatgcagaaaactcaggtgtggtaactttgttgttttgtttgagtttggttgtgtttttctgtgggacatggctattaatgagaaaggaaacttagattgaatacacaggagctacttgactaggctgacctttaatgggttcaggagaaagccaaggttctgcacaaatgagtccacctctccaagcctcattccttcactataaagtttgatcgttcctgccgtacctgcttcacaggtctgttagaaagacatccgagataatagatataaaagtaatttgttgaaaaatttccaaaataagaagtctcaaaaagtttaaggccagccagccatggtggctcacacttgtaatcccagcactttggaagccacggcaggaggatcacttgagcccaggagtttgagaccaggctgggcaacaatagtagaccctgtctctacaaattttttttttttttttttttttttttttttttttttttttttttttttttttgagacggagtgtcacactttcggccaggctggagtgcagtggcgcgattcggctcactgcaagctccacctcctgggttcacgccattctcctacctcagcctcccagtagctgggactacaggcacccgccaccgcacccagctaattttttgtatttttagtaggacagggtttcaccgtgttagccaggatgggctcgatctcctgaccttgtgatctgcccccttggcctcccaaagtgctgggattacaggtgtgagccacagcgcctggcccaaaaaattttaaaaatttatttaattttttaaaacgttagccaggtgtggtggcatgcgcctgttgtcccagctactcaggaggctgggtgatagaattgcttgagcctgggaggttgaggctgagtgaactgtgatcacactactgcactccagcctaggtgacagagtgacactgtttctcaaaaaaaaatttaaatactttgtaatcagcaaaatactattcatatttaaggacagtatactattaatattcgtattattggatagtttaatttgccccaccttccctcacaagtggaccaaaagttaaggagaatggctactggtgtagtgttaattatagtccagtaaaagcctcggttgcgtgtgggctggaggtagctttttcttctataacccttctaactataaggctttatttttctgtcagccattgtaaagtttattgggggtgagaagagattgtcctttagtaaattaccaaggtaccttttccttcccagaccaaccctggctgagatgctttcctttgtattgataggagtgggctttgcaagctctggtctgttcctgattgcaacctccttcacactctcgaggtaagttagagtcttatccaaatctcggtctttttcccagtgtgaactcagttagccttaaactctgcttgacactcagaccccatacacacagcattaatccttgatttgattgacttggttttctctggctgcaagactggactatcacaacttcctacacatccactttctctcatgtgcagtcacactctggcattttataatctctaaaccaaaaaccaaaatgggttttttgtgttttgcttttttaaaaatgtaatttaaatattagcttaaattaaaatagtcatgttttaatagttgaatagtcacttgaatactctgtatgtccacatgttccctagtaataacatgggttataaagaggcaggaaccttttaacttgcatctcttacactcctttaggcataacacaaatgtaggagcaattgtattccatcccaaatccactgtctccttggaccaaaagatgtcaacctggcctcttgtgcggctgatggctctgtgaagctttggagtctcgcaggtgaatatcactgttctgtggcccatactgccatcactaaagtagatgtttgattgttggtccccaggacctcagtaaaaatctggcatttaggccatgcgcagtggctcacacctaaggctgaggcaggagaattgcttaaacccgggaaatggaggttgtggtgagccgagatgcacactgcactccagcttgggtgacagagcaagactccgtcttgaaagaacaaaaaaaaaatctggcatttaacccccaagatggtttaagagtcaaggtaacctagtgtgaaaataagtaagtggaagatttcattcttaggccttttcttactaaaggagttatgtccgtttttcttacctgttaactttggatcttgatttttgtctatagcctagtgaccactatttcctgctccatttattccagaaagatccagcctacctcctacatgataaattaacaatgaactaatataatattcttggcagttcgttggttcttagcaaacagccacaggggagaggaaaggaggttctgtctagcagtattaccacggagatgtctcctcgcaatagcatcatcctttactagaatgtattttccaactacaacagtttttaaaaatgtgtttatgtgattgttttccaaaaaaaaaaaacttcggaagcaccctgttggccaaaaggcatctgaatttaattgtttgttttctttctttgggaaaacacatgaaggtttttacttgagaatttttatgagagctattaatgtcttcactcctcaccagacagggtctcacttaggagcgcagtgagttttaattgctttggtaatacttagcaatgtttattccccttgggctttggcttgttctgtgtatgccattgacaaagttccctttttaattgcgttccttagagttcatgtttatttccttttgcgatgttcagatcttttggtggttgctgggtagcagaatttaatggccaccaaaaggagataagcctcatctctatttaggagttcctttttcatttggatcttggaacaggcctaaattgaaaaaggtttatctgtaatccacttgtaccaaaactatgtgatttctgtgtccttattctcttccaaagcatgttttctttctagaatccaggtactcctttggtgcagaatgactttttgcttattgggccaaagtagtttacaagtgtagttacaatttagcctctcgtgttgacagaatgggtatgtctgcacagaaggtaagcagttttgtgactatttatatgtctataaattgtttatatgtttggttcctttccagtgatgaaccagtggcagatattgaaggccaacagtgcgtgtggcgcgggtaatgtggcatccttcaggacgtttcctgggcaccacctgtgagccatcctgttattgttttatccatataggcctgtagcatcttcttaaccctttatgctatctgccaggtaaatttttagagcagagatcttcaggtaggattttcttgggctgcgggaattggaatcagaggagaatgtttaatatagtgagagctaagtatatttgcctttttttttttttgaggtggagtctcactctgtcacccaggctggagtgcagtggcgcgatctggctcactgcaaccgccgtctcccgggttcaagcaattctcctgcctcgacctcccgagagctgggactacaggcgcgtgccaccatgcccagctaatttttttatttttagtagagaagggtttcaccatgttggccaggctggtcttaaactcctgacctcaggtgatcttcccgctcagcctcccaaagtgctgggattatagataacaggtaacgcgcccagccatatttgctttaaattacaattaatctgaaatttcagagttacaaattaccagaaaacaaggattttactcttgtccaatgctacaggtatataagtctcccttcctggttctgtaagttcagggagctagaatctgttagagaacttttccattaagttataatttacatacaatggaatggattattttaagtgtacaatgctgtcagtctttacaaacgcgtaccattcctgtgatcgacactctgtcaatatagagaatagtccatcaccccagaaaggtccctcatgcccttttccagcaactcccccttctaaagcaactgctgatctgacttctatcaccacaaattaattatgttattcatactgtgaattcatttgtggcaggcttctttcagcataacattgttaagagtcttcatgttgttgcatgtatcagtaattcctttttattgctgggggttattcatttttatactgtgccatagtttatccattctcctgttgatggacacttgggctgtttccaggtctggccagtcagaatgaagctgctataaatattcttgtaccaggctttttgtggacatgagtcaattgctgggtcatagggtagaggtatgagatgtatatttaactttttctaaactcccaccagttttccaaagcggttacaccattttacattcccggagttctggttacttcacatcctgttaacatttggtgttgtcagtcttaccattttgcccaatctagcaggtgtgtagtatctcccgtgattttcattcttattaccctgatcattattgctcttgagtgctctgtcaatgctttgcctggttttttaaattgtgtttgtctcttttgtctttatttccatgtgcatgtcagttataccaccttgtattgaagagactttcctttctctgttggaattgtttcagtcccttgttgaaaatcatctgaccatatatgtgtggttatttctgtacttcctattctctccattgatctatttgtgtatgagtgatttttgtatccccaacatccaatttagggcctataaatgtataaatgcttgatgaatgaaagaatataacagtggaggaagaaagaaggtaaagagtctttgctgggccattcttggggaatcctgttattaaaatagccactaggttgggatggtggctcacacctataatcccagcactttggaagaccacggtgggtggatcacctggctcaggagttcgagaccagcctggccaacatagtgaagccccatctctatgaaaaataaaaaattagctgggcatggtggcgcacacctgtagtcccagctactcagaaggctgaggaggagaatggcttgaacccgggaggtggaggttgcagtgagccaagattgcgccactgtctccaggctgggcaacagagtgagactctgtctcaaaagaagaaaaaaaaaaaagccctgaggtttacagcgattccatggttttcagctagcacctaaggcagataagcttagttgtgagtcattgtttatgtcagaaaggagcttcctgttaatatggttatatgaatagtttcaaagcattaataacttaagctataatggcttagaatactttatgtgttgtagaaactgaaaaatatcagctggttgattgttagtgtgatttggttttagctatgaccgttcatggcgctatgggatttggaggctcaagaggagatcctgcatcaggaaggccatagcatgggtgtgatgacattgccttccatcaagatggctctttggctggcactgggtaaggcttctcccattagtcaggggcagttcagtactctcacctcttacctatacctgcttccacagagaactgattcaaagtgttcatttctaaattattttctcaggggactggatgcatttggtcgagttgggacctacgcacaggacgttgtatcatgttcttagaaggccacctgaaagaaatctatgaataaatttctcccccaatgggtaaaataaacacactgaatgaggggcgaaaaagggtctgggtcagtaagtactctatttctaacttcaatactgcatccaatccacagctatcacttgcaaccggcagtggtgacaacacctgcaaagtgtgggacctccgacagcggcgttgctctacaccatccctgctcatcagaacttagtgactggtgtcaagtttgagcgtaagcttcctcctattttacgtctaaatgacacagacaaacagtattgtgttcccgtggaatgcagccaggctttagcttaactgagcagtaaaacaggagagaaattgacctactggtaaaggacaaattataatttccttccctctgccatacccttagatctgtgggaaagcacgcttctcttgcaggaagtaaagcagactttcatgagtgctttgcttcattctttcctccatggatgtctgagcactgagtccttaatattattctgaatagattctcggtcagggaatgagccaaagaccttactgttatttgttcccttaagtctgtagaaacaagtttttttaaaaatagtagtttttgcagacttttgtgcttttgtcttctcttttgaatacttgaattcctcaagcaatccccttctcttctcctgtagctatccatgggaacttcttgcttactggtgcctatgatacacagccaagatctggacgcacccaggctggtccccgctgaagactctggctggccacaaggcaaagtgatgggcctagatatttcttccgatgggcagctcatagccacttgctcaatgacaggaccttcaagctgtggatggctgaatagatgacaatgggaaaaggacttgaactcaagctctctctaaggagctgttttcctcaaacgagaagaattgaagtgtttagttcatcatgttttctgccaattaccatgcatagaccctcagtagaattggatttccatgtcacccccactccaggaaggcagcccaatccctaggtgatggggaacccctctcacggttgaaatttattacctttttacgccctgccacgaactgtgtagacattgtttttattaatctttgtttggccgggcgtggtggctcacgcctgtaatcctagcactttgggaggccgaggtggtagatcgcttgagctcaggagttcaagacgagcctgggcaacatggcaaatgccgtcttgcaaaaaaatactaaaattagctggtcgcggtggcttctgcctgtgattccggctactgggaggctgaggtgggagggattgcttaagcctgggaggcagaggttgcagtgagccgaattgcgccattgcactctagcctgtgtgacagagcaagaccctgtctcaaaaaaaaaaaaatttgttcgaatgccttatagccttcctcacagcacccaggattgtgactgactctgctttttaattcttgaaacttggctttccataacatggtacatgcttcaggactacatatgcccagagagcaaggtggctgaactatagtctggaagccctcaggtaaagaggcacatctaccactcattggttaaacaatgcatcatagcgagcacttttcctttccctggagaatggatgtgaagcagtagaccgcagccacgccgatggttatacagtgaagaagacttcacctctcctattgagtttgcttggaatgctgacagcatcaggcaactctgaactgaacatttgcttgtcagaaaatatctttttttttactttgaagtttggcaaccttcatgttaccccaaacaaaaccattgtgtcaggagtcaaacaaatgtttagaaagcaaacatgacgtctctatttacaacctcctttctcttggctgtttaaaggatgtacttcgtgtattaaagggtacttttgttgaagtaacgaaaaaaccctaatgggtgttcctaaacctaaaccttttctttattcacatttgctacggtaaaatcctgttacaaaactaccctataaagaattattttctatagtaagcattttctgaatcctagccattggtccatagaggtctcttttttttggtttgggaataatggatgatctcaaatatggattactctgatttatgtctccttagcaccttgttaaaattttttttaaaatagaaggctgtttgcattttgggccagactgccagtaagccaggctggactcaattacaattcttaacttgtctgtcatgcacctcttttcacctcaactatacgcctctgaactctcaaattacacagtaaattcaaaaaaatatataggaatttggaagaaaaaaggttgtctacagaggagagttattaaagaaaggcttcttggccgggcacggtggccacgtatgtaatcgcttgaacctgggaggcggaggttgcagtgagccaagatcacaccgtgtactacagcctgggcaacagagcaagactccatctcaaaaaaacttaatttgctgttcagagaggttgacaatggctttggtcagctctattctgtggaccctgaatgtgtgatattagccaaacaactggtttgttttgtttcattttgagacagggtctcgctttgtcgccgaattggagtgcagtagtgcgaacacagctcaccacagccttgacttcctgtgctcaaatgttctcctgcctcatcccctcatcctgtgtaactgggatcacaggaggatgccaccatgctagctaatttttttgattttttggtagagacacgatttcactttgttgcccaggccggttcaaatttctgggctcatgcaatcctgccttggcctcccaaaatgctgggattacaggctgagtcactgtgcctgacctaaacatactgtttttaatctgatttcaattataaccaaaagttgcatttcctatgtagttgttcagcttctgaattctcaggactaccctctgttgctacttcactattgttcaggtattaatgaattctatttcatagattatgatgaaaagaacttttttcttctttgtagtatgtgtaaaataatgaagaacactggtgaattagcatgcaatggatataatgtgctaacaaagatttttagtttctcaggtttaaattttgctattagttccttcgacttgtttttctttgttttttggttggtccaagaggtagcagttgggtgaaaactttcatccaagcctttgacagaacaaataccttgtgggctatttcttcacaggaattaaacatcattgtaagaaagtggttaagaagcacaaagccaggtgtggcatttgtgaaaatgcaagataaacagccaccgtttcacagaacacttagtccctacctagatggtataccaggacattcagataccttgtttaatccccacaatcttttgagtttattattccctttttatgacaaaacaggctccaaaaacacttgctcaagtttagccagctagcaagtgatggagcttaatttgaactgtcatctgaccattgatgaccttatgaaggtttcacaggttccccacacggccagacaaaaggaccggtacagccagcatggcctgtttcctgtacgaagtctgagcttttaaggactctccactttgtataatgccccccacccttttttttttttttttttttaaagatgggatctcagccgggcgcagtggctcacgcctgtaatcccaacactttggtcagggtttgagaccagcctggccaacatggtgaaaccccatctctactaaatataccagaaatagttgggcgtagtggcaggcacctgtaatcctagctactcgggaggctgagacaggagatcgcttgaacccgggagggggaggttgcacttagccgggatcgtgccgttgcactccagctgggtgacaagagtgaaactccatctcaaaaaaagatgagatgaactcctaggttcaatgatcatcctgcttcagcctcctgagtaactgagatacaggcacgggccaccgtgcccacttgtatactgcacttttgacaagtcacttccatctctgagctcatgcccatgttaaagaactctcgcacatcctgaacggatgaggagcctattgtcaacaagatagctatttgcattttggttagatgatctttcatcctgtggaactggcaacataagcattgcagcaggtgttgtatcccagacctctgagccctaaatgtcagcagtgcaattcaccccctccactgactaaaaagatgctcccatgcatttccagatacattcgaagaggatgggactgccccaagctaagctaccgaatatgaaaacaggagacaccatgatgttcaggcagccctccctctccatcgcgggttctaggattcaaccaaccataggtcgaaaatacactactgaccatatacagacttttttcttgttattatcccctacacaatacagtatagcaacttcacatcgcatttatatgtattaggtattgtaagtaatcaacagatgaattaaagtatagaggaggatgtgtgtagttatatgcaaacactacatcattttatatcaggggcttgagcatcctcggattcaggttcttcaggaggtcctgggaccatttccccctgaatatcaagggatgactgtatatcctccctatcggaaaaaccctcaaacttacatcttgtcttatttgggtggtgtatcaaccactcaaggatctaagttcttttttgactgaaaagactctaccacctactagctgggtggcctgaacaaggtggagcctcagttccatctgtaaactggggattaagcttgctgaggttagtggcctagtgcagaggccagtgttccttcctgggcttttctcagtttctcctgtcctgagtgccctcgcctgtccgcttagctcagaggacatggtgagattattgcctaacttatctgcacaagtttaaggagcaacactgtgtaaagaaatgaagtcaatggggaaaggtggagtccagctttagtgtaattatctttgatggcacaaatggagagatagttgctagtcccctaaggaatatgtaggcagttttgcaactttgtaatggagactttttcttcatattggagcttaaccgtttggtttttctaaatgtgaaatatacgtattggatattttggagtattttgtaattaaaacacctggggggaatctaacattatttggagcaaatcaaccaactcaaattctgcctctgaacgctttttctgcttatcaaaaaacccccaaaacctcaaaatgttatccttcatatttgtgatggtatcttttgtgtgtgatggtatcgtttttttttttttcctgagacgagtttcactctgctgcccaggctggagtgcagtggcgcagtcttggctcactgcaaccctgtctcctgggttcaagcaattcttctgcctcagcctcctcagtagctgggattacagcacgcgtcaccacgcccagctaatctttgctggggattacaggcgtgagccaccgcgccaggctgtgatggtatcttaaccactttaaaattgtttcagagccttgagccaccaggcaggttaaaactggggaaacagaaatcagagttttagacactgcaaggttgcaacttaccagcaacagcctgagcccccaaattctgtctgattggttcctggattctatcatgtaaagtaaagctagggttcccccgctgcctcccatggcctgggatgggagttaaacttttgcctggtccagcgtttccatcttcttgaagctggaattatggagcttgggggaagggaatcagactctaccccatgtccattctaatcagggcctctgtatctgccgggaggaagaaagacctttcctccaaatcccagacttcccctagtccactgatctaacatcgttcacctttagattcacctaacactccatgaactacatgctggcaagaggtggtctcataaaagcagcagctgatgagcacaccccttcctgctagtgagggccatctgccacccctggataatcctactctctcttccctcagttctggcactcagcaccagcccagtaaatggtcgtggaatgaataaggaatgaattaatgaatacagaacacttttactgcaaccagtggcaagacattcaaagagaacaaacacacatttacccacagaattgaagctcacttcccaattttttttttttttttgcaacccatagtaaaagagcaactcaaaaaaatatgcactgattttgaagcagctccaggagaaatgcaacttgctatttgggctagtcaggttcctggataccactgtgcagcccttggcacaacttgctgtggagctctgtggtcagaaccgcttctctgcccttccatgacgcccactcacacccggaggtcgctccacatctcccagtccttcaagcttttcgtttttttgttttttttaaaattgttcccagaagcaaacacatggcctgaacaatccctggattgtaaataaacaacactacaaaggaagacaataccaaatgaggctccgtagtcaccatacccagcgcaaccgaaaaaggtttggtttcttgtctgggaacagcactcaccccacaccccaaaggactgcttggtccaaaagatggagaatatgagcaacagagtgacactgaggatgacggcctcaggtaggcaaagatgcggaactgagggttgcggaaacactccctcaaagagtggtggtggggatgaggatgggcgtagacacggtggcagaggccgtgtctgggggcggcccagtcggcccccaggctgggggccaaggtccagcgtgtagacttgaggctggcgcaggaagtagggctcttgggctggtccttgaggcacagctgatggccttccaggatgacatggtggggcccaggcggagcagggcgagcatggcagtgtccgtgggcaagtcagtgacaggctgccctaggccagcactgtgggctggcgacagagtgggcacagcaggcggcgccgggctggagtccaaggctgaggtgggccagacattccacgcagaaggagtggcagcaatccagcattttggggtatggaacgtgttgttgaaggggttccagcagacggggcactcagcctcaagctccggccctgctgctcagccatcctcagccacacacggggaggcttcgcgggagacgtcctgcagaagggggaaaggagcaaaggaacagccatgaagtcccatccttgtgcttggcctgggcaaagtgttctgtgggtgttgaaaggtgtaatcaccacgttttacttaggttcaaaaggttttgttcttgatcaccagttcctaacccatcgagttgagtcaaatgctcctacagcccccctctgtcaaggtgaaggcctgggccacccctaccaagagcccccaagagagccggcttggagcagatgtcgccctgggctttggagctggacgcaaatgctccttatggtcattgctgtgcccttggctgccctgaatccagggagctgggggtaagctgcagtctgcgggtttgctacaggacaaatgtttccttccctgctacctcaaatccctgactagcgcagagatggttttgtgaattccctggtctgtccctcctatggggacaaatgccagccctctttccctctccccttgagctagagggccaaccctccacatcctactcacccagtccttggcctggcaggaagcccctggaaaggcctttctccttacctggaagccttgcagaagcttccctgcccagtccccagatcagcccttccagagcctcttccccttccagagcctcttccccttccaggcctcttccccatcctctgcctaccctggctcctcctccctccctttgtcctgggaaacttcagggcacgcacctgggcttctgtgggctccagggtggtcaggcagactactctggaggcctgaggctccagttgctccctcccctgaatcggcaaagctttgggagactgccttctgccaccaacccaggggcctgtctccatggcagcatgcacgcagcacctggggctgccagtggcccagtcggcagcctcttgagcacacctgcttggagccaaggccagagagcttccggggggtggggtggggaggaagatgggggacctgagttccccccagggcatggcaactattgaacctggaagccaagcacctgtgagattgtgggcagtcccttcaacacctggagtcctggtctggaaaggtagggtggcaatttcgtctttgtagatgtgaagagggtaactgagcttctgggcttcctctctctggggccctcatttctcttcgaaagtggctggaacctcctcttgcacaaaggggctgcctgctcagcactttggttgctgtgaaagtcacctacttcgagcttaagagctccgactatcagattcagtccagtcacccgctgatcttttaatgtgcctagtaactgcaatcagcgtgtacaaacctcgctgccttctgctttgttcttagcacacagtggtcagccttctgagatcttagagctggccatcccaccaaccttagggagttaaagcgggagttggagggaggcgcactccagcccagcttctccgtttcaaccagaaatacttggctttctctgtttctcatatgggtcattcgaataatttgaagagttgatctgctggggaaagaaaaagtttaaaaaccaattctccatctgaactactcactttgcagatgagagacaagagtgactcacccaaagtcacccagctagttaatggtgacatgggacccatgtcttcagatcatggttttcgtaaagacagaaggctgcatccatgccgtccccctactcagtgcgtgtactagctagataataagtgtttgcatgtgatcaggaatccttcacggccagaagactcaggtagaaatccaggaactgtggaagaggggatctgggggaagggagtctccctagagccctgatatgacatcatctaccccgactgagccgatgtctgaagcaaaacctgcttatacttcggacctgtggcttcctggttttcttctagacctctggcactgctccaaacagggaagaggaaatgaagatatgcagagggagatggagccctaagcgaaactagggtagtttagcaggctctgcaccagtgctttattctgcagtccattcatccactcggacattattgagtgctactctagcccaggtgctgtgcaaggtattatggtgaacaaaatagacattgtctttgactcatgacatttagagtgtagtgaggcaaaaagacatttaatgaataatgggcaataaaaaatacacaattttaatggttgttaataaagggcaaaaaggaaaatgggcttcgggtgctggtggctgctcccaatgagaccaccagagaaggtttctgcaaagagatgacagaagagtgagaccaaagtatataggaatccagccacgcacagtggaggaagagcgttgcaggcccgggaacagcatgtgtggccccgaggtgagaaaagctcttccaatttgagaaagtgaaagagcccagggtgatcaaggtgtggtgaccggagtaggcaaggtgggagggtatagtactcggacctgtgaactcaggagctcatctggattttattccaggggtgagcggtagggtaagtacctgatcctatttccatttttaaaacaccattctagctgcagagcagaggacaggctagagggataagatcgggaagggaacacccgttcgggctgcagcagtgtggctcaggcgttgatggtggtgcaggttaggcagtggcagaggagataaaaggggatgggataagtgatactttggggacagaatcaaagccacttcccaagaagcagtggagttctagggatccagtttagtttctgtcaaggttcatgatgccagatccatggctatttagggctgtgattccagtgaattgcttgacctctctgtgcctctatttctccttgtgcaaaggaagccaaaactagtaagcttttagttagagcccagcacccagtaaagaccacaaagcaatgcatgacctaaaatgggactatgttctcagaaacacatcgttgtatgaacagcacagagagtatttacacaacctagatggtagagcctgctacatgcctaggctatacggtctagcctgttgctcctaggtacaaacccatacagcttattatgttctgaacactgtaggcaattgtaacacaatgatattgcgtgtgtctttcaacataaacttagaaaaggcaaggtaaatatatggtattataatttaggtggccaccatcacatatgtaattcactgttgatcaaaacattgttatggatatagaggcagttgaaattattaatgcaaatggatttgagagaaaggaagggtcaaggttgattcaaagccgtgacaaagtcctctgcatcaagctttgagaagcccctgaatcccagagtggttagaagcagatctttaatacttaccagaggccgtaaactgtatgtaaccttgactcacatttcccccactgggaatcgattccacggaaaccatcaaggacttctgcaaagatgtggtaaagagatgcccatccaggcgctggtttaacggtgacgtatggagaactacgtcatctccagtaataggacattgattaagtagattctgctccatccataggaagagatattatgagcctttaatatgatgtggtaaaactattaatatggatatatacctaggatataatgtcttaagcgaaaaagaaccagcaacaaaaccatattaccatataatccaatttccaaaagttgtgtgcaatggaaaaaatgtctggagagataaacaaccagatattagcagtggttatcctgggggcaagattataagttttttttttttttttaattctcttacctgaaaattctaatttactccatccagtaagcttgtattactacacgtcaagatctcctgtttccccccaaacagacctaccttctctgaagttccatggccagaactgtaaaaggctgtccaagaggaggagcatcattattgcctggatctttatctgtgctgctctcccagggatccactgctgtttaggatcagctggggagagattctggccatgtatcacctccaccccaagccaggacatctagctacagtaaatcctaaacaccgccccaaagtcatctccttggtctatgaacaagtcacgccaaatatcaattgtccccagcatcactccattgttttcaaccaagaactggcatttcatagcacttcacagtttacaaagggccctggcccttgctaagatctaagtgtggtgatcatctagataggttactagccttttgggattttttgttgttgtttgcagaaagccatttatactctaaaaccaccctgtgagagaggctgaatggggagtagaaaggtgccggctttgaaccagatttggaacaatttgtcttggacaaatggcttaacctctctgaacttcattttctctgtaaaaaaggctaatcatcccactcctacaaggttgctctggggaaggaatagtcatacggtgcccagtagaatacggaaggcgctcaatacagagttagcatgattatttttaacccattttctagatggggaagccaaggctcagaagggtgaggcaacttgccgaagtctcccagctaaagagtggctgagtttgaaagatgaacccagtagcctgccctcccaggccaagttcacctgtcgcgcgctgcacggctgctgcctctctggactctggagccctgtgaccgtccctccgcgaccctctctgtctccttacctgctccctcggagccgcctcctccgcctcgttcgtgcagccctgcacgcatgtgctttgttttctgacttcccaggcccgatttccagtagcgtgggtgggtcttatttgcataggtcttagcagcgtttggccagctctcgctgttcaggttttcttcttccttctggtgactttggacctcctgtacaccctggaagctttggtgctttgtctttctcctgtgagtcactctggctttttctctgaggggatcaagtgcgctatccttgcaggcctctgttctgggtccgattgatctcctgccatcccctcggattccacgtcctctgtgcgctgacctgcctcgactcctggcttctgccgagatggatccttccctagctgagtccctgtaaccaaaatacagatagctcttgcaaaatactgacaaaagcggccataatacagcagaaaaatagtcgggagacggttgagcgtctgcctgaagagccagggttccaagcaaggcacacttctaggtcagagttcagccctcactgagaatccaaactccgtttactaccgatggagacttgagcaaattaattaacttctgccagcctcagtttcctcacctaaaatggccataataacctacctacttgatctgtagattaaatgaggtaatacgtgtcggatcgcgtaataacacagggcctggcagacagtaactcgctaaatgttaaccagaactatattgttataaccggtctgttcacgtggcccatcttttgttcccgctcaaattcttttttacctatggtcctcttttctttctctctctctttctttctttttttttttctttctttttttttttttttttaagacgtagttttgctctgtcgcccaggctagagtgcagtggggcgtactggctcactgtaacccccacctccctggttccagcaattctcctgccacggcctccgagtaactgggactacaggtgcgcgctaccatgcccggctaatttttacattcttagtaagacaggatttcgccttgttggccaggctggtctcaaactcctgacctcaggtgatccactgcctcgacctcccaaagtgctgagattacaggcatgagccaccgcgcctggcccctttttctttactgacattttcagccatacttgagaaataaacaagtaaataaatgtatctgttggtgatgtaatcaaatgccctagtccccgcattttgtgtttttttacattaattttttgtattgatttattttgagacagagtctcactctatcatccaggctggggtgcggtggccgatcacagctcactgcagcctcaacctcctggggtcaagcagtcttcccacctccgcccctgagtacctaggactacaggtgcatgccaccgtggctggctaatttttgtatttctttagagatggggtttctccaggttgcctaggctggtctcaaactcctgggctccagcaatcacttgccaaaagtgctaagattacacttgagccaccgtgcccacatttgatttttaaaaggtaatatatttacatggttgagcatgtgaatggtttgatttcacagtgaaaactgtccttcgcagccacctagtttccctggaaatcaaagtattatactatcagtttgttgtgtactttccaaagatgttttatacatacacaaacagcatgtccatggcaaaacatctatgtatcctttacctcctttttacacaaatgtgcatattatgtacactgttctgcatttttctttttcatttgatgatgtatttgagatatcattctgtattagtacataaagaccttcttcgtttttggcccagcgctgtgactcacacctgtaatcccagcactttgggaggccaaggcggtggatcacttgaggtcaggagttcaagaccagcctggccaacatggtgaaaccccgtcctactaaaaatacaaaaattagccggcgtcatggtgcacacctgtagtcccagctactcggaggctgaggcaggagaatcgcttgaacctgggaggcagaggttgcagtgagctgagatgtaccactgcactccagcctgggcgacagagcaaaaaaaaaaaaagaagaccttcttcgttttttaatggttgtatcagatttcattgaatggctgtaccataaatcacttcaccaacccctattgatctaaccccctcattataaatatataaatattgaatgaaagaataatgcaaaatgctgattttaagttagcctagaattgtgtgaaaataaaactgtggactttgggagttttagatctctaaagaaaatgtctaagtaattctcctctttctgagctggagacgagtatatgatcaccgatggcctcaaagttcctctcagctctggaattccctgcttttcggttcactactggttaactgaggttactggggattcgagacactgatttagtccaaagaaccggtttgtatttgagagtttggaagtcacgctttctggcttggcaacataagaaaacataagaagttcatctactttgacctaatcatgtaattccccagaagcatcaaaaagatatatttggttgagtgaggatattcattgcagttttattttaatcacaaatgattgaaaacactcaaaaccccatcaattaggtgaaaaactacataatcatttaaaatgatatagaaagatttcattgacttttaaaaatggtcacagtatactgtaaatggagggggaaagcagcttaaaatggtgcatgttggccggatacggtggcttacgcctgtaatcccagcactttgggaggcgaggcaggcggatcacaaggtcaggagtttgagaccagcctggccaatatgttgaaacccgtctctactaaaaaatacaaaaaaaaaaaaaacttagctgggcgtggtggcaggtgccgtaatcccagctacttgggaggctaaggaggcaggagaatcgcttgaacctgggaggcgaggttgcagtgagccgagattgcaccactgcattccagcccaggcaacagagagagaatcatctcaaaaaaaacacaaacaaacaaaccaaaaccaaaacaaaacaaaacaaaaaaacgtgcatgttggctgggcacatgcctataatcccagcactttgggaggccgaggttggagattgcttgagcccaggagttcaagactagcgaccccattgctacaaaaaataaaaaaataaaaattagctgggcgtggtggcacatgcctgttgtctcagatactcagaaggctgaaggggaggatcacttgagcccagaaagtcaaggctgcagtgagcccagattgcaccactgcctctagcctgggcaacagagcaaagaccctgtgaaagatagaaaagaaaaaaagaaagaaagaagaaaagagagggagaaggaaggaaggaaagaagaaggaaggaagggagggagggggaagaaaggaagggagggaaggaggaaggaaggaagggagggagggagggaggggaagaaaagaaaagaaaaggaaagaaagagagaatgtagcataagccagattttgtaaagcatatttatgtataaagactgcaagaccatgaggcaaaatgtcacaattttatctctgggtgtggccactcatgttttcgctttcttcttgcttacattttccaagttctcaaatatgtatacttttgtagtaagaaagttcacttagaaagtaagttaagtctgagttttctgcaaccaggtatccagaacttaaaaagataagcaggtagggcaggtaagaagtcagtcatgacatttaagcattgaaataaaaataaaataagtcatagccaggcatggcctgtaatcccagcacttgggaggccgaggcaggcagatcacttgaggtcaggagttcgaggccagcctggccaaatggtgaaaccccgtctctactaaaaatacagaaattagccaggcatggtggtgggtgctgtaatcccagctactctgcaggctgaggcaggagaatcacttgaacctaggaggcggagttgcagtgggccgagatcgcgccattgcactccagcctgggcgacaagagcgaaactcgtctcagaaaaataaaataaaatttaaaaagtcatggcttttttccaggtcactaattgctagtgagtctatgcattatcataatgtctgtgggtggtcaggctaaggagtgctttgcaacagtgaaaaatttttccagggagatacccgggagagatagtgaggcatctcaggaactgagagttaaactaatttataaagttcatgcttgtgggggcaagatcagccatctggaaagcacctcacctaagcagtaccttagacccgggtgagtgaagagtcatgagactcggtgagcccagccaatgtctggagcagaggcgtggggtggttttaactcatctgggaaggaagggtggcagagggcagaaggatggagaaaaggtgatgagtgcagcaggtttagaatccggatggtcagtgtttagcaggccccagtcaagggcagagggcaactctccctagggggccacatgtcatcatcactcagagccttgcctgaggcttgtctagcatttaggacagttccggagcataggcatcacttagagattgttagaaatgcaaaatctggccgggcatggtggctacacctgtaatcctggctctttgggaagctgaggcaggcagatcccttggggtcaggagtcgagactagcctgggcaacatggtgaaaccccatctgtactaaaaatacaaaaatcagcgggtgtggtaatggacacctgtaatcccagctactcgggaggctgaagcaggagaatcgttgaacctgggaggtggagattgcagtgagccaaaattgtgccattgcactccagcctggcaacagagcgagactacgtctcaaaaaaaaaaaaaaaaaaaaaaaagaaagaaagaaaaaagaaagaaagaaagaaagaaagaaaaacagaaatgcaaaatctcagacccactccagcctacggaggcagaatttgcatttttacgagatccctgggagattcagagacacattcatacaagtgaagagtactgatttaggagacatacctccagtatatactccttgatgcctttgattatattcagcttcagattcataaaggctcccaaggacctgacaccttaggcagggaacgtgaatcccagcctggggatgggcacccccggcctctgctgtgtgcagcatctgaattgctttccaagtcacaatcccttattcaaaacatttggttccaagtgtgtttcagaatcagaatttttcataattttaggaaggtaagatgatgcatttgccaactctcccaattctccagtgggatctggggcagtaccctatattcaaacattgatatcttgcagcttattatgatattgacaccgaaaagaataaacatcacaagatcaggtaagttttggcaccaaatttatggaaaaccttagttttcaggctgggtgcggtggctcacacctgtaatcccagcactttggaggctgaggcgggtggataacagggtcgggagtgcgaaaccagcctggccaatatgagaaaccctgtctctactaaaaatacaaaaattagccaggcgtggtggcacgtgcctgtatcccagctactcaggggtctaaggcaggagaattgcttgaatctgggaggtggaggttgcgtgagccgagatcgtgctactgcactccagcctgggcaacagggcgaggctctgttgcaaaaaaaaaaaaaaaagacagcaaataaactcacctaaaactttagacacagagataatgcccacacatttggattatagcttttgtctctctttacattttaaatatatattttataattttaaaataatatatatactttatataatttcatataaaatgtcacactgtatgtagtttctagcctctgtttttcacttttcatctttttatataatcaaagagtcttctacagcttttcttcaaaatcaaggtagttttattgtattttggttgtaaaagtgataataggaaaaacaaacatatatttgcttatatgtgcataaagtctctaaaaggatacactagttgctgtcacactgtttacctctggagggagccagatggaaggcagacagggacgagagaagaattttattgtataatcttttagactcttgattattactttgtgaatgtattctctatttcaaaataaaattaaaaaaactggtacatcctcactgcaaaagaaatcaagcaatatagaaagaacaaagaagaaaataaattcatctttaaactcaatacccagatacaacactgttagttttttgccacatttcttccaagtctttatctatgaatgtacagacatgtgtatggagattttttaccaaaataggatgatgctgtacgatggtttttgttacctgtgtttttcatgtaggtgaatcacagacagcttccatgcagcctcattttaaacatctgcattgttattgcataagttagccagttaccaaaaaattaatccaggtgaactgagtccagcatctgaatacgcgtgccaggtaacaccaaccccctgatccaaagctgggattttcttttcttttcttttcttttgttttttttttgtttgtttgttttttgagacagagtcttgctctgtggcccgggctgagtgcagtggtgcgatctcagctcactgcaacctctgcctcccaggttcaagcaattccctgcctcagcctcctgagtagctgggattacaagcatgcaccaccatgcctggctaattttgtatttttagtagagacggggcctcaccatgttggccaggctggtctcgaattcctacctcaagtgatcctcccaccttggcctcccaaagtgctgggattacaggcgtgagccacgtgcccggcccaaagctgggattttcaatttgctgtctgtaggatcttgaataggcagatgttatgttccagaacctggagagataacatatgggaacgggctggatgttccttctgccatggtgtttaaacccatgtcgcttattccataggtacaaacacctctacctgccccctcccctcagcctttatgcccactaccaccaggatgatgccagagagggccttggtggccgagccagtctgcatgtcaaagacccgagctcccatttgggctccaccacacactgagtgtcctgggaaagtcactttttcttctctgtagaacagagataataatctccatgatgccttctcagagtgttgttttgttagaagaatcagataaggttatgactgtgaaagtagtatgaaaatacagggcactctacacatagaagtttttattgttaaagtctggcctcttccctgagctgtcagggagaaggtagatgccaaaaccagctggcccagcttccttccgtgattggtcatggagcaaacattccccttgtgcacttttcaacatctacacactcatctttaaaatgagtgttgtaaaggtcaagggcacaaagcgttgacaagggcgtggaacaactgaaactcactaatgcttctgcacagctgctgggaagtaaattggtacaacctctttggaaaattgaagtatatactaaaactgatcatgtgaattcccctatgtacggcccagcaagtcctctgcatttatgtaataaacacaggtattgtggatgttcaccagaagacatgttattaagatgtcatagcagaactatttgtaagggtcccaaactagaaactacccccaaatgtccatcagtattaaatggataaattacaatattttcatacaatggaataggatacagcaatgagagcgatggtattcaactacatgcagcaatatggaacaatcttacaaacgtgttgagcaacagagcctgaccaaaataagagtacatacttgtttcactaatctatacttgtttcgctgcatacaagtatagatcccaaaacttaatgtcttaaaacaacagatagattacttctcatgagagatgggatagctgtgcaatttctcttctgatttcaccttagttgagtcataaggctgcatcagatgcagatttggctgggtgggaaggtctgaggtaccctcacgtgacctcattctgtgatgctcagttctttcccaggtggcctagaccaccttccttacacggcagtctgggggagcatttcaagagagtgaaagtagaagctgcaaagttttaaaactaagggttgtaactacaagagttgcaagggcccagcctcaggagcttcatcgtgtccatttctctgcattctatggtcaccccataagtcaaaaggccagcctagattcaagggtgtgaaaatagaccctaccctccctgagtagaagtcacattgcaaagggtcatgcatacaggaatggaagaaatctgtgtccatctaccacaataccctgtgattccatttatagaaagtagaaaagcaggtaaaatcactgaagctgttataaattctttgacgaatgggcctggagaggagtatgagagaccattgggttcctgatgtgttctgcttcttcatctaggtactgatgactagaatgtccagttttgaaattcagcaagctattaacttaagacatctgaaactttttacgtgattactatactgaattgaaagtctaagttacatagtggttttaaaagaatgcagttcatttccctttccattacagttccatccatcaggctggtggagctgctcatctcctcaatgttcctcaggaccccgcttccttctttcttgccatgccatcatcttgtcctcatcgagagttgaagctgttgtggcagtctgcattccagctagtggagaggatgcagaggggtagccctggacaagcacatccttgcaagctaataaggtggaagttacacacattacttccactcacaatccactggcagcactgattctcatggcctgcctagctgggaatgtagtcttagctgggcagcctgtgcaaggatatgtgccaatttcagggaaacaactagcagtctactgcatttttttttttaatgagtcttgctctgtcgcccaggctggagtgcagtggtgcgatcatggctcactgcagccctgtctcctaggttcaagggattctcctgcctcagcttccccagtagctgggatcacagcatgtaccaccacatctggctaatttttgtacttttagcagagataggaattcaccatgtggtctggctggtctcaaactcctggcctcaagtgatctgcccgcttcggcctcccaaatgctggaattacaggcatgagccaccgcacctgccacagtctactacattactaataataagctgctctttaataattatgttttcagaaggccatttggaaatagtttttatctcacgttggattataaaaacaccaagtgacccgagttctacacttttctgtgccaaaatgaagacattaataataagtatccatttcccctcaagtatatatatttaaatcataaatatgtagtaaatgtatacatttatttaaattttaaatatgcaattggccaggttccaagggcttaccaccttcctggaaaaaaattgtctttggaaaattccttgatatgattttagagggcagctctaaaatgaagtgttcaatgaatgttcaaggaatgaatgaattttagcaacctgtatttaggtgctgagagtatctgattagggcatatcagactaaaaaaagtcctctacaaacatagaatttactaatctattttctacttaaaatgcatagataatttgacatcaagcacattacagtttatggaaacaattttattggtaacagaaccctactaactcatcagagccc

SEQ ID NO: 2896 - DNA, 91561 bp, Homo sapiens
  misc_feature 1, 2, 3, 4, 5, 6, 7, 8, 9, 10, 11, 12, 13, 14, 15, 16, 17,18, 19, 20, 21, 22, 23, 24, 25, 26, 27, 28, 29, 30, 31,32, 33, 34, 35, 36, 37, 38, 39, 40, 41, 42, 43, 44, 45,46, 47, 48, 49, 50, 51, 52, 53, 54, 55, 56, 57, 58, 59,60: n = A,T,C or G
  misc_feature 61, 62, 63, 64, 65, 66, 67, 68, 69, 70, 71, 72, 73, 74, 75,76, 77, 78, 79, 80, 81, 82, 83, 84, 85, 86, 87, 88, 89,90, 91, 92, 93, 94, 95, 96, 97, 98, 99, 100, 101, 102, 103,104, 105, 106, 107, 108, 109, 110, 111, 112, 113, 114: n = A,T,C or G
  misc_feature 115, 116, 117, 118, 119, 120, 121, 122, 123, 124, 125, 126,127, 128, 129, 130, 131, 132, 133, 134, 135, 136, 137, 138,139, 140, 141, 142, 143, 144, 145, 146, 147, 148, 149, 150,151, 152, 153, 154, 155, 156, 157, 158, 159, 160, 161: n = A,T,C or G
  misc_feature 162, 163, 164, 165, 166, 167, 168, 169, 170, 171, 172, 173,174, 175, 176, 177, 178, 179, 180, 181, 182, 183, 184, 185,186, 187, 188, 189, 190, 191, 192, 193, 194, 195, 196, 197,198, 199, 200, 201, 202, 203, 204, 205, 206, 207, 208: n = A,T,C or G
  misc_feature 209, 210, 211, 212, 213, 214, 215, 216, 217, 218, 219, 220,221, 222, 223, 224, 225, 226, 227, 228, 229, 230, 231, 232,233, 234, 235, 236, 237, 238, 239, 240, 241, 242, 243, 244,245, 246, 247, 248, 249, 250, 251, 252, 253, 254, 255: n = A,T,C or G
  misc_feature 256, 257, 258, 259, 260, 261, 262, 263, 264, 265, 266, 267,268, 269, 270, 271, 272, 273, 274, 275, 276, 277, 278, 279,280, 281, 282, 283, 284, 285, 286, 287, 288, 289, 290, 291,292, 293, 294, 295, 296, 297, 298, 299, 300, 301, 302: n = A,T,C or G
nnnnnnnnnnnnnnnnnnnnnnnnnnnnnnnnnnnnnnnnnnnnnnnnnnnnnnnnnnnnnnnnnnnnnnnnnnnnnnnnnnnnnnnnnnnnnnnnnnnnnnnnnnnnnnnnnnnnnnnnnnnnnnnnnnnnnnnnnnnnnnnnnnnnnnnnnnnnnnnnnnnnnnnnnnnnnnnnnnnnnnnnnnnnnnnnnnnnnnnnnnnnnnnnnnnnnnnnnnnnnnnnnnnnnnnnnnnnnnnnnnnnnnnnnnnnnnnnnnnnnnnnnnnnnnnnnnnnnnnnnnnnnnnnnnnnnnnnnnnnnnnnnnnnnnnnnnnnnnnnnnnnnnnnnnnnnnnnnnnnnnnnnnnnnnnnnnnnnnnnnnnnnnnnnnnnnnnnnnnnnnnnnnnnnnnnnnnnnnnnnnnnnnnnnnnnnnnnnnnnnnnnnnnnnnnnnnnnnnnnnnnnnnnnnnnnnnnnnnnnnnnnnnnnnnnnnnnnnnnnnnnnnnnnnnnnnnnnnnnnnnnnnnnnnnnnnnnnnnnnnnnnnnnnnnnnnnnnnnnnnnnnnnnnnnnnnnnnnnnnnnnnnnnnnnnnnnnnnnnnnnnnnnnnnnnnnnnnnnnnnnnnnnnnnnnnnnnnnnnnnnnnnnnnnnnnnnnnnnnnnnnnnnnnnnnnnnnnnnnnnnnnnnnnnnnnnnnnnnnnnnnnnnnnnnnnnnnnnnnnnnnnnnnnnnnnnnnnnnnnnnnnnnnnnnnnnnnnnnnnnnnnnnnnnnnnnnnnnnnnnnnnnnnnnnnnnnnnnnnnnnnnnnnnnnnnnnnnnnnnnnnnnnnnnnnnnnnnnnnnnnnnnnnnnnnnnnnnnnnnnnnnnnnnnnnnnnnnnnnnnnnnnnnnnnnnnnnnnnnnnnnnnnnnnnnnnnnnnnnnnnnnnnnnnnnnnnnnnnnnnnnnnnnnnnnnnnnnnnnnnnnnnnnnnnnnnnnnnnnnnnnnnnnnnnnnnnnnnnnnnnnnnnnnnnnnnnnnnnnnnnnnnnnnnnnnnnnnnnnnnnnnnnnnnnnnnnnnnnnnnnnnnnnnnnnnnnnnnnnnnnnnnnnnnnnnnnnnnnnnnnnnnnnnnnnnnnnnnnnnnnnnnnnnnnnnnnnnnnnnnnnnnnnnnnnnnnnnnnnnnnnnnnnnnnnnnnnnnnnnnnnnnnnnnnnnnnnnnnnnnnnnnnnnnnnnnnnnnnnnnnnnnnnnnnnnnnnnnnnnnnnnnnnnnnnnnnnnnnnnnnnnnnnnnnnnnnnnnnnnnnnnnnnnnnnnnnnnnnnnnnnnnnnnnnnnnnnnnnnnnnnnnnnnnnnnnnnnnnnnnnnnnnnnnnnnnnnnnnnnnnnnnnnnnnnnnnnnnnnnnnnnnnnnnnnnnnnnnnnnnnnnnnnnnnnnnnnnnnnnnnnnnnnnnnnnnnnnnnnnnnnnnnnnnnnnnnnnnnnnnnnnnnnnnnnnnnnnnnnnnnnnnnnnnnnnnnnnnnnnnnnnnnnnnnnnnnnnnnnnnnnnnnnnnnnnnnnnnnnnnnnnnnnnnnnnnnnnnnnnnnnnnnnnnnnnnnnnnnnnnnnnnnnnnnnnnnnnnnnnnnnnnnnnnnnnnnnnnnnnnnnnnnnnnnnnnnnnnnnnnnnnnnnnnnnnnnnnnnnnnnnnnnnnnnnnnnnnnnnnnnnnnnnnnnnnnnnnnnnnnnnnnnnnnnnnnnnnnnnnnnnnnnnnnnnnnnnnnnnnnnnnnnnnnnnnnnnnnnnnnnnnnnnnnnnnnnnnnnnnnnnnnnnnnnnnnnnnnnnnnnnnnnnnnnnnnnnnnnnnnnnnnnnnnnnnnnnnnnnnnnnnnnnnnnnnnnnnnnnnnnnnnnnnnnnnnnnnnnnnnnnnnnnnnnnnnnnnnnnnnnnnnnnnnnnnnnnnnnnnnnnnnnnnnnnnnnnnnnnnnnnnnnnnnnnnnnnnnnnnnnnnnnnnnnnnnnnnnnnnnnnnnnnnnnnnnnnnnnnnnnnnnnnnnnnnnnnnnnnnnnnnnnnnnnnnnnnnnnnnnnnnnnnnnnnnnnnnnnnnnnnnnnnnnnnnnnnnnnnnnnnnnnnnnnnnnnnnnnnnnnnnnnnnnnnnnnnnnnnnnnnnnnnnnnnnnnnnnnnnnnnnnnnnnnnnnnnnnnnnnnnnnnnnnnnnnnnnnnnnnnnnnnnnnnnnnnnnnnnnnnnnnnnnnnnnnnnnnnnnnnnnnnnnnnnnnnnnnnnnnnnnnnnnnnnnnnnnnnnnnnnnnnnnnnnnnnnnnnnnnnnnnnnnnnnnnnnnnnnnnnnnnnnnnnnnnnnnnnnnnnnnnnnnnnnnnnnnnnnnnnnnnnnnnnnnnnnnnnnnnnnnnnnnnnnnnnnnnnnnnnnnnnnnnnnnnnnnnnnnnnnnnnnnnnnnnnnnnnnnnnnnnnnnnnnnnnnnnnnnnnnnnnnnnnnnnnnnnnnnnnnnnnnnnnnnnnnnnnnnnnnnnnnnnnnnnnnnnnnnnnnnnnnnnnnnnnnnnnnnnnnnnnnnnnnnnnnnnnnnnnnnnnnnnnnnnnnnnnnnnnnnnnnnnnnnnnnnnnnnnnnnnnnnnnnnnnnnnnnnnnnnnnnnnnnnnnnnnnnnnnnnnnnnnnnnnnnnnnnnnnnnnnnnnnnnnnnnnnnnnnnnnnnnnnnnnnnnnnnnnnnnnnnnnnnnnnnnnnnnnnnnnnnnnnnnnnnnnnnnnnnnnnnnnnnnnnnnnnnnnnnnnnnnnnnnnnnnnnnnnnnnnnnnnnnnnnnnnnnnnnnnnnnnnnnnnnnnnnnnnnnnnnnnnnnnnnnnnnnnnnnnnnnnnnnnnnnnnnnnnnnnnnnnnnnnnnnnnnnnnnnnnnnnnnnnnnnnnnnnnnnnnnnnnnnnnnnnnnnnnnnnnnnnnnnnnnnnnnnnnnnnnnnnnnnnnnnnnnnnnnnnnnnnnnnnnnnnnnnnnnnnnnnnnnnnnnnnnnnnnnnnnnnnnnnnnnnnnnnnnnnnnnnnnnnnnnnnnnnnnnnnnnnnnnnnnnnnnnnnnnnnnnnnnnnnnnnnnnnnnnnnnnnnnnnnnnnnnnnnnnnnnnnnnnnnnnnnnnnnnnnnnnnnnnnnnnnnnnnnnnnnnnnnnnnnnnnnnnnnnnnnnnnnnnnnnnnnnnnnnnnnnnnnnnnnnnnnnnnnnnnnnnnnnnnnnnnnnnnnnnnnnnnnnnnnnnnnnnnnnnnnnnnnnnnnnnnnnnnnnnnnnnnnnnnnnnnnnnnnnnnnnnnnnnnnnnnnnnnnnnnnnnnnnnnnnnnnnnnnnnnnnnnnnnnnnnnnnnnnnnnnnnnnnnnnnnnnnnnnnnnnnnnnnnnnnnnnnnnnnnnnnnnnnnnnnnnnnnnnnnnnnnnnnnnnnnnnnnnnnnnnnnnnnnnnnnnnnnnnnnnnnnnnnnnnnnnnnnnnnnnnnnnnnnnnnnnnnnnnnnnnnnnnnnnnnnnnnnnnnnnnnnnnnnnnnnnnnnnnnnnnnnnnnnnnnnnnnnnnnnnnnnnnnnnnnnnnnnnnnnnnnnnnnnnnnnnnnnnnnnnnnnnnnnnnnnnnnnnnnnnnnnnnnnnnnnnnnnnnnnnnnnnnnnnnnnnnnnnnnnnnnnnnnnnnnnnnnnnnnnnnnnnnnnnnnnnnnnnnnnnnnnnnnnnnnnnnnnnnnnnnnnnnnnnnnnnnnnnnnnnnnnnnnnnnnnnnnnnnnnnnnnnnnnnnnnnnnnnnnnnnnnnnnnnnnnnnnnnnnnnnnnnnnnnnnnnnnnnnnnnnnnnnnnnnnnnnnnnnnnnnnnnnnnnnnnnnnnnnnnnnnnnnnnnnnnnnnnnnnnnnnnnnnnnnnnnnnnnnnnnnnnnnnnnnnnnnnnnnnnnnnnnnnnnnnnnnnnnnnnnnnnnnnnnnnnnnnnnnnnnnnnnnnnnnnnnnnnnnnnnnnnnnnnnnnnnnnnnnnnnnnnnnnnnnnnnnnnnnnnnnnnnnnnnnnnnnnnnnnnnnnnnnnnnnnnnnnnnnnnnnnnnnnnnnnnnnnnnnnnnnnnnnnnnnnnnnnnnnnnnnnnnnnnnnnnnnnnnnnnnnnnnnnnnnnnnnnnnnnnnnnnnnnnnnnnnnnnnnnnnnnnnnnnnnnnnnnnnnnnnnnnnnnnnnnnnnnnnnnnnnnnnnnnnnnnnnnnnnnnnnnnnnnnnnnnnnnnnnnnnnnnnnnnnnnnnnnnnnnnnnnnnnnnnnnnnnnnnnnnnnnnnnnnnnnnnnnnnnnnnnnnnnnnnnnnnnnnnnnnnnnnnnnnnnnnnnnnnnnnnnnnnnnnnnnnnnnnnnnnnnnnnnnnnnnnnnnnnnnnnnnnnnnnnnnnnnnnnnnnnnnnnnnnnnnnnnnnnnnnnnnnnnnnnnnnnnnnnnnnnnnnnnnnnnnnnnnnnnnnnnnnnnnnnnnnnnnnnnnnnnnnnnnnnnnnnnnnnnnnnnnnnnnnnnnnnnnnnnnnnnnnnnnnnnnnnnnnnnnnnnnnnnnnnnnnnnnnnnnnnnnnnnnnnnnnnnnnnnnnnnnnnnnnnnnnnnnnnnnnnnnnnnnnnnnnnnnnnnnnnnnnnnnnnnnnnnnnnnnnnnnnnnnnnnnnnnnnnnnnnnnnnnnnnnnnnnnnnnnnnnnnnnnnnnnnnnnnnnnnnnnnnnnnnnnnnnnnnnnnnnnnnnnnnnnnnnnnnnnnnnnnnnnnnnnnnnnnnnnnnnnnnnnnnnnnnnnnnnnnnnnnnnnnnnnnnnnnnnnnnnnnnnnnnnnnnnnnnnnnnnnnnnnnnnnnnnnnnnnnnnnnnnnnnnnnnnnnnnnnnnnnnnnnnnnnnnnnnnnnnnnnnnnnnnnnnnnnnnnnnnnnnnnnnnnnnnnnnnnnnnnnnnnnnnnnnnnnnnnnnnnnnnnnnnnnnnnnnnnnnnnnnnnnnnnnnnnnnnnnnnnnnnnnnnnnnnnnnnnnnnnnnnnnnnnnnnnnnnnnnnnnnnnnnnnnnnnnnnnnnnnnnnnnnnnnnnnnnnnnnnnnnnnnnnnnnnnnnnnnnnnnnnnnnnnnnnnnnnnnnnnnnnnnnnnnnnnnnnnnnnnnnnnnnnnnnnnnnnnnnnnnnnnnnnnnnnnnnnnnnnnnnnnnnnnnnnnnnnnnnnnnnnnnnnnnnnnnnnnnnnnnnnnnnnnnnnnnnnnnnnnnnnnnnnnnnnnnnnnnnnnnnnnnnnnnnnnnnnnnnnnnnnnnnnnnnnnnnnnnnnnnnnnnnnnnnnnnnnnnnnnnnnnnnnnnnnnnnnnnnnnnnnnnnnnnnnnnnnnnnnnnnnnnnnnnnnnnnnnnnnnnnnnnnnnnnnnnnnnnnnnnnnnnnnnnnnnnnnnnnnnnnnnnnnnnnnnnnnnnnnnnnnnnnnnnnnnnnnnnnnnnnnnnnnnnnnnnnnnnnnnnnnnnnnnnnnnnnnnnnnnnnnnnnnnnnnnnnnnnnnnnnnnnnnnnnnnnnnnnnnnnnnnnnnnnnnnnnnnnnnnnnnnnnnnnnnnnnnnnnnnnnnnnnnnnnnnnnnnnnnnnnnnnnnnnnnnnnnnnnnnnnnnnnnnnnnnnnnnnnnnnnnnnnnnnnnnnnnnnnnnnnnnnnnnnnnnnnnnnnnnnnnnnnnnnnnnnnnnnnnnnnnnnnnnnnnnnnnnnnnnnnnnnnnnnnnnnnnnnnnnnnnnnnnnnnnnnnnnnnnnnnnnnnnnnnnnnnnnnnnnnnnnnnnnnnnnnnnnnnnnnnnattagtgatcgagagccatttttgctggtggcaatcatatggtacttttaatggaatattagaaaggcaccggtaatgaccttgttgcagcacaaaggagagagtgtggggtgccctgcatgttgtcccacctcttgtgacgtgtatcgttttggaatttccagtggcttgacatgaactactgcaggaatccagatgctgtggcagctccttattgttatacgagggatccggtgtcaggtgggagtactgcaacctgacgcaatgctcagacgcagaagggactgccgcgcgcctccgactgttaccccggttccaagcctagaggctccttccgaacaaggtaagggtctgtggccagacatctacacgcttcgatgctgggatgaaaagccatggaaattcccatgatgcagccgccttcaatggtaaacggatgctcgagtgttgcctgagttctaccatgtgggggaagcctccgtgtactctctgggggagccagcggagtgatttctggtgcaacgtgttgggctttgtctttagaatgggcacaaaccctccagggtgatcgacttcacaattcacttgttctaaaatgggctacctcagtgtcccagccaaaatttttattgtaacgtgctgtcggtgtgtgactctttcagtccagtaagcttttccggggatttcttcaagtagccagcatcagtgcaatcttcagcattgcagattcagagaaatgtggctctggagcctgtcatcctcagaaacctaacagggctgcattaattccatatggtcctgggtctatggagcagtacatggctcccaatgctctaaggctcttcagtcctaggctttgaagggagtgatttctcagtgtcttaaacctctttctgatggcacttgtacctgtgaggggtctagagagaaaggttagtaacttctcctttactgcaattcaggatgcagggcatgagaggattccctccctcctccaaggaagaaggttttggcgtgcacacatccttgagaagcaaagtgtctttgccttcagtcaatatataggatcgttttctgccccatggcctggaagccagaggccttggctttcatgataacgatctagggaaacatgcaaaatttccatgtctttcccctcctctgcccccgacagcaattaccacctgcatcctgcattgccaaatgcagtgccctttgtatgaacattcagtaggtttcatagaaaggtgctacttcgtgagcgcactttgcagtgagaagatctgttctgtttgtttttctaaggatttcaggtgaaatatttcctagaacttactacagttctagattggaggaatctgtaggtttgctgtatgttttttggttggttttctcccatccatctgcctacggtaagggaaagataacgttcgtaattctcatagactcctttctggttgtgtcataaatgcttcacatatttcgttattctcagagatactcagtttatttcttgtgttttcatttcacaccgactgagcagaggcctggggtgcaggagtgctaccacggtaatggacagagttatgaggcacatactccaccactgtcactggaagaacctgccaagcttggtcatctatgacacacactcgcatagtcggaccccagaatactacccaaatgcgtatgtctttgttctttacataagagaataaagggccaactgaagtttctgtgacaagagacatgcttcaagctgagtctccgaactcaacttgtgtcagattcagatggtgtagcaaaatgtctcaggatgatttcttggagctaagggtctgagagaagagaaatgttaagctgcctcaccttcctcctagtttgtggagcagaagggaaatgaggaggcgaggagatcaccttatgaagaaagtcagaatgagaaccaccaaacacttagattacccttgcccaacacccactaagcgtcaatgaagacttccagttggaattccgttattctgacttccaattcctgaagggaagattgtgtttgcctttctgtctgggctcatgaggaaagtttatgtgcttacttatggacaggtgaattgatctgttctatttctacctgtattccaatagggagaaaatctcttggtcctaagtaccagtggctgaaaggatagaggttcccagcaagagaagatccaaggaaggaaggcagatgagagtcacacagagagggatgctgaaaagtaaaagggatgggtagatggatagaagccctggtctgccaccccatggccaatcatttggccataatcaacaaccaaagacatggaaaaatggttttacatgtgggacaacagatggtagaggacctagagaattgagagagggccaatgatgagtcaactccatagatgccttggctttcttcctggatacccttcctgcactgaatagcaagagatggagctcaagcagcctgtagccatctagctgagcagaggagagggattggagtttggatgactctggtattttctaggtccgctacaaataagaactggtttgtggaggaaagggctctacaaatacgcatagaagtctcctccagtagttggcctcacatgacactgcatgtcacagaaaatggttctacagaaagtgtggcaaagaacatttactgagaaacagcaactaaagagaacagcaagctcaattaagaagatagagatcacatagcactctgtgttattggattcttaccagctagatgagagagtgctcacggaacacattgccaattcagtggagacccagaacagccataatttcaaagtacaattagtatattactagaataaaggcagctgcagaaaccccttgcacagctgaaaagcaagtgtccaagcatcaaatgggtttccaatcaatgagtgcctgtgagaggaaatctcaactctcttcagaagtaaacaacaaagtcaattgcctcgctatgcggtatccccagagtgagtcctaaattaaaaatttgactacgtgtagaaaagatttcgtgtgatccatgaccagaaaataaatcaggcaatacaaacaggctcagaaatgactcgataattagaattgcatgaaaatttgacatatcagtatgataactgatttcagatattaaaaaaagtgcaacaaagcaggtatcatatcaagacaaattaatagtatagaatagccaatcaaattaaagaactattatacaaaaagtatgtcttaaatgaagaaattactgtatgccgcctgaaaaatttagatgtttcagaagaaaaaattaaccaaaaacaattctgcagaactacagaatgagccacacacacacacattcaaaacacacccatacacacacacatgcaaaactcacaagttctaacacacacacaaacacacacacacatgcacatccctaaagaaatgggaaatataaaattaaccgaccctcagagacatgcaggaaaatataagaagatttcctcatgtgggaagcaagtcacagtaaagagcaagggagtttggagtagatacaaataccggatcacggatggctgataacttttcaattatgaagaacgttagaaaaatcacagattcataaactaaagggatcaaataggaaatttcgagaaaaaaaactacatgatgcacttctctaatcacagttcaaaggtaacaaggcaaggatataagaagaagaaacatctcacgagaaacggagaaaaaagagctgtgtcttcctagagtacagtgatacaaattgctaatgcgttcactcagaaacactggaagccagataccagggaatattattaaaatgataatgaggaacaagagagatcaaccgagaatgctgaatccagcaataaaatgccttgaagatcatccatgttgataaatgcatattgtgcactgcccaaaacaaagaaactggaaagtgtaagactttggaacagcaggcttatgtagcaacagaggtgacccgaaagaattaggtataagaagaatagaaaattgcatgaaaatttgacatatgactaagataactatttcaaatatttaaaaaaagataatatgtaataaaacagataaaatatcaaaagaaagtaacagtattgactagccaaatcaattaaagacttagtgtaaaaagctatgtcttaaaagaaaaaattactggatggctgccgatcaatttagacatttctgaataggaaactaaccaaaaatcaattctacagaaccaacacacacatatatacacatacaacacacccatacacacccacgcaaaaactcacaagttccacacacacacacacacacacacacaaccctcaagaaatagtgaaatagaaaaccaaccaacctcacagacatgttgcaaaataggaaaagatttcctgcatatgggaagcaagtcacgaaaagagaacgggagattggaaacagaaacaaataccggaatcaaggatggccgaaaattttcattgatcaagaatattaacaaaatcgcaaaaacacgaaattcaatgcatcaaatggcgtttcgaaaaaaagaaaaaatctggtatgatgcacttttgtacttcacattttcacgtaagaagacaaagatataataacaagaaacttcttatgagaaactggggaaaaacaagtgtttcttgctagaagaacagtgatacaaattgctaatgcattctcgtcaaaaacactgaagccagataccgggaatgttattaatgtggtaaacaggaacaagaagagatcaaccaaaatgctaaatccagcaataaaatgccttgaagatcatccatgctgcataaatgtatgtttgcactgccccaaacaaagaaaccggaaactgtaagaatttggaatcagcaggctgatgaacaagagaggtgacccaaaggaattaggtagaagaagaatagtacaagaagggaacttctgcagcccatgtaatgaagaacccagcaattggcaaatgtagatgtaaatgcaaaagtttttcttgaccaaatttctatatatttttaaatgagcgttgactactggaaacaaaatggagcaagagatttaattttagcctcggtagaggtaagaatttgaacaagtagcgtaaatatgtagggaataattagaagtgtaccattgtaagtttcttacctcatgcacaatggtattaatattaataaaatgttactgtgtgggttcaaggagatattgcaaatcctagagcaatacaaagttttgaactctgaggtatattgtataataagaatattccatgtattcaaaagaagaagccaaggaagaaagaaatttgtcacgagtttgggctcttagtacatcctgtagctattgaaccagcttcctggaatggagggtctgggattgacactaggccacatgtatagagctctagagagacagtgtttcatccccatggcccgtaatacatttcccattttctcaggcgccacaggtcatgaatgtgaggatagagagaggttggagcaacgttcttgggaggcataggaagagcaaatgcttcaagatccccgcagcccaaactcctacctgctttgccccctaagcagtgttcctccgtagctgtccgacctcttcagatctcttagtctaccctgccatcttctttatgccatgggtcccactgttctttcaactcatccccctttccctcagtgcagagtgctgcggccagcagagggtagactgagagcaggagagaaggtcctgcccaggaacccatctagagatgctgcattctgcctgggagcaagttttccagggcagctttgagaagtcttgagaaacaaacctatttgacccacatgatatgggaatgacagaaagtaatacaatttgcaagtgcttttccatgggaaaagtagagccttttcgcgaggttttgagtacatagagagtgaggttgacctggaaaggttatcctcctggatcccatgttttttctgaagaactacctgtagttgcaacttgcacattagaatatgaagtcctaccgagagagatacggagaactagataatacagatacttttgtatgtgaataaacgattccacaatacacacatcaaaatccatacagttattccagagagatggattgggcagaaggcagaaggagaatactctgatcgtttttgcccacgtgtatgtattatctcagtgtttctaagaagcgtttgctactttagattttttttataataataatcttttaagtatgagaaatgtgcagacaggattagtgattgagagcatttgtgcttgtggcaatcatatggtacttttatgggaatattagaaaggcactggtaagaccttgttgcagcacaaaggagagggtgtggggtgcccctgcatattgtcccacctctgtgacgtgtatcgttttggaatttccagtggcttgatcatgaactactgcaggaatccaatcctgtggcagccccttattgttatacgagggatcccagtgtcaggtgggagtactgcacctgacacaatgctcagacgcagaagggactgccgtcgcgcctccaactattaccccgttccaagcctagaggctccttctgaacaaggtaaggagcctgtggccagaaacctacactttcgatgctgggatgaaaagccatggaaattcccactgatgcagcagcctccaatggtaacggatgctcgagtgttgactgagttctgtcatgtaggaggaagcctccgtgcactcttgggggagccagcggattgatttctggtgcaacgttgggtgggctgtgtctttagaattgcacaaaccctccagggtgatcgacttcacaactcacctcgttgaaaaatgggctatctagtgtcttagccaaaatttttattgtaacatgctgtcagatgtgtgactctttccaagcagtaagcttttcctgggacttcttcaattagccagcattcagtgcaatcttcagcattgagattcagagaaatgtggctctggagcctgtcacccttgagaaacagggctaacagggtgcattaattccaaatcaccctggttctatggagcagtacatgaactcccaatgatctattttcaggacttcctcagtcataggtgggctctgcagccctaggtttttaagtgagtgacgccccgtgttctggtggcagttgtacctgtgagcggtctggatagaaagagtcggagactctgtattattgcaactcaggatgtgggtcatgagaggatttcatctctcctgcagggggtaagctgttcgcctccacccatccctgataactgaagtgtctttgtctgcagtcctagcgaaggactgttgtctctcccatggcccagaagctgaagaccttgccttttgttatgaacgttcattgttttcatgtctgtccgtttctctgcccctaacacccaatcaccatgtatgcctgtacccccaaatgcatcgtgctttgctgtttgctgccccatagtcctcatgaacatcagtagaaattcccataaatgtgcttgcacgtgagcacagtttccattgagaagccctccatttgtcctttttttctaagcttttatgtgaaatatttctaagaacttactacagttcaaagtgttaggaatttgtttctttggtgtttttgtttgttggttggttgttgcttttctaagtccatctgcctacaaataaagaaacaagaatgttacttgtcatattctcctgaggtataattctcagagacttttttctggtttgtgccataagtggcttcacatgtttgtctctcttggaaacactcagtttgatttcttttcttttcatttcagcaccaactgagcaaaggctggggtgcaggagtgctaccacggaaatggacagagttatcaaggcacatacttcattatgtcacaggaagaacctgccaagcttggtcatctatgacaccacactcgcatagtcggacccagcatactacccaaatgcgtatgtctattttctttaccataagtgaaggaagggtcgtggaaatttctgttagtagagtcatgcttcaagctgagtgttcaggactcaagttgtccagatgaacagtgcatagcaaaatgtctcaggaacattgtctttgagcaaagagtctaaagaagacaaatgttaatctggctctccttcctcctagtttaatggagcagaaaggtatcggaggcaaggatatcacattaagaaacaagtcaagatgacaaatgatgaaactcttagatacccttccacaacacccactaaggttcaatgcagccttttctccttggaattctattaactaaactccaattcctgaagtgaaggttctgttggggttttctgttttggcttacaagaaagtatatatgtatatctatggagaggcaaatctatctctttctatatctacgtctatccaatatgtagaaacacagtcggttctgaccaccagtggtctgaagggatactggttgtagagaataaaaatggcaggaaggcagatgagagtcagcaaagagagagatcctgtaaagaaaagggtggatagatggacagaagcccaggtctgaccagcccatggccaggctttcggcataagtgacaccaaagacatggaaaaatggtttctacatgttggacaacagacagtagggaccaaaagaatagtgacagggggaacaatgagatcaactccatagataccttggcttcttcctggaggcccttcttgcactgaagagcaaggtgatggagcccagatggactgtagcatcttcctgaatgcaggagagagattggaatttgggactactgtggtagctaggatttataggcctgctgagaatgagaatggatttgtggatgaaaggagctccaggggcacgcatgtagtctcctcgaatctttggctaaacatgacgttgcatgtgcccagaaaaaggttccaaagaaagtagagaaaagaatatatcctgaggaatagcaactgcgattgaacagtgagctaataaagaggacagagccctcatagcattctgggatactggagttctgaccagctggagagagacctcactgaacctcttgggaatacagtagagactccagaaaagtcatactttagagtagaattagtaaatttctagaaaaaaaggcagctctagacaaaccctggcaaaactgaaagcaagtctccaagcattaaaatcatttccaagtcaattaactgcctgggagaggaaaccctctttagaggtaaacaacaaagtcaagtggctcagctatgtggtgttcacagtgtagttctaaatttaaaacttgactacacatagagaagcttttagtatgaaccatgaccagtgaaaaatcagtcaatacaaatagacctagaaatgacagaaatgattagaatggcaaaaatttgacatatcaatatgtcaactgagttttaggttttaagaaaacatgaatacggaataagcagataccatatcaagagacagtaacagtatagaagagccaaattaaattaaagaatagtataagaaggtatgtcttaaatgaaaaaattactggatgtattcccaatggagtgaatgtttcagaagtaaaaactaactgaaaaacaattttataccacctacagaaccagctaacatacacaaatgacacacacatatacacacatactcacacatgcacaggcttagaaactgcacgcacacacacacacacacacacacacacctccacaaatactaaaaaatgaaatcactgatcctcacagacaggcgggaaaatataaaaagatttcctgcatgtgggtaggaagcacagaaggagaggaaggagagattgctacaggaacaaatactggaagcaaggatagctaaaacttttcaaataagaagaatattaaaaaccacagattcaagaagctgaatgaatcaacagggaatttccaaaaaaaaaaaaaaaaaactgtatgattcacttttgtacatcaccgtcaacagtcagaaggcaaagatataataacaagaaacatctcatgagaaactggaggaaaagagctgtgtcttgctagaagaacagtgatacaaattgctaatgcattctcatcagaacactggaacccagttaacaggggatatcattaaaatgataaactagaaaaaaaagagataaatgagaatgctacatccagcaataaaatgccttgaagatcatccatgttggataaatcatattgtgcactgccccaaataaataaaccaaaaactaataatttggaatcagcaggctgtgtaacaagagatgttgcccaaagaaaattagctagaagaagaatagttcaagaggaaactttctgcagcccacgtaatgaagaacccagcaaatggcaaatgtagatgtaaatgcaaatattttcttgatcaaatttctatatctttttaaatgagagttgactacttgaagcaaatgatagcaatatatttaactttagcatatgtagaggtaaaaatttgaacatatagacaaatcatgtggggaataattggaagtgtaccattgtaagtttcttaccttatccacgatgtatgtaatattaatgaaaggttgaatttgtgggtccaaagggatattgtaaatcctaagcaatcataaaattttgaattctgagggatattatataataagaattttccatgtatccaaagagggaagccaaggaagaaaaagaagtctttcaagtactcaagctctgagcacatcagttgctcattgaaccagcttcctggaatggagggtctgggcttgagactaggtcacattgtagagtctctagagagacagtgttggatccccatggcccataatacatttcccgtttcccaggcagccacaggtcacgaatgggaggattctgagaggttggagcaatgttcttagaggcataaggaggagtgaatgctctgagatttccccagcctgaggtcctccatagctgccgacctcttcagacctcatagtctgcccagctgtctccctttatgccatgagtgccactttctttcaactcatcccccattccctcagtcccggaattgctgtggccagcagaggatgactgagagcaggagaggaagtcctgaccaggaacccatcctagagatactgcatcctgctgaaagctaggtttccagggcagctttgagaagtcttgcagaaagaaacccacttgaccacctgatacggtatcgacagacaggaatactttttgtgcaatggttttacatgctgaactagagccttttggctacattttgagtacattgaatgagactgctggcctgggaaggatacatgctggatgccatttttttctctggagaactatgtgttagttccaactcgcacattatatatgaagtcctacacagagagatacggagagctagacagatagagatacttttgtattgcataaccaattccacaatacacacgtcaaaatccataccagttattccagagagatgattgggcagaaggcggaaggaggatattctgatccctttttggccacatgtatgtataactcagtgtttctaggaagtgtgtgctgcattagattttttttctttaaaaaaagtgatatatattaagtatgagaaatgtgcagagaggattagagattgagagccatttgtcattgtgcaattgtatggtatctcttttgggaatatttcaaaggcaccagtaatgaccttgttgtgcaaaatatacagtgttcctgcatatgtacccattttttgtgatgtgtattcttttggatttccagtggcttgatcaagaactactgccgaaatccagatcctgtggcagccccttgggttatacaacagatcccagtgtcaggtgggagtactgcaacctgacacgatgctcagatcagaatggactgccttcgtccctccgaatgttattctggctccaagcctagaggcttttttgaacaaggtaagaagttgtgccagacatttacctgcttggatgctgggatgaaaagcatggatacccccactgacgcacaacccttcagtgctacactggttctcgtgtgttggtttgggtctgccatgtgggaggaagccttagcgcactctctgggggagccagaggtgtgattttggtgcaacctgtgcgagctgtgtctttaggatgggcggaaaccattctgggtgctcacttcaccactcccctcattgtaaaaggggctatctcattgtcctagacaaaattcttatgtaatatgctgtcagatgtgtgtgtctttccaagccagtaaacttttccagggatttctcaagtagacagcattcagtgcaatcttcagcattgcagattccgagaaatgtggctctgatcctgttatccttgagaaacctaactgggttgcattaattccatatctccctgggtcgtggagtagtacatgagctcccgaagctctatctctcaggtctttttcagtccgaggcagttgtgcagttcttagctttgaagggagtgattttttcgtgtgcttttgcctctttctgtggaacttgtacctgcggggggtctggagaaaaagagtagtagacttttgctttattgcatgcattatgctgggcacgagaggattccctatcttattgtaggtgataagcttttggctccactcatccctgagaagtgaagtgttgttgcctacagttttagctgcaggactgttgctgccccatcaccaggagtttaatgctttcttttttgagcaatcatctagggacacatgaaggtttttatatgtccttgcctcctccccaaaaaaccattttaatgcttggagacttgttttcagctttgccaaatgcatcaccctttcttctatgctgttccatgtcgtcatgaacctctgtagagattcctagaaatgagcttccatgttagtggagtttccgatgagaagcaactgatatttcttttccactaagttttacatgaaatatttctaagaacttactacagttcagaatggtaggcatctcttactttcgtgtttgtttgtgtgttttctcatgtccatttgctattaataaagaatagagaatggttgtaaatctcagtgactcttttttggtttatgtcaaaatggcttcctgtatttttctgttctaggaaataataagcttgatgtcttctgttttatttcagcactgactgaggaaacccccggggtacaggactgctactaccattatggacaggttaccgaggcacatactccaccactgtcacaggaagaacttgccaagcttggtcatcttgacaccacaccagcatagtcggaccccagaaaactacccaaatgcgtacgtctttgtttttaccataagcgaaggaagggccaatggaagtttctgttagaagagtcatgcttcaagtgactgctcaggactcaacttggctcagatgcagaggaacatttcctgtgagcaaaagtcttagagaagactttgtttttttgagacagagtcttgctttgttgcccaggctggagtgagtggcatgatctcggctcactgcaagctccgcctcccgggttcacaccattctcctgctcagcctctctagcagctgggactacaggcacccaccaccacacccggctaattttttgatttttagtagagacagggtttcactgttctagccaggatggtcttggtctcctgacctgtgatccgcctgcctcagcctcccaaagtgctgggattacaggcgtgagccaccgtgccggctgagaagacattttttaagctggctctccttcctcctagttttatggaagcagaagatatatggagttgagaagatcttattaataaaacagccgggatgacaaatgaccaaagattagagtatccttctacaacatcggctgagggttaatacaaccttttcaccttggaatttatcattctaagctctagtccctgaagtgaatgttgtgttggccttttgcatcttgggtacagggaattgatacttgcacatctatggagaggcaaatctttttctatctacttcttttcaatgggtacaaacacacttggtcctgagcaccagtggtctgaagagatacggtctgccagaggagaagaacaaaggcaggaaagcagatgagagtcagcaaaggggcgatgctgaaagtaaaaggggcgggtagatggacagaagccatgatctggccattctatggccagtcttcggccataagtgactaccaaagacacggcaaaacggtttccacatgttgaacaacagatctagaggaccaagagtattgcaagagggagaaaatgagatcaacccatcaatgccttggtttcttcaaggagacccttcctgcactgaagagcaaggagatggagcccaagctgactgagccatgttgctgaacagaggagagtgattggactttgggattactcaggtagttaggatttctagccatgctaagagtaagaatggacttgtggaggataggagctccaggcatagagtctcctcaagtgttagtctaaacataaagcagcacttgcatagaagattttccacaagaaatatggcaaaaaaacaccatatattgaggaacaacaactacaagggaacagtgagctaataaaggtgacagagctcacatagtgctctggaatattggagttttgaccagctagaggaagagacctcattgaaaatcttgggcattcagtagagacctcagaaaagtcagacttttgagtagactttgtatattcctagaataaaggcagctccagaaaaaacctagcaaagctaaaagcaaatctccaagcattaaaatggtgtcctagtcaattaactgccttctagaagaaactcaacactctttacaggtgaacaacaaagttaagttgctgagctatgcaatatccaagtgtgagtcctaaatttataactttactacacataaaaaagcatttagtgtgaaccataccaggaaaataatcagtcaataaaaatagaaccaggaatgatagaaatgatttaaatgcatgagaatttgacatattagtatcataactgcattgctggatttaagaaaacataaactggaacgtaacagatatcatatcaagggaaagtaaaaggataaaagagtcaaatcaaataaaggactattaaaaggtatatcttaaatgaaaaattcactggatggtctcccaatcagttagttgtttccagggaaaaaattaactgaaaaataattcaatagaatctacagaaatactgcacatatatacacacaatggcacacgtgcacacacccacacccacacaggtgtgaacctagagccacacgagcattgaaacatagagaagtaaaaattgttcattgaggaatatgagcaatgctcaatgtgttttaccctaataagagcttttgtgatgtatgattgaaaaactacacaactgaagagagaaatagataagcccacactctgagttagagatttccttgattcctcactatggttataaatctttcccaaacacaacaggctagaacaaatatgcagaaaatagacatagtatctttgttctcaataaaaacgtcgacctatttaacattataccgaactacgaatacacattaaagtgtgcatggagcattcactgaggtgtactctacacatgaccttcagcaagtctccatagatttaaaagaattaaagtcatacagagtgtgtcactttattctccagaataaagtgagatatgaataatgagaagtttgccagcttctcaaatatttgggagcatacggtgcatttcaaaatactctttgggacaaagaaaacatcactaaggaatttagaaagttttgaactgagtaagaatataacacaatttatccaaacttaggagatgcagtgaagtctttaggcttttacataattttagatgctcttagggaaaaacagaagcatgtaataacaagatttcaaactgcaattctcaaagtgtagtctagagaaacctgaggacctttgagtccttcagagacagtccatgaggttaaaggactttgctacgtgaaaagtaagatgctattgccctttttactttcattttccaacaagagaagaggggagttttccagcagttacataaatgtaatggcatcatgtctctgatggctaagaaaatgggcaattgttgactttgtgtgtaaaaaaattctcagtgttggtttcttatactataaatattcatcttgtgttttgaaaaaaaaagctctttggaatcccctatgaacaaagactttgacagttgttgatctaagaccacgcttaagtatctacacaagaaaaaaaaaaaaagcaaataagagccaaggaaagcagatgaaggaagtagtccaaaccagtgacattcagtgaacaagaaaagagaccaacaagggagtaactcttgaaacagaaagttgattctttgaaaagatccatatgattgaacacagtctggtaaacaaatgacagaccaatgagggtgcacaaccatcaccatctggagtaacagaggagggtgccattactatagcatcttccagttctgaaagctgaaaagaagattttgagaacaatgtatgtgaataaattcaggaatgttaatcatgtgggccaattcctgaggaagacaacaatcagcaaaccagatgctgaatagttagtgtagtcctgtagagagacatacagagaggcgacagagaaatatttgtatgtgcataaaacaatctacaagacacacttcaaaatcaatccagttaatctggaggaacatatttcacagaaggtggaaggagggtattctgatcctctttacattgtacaacattgtacaatgtacagagtataattgtacaagtacaattgaagttgacaagtacaagtgcaacttgcacaatgtacagagtaaacattgatgtttactctcaatttcttatggagcacagatgactttggatgtgttacaatatgaatgataatttgtctttgaatgttcgcagttgtttagaagttgaggaccatttgtgcatattatgggacctttagtgaaatatttcaaagtctctttttacactttgttacagcaaaatgtagagggcgctaagtgccttgaatcttctcccatctctggtgacctgtgttgttttgaaatttgcagtggcctgacaggaactactgcaggaatccagatgctgagattcgcccttggtgttacaccatggatccagtgtcaggtgggagtactgcaacctgacacaatgcctggtgacagaatcaagtgtcctgcaactctcacggtggtcccagatccaagcacagaggcttcttctgaagaaggtaggaatctatggccagacaaccacaccctaggacgttgggatgaaaagagttgcaaaatcttaggatatagaagccttccatgctcacacaattccaagtagaatgtggactcagggtcagccctgggaaggaacactcagcgccttctctgggagaaccagagctgtgatgtttggtacccgtgaaagggtggtatctataggaagggtgcagaccctctagggcactggacttaccactccctggttattcaaaggatcattttagtgtcttagccagaagaatattctaacattttgcaaatttgtgaagatttaccaagctcatgataagcctttcatggtatttcttcaagtagcagtgttcattgcatctttggctttgcggtttcggaggaatgcggtttttgagtctgtctccttgagaaacctaatatgacttttcttagttccatatacttctgggtccaggtagcatacatagccaacaaatgctccatcgttctggcctatctccatcttaagccagtcctgcaaactaggctttgatgggagggatctctcagtgttcttgcccctccttctcatggaacattatctgtgttggtctctgagaagaagagtagtggatatctactttgttgcaatgcagaacctgggccaaagataccagccatccctccaagggaataaaattttggccagtagccctcctgagagacaatttgtctttgcctacgagtcctagatgcaggaccgcttcctgccccatttcaagaagctgaaggctttggctttggaggatcagcagtctagggaaatgtgtgacggttcatgtctgtccccactgacagtcaatcaccacctacaacctgcacagcctgatgcatgcagtctagtttcctgccttattctcaggaacacccagaagatgtctatattaaagagctgcacatgagtgcaattttgactgataggcactctgatctttcctttggtgcctgtgtttaaaggaaatctttctaagaactcgttaaagttctagaatgctatgaatctttgggtttattattggtatgtccatctgcctgctagtacagaacagagcatggtagtctttctcagaacaatgatcctgtttcagtcacagatttcttctgatgcttctgtgttctagaaattactagcttgatttctcctctttgaatttcagcaccaacggagcaaagccccggggtccaggatgctaccatggtgatggacagagttatcgaggctcattctctaccactgtcacaggaagacatgtcagtcttggtcctctatgacaccacactggcatcagaggacaacagaatattaccaaatgggtacaaccttgagttttcttcaaagacagacagcagcccccttacatttctttggaagggccatgcttccaactaacttcttatgacaaatttatctcagatctggaatgtgggtagaatgtctcaggcttctttcttcaggcacagtgtctgaaaggagagaaatgtcggccagctctcttttctcatagttgacagaagcaggaggatatttgaaggtggtgagtttcatgaatagaaagctcaggacacatggccacgtgcttagaaatagcaccattccacaagcccactaaagaccaatgcaatagttcaaccagggatttctgtcattctaatctccaagcctgaagtgaaggttgtattagccatgttcatcttgggcaacaaataaaggatatctatttgacatccagatcttccaatcactttctcctctaacctgtacctgggttctgagaacaggtatctgaagagctatgtgttgccagcacatgaggggcaaaagtaggaaggcagctgaagtcaggaagtataaagattctgaagagttacacatgcaggaagatggacagaaacccattcagaccacgtcagcgtttctgccatgaaggactatcaaatacataggaaaagtgtttcataggttggacaacagacatgacaggcctgagaaaattcagaaagggaatcaaaggagtcaaccttatcatgtccctggcatccttccttgagacccttgaagggcaagcagatggacccagctgaccacagcagtcttgcttaactgaggagagagactggagtttgtgatgcctaggcatctgacgtattctaggctggctaagaatgagaggggatttgtggaggaaaggagtccaagaatacacaccgaagtcttctcaaggctttggctaaatacaaagctgcgtatgccaaggagagttttcacaaagaaagaacaataaagaaaagctactggggaaagaacaactcaagggaacagtgagctcaatggagatgctagagctcacatagcactgggggatatttggttctgaccactcagaggagagacacctcactgaacatcttgggcattcagtagaggtcaagaaagccataatttgggagtaggatcttcggattcctagaaataaggtgactccagaacactccagcaacccttcttccaagccagtctaaaaggatccaaatgatttccaagtaattaactgccttccagaaaaaagtaaactcaaccctccttagaggtaaggaacgaatacagtttctcagttatatgacatccccagagtgcaacttgcatttaaaaatttactagacacaaagaagttttcactgtgatccataactgggagaaaaatcactcaacacaaataggcccgaaataatagaaattatggcattggcaagaacatttaaaatgcacctctgagaactgtgttcaggaaaatgtcagcaaaagctgaccatgagagaaatgaatgcataatatcagaaaaaaaagaattgaagagccaaatggaaatttaaaaactgagaaaagttatatctgtaatgagaattcactggatggccttataaccagtttagatattatggtaggaaaaggtgaacgagaaatgattcaattaaagctagacaaaccacaagacagacagacagacacaaatacacatcacacaatgactgaaccaattaatcaacagagcctcaaggacatctaggaaaacatccaacatttaatatatgtgttaggcaagtcacagaaagagaggaaaaagataatgtgacagagttatacttgaagccatgacggctgacaaatttccaaacatacagaaaatgagaaattctagtcatgaagctcaatgactcaggtatagatttttaaagagcaaaactctgatttactgggtacatcatagttaaattgtctgatttcaaagctaagaagaaaaaaagggggttccttgaacaaacattttgacagttgatctaagaccacagcttaaatatctaggcaaggaaaacaaataagacacaaggaaaggggatggatggaaatagtccaaaccaatgacattcagtgacaagaaaatagaccaacaaaggagtaaatccatgaaacagaaagttggttctttgaaagattcatgtgattgaccacagtctggctgaacagatgacagaccaaggagggagtacaacatcaccatttgaagtaacaggggagaggagccattgctataccatactccaggtctgaagctgacaagaagatatcaagaaaaactgtatgtgaataaattcatgaatgtagatcattggatcaattccttaggtaaacaacaaatcagcaaaccagatactgaatagattgggtatcctatagaaagacatacagatagccagacagagaaacatttgtacgtgcataaaacaactacaagactcacttcaaaatctctcagttaatccaaagtaacatatttggcagaaggtgaaggagggtattctgatcctttcttgtacacattgatgttttctctcggttttcttatgagtatagacgagtttggatgtgttacaataagaatgataatctgtctttgaaatgttccagttgtttagaagttgaggacgatttgtgattgttacaggacctttagtgagaatattcaaagtcactttttaccactttgttacaacaaaatgtagaggatgtctggtgcccttgttcttctcccatctctggtgaactgtattgttttgtaatttgcagtggcctgaccaggaatactgcaggaatccagatgctgagattagtccttggtgttataccatggatcccaatgtagatgggagtactgcaacctgacacaatgtccagtgacagaatcaagtgtccttgcgactccacggctgtttctgaacaaggtaagaagtctctggccagacaaccacacccttggacttgggataaaaagagttgcaaaatcttagtgatacagaagccttccatgctgcacgggatctgaatgtggactcagggtcagccaatgggaaggaagcctcagcgccttctctgggggaccagggctgagatttttggcaccccgtgacagggtggtgtctttaggaagcgtgcagacttctagggcactggatttaccactcccctggttattcaatagattatttcagtgtcctgtgaaaatggatattctaacatcctgccaaatttgtgatgatttaccaagctcatcatggcctttcctggtatttcttcaagtagacagtactcattgcaaacttcagctttacagttcagaggaatgtggtttttgagtctgtcatccttgagaaacctgatatgactttacttagtccatatcctcctgggtctaggtaacagtacatagccagcaaatgctctatctccctgttaccttaatcttaggcaggtgctgcacacctaggctttgatggaagggatttcttagtgtcttgcccctccttctcatggaacacgtatctgtgttgctgtttgtgaagaagagtagtgatgtctactttgttgcaatgcaggatcctgggcccaagatttcccgccgtccctccaaggaataaaattttggccagtacccctctctgagagacaatgtgtctttgcctggaagtctagatggaggaccacttcctgccccatcttccagaaacttaaggctttggctttggaggtcagtgctctggagaaatgtgtgacggtttcatgtctgcccccactgacaaccaccaccacagcctgcaccgcctgatgcatggcactctggtctcctgccttgttctcaggaacaccaaaagagatctttgccaaagaacaggcacatgagtgcaattttgactgataggcactctatctgtcctttggtgcccaggttttaaagaaaatctttctaaaaactcattgaagttccgaatgctatgaatctttgagctttgttattggcatgtccatctgcctactaatgtagaaagagcatggtcgtcattttcagagatgatgtcctgtttctatcatggattttttttctctgcttctgtgttctggaaattactcagtttgttttctcctctttgaatttcagcaccaaggagcaaagccccacagtccaggactgctaccatggtgatggacagagttatcgaggctattctccaccactgttacaggaaggacatgtcagtcttggtcctctatgacaccacactgcatcagagaaccacagaatactacccaaatgggtatgtctttgagttttctcccaagaaaacagccacccacttaaatttctcctggaagagccatgcttccagctaacttcttatgcccaatttctctcagacccagaatgttggacagaatgtctcaggcttcttgctttgggccagggtctgagaggagagaaatgtcaggccagctctcttttctcatagttgatagaagtggaggatacttggaggtggtgaggtctcatgaatagaaagctcagaagaacatatgacctgtgcttagaaatagcaccattccacaatgcccactaaagaccagtgaaatagttcaacagggaattctgtcattctaatctccaagccctggagtgaaggttgtgtttgccatgttttcttgggtaacaagtgaaggatatctatattgacttcgagatcttccgatcactttctctctaacctgtataaacacattgggttctgagaacaaggtgtctgaaaagctatgtgttgcagcccatgaggggcaaaaggaggaaggcagctgagagtcaggaagtatagagatgctgagagttacacattcaggaagatggacagaaacccatgtctggctatgccagcctttctgcatgaaggactatcaaatacatgagaaaacagttttcacaggttggacaacagatatggaggcttgagagaactgagaaagggaatcaaaggagatcaacttcatcattaacctgtctccttcctggacacagtgttggattgaaggacaagcagatggagcccagctgaccacagcgtcttgcttaactgaggagagagactggagtctgcgatgcctcaggcagctgatgtgtttaggctggctaagaatgagaagggatttgtggaagaaaggagctccaggaatacacacaaagtctcctcaaggctttggctaaatacaaagctgcgtatgcacagggagagttttcataagaaagaacaacaaagaaaagctacttgggaaagaacaactgcaggggaacagtaagccaatggagatgccagagctcacatagcactgggggatatttgaattctgaccactcagagagaaacacctcactacattttgggcattcagtagagaccaaagaaagctgtattttggattgggatcatcttattcctagaatcaaggtgactccagaaaaactccaacaacccttctccaagccagtctaaaaggatccaaatgatctccaagtaaattaactgcattccacaagaaaaaaaaactcaaccccccttagaggcaagggacaaatacaagttgctcagttatatgcattcctattgcgttacttctatttaaaaatttaatagagacacaagaagctttcactggatacataactgggagaaaaaatcactcaacacaaacaggcccagaaattatagaattgtgacattggtgagaacatttaaaatgcacctctgagaactgtgtttcaggaaaatgtcacaaaagctgaccatgagagaaacaaaagcagaatagcaagagaaaagaaaagaaccggaagccaaatgaaaattaaagaactgagaaaaggtacatctctaatgaagaactcactggaggccttatcatcactttagacattacggtaggaaaggtgacctagaaaataattcaatagagctacacaaatcacaggacagacagacagaccaacagacagaaacacacacacacaccacacacacacacacacacacacacacacacacaaagactgaacctattaatcaacagacctcaagggcatctaggaaaaatccacacatttaatatatgtgttaggcaagtcacagaggagaagaaaaagatatcatgacagacattatacttgaagcgatgatggctcgcaacacccaaatatacagaaaacaagaaactcatagtcaagaagctaaatgactcaggtatagaatttaaagagcaaaactctatgatttactgggatatatcatagttaagttgcctcaattcaagctaaaaagaaaaaaagggggttcctatgaacaacagctttgacagctgttgatctagaccacagcttaaatatctaggcaaggaaaagcaaataaggcacaaggaaagaggatggaggaaatagtccaaaccaatgacattcagtggaaaagaaaatagaccaacaaaggagtaatccatgaaacagaaagttaggttctttgaaaagtctatatgattggccaaagtctggcaaacagatgacagaccaaggagggagcatatccatcaccatcatgagtaacaggagagaatgccattgctatagcatcctccaggtgtgaaagctgagaagtagatattgagatcaacgtatgtaaataaattcatgaatgtagatcatgtggatggattgcttaggtaaataacaatcagcaaatcaaacactgaatagatcatgcagttttatagagacttacagacagcctgaagataaacatttgtatgtacgtgaaacaatctccaagacacacttcaaaatccctctcgttaatccaaaggaatgtatttggcagaaggtagaaggagggtattctgatcctttctggacacattgatgttttctctcagttttcttataaagcatagattactttgaatgtgttacataagaatcataagctgtctttgaaatgttgacagttgtttagaagttgaggaccattttgagtgttatgggactttagtgagaatatttcaaatttgcttgtttacactttgttacagaaaacatagagggtgccaggtggtgctgtatcttctccaatctctggtgacctgtattttttggaatttgcagtggcctgaccaggaactactgcaggaatccagatgctgagattccccttggtgttataccatggatcccagtgtcagatgggagtactgcaacctgacgcaattccagtgatggaatcaactctcctcacaactcccacggtggtcccagttccaagcacaggcttccttctgaagaaggtaagaagcctgcagtcagacaaccataccctcggacattggataaaaagatttgcaaaatctttgtgatgcagaaaacttccatgctgcacaggaagtcgaggtgaagtcatggacagccaatgggaaggaagcttcagtgccttctctggggggaccaagctgggatgttgagtgccttgtgagggatggtgtctttaaaaggggcacagaccctctggacactggatttatcacttccctgttatcaaacgaatcatattagtgtcctagccaagtggatattctaacatcctgccaaacttgtgaagatataccaagctcctaagcctgtccaccctttcttcaagtaggcagtgtttattgcagtcttcagctttaccattttgaaggaatccatttttgaggctgttgttcttgagaaacctaacatgtcttcattagatccgtattgtctgagactttgaagcagtacatagccaccaaattgtttatctccccagcctaccttcatttgggcatgccttccacacctaggatttgagggaagggatttctcagtgttctcatcccgcttctcatggaacatttatctccgttgttttttgagaagaagagtagtggatgtcagcttcttgtaatgagggatcctgggcccaagattccctgtctcccctcctaggctataaaatttggcctgtactccttctccctgagaggcaatgtgtctttacctacaagtcctagatgaagatccttttctgccccacaccccagaatctgaaggcttttgctttggaggagcagtgtctagtgtgcaagggtttcatgtataccccccactaacagccaatcaccacctatagccgaacagcttgatgcatggcaccctggtctcctgccttgttctcatgaacacccagaagagtgtaagcaaaagaccattcacatgagtgtaattttgaagtataggcactctgatctgtttttgtttgtttctttgtttgtttgttttccagggttgaattaaaatatttatgactactattaaatttctagaatcctataagtctatttgtatttttattctacatttcaatttgctgctaatatagaagagtgtaaattgttaatcctcagattattccactttgtgtgtcatatttttttcacatttcccttttctaggcaatactgagcttgattttctcttttaatttcacaccaactgaaaacagcactggggtccaggactgctaccgaggtgatggacagagttatgaggcacactctccaccactatcacaggaagaacatgtcagtcttggtcgtctatgacacacattggcatcggaggatcccattatactatccaaatgcgtatgtctatcatgttagcataaaaggaacaatagtcaactaaaatttctcttagctggcccatgctacaagctcactcctaggtccaaatttctcatagactcagagtttgtagcaaaatgtctcaggaaacttactttgagcaaaaggtctgaatgaagagaagttttaggattgctatctttcataacaatttatggaagcagcaggatatatggaggtggtgaagtctcattaatgtaaagctaaggagataaatgaccaaatgctgagacaaagtatcattccacaatgcccactaaaggtccatgcagctttcaaccatgcaattctatcattctatcctccattccctgaagtgaaatttgtgtttccatttttgacacgaatcagaagtaacaaattcaggctgggtgcagtggctcaggcctggatcccaacactttgggaggacaagacgggcagatcaccagaggtcaggagttcaagacagcctggctaacatggcaaaaccccatctctacgaaaaattaaaaaattagccggtcatgtggtgggtacctgtaattccaactacttgggaggctgaggcaggagaaacacttgagctgggattcagagtttgctgtgagccgagaacatgccactgcactccagcctgggtgacaagcaagactcaatctcaaaaaaaaaaaaaaagaagaagaagaagaaaagaagaagaggagaagaagaagaggaagaagaagaagaagaagaagagtaagagaaattttttggagccgcggaggagccagaagaagaagaagaagaagaagaagaagaagaagaagaagaaggaggaaaagaagaagaagaagaagaagaagaagaagaagaagaagaagaagaagaagaagaagaaaagaaaatagaaatgagtgcatatatttatatatgagtactagcctgtatgaacacactggttctaagcaccagttttctgaagggatatgggttgtcaggcagagtaaaagcaggaagcagatgagagtcaggaagtaaacagatgtggtgattaaaatgggcaggtacatggacaaaaaatgcatgtctgacaaaaactggcctcttgccataagtgagtatgaataatatggaaaactgtttgcacatgttgaacagcagacagtacaacctgagatagtttagaaagggaacaaataagatcaaccccataattacccttcctagacttaagggcaaagagttttaaccaagcattccacagcagtcttgctaaactggggagagagactggagttttgtttactaataaaccgagattttctaggttaggtaataatgagaaagtatttgtggagaaaaggagctccggaatacacacagaagtctcttcaagtctctggctgaacagaaagctgtgtatgcacagaagagtttccagagagaaaggagaacaaagaacagctactggggaaagaacaactgctgggaacagtgagctcaatgaagatgccagagctcacatagcactgggaggtatttgagcttgaccagcctgaggagagacacttcattgaacatcttgggcattcagcaaagaccccaaaaaccatacttcaggagtagaattaatgcattcctagaataaagtctactccagaaacacctagaaaagcttagaaaccaagtctaaaaagatccaaatgatctccaagtaaattaatgcctgtcagaagaaaacaacctcttcagaggtaaacaacaaaattaaattgctcaattaatagtatgcacaatgtgtggcatacatttaaaaatttgctaaacatacaaaaagcatttgtgtgacccataaccaggagaaaaatcagtcaatacaaatagacccaaaaatgataaaataacagaattggcaaggagatttaaaatgtatgtatcataattgtgttcaaggatttaagaaagcgtggacaagaaataaataaatggataatatcaacagaaagaaaaattgtaaaagaccaaatggagagtcaagaactgaaaaaaaagacatctctttaatgagaaaatcactaatggccttataatcatattagatagtacagatgataaagctaactagaaaatattagggggtgcaaaccatagcacgcttatacaaagcctgagaagataaacagagcctcaaggacactatgaaaatatcaaaatatttaatatttgtttaaagcaagtcacagaggaagggaaaggatattggaacagaaaaaatacttgaagcagtgatggctgatgactttctaaatatggaaaaatgataaactcacatagtcaagaagctcaatggatcagatataggattttaaaaagaaagctgtatgatttatttggacacatcataattaaattgtccataatcaaagatagaagtaaaatcttatttgaagcccaagggaaaaaacatacctttacatagagtaacagtgaccaaatgactgatgccttctcatcagaaacaacacaaatcagaaacaatagaataacaccttagagtggtaagaagaaaaaaagatcaaatcagaaacaacaaaataacacgtttagagggtaaggaggaaaacaagatcaaatcagaaacaatggaataacacctttagagtgtaagaagaaaaaaagatcaaatcaggaacaacagaataacgccttcagagtggtaagaaggaaacaagataaaatcagaaacaatgaaataacacctttagagtagtaagaagaagaaaagacaggtcagaaaaaatggaataatatgctaagaagaaaaaaaaagatcaagtcagaaacatggaataacacctttagagtgaaaagaaggaaaaaaacccagcaagcttaaacgctatgacagcaaacaattccactgaaaatgaatgttacgtaagtacatattctgtcctcctaaaacaaagaacaaataaaagaatgtttcatcagcaggattatgtaataaaagatgtgaaagatgctatgtaagtagaagaaaaataataccatatgggaattggcatcaaaaccacaaaaactatcaaaacaaaaaaactttattgataaatttaacacaatatgcaaaagaactatacatgtatactacataacattggtgagaagaaaattagaagatctaaataaagacacatcagcttatagattaaaaaatccaatgtcacttttcacaaaactgatctttagtttcaaccccacccaagcagaattcctgcagtcttttcttgaaaacctaacagaatgtatatgctagatcaccaagacaatctttaaaaagaataaaaaacttggaataaaatcacaagtttgtgggtagatgcatatggtaatatggaaattctcataaagacacagtaatcaagacatgtggtatggctgggacgcttggctgtaatcctaacactttgggaggccaagatgagaggattgccgagatgaggagttgcagacaagcctgggcaacatagcaagaccctcatctctacaaatattaaaaaaattagccaggtttggtgccatgtgcctgtagtcccagctattcaggaagctaggtgggaggatcactggagcccatgaggtggaggctgaaatgagccatgattgtgctatgaactttagcctgggagacagattaaaaccttccctctctctctcaaacaaacaaacaaaaatacatagtattgggcaaaacatatgcaaacaaaaacagaaaagggtcagcataaattacatatatggtcaatttattttcaatacaggtagcaaagcaatttaatgaggaaattttttccaaaattggtctgaaacaactggatagccatagaaaaaaactataacaaatgtgcgcttgaatcctactgtatgactcaaattaaattaatttgagatagctcttagacctcatgtaacagctaattctgaggctgaaatataagactgctatgaaaaagtatagtatcttaaaccttggagaaggaaaaattttttgagggaagaaccagaaaacactaactgtaaaagaaacaaatgataatgtggacattcattgaataaaaacttatgctcaccaaatatgactgtaagaaaataaataagtaagtaacacactggaagaaaaacactctcatccatatatctgaaaatggcctgtatccagagtatagaaacatttctcccactcactaatcagaggacaaacacctaatcaaaatgggcaacaggcttgaatagtcatttcttaggagaagatgcacacaggccaacaatcacctgaaaaagtgcacaacatcttagccatcaaaaatcaagagttataacctcataagatgacactgaacatccagtgtacatggatatcattaagaagacacaataaaagtggtgtcaccgatttggagctagaatgtgccactctctcatatgctggtggaagttaaaatcatacaacaaattaaaaaatcagtctgatgctttcttataaagttcgataaatagcatctatcctacaaacctgtaattctattcttgaatatttaccccccaaaatgaaaactaagtccacaaaaatctatataaatattcatagcagctttatgttttataaactcaaaaaaaaactatttcaatgttttcatcaaaagaaaatgaaaactatttaaatggtttcatcaaagaaaatgaaaaaagaatttccagtatatttatacaaaggaatactattcatcaacaagaacaagttactgatagtctcagaagcatgaacaaacctcaaaaatatattaaggaaagagccagacgtcaaagtgtatagtctgtatgagtccattcatgtgagtttatagaaaacaaatttatggtgaaagaaaccaatagcatttgacactggccgtgggaagagggtagcagaattgattgagcagccacacaagggagtttctggggtggtgaaaatgttctgcattgtgaggcagtgtgggctacacaagtatatgtatttatcaaatctcatccagctacatttaagactgtgcatctcactctatgtgaaaatatactcaactgaaaaacagagcaggtatctgttcaggtgctacatcacttgatacgtccagttgtgttaaaaaccactgcctaacatcctcaatgggggatctgggcttgagactaggtcacatgtgtagagtctctacagagaccgtgttgattcccatgctccataatacgttccaagttttctcagacagccacaggtcatgaatgtaggattctgagaggttggagcaacgttcttgggaggcataatggggaaggcattctccagattcctccagcctggggtcttcacctgctgtgcctcttactgcattgttttctgactctccatagccacttgaccccttcagatcccatagtctacctagccgtctccctttatgcctgggtcccgctgttctttcaactcatcacccattccttcagtcccagagtggctgcagcagcagaggatggactgagagcaggagaggaggtcgtgcccatgaacccatcctagagaacagcatcctgcctgggagctagttttccagggaagcttttataagtcctgtagacccaacccacttgctctaccagatacagtatttatagtaatactattttcatgattattttatatgcaaatgtagagcatttatgctacactatgagtaaatagagtaagggggctggcatggaattatataatcttggatgccacttcttccttggggaaatgtatttgagttccaacttaatattactatatagtcttatagagagagagacaaagagctagacagacagagatatcttgtatgtgcattaaaaaatctaagatacatatttcaaaatctgtgtcatttattctggagaaagtatttggcagaaggtgaaaggaagatattctgatcctttcttgtacagacatgtatatctcagttttcatagagagcatatactacttttgatgttttaaaacaaaaattataactgtgatgtgtccacagttgtttaaaagttgaagctgaagaccatttgtgcttgtggcatattattgtggtataatgggaatatttcaaaggcacttgttaacactttgttacagcaaatgtagagggcgctaagtgcccttgaatattctcccatctctggtgacctgtgttgtttgaaatttgcagtggcctgaccaggaactactgcaggaatccagatgctgagattcgccctggtgttacaccatggatcccagtgtcaggtgggagtactgcaacctgacacgatgtccgtgacagaatcgagtgtcctcacaactcccacagtggccccggttccaagcacagaggcccttctgaacaaggtaagaaatttgtggttagacatctatatactgggatgaaaaaccaggaaaatcttactgatgcagaagccttcagtggtacactggagggttggttgagggtctcaatgtggaggaaagcctcagcgccctctctgggggatccagaactgtgatttttggcagctgtgaggaggcagtgtctttaggaagggcacggtgtctttaggaagggcacagacccccagggcactggacttaccactcccctggttattaaatgggtcatttcagtgtcctagcaaaatggatattctaacagcctgccaaatatgtgaagatttccaagccaataagcctttcagtgatttaaagtagacttttttcattgcaatctacagtttgcagtttcttaagaacaggcctttgagtatgatatcctagagaaacctaaggagactgcattatttttctattgtctggggctgcatagcaggaggtaaccaacgaatgctgtctctccctggcctatctcagtcttcacaggctctgttcacctcagctttgaagttagaaatttctaggtgttcttgcctctcttctcatgaaacctgcattggcagtgagtctacagaagaagaggaagagaattctgcttgttacaattcaggactctgggcactagaagattccctatctctcctccaagggaataattgtttgtctctaaccctccttgagaaacaatgagtctttgcctgcactcctaaatgtagatgatttcctgcccaaattttcaaaagattaagccttttgccttggtatgagcaatggctagggaaatgcgcaagggtcttgtgtcggcccctgactgaccaccagtcacctcctacgcctgcaccaaggaatgcattgcattctggtcttctgccctgtggttctcatgaaaaccgcagagattcatatgatggagctgcacatgaatgtaatttccaatgtccagcattctccctgttctttatctttagatttaaaaataatgtttctatgaacttattaaaattctagaaactatgaatctactgggtcttttcacatccttttgctactagtagaaaaaagaatagtataattttcagaggctactgtccagtatgtgacataaattgtctcccatgtttctctgctatgcaattactgagtatgatttattttattttaatttcagcaccacctgagaaaagcccgtggtccaggattgctaccatggtgatggacggagttatcgaggcatatcctccaccacgtcacaggaaggacctgtcaatcttggtcatctatgataccacactggcatcagaggacccagaaaactacccaaatgcgtatgtatttgattaaaaccataagaggagcaacagccactcaaatattggttagaagacccatgctttaagctcacttcctagggacaaatttctctagactcacattttggcaaaatgtctcaggacctttgcttttgagcaaagagtctaagagagagaaattttaggcctgctatttttcctaatagttttatggaaggagtagaatatacgaagtggcgaagtcatattaatgtaaagctcagaagataaatgaccaaagcttaaacacacaccattccacaatgcccactaaaaatcaatgtcatctttcactcgtgcaattctgtcatctaaatttcaattcccgaaggtttgtttgccatttttgtcatgggtaataagtaaaaaaaaaaaattaagatgtgtatatatatatatatatatatatatatacacacacacacacaacacaaacatctgaatatttatatatatgtctgaatatttatatacttgtgtataaaactatatttaaatttttgcataaatttatatatttttaatatttcactaaaaattatattgttcactatgtatgtctgagtatttttatatattttaatataacattttaaatatttataataaatattcaggtatgtaactgaatattcatttacacacacaaatatatgtgtgcatggtgtatatatatatatacccatatatatatatatatatacacatatatatatatatataatagtatatatatatatatatatatatacacatatatatatatatatatatgtatatattatatatatatatatacacacacacacacacacacatacatacaggtataaacacactggcctgaagcaccagtggtctgaaaggacatgtgttgccaggacttgaagagcaaaagcagaaggcggatgagagtcaggaggtacacaaacgctgaaaagtaaaatggacaagtacatgacaaaaagcaggtataagcataacagccttttggaagtaaatgactataaaatatatgaaatactgttttcacaagttgcacaacagatagtagtgtattgagataatttagaacagaaacaaatgtgatcaaccccataagtgtgctgtatttcatcatggattgaaggaaaaaggatggagcccaagaagaccacagcagtcttgatgaactgagagacaccagagtttgggatacaaaggcagctgggattttctacacttggtaataatgagaaagaatttgtggagataagagctacagtcatgtacctagaagtcacctcagtgtaatataaatctgcatatgcacaggagtgattccacaatgaaagtaggacaaagaacagctactggggaaagaataactacagggaacaatgagttcaatggagatggcagagctcacaaagcactgggggatatttgagtcttaccagctagaaaagagacctcattgcaaatcttgggcattcagtagagaccccagaaagccactctttggaaacagagttgatgtattttaagagcaaaatctactccacaaaaacctagcaaaattgaaaagcaagtcagaaagaccaaaatcctctcaacataaattagttgccatcagaagaaagcttaacctcttcataggtaaacaataaaatcaaattgctcagttactggcatccacaatatgtgacataaatttaaaaatttactagacatacaagaagcatttgtgtgatccataaccaggagaaaaatcattcaatacaaatagacccagaaatgacagaatgatagaattagcaaaaacatttaaaatatacatatgatcacttgatcttgtgatcagaatcacaagagaagaaagagatacttgaacagaaaaaatgcctgaagcaatgatggctgaaactttccaaatatgaagaaaaaaaagctcacagattcaagaaaactaatcaatcagaatatgattttgaaaagtaaaaatgtatgatttactttggcaaatcttcttggttaaattgctaaaatcaaagaaagctaggaaaattttataagccagaggaaaaaagattgtttatataaggaacagttacacaaatgactgatgccttctcatcagaaacaatgaaagtcagaaacataaagtaacatctttaaagtaatagaagaaaaacccaagaggtgagggatcatggcagcaggaggcaggactagattgcagctctggacagagcagcatgcagaggctcatattgtgattttagccccatattgactgcaagaacagaccagcaatcctgagaggacccacagacctgtgaaggaagcagactgctcctgcaggataagggagacaccccaaatactgtgagttcccaactgcagaagtggaaaagggaggccttactccctcaaacacaccccacaactggagagctgaaagtctgtttgcaggagaagttcccaactttacctgggcctcagtaaatttaggagctgagccaagcaaaatataggggtagaggaagcagcagagaagacctcagagcttgtggatccccaagcagctcattcctgcctggcaccacagagatccatcagaagtgtggccaaggaacagagggtaaaactccacatggaggactgctctacctgaactttctaacaattgaacagggggagaagcctcctggccagaacttgggggagggcatgaatctggtttgcagcttcacaggtgggggaaggactaaagcccttttctttcacagctgggaggtggaaagcccaggcaagttttcaagcctgactttccccccacctggaaacagacttggagctgttgcgggttgggggcatggtgggagtaagaccagcccttcagtttgcatgggtgctgggtgaggctgtgactgacagcttccctccacttccccgacaactcagatgactcagcagaggcagcataatcctcctaggtacacaactccagtgacctgggaacttcacccccacaccatacagagcttcagtaagacgtgcccaaggaaagtctgagctcagacacgcctagtcccacccccactgatggtccttccctacccaccctggtagcagaagacaaagagcatataatctttgggttctagggcccacccacctctagtccctctccacactagtatagctgatgcaggaggcaaccagcacaaaaatagagcattaaaccaccaaagctaggaacccctatggagtccattcaccctcctccacctccaccagaacaggcactggtatccacagctgagagacccatagaggttcacatcacaggactctgtacagacagtccccagtaccagcccagagctgggtagattgctaggtggcaagacccagaagacaggcaataatcactgcagttcagctcacaggaaccacatccataggaaaagagggagagtactacatcaagggaacaccccatgggataaaacatctgaacaacagccttcagccctaccttccctctgacacagtctacccaaatgagaagaaccagaaaaccaaccctggtaatatgacaaaacaaggctcatcacactcccagttcacagcaatggatccaaaccaagaagaaatccctgatttacctgaaagagaattcaggaggtagttattaagctaatcagggagggaccagagaaaggcaaagcccaatgcaaggaaatcaaaaaaaaaaaggtataagaagtaaaaggtgaaatattcaacaaaatagatagcttaataaaaaacaataaaaaattcagtagactttggacacacctttggaaatgtgacatgctctgaaagtctcagcaatagaactgaacaagtagaaaaaataaattcagagctcaaagacaagacttcaaattaacccaatccaacaaagacaaagaataaaggataagaaaatatgaacaagccttcaagatgtctgggattatgttaaatgaccaaatataagaataatcgtggctccgaggaaaaagacaatactaaaagcttggaaaacatatttgggggaataactggggaaaattacctggccttgctggacacctagacatgcaaatacaagaaacacaaagaacatgtaatacaagcagcacaaagaacacctgggaaattcatcacaaaaagatcttagcctaggcacttctcatcaggttatgcaaagttaagacgaaggcaagaatcttaagagctgtgagacagagcaccaggtaatgtataaaggaaaccctatcagattaacagccagtttttcagcaggactgtacaagctataaaggattggagccctatcatagcctcctcaaacaaaacaattatcgtcaagaattttgtatccagcgaaagtaagcatcatatatgaaggaaagatacagtcgttttggacaaacaaatgctaagagaattcaccattaccaagtcaccactagaagaactgcaaaaggagctctaaatcttgaaacaaatcctagaaacacatgaaaacagaatctctttaagcataaatcacacaggacctataaaacaaaagtacaagttaaaaaacaaaaacaaaaacaaaaccaaagtacggaggcaataaagaatatgatgaatgcagtggcacctcacatttcatgctaaaattgaatctaaatggcctaaatgctccacttaaaggatacaaaaagagttgtggctggcaagatggctgaataggaacagctccagtctgccgctccccgtgagatcaaccatagggtgggtcatttctgcatttccaaccaaggtacccggctcatctcattgggactgttagacagtgggtgcagcccacagagggtgacctgaagcagggtggggtgtcacctcactgggaagtggaaggggtcagggaactccctcccctagccaaaggaagccgtgagggacgtgccgtgaagaccagtgcattctggcacaaatactatgcttttcccacggtctttgcacctgaagaccaggagattcccttgggtgcctacaccaccagggccctggatttcaagccaaaactgggctggcatttgggcagacactaagctagctgcaggagttttttttcatacccagtggtccctggaatgccagcaagacagaaccattcacccccgtgaagaaagggctgagccagggagctaagtggtctttctcagtggatcccacccccatggagcccagcaagctagctccactggcttgaaattcttgctgccagcacagcagtctgaagttgacctgggacgccaagcttggtgggaggaggggtatccacaaatactggggcttgagtaggaggttttccctcacagtgtaagcaaaaccgctaggaagtttgaactgggcagggtgcactgcagcttggaaagccattgtagcaagagtgcctctctagattcctcctctctgggcagggcatctctgaagaaaggcagcagccccagtcagaagcttatagataaaactcccatctccctgggacaagcaactggaggaaggggtggctgtgagtgcagctccagcagacttagtttcctgcctgcagctctgaaaagagcaccagatcccccaacacagcactagagctctgataagggacagctgcctcctcaagtgggtcctggtttcagaagataataagaaactcctctgagctaaagagcatgttctaacacaatgcaaggaagctaagaaccttgaaaaaggtcagaggaattgcaactacagtaagcagtttagagaagaacataaatgaccttagggagctgaaaaacacagacgagaacttcatgacacatacacaagtatcaatagcaaaatcgatcaagtggaagaaagatatcagagattgaaaatcaacttaatgaagtaaagcgtgaaaacaagattaaggaataagaatgaaaaggaatgaacaaatcctccaagtatgggactatgtgaaaagattgaaccacgtttgattggtgtacctgaaagtgatgggagaatggaaccaagttggaaaacactctcaggatattatccaggagaacttccccaacctagcaagacaggccaacattcaaattaagaaatacagagaataccacattcaaattcaggaaatacagagaacaccacaaagatactctcaagaagagcaacctgaagacacataatcgtcagattcaccaaggttgaaatgaaggaaaaaatgttaagggcagccagagagaaagtttgggttacccacaaagggaaccccatcgactaacagtggatcttcctgcagaaactctacaagccagaagagagtgggaggccaatttcaacattcttttttactattattatactttaagttctagggtacatgtgcacaaggtcaggtttgttacatatgtatacatgtgccatgttggtgtgctgcacccattaactcttctttacattaggtatatctcctaatactatccctccccactccccccatcccatgacaggcccggtgtgtgatgttccccactctgtgtccatgtactctcattgttcaattcccaccttgagtgagaacattcggtgtttggatttctgtccttgtgatagtttgctgagaatgatgtttccagcttcatccacatccctacaaaggacatgaagtcatccttctttatggctgcaagtattccatggtgtatatgtgccacattttcttaatccagtctaccattgatggacgttgtgttggttccaagtctttgctattgtgaatagtgccgcaataaacatatgtgtgcattgtctttatagcagcatgatttataatcctttagatatatatccagtaattgtatggcttgtcaaatggtatttctagttctaaatccttgaggaatcaccgcactgtcttccacaatgttgaactagtttacagtcccaccaccagtgtaaaaatgttcctatttctccacatccttctagcatctgttgtttcctgactttttaatgatcaccattctaactggtatgagatggatctcattgtggttttgatttgcatttctctgatggccagtgatggtgagcactttttctgtgtctcttgactgcataaaagttttcttttgagaattgtctgttaatatcctttgccactttttgatggggttgtttgattttttttcttgtaaatttgtttatgttctttgtagatctggatattagccctttgtcagatgggtagattgtaaaaattttctcccattctgtagttgcctgttcattctgagggtagtttcttttgctgtgcagaagctctttagtttaattaatcccattggtcaattttggcttttgttgctattgcttttggtgatttagtcatgaagtcttgcccatgcctatgtcctgaatggtattgcttaggttttcttctagggtttatatggtttaggtctaacatttaagtctttaatccatcttgaattaatttttatataaggtgtaagaagggatccagtttcagctttctacatatggctaggcagttttcccagcaccatgtataaatagggaaacctttccctatttcttgtttttgtcaggtttgtcatagatcagatggtgtagatgtgtggtattatttctgagggctctgttctgttccattggtctatatctctgtttggtaccagtaccatgctgttttggttactgtagccttgtaatgtagtttgaagtcagcagagtgatgcctccagctttgcttttttggcttaggattgtcttggcaatgcatgctctttttgttccatatgaactttaaagtagttttttccaattctgtgaagaaagtcattggagcttgatggggatggcattgaatctataaattaccttaggcagtatggccattttcacatattgattcttcctatccatgagcatggaatgttcttccatttgtttgtgtcctctttatttcattaagcagtggtttgtagttctccttgaagaggtccttcccatcccttgtaagtggattcctaggtattttattctctttgaagcaattgtgaatgggagttcatccatgtcctacaaaggacatgaagtcatgtatgggaatgcttgtgatttttgcacattgattttgttcttgagactttgctgaagttgcttatcagcttaaggagattttggtctgagaagatgggttttctaaatatacaatcatgtcatctgcaaacagggacaatttaacttcctcttttctaactgaataccctttatttccttctcctgcctaattgccctggccagaacttccaacatatgttgaataggagtggtgagagagggcatccctgtcttgtgccagttttcaaagggatgcttccagtttttgcccattcagtatgatattggctatgggtttgtcataaatagctctattattttgagatatgtcccatcaatacatagtttattgagagttcagcatggagagcgttgaattttgtcaaaggccttttctgcatctattgagataatcatgtggtttttgtcttggttctgtttatatgatggattacatttattgatttgcatatgttgaaccagccttgctcccagggataaagccaacttgatcatggtggataagctttttgatgtgctgctggattagtttgccagtattttattgaggatttttgcatcaatgttcatcatggatgttggtctaaattctcatttttgttgtgtctctgccaggatttggtatcaggatgatgctggcctcataaatgagttagggaggattccctctttttctatgattggaatagtttcagaagaattggaccagctcctctttgtatctgtggtagaattcggctatgaatctctcctggacttttttggttggtaggctcttaattattgcctcaatttcagagcctgttattggtctattcaaggttcaatttctttctggtttagtcttggtagggtgtatgtgtccaggaatttttccatttttctagattttctagtttatttgcacagaggtgtttataatattctctgatggtagttttatttctgtgggattggtagtgatatcccctttatcattttttattgcatctatttgatcttctctcttttcttctttattagtcttgctagtggtctatcaattttgttgatcttttaaaaaaccagctcctggattcattgatgttttgaaggtttttttgtgtctctatctcctcagttctgctctgatcttagttatttcttgccttctgctagctttttaatgtgtttgctttgcttctctagttcttttaatggtgatgttagggtgtcaattttagatctttcctgcttctcttgtgggcatttagtgctgtaaatctccccctacacactgctttaaatgtgtcccgagattctggtatgttgtgtctttgttgtcattggtttcaaagaatatctttatttctgcttcatttcgttacatacccagtagtcactcaggtgcaggttgttcagtttccatatagtgagcagtttttaatgagtttcttaatcctgagtcctagtttgattgcactgtggtctggagacagtttgttataatttctgttcttttacatttgctgaggaatgcctcacttccaatatctggtcaatttcagaataagtgcgatgtggtgctgagaagaatgtatattctgttgtttggggtggagagttctgtagatgtctattaggtctgcttggtgcagagctgagttcattcctggatatccatgttaactttctgtctcattgatctgtctaatgttgacagtgggggttaaagtctcccattattattgtgtgggagtctaagtctctttgtaggtctctaaggattgctttatgaatctaggtgctcctgtattgggtgcatatatatttaggatagttagctttcttgttaaattggtccctttaccattatgtaatggccttctttgtctcttttgatcttgttagtttaaagtctgttttatcagagactaggattgcaacccctgctttttttgttgtttccatttgcttggtagatcttcctccatccctttattttgagcctatgtgtgtctctcacgtgagatgtgtcttcagaatacagcacactgatggatcttgactctttatccaatttccagtctgtgtcttttaattggagcatttagcccatttacatttaaggttaatattttatgtgtgaatttgatcctgtcatcatgatgttcgctggttattttgctcattagttgatcagtttcttcctagcatcgatggtttttacaatttggcatgtttgtgcagtggctgatacgattgtttctttccatgtttagtgcttccttcaggagctcttgtaaggcaggcctggtgtgacaaaatctctcagcatttgcttgtctgtaaaggattttatttctccttcacttataagcttagtttggctggatatgatattctcagttgaaaattcttttctttaagaatgttaatattggctgccactctcttctggcttgtagagtttctgctgagagatctgctgttagctgatgggcttccctttgtgggtaacccgacctttctggtgaatctgacaattatgtgtttggagttactcttctcgaggagtatttttgtggcattctctgtatttcctgaatttgatgttggcctgcctttgtaggttggggaagttctcctggataatatcctgaagagtgtttccaacttggttccattctcctcgtcactttcaggtacaccaagcagatgtagatttggtttttcacatagtcccatatttattggaggctttgttcatttctttttactccttttttttctaaacttctcttctcgcttcatttcattcatttgatctttaatcactgataccctttttccacttgattgaatcaactactgaaacttgtgcatgtgtcacgtagttctcgtgccaggttttcagctccattagatcatttaaggtcttctctatgctgtttattttagtctgccttcatctaaactttttcaaggtttttagcttctttgcaatgagttcgaacatccttcttagctcggagaaatttgttattacagatcgtctgaagccttcttctctcaactcatcaaatcattctctgtccagctttgttctgttgctcgtgaggagctgcgttccttcggaggagagaggcaccctgatttttagaattttcagctgttctgctctggtttctccccatctttgtgtttatctacctttggttcttgatgatggtgatgtacagatggggttttggtgtggatgcttttctgtttgttagttttccttctaacagtcaggaccctcagctgcaggtctgttgggtttgctggaggtccactccagtccctgtttgcctgggtattaccagtggaggctgcagacagcaaatattacagaacagcaaatgttgctgcctgattcttcctctggaagcttcattcagaggggcacccagctgtatgaggtgtcagttggcccctactgggaggtgtcccccattaggctactcgggggtcacggacccacttgaggaggcagtctgtccattctcagatctaaactctctgctgggagaaccactactctcttcaaagctgtcagacagggatgtttaagctgcagaagtttctgctgccttttgttcagctatgccctgcccccagaggtggagtctaagaggcaggcaggtctccttgagctgtggtgggctccacccagtttgagcttcctggtcctttgtttacctactcaagtctcagcaatggcagacgcccctcccccagctttgctgccccttgcagttcggtctcagactactgtgctagcagttcaatctcagactgctgtactagagtgagcaaggctctgtgggcatgggaccctctgagccatgtgcaggatataatctcctgtgtgccgtttgctaagaccattggaaaagtgcaatattagggtgggagtgtcccgatttccgggtacatctgtcatggcttcccttggctaggaaagggaattccctgaccccttaccttcccgggtgaggcaatatcccgccttgcttcggctcactctccgtgggctgcacccatgtctgacaagccccggtgagatgaacccagtacctcagctggaaatgcagaaaccaccatcttctgctttgctcatgctgggaactgtggactggagctgttcctattcggccatctgaaacctcccctctctcacgatcacaaggtcccacaataggccgtctgcaggctgaggacaagaaaagccagtctgaattccaaaactgaagaaattggagtctgatgttcaagggcagaaacatccagtgccaaagaaagatgtagaatattcaacattcttaaagaaaataatttcaacctagaatttcatatccagccaaactaagctttataacaaaggagaagtaaaatccttacaaacaagcaaatgctgaggaattttgtcaacaccaggcctgccttacaagaggtctgaagaaaacactaaatatggaaaggaaaaaccagtaacagctactgcaaaaacataccaattgtaaacaccatcaacactataaagaaactgcatcaactaatgggcaaaatagccactagcatcataatgacaggatcaaattcacacataacaatattaaccttaaatgtaaatggctaaatgccccaattaaaagacacagactgggaaattgaataaagagtcaagacccatggtttgctgtgttcagaagacccatctcagggtgaaaagacatacatgggctcaaaataagaaatgaaggaatatttaccaagcaaatggaaagaaaaaaaaagcagcggttgcaatttagtctttgatgaaacagactttaaaccatcaaagatcaaaagagacaaaggagggcatacctaatggtaaaagtatcaatgcaacaagaagatctgactgtcctacttatatatgccccaatacaggagcacccagattaataaagcaagttcttagagacctacaaagagacttgacttccacacaaaaatagtgggagactttaacaccccacagccaatattagatcgacggacagaaaattaacaaggatattcaggacgtgaattcagctctggaccaagctgacctatagacatctacagaactcgacaccacaaatcaacagaatatacattcttctcagcaccaattgcacttattctaaaattgaccacataattggaagtaaaacacttctcagcaaatgcgtagaatggaaatcataacaaacagtctctcagaccaaagtgcaatcaaactagaactcggattaataaactcactcaaaaccacacaactatatggaaactgaacaacctgctcctgattactactgggtaaataacaaaattaaggcagaagtagataagttcttagaaaccaaaagaacaaagacacaatgtgccagaatctctggtacacagctaaagccatgtttagagggaatttatagcactaaatgcccacaggagaaagcgggaaagatctaaaatcaacaccctacatcacaattcaaagaaccagagaagcaagagcaaacaaatacaaaagctagcagaagaaagaaataactaagatcagagcagaactgaaggggataaagacacgaaaaccctttaaaaattaataaatccaagagctggttttttgaaaagattaacaaaatacatagaagcctagcagactaataaagaagaaaatagagaagaatcaaatagacacaataaagaataataaagggatatcaccaatgatgccacagaaatacaaactaccatcagagaatactttaaacaccctatgcaaataaaatagaaaatctaaaagaaatggataaattcctggacacatacaccccccaagactaaaccaggaagaagtcaaatccctgaatagaccaataacaagttctgaaacgaggcagtaattaatagcttaccaaccaaaaaaagcccagaccagagggattaacagtaaatcctaacagaggtacaaagaagagctagtactattccttctgaaactattccacacatagaaaaagagggactcctgcctaactcattttatgaggccagcatcattctgataccaaacctggcagagacacaacaagaaaagaaaatttcaggccaacatccctgatgaacataatgtgaaaatcctcaataaaatactggcaaactgaatccagcagcacatcaaaaagctatccaccatgatcaagttggcttcatccctgggatgcaaggctggttcaacatattcaatcaataaacataatccatcacataaacagaaccaatgacaaaaaccgtatgattatcgcatagacgcagaaaaggcctttgataaaattcaatacccaatcatgctaaaaactcttaaaaactaggtattgatggagcatgtctcaaaataataagagctacttatgacaaatgcatgccaatatcatactgaatgagcagaagctggaagcattccctttgaaaaccagcacaagcaaggatgccctctctcaccactcctattcaacatagtattggaaattctgtccagggcatcaggcaagagaaagaaataaaggtattcaagtgggaagagagggagtcaaattattttctttgcagatgacatgattgtatatttagaaaactctatcatctcagcccaaaatctcttaagctgataagcaacttcagcaaagtctcaggatacaaaatcaatgtgcaaaaatcaaagcattcctatacaccaataagagacacagagccaaatcctgagtgaattcccattcaaattgctacaaagagaataaaatatacctaggaatccaacttacaagggatgtgaaggactcttcaaggagaactacaaaccactgctcaaggaaataagataggacacaaacaaatgaaaaacattccatgctaatggattggaagaatcaatattgtgaaaattgccatactgccaaagtgatttatagattcaatgttatccccatcaagctaccattgatttcttcacataatagaaaaaactactttcaatttcatatggaatagaaaaagggcctgtatatccaagacacctaagcaaaaagaacaaagctggaggcatcatgctatctgacttcaaaatatactacaggctacagtaacaaaaacagcatggtatggtactggtaccaaaacagatatatagaccatagaacagaacagaggcctcagaaataacaccacacatctacaactattggatctttgaaaactggacaaaaataagcaatggggaaaggattccctatttaataaatggtgttgggaaactggctagccatatgcagaaaactgaaactggatcccttccttacaccttatacacaattaactcaagatagattaaagaattaaatgtaagacctaaaaccataaaaaccctagagacactttgggaggccgaggtggatggatcacgaggtcaggagatcgagaccatcttggtaacacagtgaaagcccatctctactaaaaatacaaaaaattagctgggtgtggtcgtggcacctgtagtcccagctacttgggaggctgaggcaggagaatggcatgagctgaggagttgagcttgcagcaagccaagattgtgccactgcactccagcctgggcaacagagtgagctccatcaaaaaaacaaaaacaaaaacaaaaaatcaaaccctagaagaaaacataggcataccattcaggacataggcatgggagaagacttcatgactaaaacagcaaaaccaatggaacaaaagccaaaatttacaaatcagatctaattaaaataaagagcttctgcacagcaaaaactctcatcagagtgaaaaagcaacctatggagaaaaattctgtggtctagccatctacaaagggctaatgtttagaatgtacaagcaacttaaacaaatgtacaagaaaaaaaaacaaccccatcaaaaagtgggcaaaggatatgaacagacacttctgacaggaagaccttttgtggctgacaaacatgaaaaaagctcatcatcactgttaattagagaaatgcaaatcgaaccacaatgagataccatctcatgcccgttagaatggcgatcattaaaaagtcaggaacaacagatgctgaagaggatgtgtggagaaagaggaacacatttacactgttggtgggatgtaaattagttcaaccattgtggaagacagtgcggtgattcctcaaggatctagaaccgaagtaccatttgacccagcaatcccattactgggtatatacccaaaggattataaatcttctacaataaagacacatgcacacgtatgtttattgtagcactattcacaatagcaaaacttggaaccaactgaaatgcccatcaatgatagactggataaagaaaatgtggcacattacactgtggaatactatgcagccataaaacaggatgagttcatgtcttttgcagggactggatgaagctggaaaccatcattctcagcaaactaacacaagaacagaaaaccaaacacatatgttctcactcataagtgtgagttgaacaatgagaacacatggacacaggaagggaacatcacacacaggggcctgttggggagttgaggctaggggagggattggattaggagaatacctaatgtagatgatgggttgctgggtgcagcaaaccaccatgacacgtgtatactatgtaacaaacccacacattctacacatgtatctcagaacttaaagtataataataatagatacagaactgcagaatgaataagaactcaccaaccatctgctgccttcaggagactatttaagacataaggactcacataaacttaaagtaaatgggtggaaataataataagtgtgtcactgatgtggaggtagattataaaactcttatcatatgctggtggaagatcaaaagataaaacgaattaaaaaatcagtcagatggtttcttaaaaagttccatcaatatgccttatcttacaaacctgcaattctattcctgaatctttatcccaaggaaatgaaaaagtaatccacaaagagttctatatgaatatttataggagctttatttattataattcaaactgtaaaataatttcaatgttcatcaataacaaaatgaaaaaataatttgcaacctactggtaacttgaatactattcagcactgagtatcttaaatagcatggatggagctcaaaaatatatcaggaaagaagccatgtatattctgtatgagttcatttacatgagatcatttacatttctccaaaagaggaaaaactaatttctgttgaaagaaaccaatgtatttgcctctggcagggtaagggggtagcacagattaattgggtagggactcaagagagtttctggggtcacagaatgttccgtgtggtgatgggagtttgggctccacaggtataggtgttgatccaaaatctcaaaaaaacaacattgcagatctgtgcatctcactctgtgggaaagtatatctcaacttaaaaagggcagaaattgcttttaaacgctcagccttttagcacatccagttgcttggaaaccagcttactcaaatgggggtctaggctggagactaggtcacaggcatagagtctctaactttcccatggcacataatacgtttcaggttttctcagagagctgcaggttagtaattgaggattctgacaagttgggtcaacgttcctaggaggcatgaatgggagtgcattctcaagatccctccaccccagggtccttgctttctgtgcctcttactccattgttttctgaccctctgtagccactcgacctcttcagatcccattgtctacccagccatcgccctttatgcttgggtcccactgttctttcatctcatcctccattccctcagtttcggagtggctgccctagcagaggatggactgagagcaggagaggtggtcctgcccaggaacccatcctagagaatggcatcctgtctgggagctagttttttagggcaggttttataagtcttgtaaagccgacacacttgatctacctggtatgttatttacagtaatactattttcataattgcttttactctaaaagtagagccttttagctacactgtgagtaaataaaggggctggcctgggaaggtatcatgttggatgttgtttcttccctgaagtaatatatatcagttacaatttacatttactgcagagtcctagagagagacacagagaatgagacagataccaatacatttttattgcattaaaaaaatctaaggccaggcgcagtggctcacacctgtaatcccagcactttggaggccgaggtgggtggatcacgaggtcaggagattgagaccatcctggctaacacggtaaaccctgtctctactaaaaatacaaaaaattagccaggcgtggtggcgggcgcctgtatcccagctactcaggagactgaggcaggagaatggcttgaacccaggaggcagaccttgagtgagccgagattgcgccactgcactccagtctgggcgacagagcgagactccgtcacaaaaaaaaaaaaaatctaaaatgcactcttcaaaatctatgtcatttattctggaggaagcagttggcagaaggaggaagatattccgaatttttcttgtatacatttatgtatgatccagtttttttatggatcatagaccaattttgatattttaaaataaaaattataatctatttggaaatttacatggttctttagaacttgaggaccgtttttgcttttcggaatattatgtacctaaaatgggaatattacaacgtcactttttaacactttgttataacaaagtttaacagcgctgggtgcccctgaattttttcccgcctcttgtgacctgtgttgttttggaattgcagtggcctgaccgagaactactgcaggaatccagattctgggaaacaaccctggtgtacacaaccgatccgtgtgtgaggtgggagtactgcaatctgacacaatgctcagaaacgaatcaggtgtcctagagactcccactgttgttccagttccaagcatggaggctcattcgaagcaggtaagaagtctgtggccagatatctacacatttgaacattgggatgaaaagaatggaaaatctgactgatgcagaagccttccatgctacacagaaacttgagggtatggcggtggaaagaagcctcagcactctctctggtggagcaatttttggcgcaacgtgcgtggcggtgacttcaggaatggtgcaaacccacctgggcacttgacttaccactcactttgtttgaaaggggttatctcggtgttccagacaaaattccaattctaacatcaggccaaattttgccaaatttcacactagtgagtgtttccaggcatttattaaaatggacagtgttcattcaatcttcagcattgcagttgctgaggtatgtggccgctgagtttgtcatcctggggaacctaatatgatgatatttattccatctaatcctggggctatttggcagtaaataccacaaatacactatttctctggcttatttcagtcttaggtaggctctgcacacctatgcttggaggcaggaatttcttggtgttcttgtgccttcttctcatggaacgtgcatctttggtgttgttgagaggaagggtagtagacttctgctttgttgcaatgcaggatgctggaacaagagattccctgtctctactgtaagggaataagattttagcctccatccttctctaagaagcatgtgtctttgcctccaagtactagatgcaggaccatgaactgccccgtccaccagaagttaaggctttggcttttcaggagcaatcatctagggaactgtgcagggttttcatgtcttcccctactgacagccaatcaccatacagcctgcataacctaatccatcatcgtctggttcctgcctcattgttttcatgaacaaccagtagagagccatacgaaagagcttgcacatagtctttgttccaattgtaagagcactgataggtccttttcccaccaggttttgaatataaatttctaagaacttattaaaatattagaatgttattaatctattgtttttgcttcagatgtccttctgcttgtgagtatactaaagagaacagtcataattctgaaactactgtccgtttgtgtcataaattgcttcacatgtttctgcatactagtagttactcagcttgatttgtctattttcagcaccaactgagcaaacccctgtggtccggcagtgctaccatggtaatgccagagttatcgaggcacattctccaccactgtcacaggaaggacatgtcaatcttggcatccatgacaccacaccggcatcagaggaccccagaaaactacccaaatgagtatgtcttgatgttacttgtaagaggagcaacagccaacttaagttcctcctagaagagccttgctcaagctaacttgttaggacaaatttcccttagacccagaaggtgtgtcaaaatgtccaacaactttgcttttgatcaaagagtctgagagaataggtattttaggcttgctatctttctaatagtctgatggaagcagaaggctacatggagctgatgaggtctttttaatataaactcaagagatcaaatgatcaaatacttagagtgccattctacaaggctcataaaagatcatgcactctttcacccatgcaattctatcattctaacctcccttctctgaaatgaaggcttttgccatttttgtcatgggtcacaagtaaataattcacatgtatatgagtatatataaaccaggtgtgtttattcagactagtatgtatatatatacatatatatgttcatataagtagtattcatatatatgttcatatatatatgttcatacagactagtattcatatatataacatatatatatacacacacacatatatatatatatatatgttctagggaaacatgcaagtttttatgtctgtccctgactgatgaccaaataccctatagcctgcacagctgcaagcgtatagccatacaatttgcaggacacacacacatacacacacacacacacacacacacaactaacatataatataatataatataatataatataatataatataatataatataattatatatataaacctgtgtgaacacactgggttctaagctccagttttctgaagggatatggttgccaggagaggaagagcaaaagcaagaatgtagatgagaattaggaagtaaacagtatggagattaaaatgggcaggtacatggacaaaaaaccaggtctgacaaaaactggcttctgccataaatgactataaaagatattaaaaaacactttccacatgttggacaagagaagtacaggactgagataatttagaaaaggaaatgaatgagcgcaactccgtaactattagactttcttcctggagaaccttcctggactgaagggcaaggaattggagccaaagccaacacagcagtcttgctgaactgaggaaagagactggagtttgggatagctaagaaaatgttattttctatgctaggtaataatgagaaagaatttgtggtgaaaaggagctgaaggaattgcatggaagtctaatataaactgcatatgcacagggagaaattctacaaagtgggacaagaaccactactggggaaaggacaaattcagggaaacagtgagctcaatggtgacgccaagctcacgtagcactgggggataccggggttctgatcagcccgaggagagacacctcatgaacatctcgggcattcagtagagaccccagaaaagtcatactttaggagtaggatttagccttcttagaataaagactaccccagaaacaccctagtaaagcttaaaaaccaagtctaaaggacccaaatgatctccaagtaaattaactgcctgacagaagaaaactcaaccatcctggaggtaaataacatgattacagtgctctgtaatgttgcattcacaaggagtgacatatttaaaaatttatgaggcaggaaaaagcaattagtgtgatccataactaggagaaaaacagtcaatacaaatagaccaagaaatagtagaaacgatggaattgacaaagaaattaaactgtatatatgataattgtgttcaaagatttaaagaaaacatgaacatgagggaaacaatgcagaatataaaaaaaagcaaatgcgtaaaacaaccaaatggaaattaaagaactacaaaaagtataaccttaataaaatactcactggatggccttaatattagtttatacattacgaagaaaaagtgaaccagaagataactcaatgaaagccatacaatctgtaagacacacaacacgcacacgcgcgcgcgcgcacacacacacacacacagagagagagagagagagaaaagagagagagaaaggctgaaaaaaataaatagaaccttaaggatatcagtgaaaatagcaaagatttaatatatgggtaaagcaagtcacagaaggacgggaaggagatattgggacaaaaaaaatactcaaagcaatgatggctgaagactttacacgtatgaagaaaatgataaatcacagtcaagaagctcaatgaatcagaaatagtatttttaaaagcaaaactctatgattacttgggtacattatagataaatcgtccaacatcaaagataacaaggataatcttatagccagaggaaaacaatatcatttacatagagggacagtaatgaaagtgaccgatgcctttccttggaaacaatggcataacatctttaaagtgataaagagaaataaaaacagatcaactaggacgacatgtccagccaaaacaaacaaataaacaaaaaaaccctttaaaataaactgatgtaaatacgtattctgccacctccagaggaaacaagcaaaaaaacaaaagaatgttccaaggcaggcttctgtattaaaagattttaaggaaagttattcaggtagaagaaaaaaataccagatgggaactttaatccatactaagtaatgaagagccctggaaatggcaaatgcaatgtcaatataaaatactcttatttatctaatttttaaatgtatttaaaggacaattgtgatattaattaaaataataggaatatattgttgtttcaacgtatgtagtagtaaaatcataaaaacagtagcacaaataatgcagatgataactggaagtatactgttaatgagtttttgcattatccatgaagttatataatattaatagatggttgaatgtgatagtttaagtgggatattataaatcctaggacaaccaaaaaaatttaaactgagaggaatggatagtagaggaatagtccttttatgcaaaagaaggaagaaaaagaggaataaagaatataaaagaatggtgtaaacagaaaatacatagcattattgtagacacaaactgaactaccttatgagatattaaatataaaaggattaagcattacaaataaaaggcagagattgtaaattgaataaaaccacagctaagtgtgttctttttagaataaatactctttaagtgtaaagatctacttaaacaccaaaatatgaaaaaggatatataccatgaaaacctgaatcataaataagctgagtggtgattaatggatgcaggcactcctaaagactaataagtgaatgtggtcaaattgagaaacaaaagtatatacgtgctcaatgtgcaaaaactttttctgtatacatgctatgacctttggaaaattaaagttttaaagcaatatcactgacaatagtatcaaaaccaaaaaaatttagtgataaatttcacacactatgctcaaggactatacaccttgcactagaaaacatgttgaggaaagaattaaaagatctaaatatacaccatgcttatagattaaaagactcctatcagttctcgtgaaattgatctttggatgaaacccacacccaagcactattgcaacatccttttttggaaaaaaaaattggaggacttatataccttaatataaagacttataaaatacaggaatcaagacatgtggtattggcctggccccttggctcatgcctgttaccccaaattttgggaggctgagtctggaggatggcttgagcccagatgttcaagaccagccttagaacagagtgagaccctctctctacaaaaaataaacaattagatcgatgtgatgacttgccatgtagtttcagctactcggaatgctgaggtgagaggattgcttgactcaggaggtctgccatgagtgagcattgatcatgcctctgcattccagcctggatgatggaatgagacacgtctcaaaaaaaaaaaaaaaaaaggatatgtgttattggccaaaaaagtatgcaaacctaaaagggatggcccaccaccagacccacatacatatatggtaaatggattttccgtataatggcaaagcaattcaatggagacaaaaatgttttacaaaatcattctgaaccatttggtatccatgatacaaaacaaaagcagaacttgacttttgcttttcatctcaaattattttatatctcttccacctaagtgtcagagctaaaactgaacctgaaatatgaaagttccatgaaaaatataaaatcttcacaaccttggagaaggcaaacttttttgaggcaggagtctgtaacactcactataaaataaaacaaattataatgtgggctttcatgaaaactcatgcttacaaaagtcattgttaagaaaataaataggcaagtaacacatgagaagaaaaatgctctcgtccatatatctgacaaatggcttgtgtccagaatataggaacatttctcccactcactaacagaggacaaacaactaatgggcaacagattgaataggcatttcttggggatagataatgtacacatagccaataagcacctgaaaaaatgtccagtatctcagccatgaaaaataagagttataatcatcatgagatgtcaccaaacacccaatggacatggatattattaagagacaccacagtaactgatgtcactgatgtagagcaaggatgtgaaactctctcatatgcggtgaaagtgcaaaatgatacaaccacttttgaaatcagtctgatagtttctccaaaagtcaataaatgcacttttaccctacaaacctgcaatcctgtttgtgaatatttaccccacgaaatggaaacataagtccacgaagacatctccaagaatattcatagcagctttatttttataaccccaaactgtagacaatttcaatgtcaatcaataagaaaatgaataaataattgtgaactagtcatacaatggcatactgttcagcaataaaagggagcatgtttttgatacctcaaatagtatggaagatgctcaaaaatattacattaaagaaagatgccagataacaaaatgaacattatgtatgagtctattgatgtaaggttccagaaaggtaaaactaatttctgtgaaagaaaccaatatcatttgcctctggccatgggaagagagtagcagagattgattagcagtaaaacgaagtttttttctggggtgatgtaaatgtcctgtattgtgattgaagttgagttacacaagtgtacatgttcatcagaagtcatcaaactacatctaagatctgtgctttgactatacatgaaaatatacctcagttgaaaatagatcaataacctccctcatatatatacttgctaacacagccagctgcttggagaaccagcttgctggaatggagaatctggcttgagactgggtcacatgtatagagtctctacagagacaatgttgcattcccacggtaataatacatttcaaggtttctcagacagccacatgtcatgaatgtgaggattctgagagttggagcaacattcctgggaggaacgaaggggagcacattctccaagatcccccaccacggggtcctcaccggctgtgcttttttttttttttttcttgacagagtctcgctctgtcgcaggcaggagtgtaatggcccaatctcggctgattgcagcctccaactccagggttcaaagattctcctgcctcagcttcatgagtagctgggactacagatgtgcgccactgcgcccgctaatttttgtatttttagtagagacggggttttgccatgttggccaagatggtctcgtctgttgacctcgtgatccacccgccttggcttcccaaagtgctgggattacaggcgtggccaaagcacccagcctgtgcctctcacttactcaattgtttttctgaaccctccatagtggtggaccttttcagatcccatagtctagccagccctctcactttatgccttgggtccactgttccttcatctcatcccccttctgtcagtcccgcagtggctgtggccagtagaggtggactgagagtaggagaggaggttctgcccaggaacccatcctagagaaacagcatccgcctgggacctagtcttccaggtcagcttttataagtcttttagactcaaactcacttgcccacctgaagtggtattgacaataatgctattttcatggttgtttttcactgtaaatgagagccttttagctacacgactagtacagagagtaagggaggctggcctgggaatgatacatcttggatggcatttcctccttggagaaatatatgttagttccaactcacatgttacatacagtcctgtagaaagagatacagagagttagacaggtatagacgcatttgtatatgataacaatctataagacacacatcaaaatccgtataccggttcctctaggggtatgtgctggcagaaggtagaaggagggtattctggttcctttcttttgcacatttatgtatgatccagtttttatatggagcattgatagggtttggctatgtccccacccaaaatctcatcttacttgtaatctctataatcctgataatccccatgtgtcaagggcaggaccaggtggaggaactggatcatgggggcagtttctcccaggctgttctcatgacagtgagagagtctcctagatctgatggttttgtaagtgtctggcatttcccctacttgcacttactctgtcctgcgcctgtgaagaaggtgcctgtttctcccttgccttctgccatgactgtaaatttccagagcctccccagcaatgtggaactgtgagtcaattaaaactcttttctttgtaacttacccgtctgtctcgggtatttcctcatagcaatgtgagaacgggctaatacaagcatatactattttgatattttaaaataaaaattatcatctatctttgaaaggcatgcacaaatgggaattgaggaacatttgtgttgtggcaattgtatgatacctttaatgggaatatttcaaagaacttgttaagactttgttagaacaaaatgtagagggtgctggatgtccctgaatattctccgcctcctgtaacttgtattgctttggaatttccagtggcctgacaatgaactactgcggaatccagatgccgatacaggcccttggtgttttaccatggaccccagcatcaggtggagtactgcaacctgacgcgatgctcagacacagaagggactgtggtcgctcctccgacttcatccaggttccaagcctagggcctccttctgaacaaggtaagaagtctgtgtcttacttgtctagcacatacctctctatgtgcttggacaacgggatgaaaagacatgaaaaacccactgatgcagaagcctttagtgctacacgggagctcgagtgttggttgaggttctgcctgaccaaggaagtctcagtgccgtccctgggaaagccagagctgtgatttttggcacaattgtgggagtagtgactttaggactggcgcaaaacctccagggtgctcaacttaaccaccaccttattctaaaatgggttatttcagtgtcccagtcaaattcctattctaacatgcttcaactgtgtgattatttccaagccaataagcatttccagtaatttcttaaaatagtgtcattgcagtcttcagcgttgtggctcctgaggaatgtggcccctgattctgtcgtcctaagaagcctgacatgactgcattgattctgtatcgtcctgggtctatgtggctgcctggcgtctgtaatcatctgttttatttttatttttttctacagactgtatgtttgggaatgggaaggataccggggcaagaaggcaaccactgttactgggacgccatgccaggaatgggctcccaggagccccatagacacagcacgttcattccagggacaaataaatgggcaggtctgaaaaaaatgtaagccactttgatttggactctttttccctttgctgacaaatcttttcaacagaagaggggcagaggaaaatactggaaagacttcaggaggctaagcgtaattagcctagcatggaaagtgcaagcagcacaggccagcaaagccccacgcgtgtgggggttctcagcctcttctcttttgacatttctttactgtttccattgttgggtgctgtttctcgtttcagtgcttgtcctctaagccaggggtccccactccagtactggtactggtactggtactgaactggtaattatctgtggcctgttaggaactgggctgcacagcaggaggtgagcttcggggagcaaacaaagcttcatctgtattttctgctgcttcccatcactctcatagctgccgagctctgccagctgtcagatcagaggcagcattagattatcatagcacaaaccctatttgaactgcacatgtgaggaatctagattgcatgctccttatgagaatctaatgcctgatatctgtcatgcttccatcacccccagatgggaccacctacttgcaggaaaattagctcaggctcccactgattttaccttatggtgagatgcacatttatttcattatatattacaattaataataattgaaataaagtgcacgataaatggaaggtacttgagtcatcctttaacctcgccccctcaccccaggtgcacagaaaaattgccttttatgaaactggtctctggtgcaaaaaagttggggaaccacactgctctgggttctagtagtcagagatgccctctatgagcttaagtcagatttttctagaaaagatttggatgggccatcaggtcaccatgagacttccttagcctcatgcattctctgtgatggtttactttggggcctatgaatagggaagactggatataggaaaaaccaaagtgtctgtgttcccccactctcacacccatgtaacataacattctcacaccagatatggggggatttctcctcacaccccaagcgagtctccagcagatacagctgggtgtcctacaatgtaactcggtcctgacactctatctggagacagtgtcagacccacaagttaaggctcagtcctacaagactgccccactgcagatgccaatcccaagttcaggctgtgacctgtacttctgcccagctggataaagatctgtttttctatatgaccctcatgggtttgattactttgctagagtggctcacagaactcagggaaacacgttactttttttacccatttattataaaagatattaaaaaggatcctggtgaacagccaggtggaagaatgcacagggcaaggcacgtgggaaggggctcagagcctctatgccctctccagtgcacagtccccagtaccctaagtgttcagcaacccagaagctctccaagtgcagtcttgttggtttttatggaggcttcattacagaggcacagttgattacatcattggccatcggtgatcgctcaccttcggcccctcttccctccctggaggttggagggtggggctgaacagttccaccctcaagtcacatggttggttcccttggcaaccagcccctggggctatccaggaacccccaagagttgcttcattgcagctcccttcacccaggaaactccaagggatttaggagcttgtgttaagaactggggggcagagacccaatatacatttcttattctatcacaatatcaaggaagctaaggatgatactgcctttgtgtgtcttggctgtggatggtgcataatgcatgaagtaagcatttctgaatcaacagcaaacaggctttatcaggtagaagacccctcagcccccagggacaaagctcatcaatgatgtcccactgtcctctgaggctctagctctaagactccagtgggtcaagctcctggagaagtggcacattctccaaagacccttcagggtcacacaccctggttaagggtgtggcctcataactccttttgactatgactgatggcttacagatagaaagaaataactttgtcaaaaaatataataatgatagaaaggaagaaggaacgctccttttgtcttctaagaatagatgtgaaatgtgtgtgccttagaatatcttctccctctctgctccacgtgagctggagcttacatgcctgcttgttttcagtactgccgtaaccctgtggtgacatcaatggtccctggtgctacacaatgaatccaagaaaactttttgactacttgatatccctctctgtggtaagttgccttctgttttggtaaggaaactgcttccttaattggatttggaaaaaaaaaagcaaaaaaaacagaaaatggcttttgagctgagtgcttctgggaggagatggctgccctctccaccagagcctgcttttcatcatggccaccttgaaccgccctactattggccccatttgttaggaaaacacccgcccctcccaccacacacacataataaaataaatgtcaaattcccaaagggcaaacttagaggtgatctaatcagcccgggaagtcccaccgaacccttctttgtctagcgtgggatgcatgaaaaacaaatttagagtcatatgatgaaaaactgtcctcttctgcagctgagaagaaaaaaaaaatacgagcagcaggaacagctaagcatgtaatgcacattgtaaacctcagatggccatcctaggaaatcaatgagggtagtgcagctctttagccccagatggcctttctcgtaagattactactcatgagtccattagcgacattgcttagagactgcttgttaggttccttcctcattgctctgagactttattgggagtatgaggcttggatcaggggaaggggaattgacattagatcttaaatgatggggtaacaaatccatgggggaaaaaaagccacttgtacttgttccctattttcttccgctgaccaatcaacttgtctgtccgagttacagaacaccaccctggacttttcttttgttaatttggttgcttgtggttgggtctgccatgtgaagggaccttgagctgggggaagaagttggcctccaagtccactgaagaccagcatcctgagattgcctggggaggtggtacaggcagtgatgaagatcatgggagccacactgcccatcgtcacatttgggccactcctgggagagcaagagggaagaaggagaggttagggtgataggaaagattctacttggccaatatattataatgtggcattgtggtctctggatttagtgtgagttgatagctgacttttttctgagtgggtgcttttgttctattttgtcggtgctattgcagaagcatcttggtggttccttacctcaaagtctcttgatggggtcagttccagttctccgcttctggccccatctagtaacgccactgcctctcactgcctgggctctctatccttgacaggctgccttgaatttaagccagtctgacttacctgcctcaaacacccacagtagtgcctgggactcatgcacctttgctcccatggaagggaagtgcagtagcttcccaggtgcaattctgctgtcctcacccacatgaggatgtatgagaatcaggttcttagagattggagaaagaaggaagaatgggaacaaatttcttccaatggactgtgaggttccccaccttactttgatgtaagacaagtgaggttaccccaagcctggtgaggagggttcccatcagacacttggaaatcctgaggactgtttctgcagaaggatgtggttggtgggatattcaggtttgactcatgattgagaaagttagagctctggttggagaaagagtttaataactatttcatttccaccaacacattcagtacgaaaataaataagtaaaaataaatagaaacattcagttttattttgaatagtaggagtagggataatttctgtagttactcttttagtacaatgatgcatgtttactgtatgtaaggcatatagcagaaattgagctcagcactagaaaagatgattgcattccatgccatgcttctttttacaaaagacttctatagatagattctcaaaacaacccacagcaaatgaaaagttatttgaaaactcaggttccagattcactggagtgtagaatctctggttggttggggaggaattcctcttgcagttgttattaataattatatgaataattattaactatattaatatttatattttgaagaccttgaagggctggagacaacagagaagcatttttgaacaccctctgtagccctgcactgttgtaggcattgatgggtggtaccaaagatgggacactttccctacctcagagaccttgtgggcttgctgcagagagaaggcagggaggaggaaaagaagaatagaggacatgtgtgtaaattacccccacagcagtcagttagtcatgggaggctccccagaagaatgtcctgaagctggctgagagaaggcaacatttcaacataggacagttatccttgctactaaaatcacatacacacatgcacatatgtccacacacagagactcacatgcaaaagaatctttgtgcctttcagtaaactttacatggtttagaaagaacttatatttccttgaaagggagtgtcctttgttgtttactaccactttttaaacttagaaagaaaaatctaaagagtgttatgattttaccatttaatttcacctttgagatgtgaaaaactagtgcttggaattcgcctgaattaaacgacacaattgctaacttggactcaaatgcgacttcttttcccacctttgccacagcatcctcttcatttgattgtgggaagcctcaagtggagccgaagaaatgtctggaagcattgtaggggggtgtgtggcccacccacattcctggccctggcaagtcagtccagaacaaggtaagaacaggcccagaaaccatctatactgtccttccatgtaagccccaaaaacccttctacatttacacagaacccacacagctgatgcatcaatacctgcctctctttttctgaaggaggaaaaaatatagaaaaattaaaaaaagttatattattataggttcttacttggaaaatagccaaaatacaaatctttttcttgatctgggcagttccatcaaaattgtaggcacagtgatttgcaccaagttccaatacttttggaaaatattgaagatgctctagggtttctatggatatccattgtctcactgtcagatgaaaagaaagggaagtttttagaatgtgacactttgcagtgagggaggacaagagcaaacttacctacagtctatcacaggacagatttttttttacacttttgtgaatcattgaattcaatgccgaggctattcatctatcacaaacacatgaacaaattatgggttgtgatccccataaatgaagagtaatcagtccaacccacagaacctggacattttgggtatcgtttcagtggaacatgcaattcgtaagttagtttgcttgggtgtctcttaggaagaacacataggacacagacccatctgcctgcatgtttgcttcctcatctcctttctacaccagggcacctgtgctcaattgctgttctcctctaagagacttccttctgtaagtttgtgaaatgccatcgacaaacctgatcgcatcgcattcactctgctgttgagttgatttttctttactttatcgtttgtaacttcttgctctacaggctttcaccttccacatatttcagattcattctttcctaaactgtgtggtggtctatgtctcactgactatcaacatactgccatcatgcacttcctatctctattcctcttcgttgcatctggctccaagtggctcacaccattattctgatctatcaactgcctacacagtcctaaaagtaagtgagtcaagaaacatcccccaaaagtaaacttttcaggtaagatcagaagacctcatgagtcactgctgctcaggatcgtatctggctccttgaagagtgaccttgcataatcttgtcataaaaaatgaaagagaccttgggaaggtcttgggctggtcacttttgtcaagtccagggctgtggggtgaaagccacagctatagagcttcattctggagtcacttagcttgctctcctggggacaggctgtgcctattcttgcctcaggcatcaaaaaaagtggcacgatgggcccttctgaaaaatctcactactggagcacagctcgaagtttctactatcctgcgttgggcggtagtcctttgctttgggaatatgaacatgatcaaaactgagtgaacttgcttcctggctttctgtacaatgaagtagaacaaaccatccaatttgaccaaagccttggatgttttctttctaggtttggaaagcacttctgtggaggcaccttaatatccccagagtggtgctgactgctgctcactgcttgaagaagtacgtttaagggaaaactgacatggggtttatcttcaagacttttttcctccctctcttcctccatcccttctttcttcccaccctcccttccttcctccccacctctcttccttttctggaaggaacactaggaaccagggaatgatgcagaatcctgaggcagaatttccagggcaattggatgagagaggagggaagtgttttagagggaatctgcagagggaagacccagtgcaagtgattttttggacctgtataaacccaggacagagctgttcactaccagaggcatcaatctgtattgcattgctctagagcaattctgaggctgaataatttataaagaaaagagtttaattggcacatgtttctgcaggcttacaggaagcaggatgctgtcatctcctctgcttctgtgtgggcctaaggaagattacaacatggtggagggcaaagtgggagcaggcatgtcacatggccagagcaggagcaagagacgagagagatggggtgggggtgctgcacaataccaaatgaccagactttgcaagaactaaagtgagagctcactgatcaccatgaagatgtggcccaagccattcaagagggatgcaccctatgatccaaacccctttcacaggccatagctccatcactggggactacagttgaacagagatttaggtggggacaaatatacaaactatatcacagtctctgatgaaacagattgaaacagaccttaactgtcagtttccagcaaattgtgaattttgtttcttgccactcataatcactgattctgggtggccgagggtgtcagagggacagcgccaagttcatggcacagagatacctgaaggggctggaccatatttttctcttgacatcctcatcttttctaggtcctcaggccttcatcctacaaggtcatcctgggtgcacaccaagaagtgaacctcgaatctcagttcaggaaatagaagtgtctaggctgttcttggagcccacacaagcagatattgccttctaaagctaagcaggtactcgctcacctgtggtcttcaccccacgctggtgaagatattgctttatgtctgggttttatgggccatggccactgcatggcagtggggaggaactgtcttcacatgaaaggctcaagggctttggggacagcatcaatcttcaaccccagccctgccaatgttagttgtgctctttaaaaaggcagaaggattcgtttcctcacgtggaaaaagagaaccctgttacccgtaaaacttacttaatgttcaccagttcatccacattcatgatcaggaaaggttgttattccaggctaactattctcctttcataataatatgctggagagaatcaatgagattgcatttcaaagcgcttgaaaaaccaccatatcgagccatgcttagtgtggggcctctaatcactgctattcaggaggctgacgaggaagaattgcttgagcccaggacttaaggctgtaggcagctatgattgtgccactgcactccaggctgggtgacagatcaagacctgtctcaacaaaagaaaagaaaacaaaacaaatgaacagaaatattccacaatgtcaaaaaaaaaaaaacccacacaacatacaatttacaaatgcaaataataatattattgttgtttctttgattttctctttcctggtgaaattttgttttattaagcctgacaaagtgatactttgcttacatcacttaaagttagtctatttggacctaggtgacagtacaatcagctaaaaacagtatttgtaggagaggcaggtttgggacaggtgacaaggcatgtggggtgctcgtgtgctggtggctctggaaggcagggtgtcaatgcagacagggatgagcatggcctggtgggaaggcatggggcaggcaggagcctgagctgctctcctgggcctggtcacaagcccaggcagcttctctgggtctgtgaactgaggggtgatgtcctggaatcctctgacactctagaaggagagaagggcctttctggctcagcctttataaacagtagctgatctccctcttgtccccagggtcctccccaccatcccagcaaatgtgcaaatacaagatctctgctcctcaggtcctcagagagctggggtgttctgatggcttgaacaagtcacttaggaaatgtggggtttggaggcattctctgataggctgatacgttttgagtttagagttcccaccgcacatcccacacccctagagtctagggcatttagtgctccatgagggaacctgtagagtgaggactctgcatcacaggctgggccttctagtgtccagaagcagaaagtgtgtctgcttcaaagtggtgctaatgatgatttttggtcagaatacggcatttctcatttccattcctttatcccttgaacttactaaagtagaatcaggtctaaaaaccagagttctaatctttaagagtcctgggattctaaggtatatgaatgtccttggaaaacaataccatttagttcatgcaaggtcttatttcccatcctctttcatttgatgtctagcattttactgcattcttaccaccacgtttagtaacattcacgaggaggaagtggaggatccagatggagcaacttgctctgggcaacaaggcatttgcaattttataccctcttgatgatgtctcagccagacattctgcccagcatcaatgccctcttcaattaatatgaaaggacacacttggcatgagattccaatcgtgacagaatatacatgagaagtgtgcctttgtcatccctactttcaaaggctaaggccacctcagtttcttgcatgcaactgatgcctttcaaatgaaaccttacatctgtgtagtccatggcaaccacaggcaaatgtgagggtgaaacgctgtgttctacattgttctgtgtcagtgagcaaggcagtgccagctcagagggctctggggcttcaaggcagggatgcctggttgtagtactgccacttccagctgggcagtgaaacataactgctaatactttccttacaggcctccgtcatcactgacaaagtaatgccagcttgtctgccatccccagactacatggtcaccccaggactgaatgttacatcactggctggggagaaacccaaggtgagatcaattccattcccacgtaacaaattgtttttgaccttcagtgcatgttacaaaatgagcattttggagaagttgtacaaattcctacccatgaatgtggtctacccactcctgactttgcctggacactgtctatgtctccataatcagtcttcaagggacttgggcaaggggagcggtgccatttcttgagtctctctcttttttgttttcagaatcttttaattttttttgtaatgattgtatgttcccttacaacaaaaacaaacaccagtagaggtctttgagtctcttaatcataatttcgcattcatattgcttccccaggtaagtggggttttgacccagccctcaagttaagggtgtagattatttttcatgtgaaattagacagactgcgtttctaaacatggtgcaaaacagtacgacaaaagttgtaattaaactattcttcttcccaaatacccacatgtctaatgtgtggtgagggtgttaggcaggggacctgaagctgggggagaggcagacagttcccatggcccaagtctaggatggcatttggtattggttgatgggtgagagcaagagagggaatattttttgcatgatgtggtatcagcacctgtactacattttatggattccttcttctctttgcggatgccctgacaataattatatccgtcagccttacccccttggcagtaggaaaactgaaatgtcttaaagtctcagctctactttctcagaggtgcaggcaagggcactgggagtctgggccctggaaaactgttctgactctgccacttgccagatagacctgaactagacacgttactctttgtaccacttggctctaatcccttatctgtaaaaccagcattttcaaatggtgcttgcacatcagccttttgcataagctttgatttgataaaatgttttttgtgtttttaaaagattaaaaaccacaggtttagataatttcaaagtaggcttccctttttctgtcattttctattatttttaaaacctcacctccttgactccttgttccctttttctgcactgctgagctgggagcactgaggccaggtaaaaggaaacttggcaaatgaggggcacctatgggtgtggaggctgctcctggtgtttgcatattttaaaatttaaatgctacaaaccactgtgagtaggtattattgttcctattttaccattgaggaagctggggctcagagaaggtggagggtgtacagacaaacctgaattggaaccctggctcctgcctatgggctgtcaggacttagaaagtcgtgagctctcgctgattgtttcctcagctgatgtgggctgcagggctgttatggggaaataataagaaagtgcatcaagtgctgagcacatcctaagcactccatcatggcagccctactactaataaagaatagaattatatctaacatgattctttcttgcaagtgacagaaatccaactcaaattggattaagcaaaacaagggaaattcttagtgagctgcaaagtttcaggctcacatgatggccccaaatcccaggtcctcccaatcatggagtaggcactatttggggcacaaaggtgacattcccatggctgcagatgctgtggtgctgtggctgtaccgggaagaataagaaaggccactctcccaattatgtgaacaatagtctgcccactctgagaagcaaacttgggtcaccgtcctgcccctgaacccatcactgactggctctgacctgcaccattgttccatgttggaggtgaaggcaagaccccactaatacccataaggggcaaaagttaatagatccttcaagaggattatgggaggtagggcaaaaagctnnnnnnnnnnnnnnnnnnnnnnnnnnnnnnnnnnnnnnnnnnnnnnnnnnnnnnnnnnnnnnnnnnnnnnnnnnnnnnnnnnnnnnnnnnnnnnnnnnnnnnnnnnnnnnnnnnnnnnnnnnnnnnnnnnnnnnnnnnnnnnnnnnnnnnnnnnnnnnnnnnnnnnnnnnnnnnnnnnnncaccatctccaatacaccatcactgtaaccatcatcaccaccaccatgatcactatcaccatcatcacaatgacactgtaaccatcattactacccaccaccatcaccactactccaccaccatcaccattacattaccatcaccattatcaccaccatcatcatcaccagcaccaccatcatcaccagcacaccatcaccatcaccatcattaacaccatcactatcaccattggtttaatcatcaccacatcatcataaataaacatcacataaccagggtgtagctgggtgttgaccccagagcccctcactgtttcctctctcccacccccatccacacatttctaaccaccatcctgcactggctcccagtctcctctggtctcacccacatgtccactgagaaaaggattttcagaacaccactagaccaggaggagccacatacataactcaggcctgcttatcaactttctacatgttataatgacatcagatcaatgggtgttctcagcttctcagaaggaggtcaaaattctcccctctccccttcatgtgtccagaccttcccggatttggatgtaccaagtgcagagtggtgtgaggccaaggggctcatccatgtaagtctcatctgcaatcactgggctgatcccgtggcctgtctccagggcgccatcagagagggcttcaatcctcaggttacctgtggcccacccgccctcagaggtgccatctctacattggccacgagatggcagcacatactcatagactgattaatttcccagcaactcctggtgggttttccctcttatcaggatgtttgccttgctcgagagcaaatctgagagcagtgacacctaacttaactttcagcaaaatattttgagaaggtgcccctttacacatctgtgcagtccaggtgatgcatcccatgcccaatgctcggtagcaggaggagcttcctccatgcagctctgcggaagagactcttccacgctgctcatgtaactccagattcggtgtcagttttctgacaccgaagacaatgatctaagtgcagtcaagggtttggggaaagcaggagagagtgcctcagttctagcctgtgccatgcttgcaaagttttcaaaattctaatgagagctgggcttgcaacattggaaacttggattatttgtgagagcatgagaaatccctgggcatgtccatctggaaaaacagcatttcctctggcactttagcagggttctgtttcaatttggcgaaggaaattaagcagtttttcacaaaagaagaactacaagaggagaattgtccctagtatttcttctccctaattgtcaaggaagtgtaaattagaaatgaatcaggacaatttccacctactatgttagctaatattttaaaaattgaatatcacagggtgaggcaaagtaattgttttccagtgacattttccactgtcacacccttttagagataatttggcaatgttactgtgagatagaaatatgtctatataattatgggaactgagactcagaaagtaataaggaataagaatgaaatttatgaacaaacatgtggaaggttggaagaagagtggggccaacacgcatggggaggaagcatttgggcagcgactccgcagacccagctcaagctgagctatacaacctccttacgcctcagtttcctcaactgaagaacaggaatacaagtgcctgtttcataggaccgttgtgaggattaagtgagatataccacattatgagttgtgcctggaaaggttgattcttagtaaatgatgactattcttttttattgcaataaatttatacaacatagagttactattttaaccatttttgcaggtaccactgagtggcattcgtacattcacaatggtgtgcaaccgtcaccatatttccaggacatttttctcatccccaaggaaacctcatgcccattaagcagtcactcctcattaaaatattagttatgaagactgagcatttttttaaaaactcatgatataacattgattgaaaaaatcagtataggaaattggcattatgatgtaatagtaaaagaagcatataaaaatctgaaaaaagtatataaaaagatagcaattgtatttctcagactctctttacattgtaaaaatcattttgatagcttcaaagaaaagcaaaaagtacacaaacaacaaccaaccccaaagcagcatgacaaagcccagatgttgaatccaggtcttgggaacataaaatcttatatgacatttgcactttaatgggtcaagagtccagtggcattgggagctgccttgtgttctgcagcctcacggacagacaggaggccagctccactgctctgttcttctggaatttcctcgtgaacaagctttggcctcagtaacatttctttcatctttttaaacacaggtacctttgggactggccttctcaaggaagcccgctccttgttattgagaatgaagtgtgcaatcactataagtatatttgtgctgagcattggccagaggcactgacagttgccaggtaagaaaagatcaatagatcaaagtcttgtgcttcccgtctcagtctcagtcccttagacgtcagtcccaaagtggcaaattcaggaaggtttgtcagtggaagaccccagtctaagtgttgctcagaaactccccagatctgtccctgaagcatattcagatcatctaaggagacgtcttggggcttgagttccagatccatagcaaggagccgtaagtgccataactacctcaggccactcaccttcctggtgtgtgctggtcaccatgactgaagtggtggcttttccagtagagaggaaggtagagggtacaggaccgagacaattacacacacttaacaatgatgtccaggctagcccagtctaaaggaaacaccaagttagaagcaatgcatgcaggattcacaagggattattttttttcccaggaaaaaactaagtgagtggttttgttgaatagactttgctaagtacttaagcactgcagatgcttgagtaatatctcataagttcctttctgatttgaattactgggaaaatgtacatatggataagagaaggtggcatcccatattaaaaggttggcagcttaaagctcacatgaattttcccctacctcttttagggtgacagtggagggcctctggtttgcttcgagaaggacaaatacattttacaagagtcacttcttggggtcttggctgtgcacgccccaataagcctggtgtctatgctcgttttcaaggtttgttacttggattgagggaatgatgagaaataattaattggacgggagaagagtgaagcatcaacctacttagaagctgaaacgtgggtaaggatttagcatgctggaataatagacagcaatcaaacgaagacactgttcccagctaccagctatgccaaaccttgcatttttggtatttttgtgtataagcttttaaggtctgactgacaaattctgtattaagtgtcatagctatgacatttgttaaaaataaactctgcacttattttgatttgaattaatttggttttggtcttcaaaattttcatgctcttttcatcccatctatttttatttttatttttagactttacgtcctggggtacatgtgcagaatgtgcaggtttgttacatagatgtaacgtgccatggtagtttgctgcacccatcaacctgtcatctaattcggtatttcttttattctatccctcccctagccctccaccccttgacaggcccaggtgtgtgatgttgccctcctgtgtccatgtgttctcattgttcaactcacacttatgagtgagaacatgccgtgttttttttctgttcttgtgttagtttgctgagaatgatagtttccagcttcatccatgtcccgcaaaggacatgaactcatccttttttatggctgcatagaattccatggtgtatatgtgcacattttatccaatctaacattgatgggcaattgggttggttccaactctttgctatttgaatagtgccacaataaacatacgtgtgcatgtgttttcatagcagaatgatttataacctctgggtatatacccagtaatgggattgcagggtcaaatggtgtttctggtgctagactttgaggaatcaccacactgtcttccacaatggttgaactaatttatgctcccaccaaaatatcaaggcattcctatttctccacatcctctccagcatctgttgtttcctgacttttaatgatcgccattctaactggcatgagatggtatctcattgtggttttgatttgcattctctaatgatcagtgatgatgagcttttctcatatgtttgttggctgcataaatgcctttttggagaagcatctgttcatatcctttgcccactttttgatggtgttgtttttttctgtaaatttgtttaagttctttgtagattctggatattagccttttgtcagatggatagatgcaaaaattttatcctattatgtaggttgcctgttcactccgatgatagtttcttttgcgtgcagaagctctttggtttaattagatctcatttgtctattttggcttttgttaccatgcttttagtgttttagtcatgaagtcttctcccatgctatgtcctgaatggtattgcctagttttcttccagggtttttatggttttaggttttgcatttaagtctttaatccatcttagttaatttttgtataagtaatgcccttctttgtctcttttgatctttgttggcttaaatatattttatcagagactagaattgcaatccctgcttttttttttctttttgctttcctttgcttggtaaatattcttccatccctttattttgagcctatgtatgtctgcacatgagtaggtttcctgaatacagcacaccaatgggtcttgactctttattcaatttgccagtcttgtcttttaattgggggcatttagtccatttacatttaaggttaatattgttatgtgtgatttgatcctgtcattatgatgctagcgggttattttgcccattagttgatgcagtttctcatagtgtggatggcctttacaatttggtagtttttgcagtggctggtaccaattgttctttccatgtttagtgcttcgttcaggagctcttgtgaggcaggccttgtggtgacaaatctttcagcatttgcttgtctgtaaaggattttatttctcctttgcttatgaagcttagttcgctgggtatgaaattctgggttgaaaattattttcttttagaatgttgaatattggccccactctcttcgggcttgttgggtttctgcagagagatccactgttagtctgattggttccctttccgggtaacccaacctttctctctggctgcccttagaaatttttccttcattcaaccttggtgaatctgacgattatgtcttgaggtggctcttctcgaggagtatcttttggtgttctctgtatttcctgaatttgaatgttggtctgtcttgctaggttggggaagcctccttgataatatcctgaagagtgttttccaacttggttctattctccccatcactttaggtacatcaatcaaatgtagatttggtcttttcacatagtcccatatttcttggagccttgtttattccttttcattctttatcctctattcttgtcttcttgctttatttcattaattgatcttcaatctctgatatcctttcttttgcttgatcgatttggctattgatacttgatatgcttcacaaagttcttatgctgtgtttttcagtcagatcaggtcatttatgttctctctaaactggttattctacttagcaattcatgtaaccttttttcaaggttcttagctttttgcattgggttagaacatgctgctttagctcggaggattttgttattatacaccttaataatagcctgatataactataagatttttttgtaagcaccatcgtaaccacaaagcaaaacctaaagtagatatacaaaagataaaaaggaatcaaagcataccactagagaaaatccttaatcacaaataaagatacgaagagtggaataaaggaacgaagggtctacaaaacaacagaaagcaattaacaaaatggtgatagcagatcttacctataaataattatcttgaatgaaatggattaaattttccaataaaaagacatacagtggccaaatagattaaaaaataaatccaactatatgatgcctataacacactcacttcacctgtaaggactcaaacagactgaagtaaagggatggaaaaaatattctatgcaaatggaaacaagaagatagaggggtagtatacagattgagtatcactaatccaaacatctgaaatctgaaatactccaaaattaaaatgtttaagtgccaacatgatgttcaaaggaaatgttcttcggagcattttggatttttggtttagggatgcaaaaacagtaaatatataatttgtattagtccattctcacactgctaaaagaatactacaaagagactgagtaattataaaggaaagatgtttaattaactcagagtccacaggcttaacaggaagcatggctaaggaggccacaggaaacttataatcatggcgaagatgaaggagaagcaggcaccttcttcacaaggtggcaggacggagtgtgagtgtgtaaggaggaactgtcaaacacttataaaaccatcagatcttgtgggaactcactcactctacaagaacagcatagggaaaaccgcccccatgatccaatcccctcccactgggctcctccttgacacatggggatcatgagggttacaattcacgatgagatttgggtgggacacagcaaaccatatcataatgcaaacattgcaaaaacaattcaaaattcaaaacatttctggttcaggcattttggataagggaaactcaactcaacatgaggtaaagcagactttaagtcaaaactgtaaaaagagacgaagaagaatgtaataataaggagatcagttcattacaaatattagcaattataaatatatattaatatatatacccaaaattgtagtacctacatatagtactaaaacaaacattaatagatctcacaggagagctacactgtaatataatcatagtagccacttgaatagctccactttcactaatggacagatcatccagacagagaatcaatatggaacacgagacttaaactacactttagccaagtagacctaacagaaatatatagaacattcatccaacagcagtagaatacacattattctcaagtgcacagggaatattctccagaatgatcatatgttaggtcacaaaactagtcaaaaaatgtaagaagattgaaatcatatcagttttttttttagatcataatcgtatgaaactagaaatcaataatgggggaatattggaaatccacaaatagatagaaattaatcaatatgctcctgaacaatcaatgagtcgaagaagtattaaaagaggaaattttaaaaaatcaagacatgagttcatgtcctttgcagggacataatgaagctggaaaccatcattctcagcaaactatcataaggacagaaatccaaacacccatgttctcactcataggtaggaattgaacaatgagaacacttggccacagggcggggacatcacacaccagggcttgtcagggggtgggaagctggtgaagggatagcattaggagaatatctaatgtaaatgacgagttgatgggtgcagcaaaccaacacggcacatgtataccatgtaacaaacctgcacgttgtgcacatgtaccccagaacttaaagtataataataaaaaagaaatatttgtttttgatttatatgccaatcagacaaaatgtgaaaagccctactgaattaagtatcaccatgaaagataaattctggataattttttcaagttttaacaatgtagtttaattggagaaagctatcatttggaatgagttaatctatcctatactaaaataagtccttgctttaaaacataataaatatgattttgaattgaaaacaaaaacaactcaagacaaggaaaatggacacactaacataccaataatttatagtatgcagcaaaagtggttttaaggggaagcttttaccaataaacacttccattaaaaaagaagatctcaaataagcaacctagattacacctcaacaaactagacaaagaactaactaacccaaaagttagtagaaggaaaaaataataaagatcacatcagaaatagtaaagactaaaaaactgataccaaaaagaaataaactactagttggttttcaataaaataacaaaattgaccaacttttagctagattaagaaaacagagaatactcaaataaaaccagaaagaggagacattacaatagatactacagagtacaaacgatcataagagactactatgaataattacatgccaacaaattggataacttgaagaaatggatgaattcctagagcaaaaaacctacaaagactgactcagaaagaaataaaaatctgaacagaccaataatgtgtacatgattgtatcagtaataacaagtctcccataatgaaaaggccaggacctaatggcttcactgctgaagcataccaaacattacaaagacaatatcaaccctcctcaaactcttcttaaaaactaaaaagaaggaatgctttcacattcttttatgaggatagcattacactgatactaaacacagaaaaataatacgctaataaaagacattacaggcaatatccctgataaacatatgtgcaaaaatccgcaacaaaatactagaaactgaatccagtagcactttaaaaagatcattcaccatgatcaagtgcgatttgtttccgaatgcaagaatagttcaacttacacaaataaataaatgaaaggatggatgataaaaagtgtatctatatatatatgttttatacacacacacacacacacacacacacacacacacgaggaatattattcagccttaatgaagaagaaaatcctgcctttgcatcaacctggaggcattataataagtgaaataagccagacacagaaaggcaaatactgtgtgatctcgcttaatatggaatctaagaaagtcaaattcctagaaatagagagtagcttagtgattgccagaccgtggaagggggaaatggagagatgttgatcaaaggatacaactgtatagctttgcaaataaataggttctggagatctaatgtgcagaatggtgactagagttaataatactgtatgcatacttgaaatttgctaaaagagttgatcttaagtgtcctcaccatatac

SEQ ID NO: 2897 - DNA, 100000 bp, Homo sapiens
caccagaatgtaaaccccacgaggcctggaccttgtctgtcctgttcaccacaatatcctgacacctggaacagtacctggtgcacagaggctatgctgaattcaggcaatgattcagcaatgccagtgtgacatggtactgtggctaacagtaccttctccggggaaccagagaagcaggagtgatgaactaagtggtccatgctgagccacaggtgatgaacaagcttctccttaatgaggaagttgaaagtggttataaaaactcaggacaataaacttctgatgttcctgaacatcatcaccttagtggtgattcataacccctcttctgcttctaaaatataacatcttctaacttcactgataaactcatttccaatagaagaaaaacaccttctgccttagtcactatacttctaagttctgtgttaagcacctgagggtgaggagtgtgggctcttttattttggttcacatttaacatgcagctgctgcaaaggcattttaagaacacggaggtgactgaaataaactcctgccagcaggttacccgacatcctattcaccctctgctgaagtggagttccagcccctgctctgcagcctgccttccaagcttgaaataaaacaacaatgccacttcaacggaggttgaatactgttttcaatgacttcatggtcatgcttctgagaccgggatgcacataccttagggagatgcaaagccaagctaaaatgtgcaggctggcatggtgttgctggttgatgctgactgagaaacacggcttgtggctatgaagtgaagaaaatggttttaccctcacccttggactgcacaggcagcagataataggcagttggcccaagtcatcgggccctcgattcgattttatatatttgcaaggaggggcagagagagagaatgaacagaggctttcaattgtgctgtgggcagtgaggagggcagacctgacagggaaggggagtccgcaggaggctcccaagtatgagccacttggactccagacctggcaggctgctctgtgctggggcaagtctggaagaaaggcacacagctaagcagagtggtaccctgcaactgaccactgacctccggctccatgtttgcatttcaaagccatgatatataaatgtaatttactttgaaggcaagctttgttcgaagcagactggcctctcaacaaagggacagtgaccactgcctgcctgataagctcctcccaggagagagactatctgccagggagtggggggcagagaggtaggtaagtaaatctttctgcatgggaaagcctttgaagagtatagaggcctcacctaatccaaatcactgaagagttttgaagtactctattaaattgaagcaaagctgtttgccacagaattgacttgtttgaggagttgcagggaatgaaatggtttcagtttccaacttccttaactgaaaagcacaatatgatgaccatattttcggaatccaaagtggatttaacataggcttgtcccctgaatacaagggcatattatcatgatctagagaccatgaatctatttggaagggtaggaaaatggaagatacctttgatttgggtaatttttgctttctccccataaactaaagcaattcactcttcttaggggctctgccagcaatattgaggctggagggaccagaggagagagagcaaacatgaaatataaaattccatcatctccattcaaacatcagcctggaggtaggagaataattaggcggttggtcgtttttctcccaaagccaggatccaatgactctgggctttggaggtaatggaattgaaagctccggaagctgtctggtgctttggctaaaattcctagcataggaacctttttgggtgaggaagatgactctcattccgggtacgggggaacaaatctacttgtcttttgtttaccaatctgatcctccatcatggataaagcagtgctatccaggagtacagagctcgcccagggagatgggcaggaccagcctcccaatacccaaggggggccttgagtttcccattacagagcttgaaaaatcaccaaccactccagtctccctgggtcatgcgcggctagggatgattgtaaaacagatatagctctgactcacctgcagtggaataattaaagtgacttttttttttcatatatggtacagtcagaatgagcacctacagaccaggtgcagggctcacgcctgtaatcccagcactttggggggccaaggcaggcagatcacttgaggtcggagttccagaccagcctgtccaaaatggtgaaaccccatctctactaaaaatataaaattagccaggcagggtggcgcgtgtctgtggtctcagttacttgggaagctgaggcacgaaattgcttgaacgcaggaggtggaggttgcagtgagccaagaccttgccattgtactccgcctgggtggcagagcaagaccctgtttcaaaaaaaaaaaggaaaaaaaaggccaaaaaggaaaaaaagctcctagagagtgaaaggagcttctgggaatcacatccagtcctctccagcacagcgttgatcaccacgagccagcattctactttatggacagtaaacaggtctttaccccctcctttatttcctttatgttgcttcagttattgttggtacctcaaaatcaagtggtcaagggaaggagagtaaaaactgaaatctgctccattctacatgctcttaaaggctggaggaagaagctaaaacagatgccaggaataaaggtttaaactaaaccgtggactccttgccagaacatgtattcttcactggccggtgcaggcctcggaacacccgcaccacagtccctattctgggggtggtttggaccgtgggtgtcatcagcacaaatggcctacgtgtcctaggtgacttcctagactagatgcagcctgcccacggagtaaatccctcagggcactgatgaaaacaaaaacctaatggagaccataagctgtaggaaaagtaccatcaagggcacagagaagaaatacaaatatagttttcatttagaaaatttacccagtttataagaactgtaagataagaaattactaaatgagaggaagtactaaatataggactaaaagatttaggaggccgggaagaaaagaagggaagtatcaaaaaacacaaatcataatggaaaggaccccgaacagccactgtacagtgagagaccagagggaggtgacttgtccccactgacaaatggagcagactggatcaagagcccaggactctgcactcaggaggatgcactgtgcactccgttgtcacgcttctctggagggaggctggagagactgagaaaagtgtaaacacacagaggaggttagggagggaatgaagatggcagagaagagaggaggaagcagagactgggaaaacttgggagggaagacgggaggagagcagtgagataacaatgagtatcaacgcattcattcacaacatagcctttcaagaggattaattctaaacagactattttcctaactcacttggtttgaatccagcaagttactgctgccctttcaattgttcaactgctaattctttaaaaaaattatttacgaatacgttgtaacattattaaccagtcagcatgttgtacaacagatctcttgaactttcctcctaatctaactgagattttgttgctttaattcttaaatctcaaaagggtcatccctacagctcactgcaatgtgggtttctggcaaaagcaattatacctgcaggctggaagcagcaagtgaagaaccacacattctccatttctcagcccgagaagtcgaggacatgtgatacctggtcagttctaagctaaaaactgttgtagggagtcttgtgggttgaccaactggcacaggcatctggcttttagcagtctacatttgctactaatcatgattagtcaatactttctaaactagtgcatgttggcaagtttactgtaatgttattgacttctcaaagaggactcgtgctgattcaacccagctgtgttctataagttcctcaaacatttgtttagtgtgatacctctgatcagctttcaagacactttattcttcttggcttcatgagctaagctactgtgctgaaggtgcattctacttaagtgagaaactgattggaatgtaccactccacagcctcaataaatcacaacactcttcccaagcagtggtctggaaagctactgtgacctggcagagcgtgatgccatcagcagggagctctccaaggacggagagaaaggcatcatttcatcctttacttccccaaagcgctggcttttgtcttgcacctaccatgcttatcagaatgataaattataagcaatgctgggaggagcggcctgtcgaaccaaccccccttcccctggatttcgccactttagacgcctgactctacagcgctgcatttgcctgccagaggcaagactggcagccgggatgtgccaagtgcttggctctcaattgcaaaacaaaacagtataggagggaatttggagttagctgatttgcaaacactagagcaagtcgccatgtaaacatttgtttttgtgtcctcaggtttttccatttctctcaggcagctacctggatgccaccctgacagcatcaaaagtgctgctcctcaagttaccagtgaatccttattcacactgaaataaactcagcttcttcagaccattaaaaaagaaacctgaaagccccccacaaaacaaaacaaaacaaaaaaaccaaacaaaaaaaacttcatgaagcagtcatcacagaggatatcagtaattatggcaggaggcctctagtgttgctcagaatcaacgttaggccagcaggtgtgtccccaagtgtctatgacatgtcactcggagggagccatcgcctggggaacctgaatgaataagcagctgcagttcactcacatgcgttggctgagactgttccatcacaagtacatccaactttaaataaaagtacttgggcatgtgaatacgttctatgcccccaacgccaaatgccagtttactgaatcacacacaagccagcatttactgggtctgaccaaacgtatgcggtgagtcagcatttggaccttcactgtaagcctaaaaattagttcttccatttgccccctttttgcagttgaagaagattggttgacttggttgaattccacagcagagccagaatttgtacacagattaagaataagaacctgtattttgctaaattcacttgcttcgtaataaaataaaaatcctacatgacaaagacacttaaaggatatcacagagcactggtactcctatgtctgaaaagaaccttctctttagcttcagtgtgactacttatttccaactcactcaactccagggttgaagcaccaacatggttaaaaaaaaaaaaaaaaaaaagggagagttataatcaggaagttttgaaaaatggaaagaggaaaaaaaaacctaatggttgaattattttctttaaacgttttttagtattcagggtcagaaggtcctaaccaaggttatctaatctagttcttgccccaggcaggatgattaagtcatcccaaagaaaggaaagttcacacaatttgtaaagatcttcccgaattctactacctgataggcaagttataagcatcacttgcctgtcggaggctccacgaaatgctctgagcctttgagaggaaaggtacagcacaaatgcaaattattaacaatataaatcagctcattcccgtaagcatagacatctaacccagccaaaggaatgtgtgaggagctacaatgccgtctttgtcagaaaatatatttattattgatagtgagtgaagtaaagatgtgagtattcctatagaggttttatcagccaaggttgccttcatattgataaaaataccttatctcactgtaatcataaacattattccagtagaagaggtacattttctctcctttttgtcttcttgctgtataatcaccataataagttataatgaaatagctcttacataatcaaaggagaaaaaaagacaaaaccaacatgccacagcctagacaattccatccagcactgctgcctccagactgttttctggctctctccacccagcactgctgccctcggatctatgttttctggctcttcctcgccccactccaattaatttagcccccaaccccatcctactttgttagggtggagttcaccaaatgatggggcttgttcagaagagaaacattttatggtcagtgcaagttgaaagaaagtaccaaaaggtggagagggctgcccttctcttttaatcatcataagagggtttctaatactcaagagtgtcctttaatgactgatccctgatcaaggctttggcccttcaaatgctgctgttcaaaacgtgaaatgattctgctgaatccattcttgatgtctctctttagggtcttctcattagtggtcttctcttcaaatgggttgttttctcactaggaaaaaaaatttccatctctggaattaacgttgatggtgttttgctcattctgaaagtttttatcctccttctcaagcatgctctgcaagaaaaacagaaagagtaagttttaccaccgggagaggacaaaaataaatggcactaactatttagtatgatttgtgttgcttttcaaatatctaatttaaaaacacagaaaacaaggcatatgcttcctgttctcaaaatattgctcctttaatcaaaccattgctttatcaatatgatctttaaatgacccctctcaccaccacatgggttgaaaccccaacaaggccgggcgcagtagctcacgcctgtaatcctagcactttgggaggccaagtgggcagatcacttgagcccagaagcttgaaatcagcctgggcaacacaatgaaacccatctctaccaaaaacaaaaacattagctgggcatggtggtgtgtgcctgtagtctcagtactcgagacgctgaggtgggaggatcccttgagcctgggaggcagagggtgcagtgagcatgatcatgccactgtactccagcttgggcaacagtctttgctgtctcaaatagaaagcaaagtgctcctggtaggggcatttggaaatgttgggagcatggctgatggatgcagtgacgggggaaagctatggccaaggcagtgcagggatcaaaccccaactccaaaggctctgaagggaatctcttcattagagaaacacaagattccttcccagagggggagaacgcagatgtcatgtgctcatgaggctggacagagctacacagattggtacctattcccagattgcagaatggtccctacattctatttagttatttatttgggagatgaggatgtagataggaagattcttaactatcagatgagaactctataaccagctgaaatgggggtatactgccttcattttagaggtctttaagaagaaaaaagtgatactttcccctctagttttgcaaccactcaagaggcaaggtgaggccgaggttgcctctagtttatccattcccacctgcctcccgccacccgcacccttccagccatctcttcattgagctcctaccaggtaccactgcactcagttagtgcattggggaaactaatacatacacctgtggaaaattcaggaataataaaaggtaaaatttgctaatttttatttatttgctaaatacatgctaaaatttattgtgtaaacagcaaacatttaacaggaaccaaatagtatctggtagaaagtaattttttccttccgtttcccgtttctgtgtccccttccagagatggtcacagttcacaagaggaatggttctgcctggtcagagggcaaccctgtagctggagcgagcagggaaggcttctccaaggaccttccaccaggagagaatccaggtggaggactggggtgggactgggaggagtgaggggagaaagcggtgccaggattcagcaggggaagaagcctagcacacacagaatcctgaggggagaggcctactggaagaaagggtacatgctcaggactgaccaagagaaagggtggaaagagggcccagacggacgccaggctgagacatgtcctgctagccacagaaaacatggaggaatgcttttaataggagaatggcatttaggaatgttaacctgacatcctcagcatgatggatccaacagggggagtctgcaggcaggaagcccaaggaggaggcagattagaaaccagacaaaggtggaacaagaactagagctacatgggaagaaaaagggagatggtgacacccaaggtatgggagatccttggtgacaaagacagtgatggggccaccaagagaaacagggaagtcagtgggacctgggaaggaggaggatgacttaaattttgggtttgtgaggcaattttgggtgagacaccaaaatggaaatgtctagaaggacgctgtaggccctctgaggtcaaaggtctctagaccaacaatttagggtcaaaaatttaaaaatgattgaaattaaggggacagaacagaaagatagaagtcaaacaagatggtgtattgggtcataggagcaaagggtggatagattatcctaagtgttcatcattataggtttctaagaagtctatgtcatagggcacaaaagaacagattaaaggcagacaaacttagacataacacacacagtggtgagaaaaacaatgattctgtctacaggaggtaaattagaaaagctagatgcatttagggaaaacaggaaaaacaaagtagtgcagtggaagattgctcagcagagagttgtcctgtaagaactcatactggaatgtgagcaccagccccatgttcgctgggaaaataacacgctgagcacccaccatgtaagagacacacctggcagtgtcacagcgtcacagcatctcagctatgctcacctgcttatgaattgattgtgtgagcctctccaatcacatagatgataagttctataaattccagatatatagacacctcactacatcatgctttattaaatacaaaatggaagccagtatcaagcagatctatatgagcctatctaagggaatgcagttactagagaaagtgatctctttataaatgatgccattagccatttgcatttgggggggttatagattcactgctttcttcaacacactgatggggctttgagttgtcatctgcctggtcaagattacatagctgtacccctctctacaattttggcttagggttacaaggataaccacatgacaatgtacctcctttcaaatattgcaaaatacctgcagctgccacaacttaaggaaagcaacagttaaagagtgttttcacgagtctaggattgtttttactattctctctgcaacctcaaccaaatatagatgggtaatttttcagcaaatcatatcatgctaagaatgttaggctctctttcagaaagagacaagatggggcctgctggtctgaggatgagcaggccagtctcacataaagacactaaaagaagtaacattttataacccctttagccacattcacaaaataccgttacatgtattaaaattctaatcctccagatagcacagtggttcagctgatttgtggtgactccttgaagacatgtgggaccaccacgaaaagcaccagggctgatctataaacattttgtcaaactgcactcacttgctaccaaaggtggcaggggtggtacaaaaccatctcaattctatcagggaaattaacaaacacaatgcaggctggatttttaaaaaagatgaattcatctgtcaaacattttgggttattattatatccagctatgcgacaaaacctgctccaactcagaactcagggcttttggctggagggatcgtagtctggtggggtctgtgttattcagctttcaccttataggttctactgtctctgtttggttccgtaagtactgctgttgggctgaatttcaacgctgcataaatttaacactgctaaattaacataggaaattccctaaagaatgagggagaagctttgcaagttataaaaaatgcttccttcatttaaggaactgctaacacttaatcttaatgtggagaaagaaattcctgcttttgctcatcattcacgtatctgggcctgcagaaactccttttataaacagctgggaaatcaccaaaagaagagagtggttcaggcatgaacactgctcttttcccaagtcttttctcattccagccactgaagaacaaccggcagctcacaaataagaacagcgcccctggagcctgagattgcgtgtcatttccgcttattaaaaccttactaaccatcctaaccgcttgctcaaatatttctgttaagcagtaatctcatcaactgatttttgaatcacagctttcttgaggggttgactatcatagcagcatgccagctactggttgtgttgataatttaagagaaagatggcaaccctgggttgctaaccaatcatcatgaagagaagaaaagcggtttgtttttaagataccactcagggtgcttgtctctggatgaacttacccagcgcctcaccaagacttaggcctcataaagctgggtagagaagcaggaaggtctacctaaccaaggaaaaatgaaatggagatgtgtcctggcacagacctggtcttaagacacgagttttactaaggagggtcagaaaagtggggagtgggagacactggagcttcgatgaggaaaaagccagaatgagaagatgtgcataagacaggaaggaaaagtcatctataaattgaatttatgggaagcacaaagcagttttgcctgtgcaccaagtactgttcttcactacctggaaatctgattagatcacttttttgttttcaatatgtgtctattcccctgcagcaagagctgtttgttctttgttcctctgctttggaggaaatagaagttaacttttttctgcctggatcttgttttatatcttctagacaaatgctctgtataatattcaaattaagttacaagtaattaactgtttatacagctgctgcaataacagacaaaacactaacatactgcagttctaattgaaggatgaccatgggaaagaaatacctattaagaaaaatgaaaatctattaccatggtagtatttcttctattaactcagatttaaaaaaagagaaaatgtcacgaagcaacgattactctcagaaagtggttagaaaaggattcctatgatggaagaggttgggataggaaatttaaagtttggaattttgttgctttgatctgactctaaattcaaagggctgccctaccaaaaaaatgggaaatctatatgaaatacccacgtgtcagtcaccctgtgaccagcatcccagctgggcaattaataaagtcatcaagcgataatgataaagcagctttcgaacacaataaaaacatgctcctgggggcttcccagaaagttaaccttcttgattatcttcgtgctctctgaaagtggccaccgtgtcatcggggggaccctgatgtgggtcggggagagaagcagggtgactgggagcagtagaacaagggagggtctggtcacagctgtgagctagccaggggactggggtcacctactgtttaatgggagcaagagaagaggggaagggggtctcttttcaaggcttccatccgattcccaatcatcttccaatttgttcttaaggctaaagattcattcctagggttggtctgatgagactctgccaggtagctttgacctatagggagtgatagctccccatctcccaaaagatggaaacaaggacttggcaggacctctgaaaggtcaaagacctttaatgcaattcaggccaatggctctaagagcaatggttttcaaactttgggtacagagtctcctgggaaatttggtcaagttcagatgcccaggcctcaccccagaccttctgaatcagaatctccagggatggggatgggtgggtacattttaagcaaacccctcaggggattctgatgctcacccacatctgagtctgacacgacaggaaaaataccctggttttgaatttaagagtgggctgtttggtctggttctgcccttctacagatcatttaaattctctggaagctaattttgcacatgaaaaaaagaggttgggttatatgatctctagggtccttttagctccaacagcctataagtctattaatcatttgcatctaatgtagagttcatctgaaaacaatgataacatacagcttgctctgcaataggtttttctttcaagaaccttgatttttaagcaaaagctactactatgttttcagaccccttcatactcaaaatatgtcacagacttaggagcagaatcctggtctaatataatacagttcaccggggagatgaaattgtccttcagaaggcggacagaaattgtgccagggaaattcctccatatgcactgatcttgaggctttgacttaggaagccaaccaaatactgggatgtcaatgatattttagaaacgagacaacggggtgcactagccttaagttggagagcgtcacattaggatctagcctcatttactgggtcctgaccccaagttcctcactgtggccggttcctttctgatctctccaaagagatcagcaggaagcatgtaggtctgaggtggggcgtctcatttacaagacgtccttattgtgagctgaactaactgtttgcgtggctactgtccactgcctgcttactgactgaaacttctgctatggtttgggggacccctgacagactcacatctaactgcaggtcccacactgacctctgtcccttgggcatctcctggggttggtcctgcctctggtcccagtttgcccttggttgtcaggctccaggttcctggcttcctgctctttttcagagtcacacttcccatggtacttcacaggatgaaaggcatcacgatccaggggggcttacggctggctggagggagcctgcattttctaatggcctttattagccggcagggacattctgccagccagtgcagagacagctgtttttcacttcactgactttggagaaacttgaaactgtttctattccctcccagttctttctgccaccttggcttccccagggctgtcggagtgtgaacctcaaagaaagggtacgtagcagtgggaggccaggcagcagcagaccatcagaaatgcaagtgttcttcttgagtgaacgtttaaggtggacagcaaaatttaagagcgaaggcacaaatactggaggtctcaaaaggagaggtgctgcttgtaccaaataggccagtctcttcatctgagtgcgcctatgaacaggcatgcttatgcacaccatcttttgctcttatacttcaaagcagaatcagtcctagaataacagagctagatggccctcatggatcactggttcaaaccttcagtttatcaaagcaactgaagctcaagtcactataattagattagattgcagcagcagtatttcctataaaccccaccctcccagtgaacacaaaatgtgccagagggtccagccagcttctgcatttttctgtcaatagcagcagggctgggaaaaagctgaatgcttagactagcaactcccaatgcagcccaattctacaagtaaatagtagagaggtgtatgtcccagggaatggtcccagacgtaatgcagatctgacagcaaaccctttcgacaccttccccttttttaaaaaacagaacttgggcacattttggtctacccatgagcaaatacattggcttctcattcccgctcctttccatttctcctgtaaggtaggtggtgtgcataagatgcctgttcataggcacgctcagaggaagagacatgacctatttggtacaagcagcactctcctaccttaggtaggtgtagcaagatagaatgggaaccaggtatcaaaggtaagaaaggtaatccaatcttgctgagcttgagaaagttatgaggctaagcagatatgagaaacaaagacacaggactatgtatcaatcgatgtgctccttcctttgtaaatgctgtatctcatcagccagccagctggtagcttttaagtcttagaaataataattagagctatttaatatcctttaccctcatgaagagcacataagttaatacacaagaaataatagcctaaatgtctctgtcaacccatgagaaattgttgaagaacagctgaagaaacactgatatgaataagtggtaaataagcagagaggaagagtaaggctaaggaatatccggaaattttcctaacagtaaacctattagtctctagaacaatgccccagggaacccgtgaaaggccaatcttatgagtttttaaaagtggagtggacttagccattggaattattccatgggggaaacccttgcactggtcggatatggacaacactgcctaatggcttgttgtcatgtatagtattttccatgtttgcatgtccagcttgttctctggatttaacaggaaacataagaagaaaatgtaagaagttgcccatgaggaactgctaaaataggcagtcgggactacgtatcttgccggagtctcttacaggggcacagctggggtcatgaggttagcctaaattcacaaggagcaaaaggacaaccggtattggaaggaaagtaactgctcatgaaacactgatagaagctccttctggccactgggcgtgatcttaaaatgggccagtgccaagttgcccctttcatcacgggcttcatcaaccactccccatgtgtgaccttcagactctgtcccccgctcattagatcttccacattctggtcctccctttatcgctttcgctctcactttcccttactgccttatttctgcattagtgatgatggatggatgccccttcacaaacttacccactcaaaaaccaaatgccacttatgtttttgaaattttttgtttttatggcaaggtacatcttggtctagctgttaaattcactatgtgacttccctgagtttcaatgctctcaactggaaaatggtgaaaataaaaccatctcatttacatctcaggttgtcataaaaaaacaagtaaaagaatggatgtgaaatgaccttgaatcctaactactgccgaaatgtaaggtggtgcaggttcttggttctcgtccatttcaagttgcccatctcaggaaaaaaggtttgagggcttctatctttttattattaacttgtatatacacctcctaataactgaatataagagccacgaaaacaatagatactccaaacatacagctgaacataaaagattggagagtgagggggaaaaaagagggtctcttttgaaatcataataataatttgatgcttttggctgacctgtttagtaaatttcagcacaataatgcaacgaggaaagaaggggaaaaataagatttactgaatactttatataaaggtaatcctcacacattaccccaatttacagatgagaaaactcaagccccaaggtcacagagctggtaaaagacagggtacaaacccaggtctgccagattcaaactcactatcgcgccatgtggcgtattgcttttgtcacaagttaactttgctttatcctataaatatataccattgatgtcacaagctatatgtagataattcaacacaacccagacaggcaggatggggtcagcactcccaatgccctgcagctgccactgtggtaatgttacaaatcacatggtacaaacaggcacgtatgtagagaccagcattgaaacatacactttgtcacaaccactcttttccactgaccaccagccaataaggcactattatcaagttagaaaaatccatgaatcaacctacgagtctcaagtcttcagttcatattcatattgaaggctggggtttattaacagcatatcagaagctgttttgacaaataaaacgtactaacttaacattagcaacattacctgtaccaaagacctttaataaaaggatccctggcatactactaagagttatacaagtgcagctacaagcaagaaacagaaaaagctgccagccactaggcttttgaggacaacataggcttttaataaatcttgatttattctttccactaatgttactttattttccagctatccagataatactaaccctcccgcggatatttgtagagtataaaaattttacaccaagtgatattattataactacatcaaatagactgcagaaaggcatgctgtgtaacttaaacactagatttagttgggttagaaggtaaatctatggagtttgtcagcagaaggaatcaacgtttccaacaatttctgcctctcagacaaccatatccaactgttaaattggttaaatgataggcaattatgtgacctgccagaatgataatttgcttcagggtttatcattagctttctaaagtacataaattagagaaaatgacgtcctgtgaacatcatattgttctgatatgaagggtcaagagaagaatatggctatgtctataaaagcagtggaaattctttttaaaatgctatctctggtttccctttccctgtcaactaagtgaactctatcaactggtggaagcgttggacagtgactgaacggtggtgtttgttttttttttaacctggccctctgcctacctacggcttatgggcccaaaggtgccagccttaatctgtatcctcttcgctagctctaaatattggcctaaaagtatgaggaatgacctgggaacattattattagaagacaaaagttcagggcaagtggaaaaaagtataattgtatagaatccttttttctgcaagtaaatgagttgtacataaggaagatatgggctctttgaaatgatcggacacaagttatgccctaatcaactcattacagtaattcttgatgatgatgctagggcttagaaagctttttcacacacagtggcccatttagtccttaccactgccccagtcatccagttttcaatttgcccagtgcccccagtggcctggctggcacacctacctgttggcatgattgacacagtgcatatactgggtggccagagcggagcatttgagggtctgggggtgttctcacggtaacactgaagaattttggcctgcagatcagcacagactggatgaactcatatcgcctgaaaacaaacacagggaccgctgagaccaatggtcttcattcagaaaaaaatcaaggttaaagaacacataaaacgcacagtaagacacagatgttgcaaatgtaaaaaaggtttaagagaaagaattttccttaaacttcaaagatagctaaatttttcccatataaaaatgacaaagggtaaataaattctaagaaattagttccactaattgacactacttgagttagtctggacaatataaccatcccttccaaaccgaaaccatatcaacatgccagaacttggaagccctaagttctctcttccattcccatatccacttggtcacaaagttggaatccctacggcctggtcctcctgctccacactcactgtcgttacattgcttccaagtgaccacatcctgaattcaagaaacaacctcccagctggtctctcagctttgacaccctctatcctgcctgcacacaccttccagagggttctttcccataggaaatcgaagatggtctctttcccagcactttctacacaaaatacaaggccagctggctggtccttcttgaccaggttctgcctactctgtggccttcaccccccaaccctgcacacagctgaagcctggacaaaccaattcagggtttcgttcttacacttctcttcaagtctaagctcatgctgctcttgcttcggaaatgctctacgcccaaactcccacctatgcctctatatctggaaaaaacctactcacctttgatacttcactcaagtgtcagctttcattagctctccaccccccaaccctggtaagtctatcattccctttatggtgaccccattggtcccgtattcacttttcttgccatgctgtgacactgactacaccatagtctaatacaatttagcaacctacatttactagaatgtaattccaaggactgtgacttattttctttgttacctcagctattagacatcggaaccctcagaagtcatgtaatacatttactgaatgaatacaaatcggtgcaaagaaaacattttaagtcccctgggttaaaattttgctacttatacttacaaatctcagattttagtcagattcttctgtgaatatgtgagaccaaatgtaaatgtttccaaaaaccttataatatatgcttaaaaatgataatgaaccaaatgagttatacgaatgaaggtaaaatattctgattaatacgcagggaagtttggactgcaaggattaaatacatacagagaaaaaaagcacaatattacacttttaatcttgaaattcgtgttttttcaaattagtcttaatacaagaagcttccagtttatcacttctatttttgaaatttaaatttgttatttccatagtaatcttgaaatcacatattttaaatttaatgggttcaaacaaaacccctagagaacacagggggaatatttctctcaataaggaaacgcctgggtgatgatttgtctcattatttttatccagtacactaagcaatatatattttactagaatagaaatgcaaagcatgttggtggttccctgacttcctacatcctctaaagaacacagacatacagagaaaaaaaaatgtttcaacaatttttctataaatcacttttactttttcattcattaccttactgctttgtcaaatacctaagaacagaataaatagaatcccaggagtttccatgctttaagatttcaaacttcagatgtctgtgaattttctggacacagatttccctaatcctttaccacgaacatcaggatttaaaaggaatcagcgtgcttcaaagagtataggcacagataccactaagtgactaattatagcaagacctgctctagataaatatcgaataaaatatgattaagcatcagatcagctgaacctagcaaataatgactaatgactaatagctcataggaaagcaaggttacattctatcctagtgttgacactgatcgtgtctccaatgtgtctcagatttaaaagcagggcgaaggaggtgaggagggaggctagaacaaccctgaccagatatgcagcccttcctcattaacatacgggaaaagacttaaaaatgagcatccacacactgcatgtcataaagaagacagtttattttttcctttaaaagtctactcacgatgggataattcacctcatgttatggactccttagaaagaggtagttaagttgtagataagcatgtatcctgggttgagctattagtcatgcaagttaaagtccagcgttatttatgatttgaaatgtgtcaaaatatacttttatcaccacaaatcaatactatcacttccagggctcttgatttcctgtttggtgatctgttctgtgtgtgtgtgtgtgtggtgtgtgtgtgtgtgtgtgtgtgtgtgcagtcatcctctgaaattctttttgtacacactcaatctgtattaatgatttgatggtagaaagaggggaagaggaatggaaatcagcatattgtcctccagctccaggagtagactctgggacattttcttggattaatctgtaagggtaaggtttgcctctgtattgatctgtaaagcttgttatactgccctaatgcactgttttcctttgggaaaatgctaaatgagattgctgtctaacattagaaggccataaaacacaagcatggcaccttccattcaggataaaggtttcaaaacatttccaatatgcattatggtaaacctccatatattcatagagtcagcaattgacttttattgactgctttcattcctgctgaggaaaaagcccctattaggcaaaaataatgaaaggcagactttcaagatacctaggaagaaaattaagtcttagcagcaaaggacgattagacaagttaatttctttgtatgtaaggagaggcaaagaaatggtgaatgacaatggtaagagaaggatgaaatatagatttggaaaattaaaacactaataaagaagtgggaagatctaatagttactcaaaaacatgtttagcaaaagaaatcggtggaatagagtcaacctttgaaaatatacatgtaacaaaaacaagaaaaaaatccagttttgtggtcacttgaaattactgggaacctttcatggatcctaccatatgatgcacatctcttttcttttctttcttatactcttttactctgctcttccctttctctccctcatctccacaagcactagcagcccgccctccctttggccctccctaccccacacagggcaccaaaggcccaaggggttgctgacagtaccaaaggtagaactggagtcccaaagattgaccccagaacaaaatcaaaagaagcacttctggtagatattctgtagcctgtcaccgtaaaacattctttggctaatgtttaatgttaatattcacttaaaaggcatctaaaaaatatatatccaagtattttttctccttatactaacaggtctattgtagaaactttggaaaagaaaagaataaagatacacatttaggctgtttctaatttttcactgcttaaaaaacatgtgaaggacataaattattaactaccatttctgattattaccttaggagactttcctgtagttaaattaactgatcaaagagaaacgaaaacagttttagcaaaaacaaagccaaggggtattcagaagtcccctcttaagactctataacacagttacactcggttatctgttttaaactatctgttggttccactgctgcctctattttcaagtcttagaaccttctttgatgtggtctgagctttacatttcaagaaaactacttacccatctttttagttctgctaatattatggtaaggataataaggtaacttcagagaaggaaaaaatgtggagataacactcctcaaccactctccactcagaaggctaaaaaaatcatgtaatgacaatcagttagcagccacactcccaaggctctagaggacactgaagtcactcattacgagtctaggcatgcaaagaaagatcctttccctgtacctgaaccagaagtatgctgagagagttctacagatactatgataaataccagagagagggagaagagagggaacaagaaggaaagaaggagggagagagaaatgaagatgagaatggctggtgttaaaaggagaattctattttttttttaacaggttctgtaatgcatccttcatgggatcaggtggtctcataaaaccatattttacactaaaagccgcacacaacacagtcagggaatcaaatctttaggtctaattcctatagcacaatgcaaaactttaattttttctctaccaacttttcattagctgttaaacccagtgatcaggatttctcttttcttttaaaacacaaaactaaagctactaggcacattgccaatatttaaaaatattaatcattcacttttgtttttctcatcacttataattaatctatcgtaaaatgcaatataaggaagaaaatatttatctgaaatgtactatattaactttttatttttaattttacctaaatctaaatatcctaatatttgttttcagagtaaaatgtagtctctaattatgcaagactgaaaaattcaattttaagctttcctgacattcttaataactgctaaccattttattatgacatttccatttgagctgtaatcaaatttccacaattacacttcagaagtccctctcaaagtggtccaaacagctccaaaagctgcctgctttgtttccatttgttttcatatacatttgagatgctatttcttttgattactaacatgatgaatgttaactaatatgttttctacatcacaacacaaaatgccaagcagcctccactgttaccagagaaaggaatgccaacctgacatcacctagctcagtacttagctcaacgaaccagtcacactgagagcagactatgactgtaatgagggccatactatttaatcaaatagctacagcttgggctttaaaagaaaagttagctttggctagctagaaaacagagcatataaaattctatcctataaacccaaggttgaaagaatagtttctatctgaaaatactttaagacttaacattttaattttaatccactttgactttggaaaaagatgtcaggttcacaattccacagtcagatctacgtggggaacggacctggagggcaggaggggaaagcactgccagccttccactccagtgttaggaccctggtaaaagccctaaacccaggaaaatccaaaagagaggacctctggccacctatccctgcaaaatgagcaacagtactctatatacacagatacacagttcttatgccaataggcctcaacaccctaaacagatgggtacaaacataccaaagtgtaaggtgagcaaacaacttttcattttgcaatatgtttttctttttcaataatattgggtccttggaaatgatggggggcaggtggaaaaacctaggagagcaggactctaacaacatgtggccacgtgacagctggtagggttggtgtcttctctgtggtgctcaggggagagtaacacaccctgacacgatgggactccctgctgcctggtttcttctcaagccacagctctcattctacccttcacagaaaaccctttgggatcttgccaactgcaccaaaccctgagctggatcccactgtatgggctcacccacacaactgaagagctggagagttcctattcctcattagaggtctgaacttaggaaactggtctccaaagaatgagggtccccagttttgtttagttgtttaacaggtggaaggatttggaagtcagacatttggtatgaggtggaagaaacaagccattggctaatttttactttccccatatcttggtgttcttgacttatatttgggctacatatcgctaaaaagggagataaatttttacttaattcttacttaaaagataccaggactaagaggcaataattgtacagagttggtgactcaacataactgatggcaacatgaactcaatctggaaggaccccaaataaactccagatcacatataatttagaacaaccatgtactcatgggatgctattttctcaagccacaaagtcttctcaacaggcaaaattctacagctaacaaattgcgctttcgtctgggtggaagcctttatttagagagctataagccatccctccctccctttctttcttaacaatgctgaaatattgttattgcttaacaaatgtcaaataataacgctgtaataaaaacaagcacagtgggttaacaatgcagttttctagcagcagttatataaagtattctgggtagaactactcctagcatgcacatagtgggaacagaataaaatcacagcccatagaagtagcccttgttataataattgcaaatttgaagattattctctttgtcctttcaaaagatccacaggtatggaatgaaactgttaaatccgaatctccaaaggatatatcaatgtgtgaatgagaccagtaatcttaacacagaccaaactttttatttgaatatctcaattaggtttcagggtcaaaaaagcatcgttattattactattattaaataaaggcatggcatttactctctcctgactcgtaaaacaactgtttaattacataacagaaatatgttcatcatgagccatatacaatcatcaatcatagatttttccttaaataactattttcttaaatatctatataatgtattcacttatggtgataccctcgaggctttgtgagttatttccaatccctcatgatgctacttggaatgttcatcaaaattggtcttaggattaaaaacatgagggttggttggttcatttatcctttatctactcagtcactcccaaaacagaaggaagacaggaggaactgggataagtgaggaaagcagaaagatattaggaagcaaaataatctattggaactagaggagaaagggaggaatacactcttcccggtggtgggttgctgtgcccagccagtccctctgttttttctcacctgcacgaatctggcaggtggagaaaaaacagagggattggctgggcacagcaaccacccactgggaatgacgagggagagaaatggggagttcaaggctgggaactaaagcaaatatgacatcttgtcttcgaaggtaactttaatttcaggttcttgaaggggtggtactgctttatcacccatttttcctgcagaaaacctcatgtttagaaggtagataactggaaataccaacacgggagtccccaatgtagccaagggacagggcaccaggcctggcaatctacaagtttttccaacaaaggatactaacaatcaacctaagacttaatgagaaaactgaagggacatcaaacataccctcccagaaataatccttccctatttggagaaatacatacttcatgaccttcttatatcactttcctcaatctattataatagcttacaatcacagactcttgctttgggtagtatgcaagctgcgttctgtgcagaaatataagtgggcacacattcatgcgggcttctatttttaggtgattataatttttcacaaagaattgccctttgggatgaatttttatgctcattctcagctgaggggtgactcgggtggtgcgaagtttggtgaaatttcattgagtagtccatgcataaaaatacattccagtacccctacctcttccctgccgtgatcaatttaagagagtgcttttaataccaagagaagtcaagaacagtttaattttaaaaatttcaaactgtcacatatctcaatgaggactgtgacacattctaaaaaactaggttaagaccaaatttaagtttgtggtgagagagcgtgttacattactttacgtgatacacttttttctatacattttaaaagcaagatccaaataccagatacacactggaaggactgtgtctggctccttaactgaaagaattgcaaatgtatttattttagggacaagtgaagaaaaaaaattatcatattgatttgccctttaagtgtcagagtgctaaaaatgaagagtggcgggagcagcatgggaggaggggtagagtcaagccttttgtctgttttccatccctatcggttacttgaaaggagaatgcttaggcactgctactggaagagggaaatcccaaaatggggccaataggcatgctgccaaacttccttggatgcagtgctgcgaggcagaaagaatgtcatgtggacatagagctgtgccactgtgtacagactaggaagggggagtaaaggatgtgcaggaacaaagggaggggagagaatactaaatactcccccaagaaacttatttactgggggagaaacataacactcataaaggtcacaagtaacacaaggcaaccgaagtgtcaaggaaacagtacaggagtatacactacagctgttctgagggcataaccattctattgtgcgtggacagtgtggggaaggggtagtctgggggggttccaaggaagagaggagatgggactttaaaaatcccacgagtgaagggcaggactgtaagactcagagggcgtttgagaggatctaggtgagctgagtccaggctcaatcgagtctggcatattcaagggactcaggttgtagtagagggttggaaggttgggtagtgctaagaagggaggggccgggatatggacagtctgccaagaagagacacacacctagagtctatcctgcaggtgttgacaagccactggcctttctaaatgagaggggaagttataaaggtaccatcttgagaaggcggatccagtgtaaaaataaatcagatggaagaagtggaactccatggcagagaggtcagtggagcagcacccagctataaagatgaaaaagctgatgaagagaatgatccggcaagaatggaggcatggaaagcaaggatggaatgagtggtaactgagaggacatggaagtaaagaagaggaaggactgagagaatcacaggatgcttaggccttggggatttaaagaataaacatgctcgagtaatgacaggaagctcaagtgaaatgacacctcctcaccacgatctaaagcgtggagttggagctcagcatgatggcaggctacagctgcagtgtcaaaatgccctgcaagatgtggtggggagcatagaggcaaagggagaaaggacagcagaagcttggggaacagtccatacctgggggtgacagggaaggaagaggagcagtaggggaactgaccgtggagagaactggtgtaacacagcatcacaaggctgggagaccagagtttcacgacagagaagacagtcaaaaagaaggaagactgataaatggccaggaatgtgctccatagcaagctggagaaagaatctgagcagagagcgtgaggcagaagcaggtagaaattggtaaagaagaaagtgggcagtgaagaagaaatggaggtggcaggataggtcaattccatatcctttagagtgcctgtgagatactaggcactgtgggacaagacaagagactgagtcaggcagacctatctagcccattaagaactgctttaaagggacacatcggcaacagtaaaatacaaaagggaaggattacatctggctggagatgactaggaaaagtttagatgagataatggaatttcactagggtcttcaagaatggaaagggcttaggcagttgacatgggatacaaaggcattctagacagacaagtaaatgaaggaaaggcagcaaaagagagagaagaaaaggctagagctggaggcagtgacatctctaacagacttttttttttttaagattcacatggaaatttacatacagattaaagagccaaaacactttcatcaaggacaattctgcaagcagaccatgacattcccatcaagtagaggaaccagtaaaaatgtgcttaaagttaggatgtcagggaaggtagtgtgaaaagagtgagttttcaattctttgaaagaagacaaagaagggcaggcagaaaggagggcatggtccttgcagacctggtgtggttaagaataacacttcgatttcctaagaagggtgtccacagtgaaggatattacaaaatgaggctgtgagatggggaggagtggaaggaaatggtttgctgggtgggaaacctcaccagctgggcagtgctctgatagcaagagggattctggtgagtaagcccacgcatgagaaaaaagcagacatgagaagaaggttctcctaaaggagctggacacagaacagcagagacggagtatgacttgggggaggccccgctgcctggccctgcagtggtacctgagcaggtgtaggggacccatgatgggagatgctcaacgctggcaagggatactccaggtcctctctgccccccaggcgtactttccactacagcatctaattttacatataaggtaagtatatctaaggcaggaattatttacgcatttactgatgggcttcacctcacacttatactgagtgtccagtacttccgcccaagtcctttcttgctctccaaaacagacgtgcagtaaaatgaatggttaatgagtatggaaaatggaataagagtttatggatgctagacagcaatgattacttattctgcatggctcatgatttcacaagtttaatttaaaatcatataccatgtatatgctaacatacacaaaatatatatatatatatatatatatatatatatatatatatacttgacataaatacctcacttgatcttagccaaaaggctgagaaatgattataaaatatatctgaaaaaatacacattgcaaatagcagttgcttccaagcaggggagttggataggtggccaaagagttatgaggagattgacttttgcatataatatttacattttctatcatgtgcatatattgcttatcagaaataatgttcaaaaatatacggcattttatttatatatattgtatcctccgagaaatgctgtaatgaagtttgcttttccctctagatgcctgggcaccacaattcctaatggtgtgccatttccacacgttttgtggcactaaatagaaaactgattgaaaacttaaagacgaagatatgaaatcccacatgcaaactctacacaaagaccaaaatgtaagctgggaaacaatcataatgccccctacattatcagccttcagcacaagtttggcacaaacccttctgattagtatctcagtaaccttgtgagaaaagacacagagaaaccaacacattattgaagtcatgggcaagccattgggtgtgaggtgtaacacgagcatttggaaagcctggaagctttctcattcatgaaattgtaagttggccccttctctgtctttttaattgctctctccccacctgtttccacttttatttataagtaattcccaaagctcagatctatgtccctactcctcttcacagttccttgtgaaagtattttctttctttagaggtactcctacgactctgtttgtgatgaaatggatttcgagtctcttcaccagtcagtagctgtgtgatcttaggtttctttagcttcagttcttctataaaatatacaatcagtaatcttagccatctgaagccagggactaatctgacgatccttttagattccttctaagactctaagtatcaactggttatggtcaattattatttgttttcttatccaaacaagattttcctcctacttttcatcaacagcaatatgttagctcatcatcatacatcaatttttggttcttttgttgttatttattttccttttttttttattatactttaagttttagggtacatgtgcacattgtgcaggttagttacatattatacatgtgccatgctggtacgctgcacccactaactcgtcatctagcattaggtatactcccaatgctatccctcccccctccccccacgaaactggaaatcatcattctcagtaactatcgcaagaacaaaaaacctttttttaaattattatttttcttgagacaggatctcgtctatcacccaggctggagtgcagtgctgtgatcacagttcactgtagctttgacctccgggctcaggtgatcctcccacctcagcctcctgagtagctgggactacaggcgtgtaccccacacttggctaatttttgtgattttttttttttttttgctgagatggggtttcaccagttgcccaggctggtctcaaacttctgggctcaagtgatctgcccttcttggcctcccaagtactaggatatggcataagccacagcaccggctaattctttattttcaagaagtcacgagattgttagttcctgttttaaaatacctttcacttttaacattcctcagtttcccattccttaccataggctaagttatcacttcaagcatacactactattacttaactttcaaaagtctatctgcctcagctgcctcctttttgtgttcatctacacgaattctagtgaatgatagcctgcaaaatgccaatctttcccaggagtcaacagcattcttccttctccctctccccacctaccaaagctaattttacttccaaaatatttatcatatcccctgcctcctcacaggtattacttgtgatgttgcaagaaagagtacccactgaaatttctgttaaaccactatacctattctggcctcaaagtgaaggacagatggtgacatttgcaaggttgttttcaaaccaatctaatatgaaccagtataacagccgaagagcgcaactgcacatattcctaatgtcattcccaagctatgttatacaattataaaatcattctctgaattgattttattttcttccttggataagggcactatctacagcagcgataagtttccataggaactaaattcatttcaaaggtttgaacatagaggctttaaaaaaagtgctcaaacaacatacgaattttgtacaagtgccttgcagtcttgaaatcagagcattgtaaatgttaaccttttaatctcctgaaatccctggaaatgagaaaatggtctctatttgggaaatggatatgtttaaggtaactggtaggaaaagaacttagaaggtgagttgctaattcgtaatatctcatctctagcattaaaccaactaatcacacatgataacattatttactaattcttagaaaataagtgcagcatgcaccaagtagttgctaatattttcctacttaatattccataaattaaatataaaaactagagaaaatacaccttcgaagtattttatagctaataaatgtgagaagttcatacgggtgtaaagcacactgaactgcacgtacctctgtgaagcatccacacggtaactctgtaatttgaaattctaacatgtttctctttttgttctgattaaatattcagtactgatgccataagaagcattaaattccaacatatccctttgtattatataaacggatttaagcattttacagagacaggcaagatttagcaaattggcttaacattctagtctgctgctgagactaaaatgaaaagaccaactacgaagtatagaaaacaacaatctaccacacagattctccaaatgattagatgagtctcatacacgagtatttcagaggtggaatctcaatgatttctacgtaaagggtaatgatatattactgtaggaccaaataatgcatttctcaattcatgtctggattggatcaccatgctgagctccattagttttacatctccctaagggttccaattcagcagtattatatatgccattacacacaacccaacctaagaatggctgccttatgacagccccttaatatactctccagttgagtatgtctggagaaaaatcacaaaactagggaaactagaatcacttaaattcacaggcactaaatcctgccacaatgttatggcacttctttggtaaactcacttccccctattactaggattattcatgccatctgcagcctcctcaaaaatctcgcctggtcttttccctttccacccttggctaatgtgctggcctgttgtttcattgagaaaaaaaaataaaccaaaagataactccctcatcttcccaacataagatctggatctgcacccatcttttttctattgatactttggaggaagagtgtctctctcatccaaagaaaggcaatccctagcatggatccaattcttaccttcccccacccttgcctgctagtgggattttctctcctggatggttctcaccacattctggcattctctagaacagtgctatccaacagtgctttcttagtgatggaaatgtactaaatctacgctgtcccaacatggtggtcacaccaccggtggcagtaagcacctgaaatatgactagtgcaaacaaaggaaatgcatgttaaattttactaattttaatacatttaaacagtcataagtggctagtggctaccatgttgttggaagcacagtctagcaaataccctttcaatttctgcctccacttccttaccttccatccattcttttcatccatgccaaagtggctttcattcaactgttggatagaactgctcttgctaaaatcagggcctctaagtggtcaaatccaatgatttttagtagacatcttataggacccgatcagccagacttgttccagtaaattgcccctttcttgaaaagagtttcttggcttccataatacacactctcctgtttttcctcccggctctctggctcattgtcttctaactgatccctcaagttggagttccttggagtgatggtcctggaggtctctttgctcttctctctcccctctcccacagacacctcagccattctcatggctttaaataccatctgtgtgttggtcgctatcaatttgtatctctagcccagccctcttataggtgactgactattgctatttacgtggaagcattacaggtaccacatgtttaaaactgaactaattccctcctctacctccaatttatttttttcttccccatctcagtaaatagacccttcaagatcagggagttgtccttgatactccccctttccccctttcattcccaatatccattctgtcacgtagtctagtctaaattcaatagatctagaattgaccacttcctttttttcttttcttttctttttttttttttttttttttttgagatggagtcttgctgtagcccaggctggaatgcagtggtgcaatctcacccactgcaacctctgcctcctgagttcaagctgattctcctgcctcagcctctccagtagtgggattacaggtgtccaccaccaagcccagctatttttgtattttcagtagagatgggtttcaccatgttggccaggttggtctcaaactcttgacctcaagtgatctacccatctcgcctcccaaaatgctggaattacaggcatgagccaccgcgcctggcctggaatggaccatttgtatttccattgccattatcctagtctgaaccaccataaccacttgcctggactattcaacagcctcccatgtagtccctctgtttccatttttggtctcttaccctcatctctacacaattcattatcaaaacaacaacaaccagagtgccccttttaaaccacaaatctggttcacaacttctaggttacaaccctaactcttcaagatttcctacctctcttgggatacaccaaaatagtgattatgacctactaggtcctacaagatgtaacccctgcctccatctcttctacgacactttctcacaatagatttcccttcagaaccccaaaggagctcagctccttctcagcgtcttaacatgcattggccctgctgcccttcccctaatgcctactattttagctttatatcagctttaagaggttgtctccaatgcctcacagtcgattcccatgggacatgtctcatagcatttgacagcacttttcacaattgccattgtcaagttatttggatgatcattatttctcccattagaccagaagctccaaaagggcagtattcccagtgcttgtcacattgccaaacaccatcagctgctcaaacctttccccctgagaagccactggggtagcttctcacttctcatcagcaccgtattagccagtgtatatgtgggggaacaaggcagacctgtgagaagagtggccaaactacacatgttcttaacatcccaactggaatcgagaaccaatttccaataaatacttaagttctagaatacagtcaatacttatgttttagccatttactgtgtggttaaaaacacaggatctagcatctaaaatatgcatatccaaaacgggggtctacttttacttgcagtggaagcttgggcaagtttcttgatctctctaagatgcaaatttttcctatttcctactgtttaacattgttgtgaagattagtaagataacgtttaagctctccacaagtgtctggcactgagtaagcctgtaataaatggtagctgttgttattattaatacacattattgttaatatatttctgcaggttattctgggaacctacccatttgttatcatcttcttccaaagaaaaatgagctgctattttcaaacagccaacttaaaaaccaagttttagaaacgatacatctgagagttggtaactgctcatgaagcttgaaggtacccacaaagtgttcggtggtggagaaagaggagggctgctgcatgtgtttttgatgaagggattaaaaagctgactcatgttaaaaatcacgcctccagcatggggtacataatgaacataaacctacatatttttctttccccaagtacgtgctcacggggagcaacagtccaccctatgaataaatggattgtatttgaagtaattacacttggcatagatttacccactgctggtggcagggctgctcttgtgactaagcagtgaggggaactcaacagaattgatggcaaacggctttaatttgcttaatagtagcaaaatctcgcctaagacaagttggacgtttcaagaataataaacccaccagttaaagttctattactgttaaaccagtattcaaacaggccagaaactggttttcagctctttttgtgagttttctgtatctttaaggtcatacatgttattttgtgaagccacgcagcagtcttctggaggaggcctagacatgccggtgttactaaaatgttgggtaacatttagtttattcatgttgtgaggtctgtcccttcccctaccccatactcccaaaagctttaacaccaaaggacatttagaaataatagggagaaatgtgaaagtgctaatgatgatttcatttcaaatggtcttaaattgacaggtaatgacagcactgcctgtaatggccttgtagccactcataagcaggaatggggaagaagatggactaggaggattctcctttctataaatgcacatggctgaatgcaaagaaaacccagataaaattaaaggtcttccctgtgcctgagtgatggcctttgtgaaggatgagtgagaaactgaagccttacacatcataaaatcacagtattgtggattgattaccattcagaagttaattacacattactaaattattatgtgaaaagctgtaaaatctggagttttgtcaaatcagatcatatgtcatatcatatatcatatcatggactagaggtatgtaatggctgtggctatacagcagaccatgaaactgaaattttagactgttggcctaatttaatcaatgtcaactgtcaaataggaggattatggccagcaactccatatgagctaggactgaagaccctgaaagagaaagacttaagtactgctcaggatgataatttcgtttaaggtctgaataactggttttgttatctaaattgaatagcataatgagatatttttatcacaaccacatactgtataatgaaataaagcaatgagagcattttatcaaggatttcaacgtgatggcaaatcaattataatattaatttttatcagacaccatcaaatccgccacttttagatctccaatattggttataagtgccaacatttagactgaaagaactgttaacagatggagcatttccttcttccagtatttaggagtgaggccatctgactgaagtctatttccctgcttataaactaaggcctttgcccaggagactatttcaaaaatgtaccaaggttaatatgtttgcatatattacaaatgctaagcaaaatggaatgttaatatattctctattaattacaaaggaaatggcaggaatgactgcacataaaggacattttaccagttgtcttactctgattaccttttaggtccctgcaaatgccagtcacagtttcactggtgctcagttgcctgaaatgagggagaagtaacgagttctcctactaggagccatactgggacaagggtaacaaaataaagagtcctgttttgtgatatttcatttcaccaaacctgctggtaggaaaaaagtgaaaagagaacagagaaaagatatgaaaattgcattatacagtcctttaggtttcgtccttcttttttccttctctctcttcctcctttctctccccttccccaaccagaccttcctatttctggtttacgcaccgtcagtcaaggggtgaacaaatttttatatatgctctaaagcaggagtagcaaatacaaaggaaaaatgcctactcattcaatgcttaagccatgacagacatcactaatcaatcttgacattctttcaggctgagtctgtcatagcctccgatccttttcaatgaaatactgcagggagccaccacgatcaattggagttggtgcctgaacaaaatttatttgcctttccttgcactagacttttccctagtgttctatctttagcattggttggactttcttggttcggcactttcttatggtcatgtagttcagactgggcatttttcaagttgaaattcatgagaagcctggctctcttccaataagcaccttgccatacaaaaccacagtttctgaaaataatagagatcagataatgcccctttctggctcaatccacatctctaaaagggaagcaaagccaggaaaaaaaatcatctgggcttagcagtctctttcttcctttctggagtaaaagagttggcctctattaatgtttgagccttgatcttagctatgtcgtttttaaagctgatttgaggttcagatttagcatttaccctttcaaaaagtatctgttaaaagaaagttttatgacagtcactagattgcctttatgagcattttaggagtaccttcccatatattaacccactggctcatttggcttcatagttaattgcacgatctctccagaagtccttaatgacaccatctcacatccaaccttcataatttagctccccccaaatccgaggcagggcttcccaggcaccatcttactgccattgtgggccaaatgtgattctccccagcgctgctgtgcctcctcctttatggcagcggcttgcctgatcactccaagccattccaggaccagaagacttccaggcaagaagaggctattagatgcaacctgcttgggccagggccaattctgctaccagtgataactaatgcatgcttctgctggtattttttcattctattgctgagaggattgcctcccacatttgcacaaaggatttccctagataaagaagatccgagaaggccaaatcttgccagaattcaataaatggcatacaaaagcctgaaaaaaaaccctggatatcaaaatggaagtaggttcaactatgacaaatgtggctgcctgaaaaacagacaagaacacaaagggcatccctgtcttctctgtctttacctgggaactaaaagaaagatggcgattctctgtacacgtgctggtctgtaacctccacagctgccagctctaaagaaaagggcacactcatctgctttatgaagagttgaaaagattcatgtaattttcctggggtcccaagcttctttctttttttttttttggcattacccataatgtatttgtccatgggataaactgaatgccttcccccaacaattacatttgcttaaaggaaaacacagctgccttccttgaatataagatgcaactgggactagtgagaccaaagatttcaaagggaaggaaagtttttatagataaaagatactctattatatcaaagtgcattgagattaaaaaaaaaatgaggcaaagtatgactattctccttagggacaaaaggtccaattgagaaagaagctctaggtgccacttccagaagagccacctgccactacttggagctattgcagatattcaggagtcagaatttcgactcctgccacctctggggttcatgggggagactgtgcacacatgtctcccctgaggcaagccaacaggtaattactcgatcactgacaccttgggataactgaacatgaaatcaattcttaatggttctctcttaaagaaccagcatcacactgctagctactgcacctgtagtccagctactcaggaggctgagacaggaggatcacttgacccaggaggatcacttgacccagaggtccacttgacccaggaggtcaaggctgcagtgagctatgatcatgccactgtattcagcctgagtgacagagtgagaccctgtctcaaaaaaaaaataaaaataaaaataaaagaagaaagaaagaaaaaaggaaagctttggagaaatatgtgctaacccaagcaaaagcaatgagtcacccattcctttgggagtgtattatattgctatgagggcccaccccagccaaatatggaaagtagcaagagatgatgctgaacctaattaccattagttattatttgctatgttacaattgcaccgaataacgctgctgccagcagtgctgttttatgtgatatcttcttctgtggcaaccttttcataaatcaaagcaaaagccaataccagacagtttcttgtacagctgcctgacaataaaagttaacactgaaccttagctgttatcaatcttcataaatgtgtcacgacgtggcaagactgctccacattacggtggggctgccactaatgcaagcaaggtaggacccactaggttaatgggacttgacaatcagtccagttttaattgagccagaaaaaggatggttctcttatccttaaagtacacaggaattttctcctctatgtcttagtttcatcatgctttgctcagaaaatgcctataattaatatagactggtataacagacaatagaaacccatgggggaaagtgggtgggtaggcttttataagaagaaaacttgttatgaagtatttattggtgttcttgatagacagttacctgacttgaagatgctgtgttttcaagttgaaattcaaactagaaaatatataaatctgtctacatgaacagaagcaaaaaaaacagtccttaaaatagcaaaagtcaacaaatttttaatatcaataactttcccttgacaaaaattcacacatatagaaatctgaactgaaggaattcccaattaatgacaagtcttaatgtaataaatatccatcatgttttgaattttgctatagtcttaattatcctattgataccgtcaagagaaagcccagcttctatctggcatgtactagagatgaactctggcaattagctaatgtccaaaaaaatcagccctgtattaacagcctgtaatgaagaccattaacagccagataaatcaaccattaggccagacacagagatgtcaacatagccacaggcacctaatttgctgaatgcattatttaaatatgtattatccaagcacagtatatatgccaggtgcttgggcagatcgataagaggataaaatacaattcctgccctcaagaaggtttcagttcaactaagaatgagatcacatgctgttaactagactataaccttggcaatgggcccttcaaactcccaagtctatattcttagtttttagacaacagtttcctctagtgtaaattcagagctatattagatcccttcagagtaaaaacactcttatttgcacctgtgagtgagttagcccaggcttttaaatcagaatgtagtttaaatgcacacacacgagaaaacgcacttttttttttctttttgcttttttgttgcccctaacctctagtcttccattctgaactgcaggagtctaagttaagaagctggacattttataagagttcaatttagtagatggaaatattgatactaattgagcacctttagagagaggcatgctcccatcaagctggctcagatacagcttgtaccttaaacggttacacttgagaagggagatggggcacaggcaacactgatgccacttacattgtcataaggctggagtgacataaacacacagggaacaattaattaattatggctttttagtaggaaggaggtgtctagaaagactttacagagaaagcagaggaattaacacatgagacaggtcctacaaaaggctgagtttatcgggaggaaggtggtgaaggtgaggtgtgctgtggctgtgctcgggggcagcgtgagccgggccaaagcgtgagtgcggaaggccttccctccctttagtgatgaacactgaagtgcatgagaaaagatggcaaaagatcagcccaggaggtatccaaggtattttcataatgtggtttaatatttaaagttttggctgtttgtcccaacttctatatttgatttattagataatgtcgattatttaactttgaagcagaaacttatttcgcttttaacatttggatcagattgatggatgagcatcttgtggttgcaaggcaagctgttaaaaaaaaagttattatttgccactacttatcaccacaaatcaggatcatcgtaacactcaaccaacacataactttggctgttgggactgatataggactgcagccatcatccttggcccctaattttaaatgttgtattcataaaaataagcttcattgttctcttcataatgagcaaaggtgtaagtaagcttataaactagagtaatagtattaagatagcatattatcagttgtgggtttaggattccgctaactgctaacaaaaaatgtttgaaaacaacaggagggactggaaggagggaggcttctctttgctatggcttccgcatccctttctcactctctataggaatttactcctttcatagaaacaaggctgcacctgtgattgagttagcccaggcttttaaatccaaatgtagtttaaacacacatgtatgcacaaacatgggaaaatgtgctagtgtttttttttttttttttttttttattgcccctaacatctagtcttcttttctgaactgcaggggttaacgggcttttggggactaatctagacacttagccacactgtcctttttacttctggaaaaaaaatatatatatggcccaaatgctgagcaagtgactacagaacacgttaggaagaatttgtttgttcagtatacactaccaacctatcgttgtctagaatctcaagtgaagaaaaaattctaaaactatgacaaggttttaggtgagaactatatcatgaactaacaatggctgcttttgtctgagcataccattgcgtatgtatgtctaaccacattatgtagttctcatgtacatattaaaacagaattattattttgagtagtgctgctaactgttggttaataatttgaagaaagcatttacctttaaacacatgcttttaagaggcctggtatactcaattgtaatttattgcgttcaagaattatcctctagggaaatatatattagatcatatgatgagcatcattaaaaaaacacaaaattcacccaacagaaaattcaactattgtgactacagtaattataatagctcactattcactgcttaggatatgctaaaaacataaatggacctcatttaattcaatataacagctctgttattaccatttcacagatataaaatctaagactgtggggtttggtggggtggaaaatgagaagtaacttgctagaataggtctactgaatgatgtgaagaaatctataaacattatattcagtaaacattttaacatgtggatacttattatttcattgtcctatattgacattatggcgtggaaaaatgaagagaagtcctaataaacttaaaaagaatcaggaagaccaggaaccacagacgagagaaaataagcatattttctggtagatgctacgcaaaacctgtagtatattaaacatttgctctttcttacgtctacttcctagatactgtgcatataaaggtagaattttatgacatgaagtacaaatagatgtatcattaataagaatgatcagcccttctgaagaacgtggccaaaagcttagcactcaaatctttttttttttttttgagacggagtctcgctctgtcgtccaggccggactgcggactgcagtggcgcaatctggctcactgcaagctccgcttcccgggttcacgccattctcctgcctcagcctccccagagctgggactacaggcgcccgccaccgcgcccggctaattttttgtatttttagtagagcggggtttcaccttgttagccaggatggtctcgatctcctgacctcatgatccacccgctcggcctcttttaaagatcccagcctaatgcactttctggagcaacaatcctattttcttgcatcatcaagttctgaggatgtatttttcatttgtcttgtcgtctgttagaaaaggtaagatgtgtatacattttggttttcaattctcctattatatcagcttctcagcgcttcatttccaaatgttcaaaagaggtatggattgacatttctgccaaaggacaattttttgcttgtagtttttctcagagttaatggaaaaagttctgccactaatgttttcaattcacctcagggaattacaaactagcagcaaaagctgcaaaggttgtgccaaaatgcagtatttttaattatacaagtcaaaaaagcctataattttcacaaaacatgatttccttttttttaattaaaaaaaaaagtcttgggaggccaatttttgattcatattgtgatacaacttctaaggtaaataacctgggccctgactcttaactactagatccctaaaagaaactgacctgtataggttgagtacctactatatgcccagaattttacccacatttcattaacccttattaacaaccatgaggtattatatgtacatgtcctatatcagcaaaaagaagatcaagagttaagtacttaatgctacacagttggaaggaacagtcacaattcaaaccccatccatgttacggaataaaagtaccagttccttagggtttaggtatgagtttgtttcgctgcagccttcttctgactatccgcccccaccgcgccccccaccaaaaacaaaacaaaacaaaacaaaacaaaacaaaaaccaaaaccaatcacttgaaagaaactttcagtagaggactacagaccaatcctagaggcatgatgcagctatttagaagaatgagttggatttaaaagaaggcgttgaatttagtgttgacccagggggatgtatccataataaatataagttaaaatacgtatggtatagtttacactctgtgaaaacaaaacaaaatctatgtttattaacatatctactcatagagataatgtgaaaggctaaatatcaaactgcaacttcacatgctttacttttaaaaggttgattggaaaagaaaagaggagtaaaattacatttcccttgttacaagaaaaaaaatacttcctgataaattaaaagagaaaaaaatctaatacattagttcccctttatccatgggggataattctaagatatctagtggatgcctgaaaccatgaatagtacttaactttagataaacttgttttttcctacacatacctctatgataaagtttaatttataacttaggcacagtaacgactaacaacaagaataataaaatataacaatatactagaataaaagttatgtgaatgtgtctttcagtatcttattgtactctgcaaaaagcaaaattgcagataaggggggccaccgtattatttatcaatttcatatccttttcgctacagtaagtctccaggaaggatatcaaagagaaaagttgttcataaaattcaatgggaaggagagagaatactttaaaaggctcattaataatcaagtggactagcaatagaaaatttgcctagtaagtgagctaattttatctatttgggcacattcaatcagaattatagacataaattaaaaattagacatccagataaaaacatctgaataaaccacatacgtttgtctctcacacattcattgcaatgacacaaagaactggtaccttgtgaattcttaggacaccattcaaagatatcatagctaggagtaatgaaactaatcatataccatttcaattggtatgaaaagatgaggctctttttctgcctaatgcctaggacttccccaggcaacatcctatgaacccaatctttcctcaactctctcctcccccctttttaatcagaactaatctttactatgttccgtcctttcaagtccctgaactttgcctcaatcaatatggcaagctaatatgtggttatttttgagtggacattagtatattaaggtgatagtcattaatttggtgcagtaaactctaattatcatataataaacgtatacaactctatgcacccaatattatattgtattatttgatagaagacttccagaaacaatgaccactcaaaaggcataatcctagtggtgacaattatggggaccagggataggtgaaagaaaaaatattcccaagtagtagaactcttttttttttttttttttttttttgagacggagtctgctctgtcgctcaggctggagtgcagtggcatgatctcggctcactgcaagctacgcctctgggttcacgccattctcctgcctcagcctccccagtagctgggacaacaggtgcccgcaccacgccaggctaattttctgtttagtaaagacagggtttcaccatgttagccaggaggtctcgatttcctgaccttgtgatctgcctgcctcggcctcccaaagtgctgggattaaggcatgagccaccacgctcggccaccaagtaggtagaacacttggttgaatctttatgcctattaactctgccttttaaaatacggcatttcaagttcttcaagtctgactccagtctgctttgtggtctcatattccactagacctctcccacactgtttcagccattttcactatcaatgccctcttcatagcaaggccattctccctcttcttaccttaagaaaatctcaagtgagaagatccagcttatgccagtcacctcttcatgcaatccagattcccctgggattcgaacctcctagtcctactgcattttatggtttgtaccttcatgttagcatttaacatgtttggtcactttttatattcccaacttataacaaccatatggaatgtataagatactcaaatttttcacgaacaaatcttttagtaataattcctgcatcaagttttgatgcttctgcatcgagctaatgatcccaatgagtataagccctctgagggcagggactcaaactgatatgctgtattttcagggcccatagaacatggaacatcaaagagacccttgatgaatgtatgtttaatactgaggatggtaagttcttcaaagcaaaattgttgcattaatatctttaaaaaatagatatatgccattgagctcactaggggaagaaaccaaacaaataaggacagggtgtggaattcactaacagaaaagaactcccaagacagaaagagtcaaaataggtctgctggcatatccaacaactcaagttcaaagacttcaaaaacagccccaaaccaacacccaactaacaaaccaaaaccacaaatgacttaagtcatgacaaagcatttggttcccacttcttgtcattaaccaggatgtcttaaagatgaattctataccagcaatgctaattttcttcattacctagcgtcttttgtattggagaaacactatcaggaaaagacaagaactggttgattatggcagtatcaaatgagctgtaatggaggtgttacgaatgtaaatcagcgaagcctgatgcgaaaacagcagcatctgggcatgcagcttgcaaagtaatgagactgtgataatgcactacacccagctttgatcacttcatcttgttcaagagctctgcttgggaaacaaaggtgtgagcattgacctcctgcccacagcttgcacaagcacaaaacatggtaacagatcaaggatcatacccttctctcttctcctccttgccaacacacccctttttcagaactgatggcttcaagttggaggcccagcataaagcaggccaagcaagcttctaccatatgaagcgtctgtctaacatgtctactataattggcaattcatttttcatcctgaaagcaggaacaggtgtatgtaccttcgacattccaatcataaaccatgctgaatgcatctctcacatagtcagctttgtgagatctatgccagtggctagccggtggacttcagagtctgcatagatggctctgcctacaaatgaataggcacttgtgtaatctcagatgctcaagagaacaagaggaggagcaaaggcagtgcataaaaaattaaaaatctcaccacacagcagcagcccttggtttttcttgttaaataatgtaattggcaaatagcttacttctttgtaattgcaatatccctacaatgcagtttaacatactaaaaaaggaggttttagtccttgaaaaggagtataaagccagatgtacactgcacagtgtttcttgccagcttcatccagaaacactagctgaggtgacttgtgaacagagccaagagcaagaactctccttaatgagcacatttatcagttttccagggactcgttgattaccagcatttagacatacacactcacaaaaggaacacagcaatttaactattgccactgaatgggaaagcacatgaaataatttaaggcaggcatgtgagcaagttggggatcttggcgacactaacatatgaacatgtgtgctttcatttcaacatgtaaggaagggccagacgcaagcttttacaagttttcaagcattctgccaggactcaataaatagtatgaacaattactgcatatgattattatattgaaaagtaccagtgctactgtacaaatgtttcattacaaatactgcctttgaaatccctttatcaaaagtaattttcaaaccttatccaagcctcctacaaggtcctaggttgaagaggaggagagtacaacaggcaaatgtaacttaatgggggaaaaaagactgattctttaagaaaataaataaatgaaatacaagcaagatttatcccctctatttctacagtaataaaatactctgaatgaacagccctgactctgagataagggatcaaattctaatgaaaaaaatatgattatggataggattaggaatcctacatttaagacgtgattaaattgaagaagcattttatctaggacaaattacagatagaaactgggaattccaatatttggggtatattttttcttaatttagggtgttttaggtataattaacacacagttgagtatcctttatttgaaatgcttgggaatggaagtgtttttgaatttgggttctggatttggaatatttgcatatgcataaagacatatcttggggatgggaccccaaccaaaattggaatccatttatgtttcatatatactatacatagcctgaaggtcattttcttcctgagcacagtcaacagactacatgttgtggacctgcctttgactgtgacctgtcacatgaggcaggtgtggaattttcaacttgtggcatcatgttggcatgcaaaaagtttccaatcttgaggatttggggttttcagattagggctgctcagcctgtatatcacaatgcaccaatcttagtgttcatattgtattagaagttacatacctgtatatacttgtaaaactatcactcagatacaacagaatattcccaaaatctcagaaatgctgcttgggtccctttccaatcaaattcctctattcccaccacaggcaaatgttgcctatttttgaacatcgtttaaatgaaccaataggaagtactgttttgcatctggcttctttgtgtgtaccatgatgtttgagatccatcgtgctgttacatgtatcgatagtttgctcttctctattgctgaatagtgttctactgttgaatataaagtagaaaactgcgctttttatccctatattccaatcagctttgccatcttcctgcccctttctgcaggataccactgagttgagtggaatactgtctgttttgtttctcattccctcaatgatgaccattcggattgttgctagtttttgatactatgaataaacctctatgaacataggtgtacaagtctttttgtagatgtatattttcatttctcttgggtaatacctaggactagacttgttgcatcatacagcaagtgtatgctttacatttataaggaatgccaacattttttttcaaaggacttttgccattgtatacccccaccagcaaagtgagtctggtttctccacaatctttccagacaattagtattgtcagtcttcttgatttttgccatcctatgttttaaatgtacagttccctggtatctaatgatgtagaaactcctttcatgtctatttggccattcttacatcttcctttgaagtgtccaagtcttttgcccatgaaaaaattttcctaatgatgtcttaagatgggcagaattttaaaattttataaggtccaatctaaaatttttgtattttgtttgcttatctcttaagaaaaatcagaagagccagaaataagaaacttgacaagactgaaaccatgaggggtgacttggtaattatacattcaaatgagcaacagaatacaagtttaaatacaatgtatcctgaaagttctggtttcaattttagtatgtggtttaccccaggcagagtgaatgggcagctaaatacattcataagttaattatctgactgaaccagggaagggctgatagcatctgggataggcttaccaaactctggagtgataagactaattaatttgatgttatactatggctgaacctatataatgttccagaaactaccctgactaccatttttatgtgtagataacttctttgataaaatctttaactgtgctcaagtcctagattgttaactttgcatatctgacataaggacagaatttaaattctaccttctagaagctttctggatatcttataacagggcaggtcagtcagacaattaactcttaacttggcttctacaagtttcactgtagcttagttgcactcaaaacgcaaaatatgttttcttatctttaaagcatgatttttaactgaagcccttaacaagtaaatgaattctagttggaattggcagaggacaaacctagtagtctcagttagaaatgtcttttccaactgtgagctgtgtagttattactcaagtaagcaaggatcaataaacaaattccaaaatatcatgtaccctagaactagaatgatctcatttaaaatattatgatacaaggaaggaaataagctatcattttggcaaatcttcatttatctaactaacagtgtgcaattaatatttcatataaccatgtagggtaactagattcttaatggatcgtattgattaagaagaaagttcaatactgatgttcctgctgggaagacagaatgatttgttagctcacacagaacgaatcatgaatccaggagtgtatgccacaaacctaagagctgccacaagaatggtttgatcatttacatgtttacacataaacacttatacgaaaggaaagaagatgcttggtgcaacaccaacaaaccccaactgccacagaagaacagagaagaatgctccaggtcatggacttacgaaggacgtggccaatctggctgaccatcagcagcttatttcaccagctgagattcctttacaccctatgctgaagtgatggaaaaagtttccaaagtgacccttttggtcttgtgaccatgttcatgagatggctgcatttgcattgtctttttagagaaattaacaatactctcttgtccttggtgtacactcctgctctgccctttttatccctatattcccaatcagctttgccatctgccctgcccttttctgcggataccactgagttgagtggaatactgtggcgaccagtcatggagtagagagataatgagatggaaatctctcttgttaatgtttcttgacatttacttctattatcttagaaaatatatttagaccaagtatagagatctcacccaaggaactaaaaagaaagtaaataactaacaggcagatctgatttgaagggctccaattttagaaggggggaaaaagcattaataccgagctttctttgtaaatataaccaattctaaatgggtatcgtaagaaatactgttaaatatggcatgctccaaagccagtctcactttccttggactaatttgttgcttggtgggaggtgacagacaaacaaaccaggcagattgacagcttgggagctggcactaccttacatatcccgatgagatacggaaggagctgcatcatctacaactttcctaaaatgggagccactatctgcagttgaataaaacaacttacgaccattttttagataaggatcaaagacaactttctcgttaacttttaaactttctcagcttatatgccctacagaaggtgacagttataatttacttttatagatggaagacacaagtcaaagacataataaataacctgcctgaggaattttggttctaaataaccgagtccatgtgacagccaaatgtgtatttgccattagcttcatataaaagtatattcataagtacattaacatctttcttcaatttcagaaatgaaatcctcctcagcagcacatttgcaaattccagaggggacatgatatactatggaagttgacataggtggctgatgttttaaaaacaaaaaccaacaaataactcgaaacttctaaagacgtaattgtaccaagaggcttgtgcacaaagggtacaggtatatttactttatctagaattttgcctctcaattactaagtctcttactgaataatcaagatgttacttggctccaaggaccgtgggaataaaatgtcaccactgcagctgctatatttcttgctcacagcccttcaaattaaaaagggggaaaaaaggcccaatacaaatgcagaatttaattagttagtaaaagcccaaatcctgcctgaagccctgttcttcctgtaatatcgcattcttttcttcttgtgtaaacttttcttatgaaggagacatctttataatacaataactctagttataatgtaactgctggtaactaactcctgcattagagaaggcagcatgttcaagtaatgttgttttaatacaatttgtgtcagcagaaaccaagtcaacttgatcatttagaatttgatcaatgtgaattagtgtcttctgagatacaccatttgatcatttcaaaactgatcaatgagaatcagagataaaacattatcatgtacatttggtatattagatccattcacacagcactaaagtaggttataagtagcatcaatacgtgttagagaagatgttcaggatacctgtcagctgcagatacaaatacactgaaacagcatataattttaatacttttgataaggcatgttactcaataagggagctgggtcactgacaaattgcaagaactcaacttcagagaaactagaaagagaagcacagaactaatagctcaaacttttgaaataagttttaattaaaagtttaagaagaaagataagtaactaaatttacctgattaaacttctagaagaattttaagactattaatcagagtaaacttttacttttagtacaattagttctattaatctaatatttccaaaatgaggttgcattgacatcaggctcactggcttatgcatctagcagaattataaatttgccagtcaaaaccgtattaattattttacagccaattaagcaggatctttaaacaccattgcttaaaactgtccatgtacacatgtgtaattatacagaacatgagaaacacctgctgatactattggcgtgtcttctcggcttcaccaattcatccgtaatatagctattaaaatattacatccaaaaaagaaataaacaatattgccagtgaaagtgcaacccctaaaaaagaaaaaaaaatcaaggacatttaaagtcaaagggttttacattgaagaaaacctttaaagatggtaatatttacaaaatcattttatctgtatgagttctgcatagtattcctcagatactctaaaatcacctaaactattttacagggtaactaatcttttaatactttataaggataacctaagcttcttctatgacctaaatttataagtcaggtttcaacaacttcattcagggataaaagcgaaaacccctcaaaatctggcacacaaaggagtattactggtattcacttccaagttcatagacttgtactctttagaagtgcttcttctttcacagaaactgaagccatgttaaaaagttgtacctctatgaaatcattccaaaaatattttcaatagatctatgtcactttccatgcatatttttttttcttttatggaaaatagaaactcgccacttcattatgtaaaggacagaatgagaatgagtatcaattgtcctgtaaaatgcttttcatttgtttactatcacattgtctttaccatcctatattgcctttaaaatatttaacatgtctttgatatttgctttacatttacttgattttgcttttctattttaaaaacaattcacatgcataaacactctggtaacatcttcttttataggtgtggcatatcagctccaatgtagccacagagatctgattctgacattgaccagaaacaggaggccggcagcactccagctacattgctgtgaggcttctcttacatgctatctatcatgagtgctttatgtgccggtcatcctggctagagtatgagctccataagggtagaactccttctaatgtgctagaggtttagcagcatctagaatttgtttaaaaacaaataagagatttctccgatagcacatagtttcataacttttgataatcaaatgcagtatttatactttgtgctaggtctgtgttaagaactacacatgtaacattattaaaataatactttgttaattaattacctatgaggtacagcataaggattaatataaaatataatttgcattagatgagctgtaacattactagcgccatataatagaaactagcaccctaagttgttataaatgcgacatgaagtgttgacaattactgttttagttggattgagaaaagaaaaggtattcttttgaattaaggttacatataagaagaatgctggatttgctcagtgatttaggttttaagctaaaattttaaatctattgtgggaaaataaacagtccaaattatcttcgaatccctagttcccactgaaatcatggtaagtaatatttttaataacttgatatgcattggaaatgaatcaccccaaaagaggagaactaactttgaattttttaaaaagatcatcatttaaaaatttgtcttccttttgtttttctctgatgaactctgagttccacactagtaataagatccggcctgttttcttagttgtatattcaggcttggcttgtcacacaggggctctatgaatgatgatgtgtggataaagtaggagaaacaatccattaattctcaaagtattttactgccaaactatacattgaggggctgaagtatgagttaatatcttaagcatccctaaaataattcattagctatcctggtaggttacattaatatgctggtgttagtcatgggcagcttcaaatctcttagctttctttctctttacagtgatttgtatgacccctgatcaggtatataatatgcccttgacactgcactttaaaaagcttctatctcctgtaaccaagatgcacataaatgatcctactttcatcagatacaattaactaaattctcctcaaagtccttcagaacttgttcctaagaggaactgttgagttccggttcaggttcaagatagagctcctcaaggtgatgctacaggtgctaagctggtcatacagataggagccagtgaaaataatctgaccaggcgaaaacccctgtcatgcaatgcaaatattatatattgtcttacaaaagtcctgattatctgaatggccaaatttctaaaaagaaatagcagtctactaagtaatctctgtgccttcaaagaggtaagcatctcctatacccaatgtactatcacttcctaggtgtgaagctaatgaactcctgcaaatcaaaatacaacattctaggaagctcagcctagcaggaagtagctgggagaaaaacgatataatgaaagccactccctaaaaaactagctattagaatttcttcaaagtgtttaaaacctaggttttgtgtgcaatggagttagtcaaaacgcaaaaatccaagggcacatccccaagattgctctcacttctgacacatcaacagcaagtttgcagagcgggggaggggggtccaaaccagccaaaattcaatggttcaataattcactgaaagaactcagaactcatgtaagctgttaaactcagttatggtttactatagggcaatgatacagaaaatcagccaaggaagagatgcataggactgagcctgggggtttccaaatgcaaagcttccaatgtcctaggacctgctgccctcctggtatcaatgtgtgacagtgcccatggagtcctgtcaaccagaaagctcacctgagcagcactgttcagagttttattggagcctcattaaactgcttgatgatggtccacatgataaactcacctccccagaggctgaactgataccacatggtccaagggcccagcaagaatagcaatttcttttttttcctctcatttatttatttatttatttattatttagagacagggtcttgatctgttgcccaggctggaaggcagtggtgctatctcactcactgcaacctttgcctcctaggctcaggtgatcctcccacctgagcctccctccccgtggctgggactataggcatgcgccaccacacctggttaatttttgtattttttttttttgtaaagacagggattcaccatgttggacaggctggtctcaaaatcctggggtcaagcatccacccgcctcggcctccctaagtgctgggattacaggcatgagccacctcgcctggcgagaataacaatttctatcactaggaaattcgaaggatttagaatttctcaggagcttgtccaaaatccagacctctctttggccaaggccaatttcttactacacagtttggccatatattaattattcttgaataatatttaataggtaagacagaatgatgctgttgaggttcttttaaaacaaagcctaacttacagggccctgctgacttgcaggaggtcagccatcatgagtcaacgttgtgcttcccgtggcctctcgcactccaaacctagttcaggctgaatgacaggcagctgggcagagattcaggacagagatttttgcatctaaaatccagacctatcttttctatgaaatccactctccactgattttccaatctgctaacctcataattctggttctttgccccctttatctaaatgttaggggatgaattgtgtgtcctgaaaattcctaagcccatgctcagtacctcagaatgtgactgtatttggggtgagggtctttgaggagataattaattgtagtgaggtcacaagggagggttttagtctaatatgactggtattcttgtaagaaagcagattagcatgtagacacaagaggaaagactgtgtcaagacacagggagcagatggcatctataagccaaggagagaggcctagaagcaaccagccctggcgtcaccttgaccttaacttctagcctccagaactgtgagaaaatacctttctgttatttaagccacccggtctgggtactttgcagtactggcaaactaatacaccaaccaatcacaaattcatgtgtctgattttttttttttagacagagtcttgctctgttgcccaggctaaagtgcaatggcatgatccagctcactgcaacctttgcctctcggattcaagcgattctcctgccttagccttagctcctcagtagctgggattacaggcatgcaccaccatgcccagctaatttttgtatttttatagagatggagttttgccacgttgcccaggctgatcttgaactcctggcctcaagtgattgcctgcctcagtctcccaaagtgctgggattacaggtgtgagccatcacgcctggcgcatgtctaaactttcaacaactttttttttctcttgcacttgtagagacttcccatctgatgttttttctttttcttcttttaagacataatctcactctgtgactggagtgcaatggccaatcatagctcactgcagtcctgggttcaagcagtctgccacttcagcctctccaatactgggaccaccagtatatgcccctacaactggctaatttttaagttgttcttttgtagaacagggtctcactatgttgaccaggctggttttgaacttcaggcctcaagcgatcctccgcctcagcctctcaaaatgctgggattacaggtgtgaaccaccacagctgaccttatctattcttcaagttcttatttttcatgtctccaactaaacctcacatccactgccaggttattttccttcaggagcccagaaatcagagtgctcatctggtcaaacatcttcccatgactattgctcaatgaagaccaaacttcacagcccagcagctaatgacccactgacctttccattttatcttgcaccagtctttctgactcaagacactgctttgtcacccaccaactacaggcacagttttccttctgaatatctttcccgtccacctactcaatactcttcttaaaggccaactaaaaagtcatcttctttatgaaaacttcacagatcactctagtcaaaattgatcctaatgtatccgaaatttagctgtttttatagctattgtcttagaataaagaaatattcgggagccaactcgaaggttctcatgggatagagacaaaaaaaggtttaccacctaaaaaaagtcattatatcattagggagaaaaataaacacctaacttaaaataatatatgtagagaacttaaaaaatctataaccagttctattaatatgtctaaattcttaagatctcacattatctctaatagtgagacttgtggcccatccttggaaggtctctctctgctgcctctaaaagatagttcactacagaaggctgaagggctttggctctttaaataaacctcaaactaccttaatttttaaaaaattttattttaatccacattacaataacactaatatccattaacaacaaattgtactgtagcagaaagtagtaattccaccttagggtttaatcattttatcaatgcttgtaaacatgtgcaaggaaggaggtcagagcccgatgcaatctttcaactaaagcgtcacaacaactttttttgcttcactaatttgcgcatgtgctactaatagaggttacacataggactatttatatactcagaaaaattctgaatgatgtcttctaacctaatgtgagactggcagcaaagggaaagtacaaagctatgggacacggacactttgatccatcaattacgaacattcatttaaacactccaaggattaagagaggtagcaatttaacatcaccttcatatcaagggccaggtaaagtctatgatttaaagcctttcaaggtacatgtgaagaaatgaaacagcctaaccacgagaaaggcagatacccaaatttggacatgcccatcattttattaacaaaagtgaatggtttctatgtttcccttaatacagtagcaatttaacatgaccttcaaatcaagagcattctattttatatattattacaaatgataatactattaccattgctttaatttccccctagttcataaaatacatggatttgtaacaagctttcatcaaatgccttttcttggcatctgaattccagtatagcagataacatggcccccatctcaaccaccccaaactcttccaagtattctagagtgctatataacaaactatgatctgtgcaaaaagcactaaactgtgctttcatcttgttaagaatagtaaataattataatactattaaaaacttacttaactttgcttccacctcttcagcagctttctgatattgttcagtggtgactctgtagaatctgagctctgtggacaaagattgatagcaaaggtttcactatccaagatgacaaaatggtggaagatttacaacttcaaaaaacacataaaaccttgtttcagccactcaagcagtaaagactttcttgtataggtggcatggatacttataaaacacatgtaaagctactcgtttaataacagtagagttgttggtatgcggattataattacagagtaaacgttcacagttacattccttatcatttgatcctttggagaaaattcctaacattttggaaagattctttagatgccattatttggaatctacccttgtaagatcaaaggatgcctgagatcaaaaactgaattcacacacattcgtatttatatattattccattggtgttcctactaggatattaaagacatttctttctacacaatatttttgtcatcaagatggtatggctcatgcctataatcccgcactttgggaggccgaggtgggcggatcacctgaggtcaggagttcaagaccagcctgccaatatggagaaaccacgtctctactttaaaaaaaaaaaattagctgggcatggtggccatgcctgtaatcccagctaatcaggaggctgaggcaggagaatcgcttgaacccgggagtggaggttgcggtgagcggagatggagccattgcactccagtctgggcaacaagagcaaattccatctcaaaaaaaaaaaaaagttttctttatggagcttaagttgttctatcattccacgtgaccacaagaacaacaacatttataactaatcagtaggaacaagggggcagattagataattttaataacaaaaaatgtttccactatgaacaggaatggacacataaacaaataaaccaagatgcagtggcaaagtaatgcctttcctggggcagcaaaatttatccatatgactagctacactgaaactggtcttattgcaggagatggcctaaatgaccccatgagcctaagactcaatgaaatatcctgcaaaatgcactgcattaaaaaacaacaacaacaaaaaccaccacaatacggtagtctattgtgtacctttcattctctaatcactcaggtttcaatgcatggcttgcaatcatttattttttaataaatcattgttggttggtgaaaaaatgaagtgaaatcctcttcacaccagtgacccctttgcatttaacaatcttggttgtccaatgaagtcacatccaggattcttggatgtagataaaatcaataggtatgtgattagatagcagctcagggtggctagagccatagacaggtcaccatttgagatgatgaatggctttctatcacctatagtcccctacgatgctaacatttactataatcttatttgggctacgatttatcttcttgcacctgatcaataaagatgaacagaacagttgtaaggatcgattgtaatttttatcattttcaagcacaaaggtgcatttctgacatgaagacaatattctaagtgtactgcgctgcattttataaaattgcaatttgagtgatcaactgtaattgtctatatgccgagagttttaactcctctgtaggtctcaagctatcaaaaaaccatttgtcatctcagatacttacttaaggttatgtcacaccttcctatctgtttcacttataagattttcttcccttaaaaacacaccagtcacaacaggctcttttgcaatgtttggtgtaatccttcctttgaaccctctaacaaagaatgtagcaaaaaggcagttactaatcactaacaatagttactctcactaagatgagaaactcccaaattactctaatgaactgttgagtgggtattatgttactgaacatctattaaaatgctggctaagcaataacatcttaattaatacttttgcttagtttaagactggaactgtaatatctggagagagacaggactaagctgacagatctggtttctggtttgttctgtgaccttgagcaggtctttaatctcccccagcttcccttccagtgttcctaaccatcgagtatggatgataatattagccctgcttatttctgccaaagctgttgaagaaacaaataagataggcaagagagctgtgaaatctgttaaatgttttcacagagtacatcaaatctcaataaaataattttggaggaaaataattagggtaattccattctaggtatagatctaaatggtaaaaagtaagtattacttgttttattaacaatgtgcacaaaagcaacagttgccataatacaaattagtcagttcctctctgctttgccatgccaaatgcagtaaaattttactaattttgttaactttcctataggatgttaaaacacacacacacaatcacacacaacacacacgcaatcacacacaaaacccagtacctgtgttgcttgaaaacttagcacatattctcaaattaaagctttaggctttatgtatgctccatacttccacctcagcaaccagttcccatattgcataaatctttccaacaaagaaaagtccccaggaggtaacatcatgtaaaaccaagggaataaacacaagtattctcaagatctatgtgtagacagtgtttaattcatatttaagtattcacttatctgtgaaagaaaattaaattcttactgtcctaataacatcctctttgggaatcagatgctcaagaagctttccatctgacatgggagaaaagaacaattatatcatggaaagtcacaaatgccgagttaaaagtcatagataagtgttactggagttcaaaagagtagagatctcctttggcctcagaagacacttttacaaatggacagaactcattaaaaaaaaaaaaacaaacaacaacaacaaaaaaaaaaaaacaaccaacccaacaaaaaaactcattctgttttccaatgagagaacggataactactgggtattcgtacagtgaaaattacaaagtaaaggaatgaattagacaaacatgcagagcaaaaaagtggtagatctgatcgtacgatgcaccttatgccaagattggaaaagtgaaaagtaatgaacaagaatagtaaaaccaagttccactgatgatctccgagtggcagcagtcatgtggtgtggtggaagtgcacaaaggagcaggatgccacaaagtatgggaacacgggctttgctgggttgctatatttttaaaatgaggtgtgggcgtgcagctagtcattacattggcttaaaatattttataggccggcacggtggctcatgcctgtaatcccagcactttgggaggcagaggcgggcatatcacaggtcaggagttcgagaccagcctggccaacatggtgaaacccagtctctactaaaaataaaaaaaattagccaggcgtggtggctcatgcctgtaatcccagctactcaggaggctgagcaggagaatcacttgaacccaggaggtggaggttgcagtgagccaagatcgcgccattcattccagcctgggcgacagagcaagactccatctcgagaaaaaaaaaaattttttttatattttataatacagacaaaaattgtattactcccacctccctccaaaggggttaacaaacaagattttgtttggctagaatataaaagtgtattgggcagggcgggcacatcctgaaaggttggctaagtggggattttatatattcttgaatactaaactgttgcagtgtatacaaatactaagcaaacatactctcttcatttttattgtgaaaaaattttaaagttacagaaataggcaaaagattcccatctatccttcacctaggttccccttatgtccacatcttagaaattataatacaattatcaaaggtaatgatttaacaatgttacaatagtagtaactgaatacagacttaattcagctatttccagttttcccactaatgttcgttttctgtttcaggattaatcttggatcctatgttgtattaattgccatggctccttagtcccctctcatctgtacagttcctcagtcttccttctctgttatgaccttgacacttctgaagaatactggtcaatattttgtagagtgactcgtgatttgggctcacctggcgttttctcatggttaagagttatgcactactgggaagaattctacagaagcaatatgcctttctcctgcctgatttcagggctaccttatggcaacagatctttttattgaggttgaccttgattacctgattaaagtgtgtctgcggggattctccacaacaaagctaccatttttccttcctgtaattgatatctgcaggagatactttgagactatacaaatggtctgtttcttctcaaagttttgtccatcacttttggtatccactggcgagtcctgcctgcagcaatgattactgtagtgttctgatggacatagatttctttcgtttttgtttatttgttttaagatggaatctcactctttcgcccggctggagtccagtggcacaatctcggctcactgcaacctccgcctcccaggttcaagtattctcctgcctcagcctcccgagtagctaggatcacaggggcacatccaccacacccactaatttttgttgtgagcgcttggttcaaggtctatggaccacctgcttcagagtcactatggagcttattaaacagtagagtcttgggccacatcctgaatctctggggatggggccggaagctgcattatttacaagcagcttgggtgattctgaatacacacactaaatttgtaactacagggtttctagaacaatgcgagaataatatagtatttagcttgccattcaaagtaaaaaaaatcagtgtttttgaagaatgatggcaaataaccacttttcataattaaatatgctataatctttacaaaggtactccaaattagtgattctgccaatgttgttggcagatcctggtggaccccaaactcctccaagaactctgtcttcacacattgcctagcaacaccacatgttcctaccctgaatgggtactgagaggtaggagcacaactattttcagaaaggttgttttgttatctctgttgtcttgagatggtaataggttgcacatgctgctatcttgtttataattatagatgactgttactttaatgtcatctgttttctttggttaaccctgcagttctagtaggatatatatcaatttgtctgatcatttactaatagctgaattgtaagacttgttgatctgtgctcaaataaggaacaaccacattcctatttccaaagaagatgtgtacattcctcccaaatttgttaagagtaattacttacagtatatggaatggggaagaaatccattagatgaccttaaaaagataaataaagagaacaaacgggccgggcgaagtggctcacgccgtaatcccaacaccttgggaagctaaggcgggcggatcacttgaggccaggaattcaagccagccaggataacgtggtgaaacctcatctctactaaaaatacaaattagccagctgtgttgcgggtacctgtagtccctgctactcggctggctgaggtatgagaattgcttgaaccaggagtcagaggttgcagtgagccaagattgtgccactgcactccagccttggcgacaagcaagacctgtctcaaaaaaaacaaaaaaatgtggagaaagaaagatgtccatgatctacaaggtggtctaaggtgatcttctaatgaataatcatttttttgtgtgtaacaacatacacttctgtgcctataaggtcctttacagtctaaaataaaaactatcttcattcatattactctgcatattgtcctgccccataaacagcagaaaaaatacttgacatgatttgtccatggtacggttaatgtaaatttgtggcaggtacatgtgatttaattcaaatatcaaaggttgatttaataatttctttctttaaaacagaaagtcttattgtttgatataagcataaaaatgttttccatcaagactctttgagaaggtagatctcataaatttaaagtagaatgacatacctcttagatgtgttagcactatcaaccatctgataaagacttgcacatccttgtcaagataagccaagtaagctcctaggaggtaaactatatctaaaacaacaatataattctcatatttggaagatatttctgtcacctattttaatagacaaggcatcattggaaacaatagtattttgattttctgtattaaaacacattccaatctaaggcaccatggatcaattactaaaacatgggcaacaaactgtgtggggagactgaatgctccattgtacatactttttaaacgtttcctgtaaaacctatgcatatgtcgtccacagaactccgcacttaggtgggcgatgttagcagtacagcatggtggttaagaacatggactttggagccagatggccaaatcaggccctacccttgtgaaactgagtaagttacttaacctcaacagttacttttcctctgtaaacaggactagtgtaacaatgattacctaataggattctctggggattaaataaggtatatatgtaaaactctttgtagcaccagggacttaggaatgtgacctattattaaaaatttttgaacagggggaaaaaaactgtatagtgtggggtggggtggttttttaaaaaagccatttaataaaaatttaaatctgtaaaacaaaagcctattcttccattaaccagacattgggaatgttgctcacactgcttacctgttctgtttttctgttccttaagacggatgggaaaatgaagacaatagtggaccagtgtcaggagcgttaatagctacggaattaactaaccagccatataaaaaaatcaaaccaataacatttgaccttatcactaatgaaatccaattaacacattgaacagccaaagtactttaatgccaagacttcccaaggccttgctttttactcttatgtgaatctctaagatgagaactactgttcatgattctcaaactgatttgctcatgggcatcttgagggaagagaatctcctaaaatggtccatgagaaacgccagattaaagaaagtccaaccacatgtcaatcctgtactttccggcatgcaacttttcttttctcaaagcggattttcttatgggttattttttaaactgatgttcaaaaggtaattggcaatattgaaaatgattccacaactgatgaagattgatggtatcaccttttattcagtattaataaagaaggcatgctattatcttgaattttaaaaatctgagatgaaatcctctaagaaaattattgcataccctcccctgttctctcagaacccagtggtagatggcaaaaatggccaccatgcttactcttttctatatccgtgaccccagcaacatgacttcacagcttctctcatgatgagatatggagtttacttccccatcccttcagtctgggctgtgtttgtgtcttgctctgggcacagaatacgacaacagtgatggtgtaccagtttcaaacctgggcctctctcttgcaacctgcacagggccatgtcaatcaccccaggctagcctgcaagcgggagagagactacaggcatctatggtgaggacagcctagagcagccaaacctcagccaactcagcaggagtgagccagctgataacagtccaaattggtaacctgcagaatcaggatgtgagtaaaatggtagctttttaagccactaagtttgtggtagttcattatatagtaaaagctaactgattatgctcttctctgtgttcttacaaagaagagacttttataacttaccacactgtaccaacatgtattctgtgtggtccccacctagtccataagctccataagcatacctaggagtaggtatctgtcctattcatcattatacctagagcactcagcaaactacatgacacacaaactcacagaataatgttagagtgacacctgcaattctaaacagcacttcaactgttgctcatatttaaacaggatgggatagagacaagtctaaagtaaatgaaataatgttataatgaggatgaaagaaatactacctttattatatctactacaaattgacaaacacttcagcctgcaatgctccacaaaaaggaaatgtatatcacttaagatgtgttcaactacaataatagtacagtaaagttgaagctcgaaacagtagcttaaacaagtaaggggtttatttttctcgtgtaataaaaatctggatgggaaactcagggctgatataactatgcaagtgtatcaacaaataactagccccctcttctgtcttcccttgtagccaccccgagcagttgacttctgtcttcatggtcaaggtagctactgcacctgcagttattatgcccatgtcctcagggtggaggaagggggggtccagagattcgtacttccaccccttcggctacaattatatcatgcaaaggaggctggaatcccagctgcaaaggaggctaggaaattgattatttttgttttctcacttctagggaaagaagaaggaagaaagaatttggaatgggtgtttactgagcaaatttattgtacctgcacagagagctgaggtgacagcacaaaatcaagtacaaaacaaagtggttgattttagagcaagtattccaatatttctttccaatctctccttaaactaatttggggtatgggggggtttacccatctggtatcttcatccccaagaacaaagtttctagaccgtacggaaggaaagagaatcaacaagagtgggcatcattcccaagtttctctgggctggccgtggcccaggatttgaatgtgcgatacactgccattttccattttcagaaagtctcacttttaaaagtgttattaaaatgcacatgcacagatacacattattgctcgatttgaaaactatctgttttcagttctaaatttgatcaaaagaaaacatgcacatacacacacagtattcgtgcaatatttctcagattctgaatcttgttttattataactagtatgatcatacccgtcgcatgtacaaaagaacaaatcaaagaggtcataagaaaaatgtaactggctcttgtcagttcttttatgaatgcttcatatggagattagggcatgactatgtaacacatgagggctgaagtacaattaaattctggtggcctgacactatttcccagaaaagaacaagacgattgcctgtccgttaaggatggtggcaactccacagatccttagcaccaagagaatggtggcagaaacaagtcggtcctgtaccttcaaggtacaataccacactggctgaaggtgagactgtcctgtgtctaactggtctatagttactgctaacaactgcaggcctcttcttcctcctacaacacaagcaacacaagtgtcactctaggtggcagccaattccaacaaagaggtccagggtgccacaacaccaatgtcaaataacggcagttcccattgttgagtagccagattcaaaagtcttaatatagtttttgttataatcctcacccaggaactatgatacataatcagctagatgtaggcagtatgttttcccaaaggtgagagttaagcgcttggggacccaatttaatgctgcattattgctgcgcagatacaattccaggcacagaagctctgaaacagttatttactcagtggctcaggtgttcagaaggagttcatgacttgtcaaccattctgtctttttacagaattacaagaatcaagagattgactttgcaatgaactacattttctaccagaactttaaaagctatgttttttttaatcagtaatagtccaaatttagtttatctagaagttttaaaatttcttcatcagaaaacctaatgactggtttgaattctgcctttcttgtgtgtatactctgaagtcgttataggtgggcagaaaagcagaaggaatttgaaattcttggtaagaaaagcagccctcaatagagtagctggcaccttaaagaatattttattactgaaacttcttaaacctatggcttgagtccacttcactggactctctccttttatcccctaccctccgtctttactcaatctcccaggagaatgctgtcctcagacagaaaaatcaaagctaatttaaatagattgcaattgccaacatcggttcatattcacagtatatcagatccagtattctgtttctgaaaggtcactaaggaatggtttgggttatttaaactgagtctcgctttttaacatctaaaatgagactttatctttcaggatgactgtatcagtgggactatgtaagttcagtacttggcataggcctggtttctccttgtggaaggcagtggttctccatcacaataccattcttgccagcacccttggctccctaggtaatccaaagagcctggatttccattcatttacctatgcaacttgcatgaacctgaagaacaatcatcaagcggatggattcaaactgcatctccatgtatcaacattcagcattgctatttgttttatgtaagcactgaactcaaaaacctagttatttacctaagtatccctaaatttctgctaataatcatttgtgtatatggatgagtgaatcatatttgtctcagccctatttctttttcaaatccatatcaccagtcatcaataataaataacaagttagcagtttctaatgaatcaaaaatcctattacattccatagttaagccaaattagattccttatggaaacaagactctcactggtttatcttaaaatctctccttcctccttaataaccctagttttaagctagatatatggtaaacaaaactagaattccaagcttgctgcagtgaggctgagctgtaagcagaagtgttatatggaacttcccagtaggctgcttaaaggagttgatctaagctgacaggggatctcttcagccctttatctcagcctgcaatgttgagtgatggccagagctccagcagccatcttgggacataagctgaccttaaagagcaaaagctgtgttagggtgctgcaatggaataataggtgtctggggctctgatgacactgaagccccatgccagccttttattaaacaagaaaaaaatctacttcttatgtcagccattctattttatgatagacagggtgaaagtaatcaggaatagacctctgtaagccctaagatgtttgttttttgtacacctcatgaataacttcaataaagtcaaatgcaatgacacactggaagcactttctcctttgcagtaatgcttcacttctacttgtcaggaatctccatttccttctgctctctccttttccaacaaagaacaggaagaattaaaaaatgtcaaagccatgttgaacctagcatcaaatcttaccatctctgagaagtcacatttcatgaaaaccccattatctccgggtgccttggcaaaattaataaactgcttttataattaccctttcgttccatctttacctttcttatataaagaaacagagctatttagagctgcttctggcatttctagttttattcaggagctttagaaacttcattaattagagtctcaggtttttttttttgttttttttttttcttgatttggttttctaattagaataggaatcctagattcattgacagccctgccacacacaaggaaaaccttagttacattacctcatgcctcagtttcttcatctggggaattaaataaacaactgcaccaaaaactcatttggcattctaagtttccttttatttgttcactttttacttctattaatactaaaggtctgtgccagacactgggccaagaacttggaatatatgctgagcaaacagatgaatggccctgcttttatgaaacttaacgttatcatgaaggaacggacataaatttaaaaatcacataaatacatagttagtaaagaattacagtgccactgatcactatgtggaaattttttatttctaggaagtggtttttgtaatgagtctctaaagcctatatttctctgaagtatctaccttcatattcagttcttaagttagttgtgatcttattcctttaaatttctctagctatttgtgtcagacaattcaagcttcatttctctacttgaaaagtttattctgacccctttaggaataagaggaacctaccagttttgatatggaaagggtctaagaagaaaacagaaaggtacaaaacactttgaatattttataaaatgataagcaaaatacatgcacccacatacccagaaatgttctgcaaggagcagttgttacagatgtggaagatacttttctttcttttatagccttctataacaatttaaggttttagcctgggcagtataatttttattagaaaaatatgccttcatttccagtaggtattaagtaaattctcacatgcatgaaagttatctaaatattactgggaaagtgactctaatcctttctctattttcatgcttagattgggacttctcatttatcgcaaatataaggtattaatttttctattatctttttaataataatgccaataaaaggtctcaaatccttctattattgtagctcttctcctgtgataaagcagtatcagtcatccacactcaccttttggacttctatattacacaccgagacctttctgcttttgacatggttgtatgtctcattgtttattctacaagggtgagaaaagcaatttcacagttatcagaagggttatcacaagaatttactgtgatgtcttgcaaacctctagagtaactgttaaattatttcatggaaccagcacaggaacctcccattctctaagggctgtgtgatgtgacacagtcactctccaggtcataagttttccttgggaagtgccaatgaggtgatgccacgtgcacatttaatagcacatccactggatggctttatacagacgtgtcacattcgtattgccaacacatctcaggcttgcactccattttacccctggtctatatcatctcctatgactaggaactctataaaactaacaaactctcttgtgcttgctcactacaggaggagcacgtgcacacagagtcctcttgaaaactgtgggccaagacgaaagcataaatgatcagccttaccgtagatgaagcagacaaacattagctcctttaacagcaacctctttagccctgcattcattcataattttatattaataatctgaaggatttataacagtgctgatttggatgatattggcttaccattccaccttcttctccagccctcagagaagcaacctaaaattcattcattcaagaagcactactgctgaagagctaatatgggccaggccggggtaagtcctaggaatggaaggctgaagatcccttgaaaggctattggacagagagcccaaacagctaaccaattacagtacacagagataaccaggttcagtttggctgtctttctgtcttcaagagctccatattacagtgtcaatgccatgggagggaggtatttttgtcatcaacctagtgtttctcaaatttgtaaggtccatcctattgaccgaaaatatgattatagaatcatagaaataaccacaggacagagaaaacaaattttaaagattctcataaagaatcgaagaccttgaattattatttctttggaatccaggttgacagaaaaactgagtgaatccgttattacccttcagctaattatcaattaactacagagactcataaccaacaggtgggacaagaatgctttccagaacaaaagttaagtgtacagactacagaaggagtcctgtgaggaggagaagtgttggtggagaaaggaatcctgaggagagtagctggagaggccaagacaagtttgccttcctcccacttttgcctagaacctgactttttaaaataagattgcatcaaactctagcaagaaaagatagacacattctaatagaggccaacataaataattcattctgatcagaaaatctacctaagaaaaactttcctgaagattgagcaaacctctgaactctttccaggcatgatacttgctgtgctcctcagcaccagatgagctgtaattccagcagaatcaatctatttgctcaaaagtaatacctttccagcaccacagaaaatacgcacctctcataaggatgagtgccacaaacaagctcagtatcccagactgtgcacatctctctaagtgaatagaagatgaaacaactccgactgaccgctgcagagtgacaagcaaaagccttaatgaggagtgctctgatggtgtacgcaaggcaaagcatccttaagctcaaagaatcactatgctcagaagttatctgtgtcaccttttgacatataaaaggtgacacaaatgagtaagacagattactcattaagaactacggtgtaatcccagcactctgggagggccaaggtgggcagatcactgaggtcaggagttcgagaccatcctggccaacatggtgaaaccccgtctctactaaaaatacaaaaattacccgggcatggtggcacacacctgtaatcccagctacttgggaggcgaggctggagaatcacttggacctgggaggcggaggttgtagggagctgagatcgcgccctgcactccagcctgggcgacagagcgatattctgtctcaaaaaaataaaaataaaaagactacaatgctcactcttttaacacacacacttaatatctatattcaatgaagacagtctgggattggtgcaggcaaggggtatagaattactatccaagacagtgtctcattgtaaactacttttatcactggcatcatgcactctcagaagtctaggatgaattgtattatattcaagctgagatttcacctaacagaaaataccattctttcaagtctcctgactggggagtagacagggaagggctagactgcaggtgtctagcacatacatttccttgatagtagcatttaaaaacttgaaagacaaagattggtaaaatcatttgattttaccctatcaaactggctgcttacttgctttctttcatttcacagatgcattaagtgtcaatgagtaaatgaggaaatggttccctcatcatttgctagtaagagtataaattggtacaatttacggcaacatgtttaaatgcctttcgaatgtactctgactcaaaggcttcatgtctggaaatatgtgaaataacatgaatgtatacaaaaatttagctaaaaatttgttcattgtggagttcatcatactgaaaatgaaaaacaagtatttagccacagaaaatagctaaagtaactaatagattattcattaatggaatgatagggctgcttagactttggtttgttttttccccctttccccaagagaaaaaggagagaagaaatgtttaaattcctttaagttttagcccttggtgaacagatatagaataaggacagttacgcaacagtttcttatgattttccaaactgtaccaactctcctcagaacaaaaaagtaaaaacaaaaatctacccttttggcacagtacaaacctatgcaacccaaggtcaatacagatgagagagtggggattaattttcaaaagggggttgggggacaaacaattttaaattatgaaggttaaagccctatttattattggtatctctgaaattcttctccatttgttaagtgggtcaatgtccattttttattcactcaagtatttactgaatgcaattctacagagtaaggtcctaggacctgaattagatttttttttttaaatttagttatgtattccactgcttatgatctactgagatgtactctaacattcatattcaaaagtctctggaagaagggaggctctggagattcttcctatacaagggaacacaattctaacagggcaaggttgaaagcataggagagctggttgagtcttggactgtccaaaagcaaatattgttaggatcaagtatttcctatgttcatatcgtttgattttatgataaaaaccagccaagaaggagtaaagttaggggccactatctttattttacctaccaggaatggtgtgtttaaacaaggcacacatttgctggtgttccataagatattaagtgccagaaataaatcagtccctaagtcagagctagaaggccttaggtcttgaggtttaaaatattatagttctttcagtacaaagagtagatggtaccctacagagtacttcactaagtcatgccttttgttgaccatggagggttatatttatttcttaaccaaaccacaatacccaagaaaaagaagatccaatgcagatgtacacatatctgaagtttaatttcttttcatcaattttagcacaaactgagatgttaatataactgtgacatggttttctctagtgctagcaacacacgtaaagttacacaggtgaacgaaaagtcagtcttaagggttaataatctcagatatgaattggagaaagctcaaaagtgcaaaggaccatcaatctatttcaaagatgtgtttatctttttgtatttcaaaggaaaggctttttgaaagacttggcagagaaatatgcatgtgaatagaggcacattgaaaagtcttgcttgcaggtataatggctctccctcagaaggcagtgtgcaggattccggagtctctaagtgtattttatatgctaccaagtacactaagagccctgcagtattgcctgtgtccagctctatttggtggctccttagcattttcctgcattaaactctacctaaaagttttacccctaactgcagcaaagcagttcattcatgtggtactgaaatacaccagaatgtgtcatattttttaaaaaaaaaaaagaaagaaaaaaaagaagagggtgggtgggatggggagaaaaagaagctatagaggaccagtaaacaagtctgatagtcttctagaaatattcatgaaaatctgccctgaaaactgctggtatttagtagccaatctttgccacgtggcttttctgagaattgtcttagaaagatcccaccaaggggtgataataaaatgcatttcatcaaatgatctttcatctggcatgatgtcactttctcacatcttccatgtgggctgcaagtctccttccaaggccatctcatttactgtgtattctgcctagtgtaggtccaagtccttccaaacaagacctaaagcaagaatgcacccatccatgagagacaaagcatatgcgttctgttagttcccacaaggcagacactggggatttagggagctgaggtctacaaaagtctttaaagaacagcatatcactctacacaaaagaggttcttgtgtgacccttgtgatctgaacacatttcaagagaagagactagatctttactttgaaaaagatttttattataaagacaaatgtgaaacataaaggaatcggggtgaataatgtgaattaggctctgaaatgattccttttcctagtacacaccatagacattacagggcaaagaaaagtctgcaataaccacgctgtgtctgaacgtcgcctattgctcagtgtgacccaaatgtaaccagaccaaatccatcagcagctgaatgtaaatgccttgtgctaggcttagtttcaacaggcattctctttgcctggtgaagccctctctccactagaggccaagttattaggaaattgtttgtcatcttagactgaattgatcatttgttccctgaattctttctctcatcatttactcattacacgcctcctcctgatagaagtagactttattagcttctgcattcattgcattggcaaacagaaacattctgctgcatttcctggggttcactcatttatctattggataagagactgaagttttctacagggcaaaaaaattaaatatcagtcaggttgacagctgggaaaatgagggtctctctgcgacaagcttgctgcatttttggtttagtgaggagctgcaatgttatttcaccacaccaccacttcatatgtaacagaattgtgggctatcatctggtgaactaatattccacaagaataatacacatggtgcatgtaaagtacctgcgatgcaaagctaattgctattttaaatagaacataaaacaaaaggtttcaaagatccatttctaaaaggagctaggaagagaggctgtcttattaaatccatgaactggagctagaatcattgaactttaacgtgtaaagaccttccaggtcatcaaatccttcccaagaatcttctttacagtatccccgacaagtgattgttctcattgtgcctgaaacatactggtgacagggagactggcaaatctcagaaggcagcctattttatatatttattttttgagacggagttctgctcttgttgcccaggctggagtccaatggtgtggtcttggctcctgcaacctcagcctcccaggttcaagcgattctcctgcctcagccttctgaatagttggatgacagacacccgccaccacccccagctaatttttgtatttttaatagagatggggttcaccatgttggccaggctggtctcaaactcctgacctcaggtgatcagcctgccttgggtcccaaagtgctgggattacaggcatgagccgctgcgcctggcctaggcagcctatttagagctgaacatctctggatgggagggggcacttcctaacaggggcctgactgcttgtgccttgggcaagccactcaatcccactgggtctggttttagaaattagatacccctgtgtgaaagaatcggagctgaaggagagtaaagtcatttagaggctcaactactttagtccagcaaaagcctatttggcctagcaggtcacaggataactcccgtcttctgggacagtgctttccacaagaagaactggcacacttgtctgtattcctctatgctgagacgcatttgagctattcagagtagggctttcttcgattctttttcaattctttcttcactttgttgttgttggactgaatctcactctgttgcccaggctagagtgcagtggtacgatctcagctcactgcacctcagcctcacaggttcaagcaattcgcctgcctcagcctcccgagtagctaggactcaggcacactccaccacgcctggctgatttttgaattttcagtagagatggggtttcacacattgaccaggctggtcttgaactccagacctcaggtgatccacctgcttcagcctccaaagtgctgggattacaggcatgagcacctggcatcttcacttttttcctcttttctcttagtttcacttctcttgagccaacttttattatatacctttcgttcttgacaaaaaacaaagtaatgatgcaatggaaagttctgcacagccactaacacaacccctcaagcagatgggtgtgccagcccttgccccaatcatcctaattctctgatatcaactttctgagttttagcctcagttcaacaaagcatgaatagcctagtattgtgccaggtactggttatacaaagaaaataaatttttagtctttagctctctgagagtttgtatgttagaaaactaaagccttctgatttaatattgtttagaatattgcccatatcccatcaaatcactctgaggacaagaaggtataaatgctaataataatatctttacaaatcagtggcgtattttagctaagtgttatacagacattttttctaaatagttcttaaatctgatcccaggacatgcgctttacatagttgtctcatgcaaacctgacaataactccatcaggttggtacaattatccccattttccgatgagaaaactaaggccctccaaaatgaaataatttaccaggtcatttgagcttgtcttggcactgccagggtcaaatccaagcagccgagctccagaggtaatatgcttaacagctcagtacagtgatttgcaaatcactgtattaacgtactgatttccagatcactgtattgatgccttatgaaaagagatcaccatctatacaaaacaattagaaggctttgtgtaggaggggcatttagcctctaattgaatactattaccttccctgaacctacaatgagatatttaaagttattatatattaaaaattctaattatatattttacttagtgtaagggggatgagattaagcccattttaattacaaacaaaagcagatccacatgtcagctgtctgtgatgccttgtggatatccagacacttgttcttaaatctgtatattacaaactgaaacaacaacaacaaaccagaagaaaagtaacacaggaaaaattggctaacaagtcaatgaacctgtgactttctgatacagcaattataaaggtcaaagcttattttcaccctatgtaaattaaatttaaagaactcctaaactatatattacaagatccagaattaaatttagattagccagagacttttttgtagaagacgctcttaataatctttggcttttgtccagcccagattcccacttccttaaagatgatggagaactgcttccctggataaattagcacaactcctgcctccttcccctcagtccctgtggaggaattccactggactcttgtcttcccttaagaagtaacccccagtcagacctcagggctgttcaaggtccacttttctccttgacctacacttggtctcttaggaagctcttccagtctcatggctttaaactcccctcatgggctgacaactcccagatcttatacccagcccagaccttgcctctgattccatactcaatggtccaaatgttttattgaatcaattgtatcagaaacacctaaaatttaaattgattaaaacacagggctcggctcggggcttacgcctgtaatcccagcattttgggaagtcagtgaggcagattgcttgggcccggagttcaagaccagcctaggtaacatggcaaaaccatgtctacacaaaaaaatacaaaaattagccaggggtgatggcgcgcatctgtagtcccagctactctggaggctgaggcaagagatcaattgagcccaggaggttgtggcgagccaaaattgtgccactgcactccagtctggtgatggagtgagactcgatctcaaaaataaacagatttttttttatagatagatagaagagagagagagaaagagagagagagagagagaacacaatcccacattgttttttgttttttcaatgaacaaacttattcctcttggtcttcctagactcagtaactggttctatcttcacacatttgctgaagccagagatacaggaatcatctttctttcttacaccatcttataccagtccagcacatcagacaatccccatgttcaggccttattggcttcctttcttctttacaggcatgtaatgggtttggattttattctaacggctatggaaaagcatggacggtttcagcaaagaaacgatataatctgactcaagctttttttttttgagacagagtctcactcgttgcccaggctggtgggcagtgacgcaatctcagctcattgcaacctccacctcctggttcaagagattctcctgcctcggcctcccaaatagatgcgattacaggtgcatgccacactggctaatttttgtatttttagtagagacaaggtttcaccatgttgcctgggctggtccaaactcctgacctcaagtgatccacccgcctcagcctcccaaagtgctgggaatacagcgtgagccaccactcccggcccagactcaagttcttaaaaaaccatagctcttggctggaaatagacagtggtggagggaacagaagatggactagacagacaagggagtgattacaaagttcagctaagagagatggaggcttggtttatggtggtaatagacttaaaaaacagacaaattgaactatgttttggaagtagaatcaacagaacttcctgatgaattggagaggaagagggaatgtgaggaaaagtgagaaccaaaaatgtgtcgtagattgtgagcttcagccatgagtaggtaatggtgccatttcccgaggaaaactggaggaagactggtggctggagcatcaggaccgctacctctgctattctttggagtgtgagtgtgtgcttcctaagtgtttcgcgttagatcacctcatctgaaaacccctctcctattttctctcactgtattcatgtttcttcatcacacttttcatgatctattttggctcattttgttctctgtattgtattccactgctagactctgagctctgtgatggtgggaaacaggttctccttgtttgttgctttttccgtgtccccagcccatgtcttggaacatagttggatatgtccacaatcaattatcctcagaacttctaggggaaaaaagatgtctaaagcaggaggtgacaaacttttgccataaaaggcagagagtaaatatttgaagctttatgggtcacatggtctctgtcaaagctactcaacttgttgtagtacgaaagtagccacggacaatacacacataaatgagcatggctgtcttccataaaactatttatggacactaaaatttgaatttcatagaattgttgtgtcataaaattttcttttgaattttttccccaaccatttaaaaatgtataaattattatcagtttgctgagcctggtctatccaaattttaagcctcaggtgtcaaggaatagaaaggtaagaaaatgtaaactggatgattagtataaattgtattaaagaacttatactaccataaaataatcccttattccttcccactaacctactgtaccttaagaaaaaggaatcatgtctatgaatcttgaatccagcacttaatgtttgctgatggatggatggatggatggatggatggatggatggtggatgaaatgaaggaaggaaggagggaagaaagaaaggagggaaagaagaaacgaatgaataaggcaagggaggggagggaaagaagggagaggaacagagagagagagatggagaatgaggggagagaaagagggaggaaatacttttattttacaaccaccatatcactggaatggaaaactgaatacaggcatactttggagatactgcaggtttggtttcacactatcacataaagtgagtcatgcaaactttttggtttcccagtgcgtataaaagtcatgtttataatcactgtagtctgttaagcgtgcaatagcattatgtcaaaaaaagtacataatcttaattaaaaatactttatcactaaaaaatgctaacaatcatctgagccttcagcaagtcacactgtggagggtcttatctcgatattgatggctgcggtggtggccaaatggcatggctatgaaatttcttaaataagacaacaatgaagtttgccacatcaattcattctcaggggagagtttcagtagcatgtgatgctgtttaatagcatttacatagagtaaaacttctttcaaaatcaaaattatctcaaactctgctgctgctttaccaattaagttcatgtattataatattctagttctttcctgtcatttcagcaatattcacatcatctttaccaacagtagactctattcaagaaaccactttctttgctcatcatctgttcaagtttgctcctcaaacattaaaagttcatcatgagattgctgcaattcagttccatctttgggctccacttctaattcgagtttgttgctatttccaccacatctgcaactccttcctccactgaagtgttgaaccctttcagccatccataattggaattaacttcttccaaactcctgttaactgatattttgacctctcccatgaatcacgaatgttcttaatggcatctagaatggtaactcttgcccggaaggtttcaatgtacttttcccagatcattcaagagaaatcactatctatggcagatatggcctttaatacgtatttcttaaatagtaagacttgagggtcaaaattactccttgatccacaggtgtagaatggacattagcaggcatgaaattattaatctccctgtacatctccatcagagtcttgggtgactaggtgcactgtcaatgagcagtaatactttaaatggaaaatgtttttgtgagaggtagatctcaacagtaggcttaaaatattcagtaaaccaggctgtaaacagagtgctaccatccaggctttggtgttccatttatagcacacgggcagagttgacttagcaaattctgcaggaccctaggatttttggaatggtaagtgggcactggcttcaacttcaagcatcagctgcattagcacctaacaagagtcagcctgtcctttggggctttgaagccaggcctgacttctcctctctagctaagaaaagttctagacagaatcttcttccgatagaaggtgtttcaccttcattgaaaatctgttgttcagtgtagtcaccttcatcaatgacagtagcagattttctggataccttgctccagcttccacatcagcacctagtgctttatcttgcattttatgttatggagatggctgctttccataaacctcatgatcaacctgtgatagcttcaatgcttcctctgaagcttccttgcctctttcagccttcgtagaacttaagaaaattaggtcttactctagattaggctgtggtttaagggaatgttgtggctggtctgatattccacaaaccacgaatctttctccacagcagtaataaagctgtttcactttcttatcattgatggttcactggagtagcacttttaatttccttcaagaacacttcctttgcattcacaacttgccaattgtttggtgcaaacggcacagcttttagcttacctaggctttgcacatatcctctcattaagcttaatcatttctagcttttgatttaaagaaagatgtgtgactcttccttcaattgaacactcagaggtcattgtagggttattaattggcctaattttagtattgttggtctcagggaataaggaggcctctcaggggagggaaaagagatggggaaatggctgatggtggaggagtcagaacacacacgtaacagttatcaattaagttcagctttttatatggggtggtctgtggtgtcccaaaacaattacaatagtaacatcaaagatcacatcatagatcccatagcatatataacaacaaagaaaaagtttgaaatattatgggaactaccaaaatgtgcacagagacactaagtgagcacatgctttgggaaaaatggcactaatcaacttccttatgcagggttgccacaaactttaaatttgtatttttttaaaaaggcaaatgaagtatgtcgtactgtgatttgtccatctggcacctcttggacaaataagagaaatgtaccccaagtcaaaacaaagataaaaacttacattctctggatacttgttgaggaaccagaataccatccctttccatgccgagatatgtaccaattttttaaaaaaataaatggcaatatgatgaaccggatttccaactaaaacagtgattcaacacattgcaaagaccctaaataaaatataaaacttctgaaaactcttgtattatcctgcataacatccttcccagaataaacactattttcaatacaatgtcagcacgatctctactcattgcaaagatgagctccaaccatagaccccatcattaaaacttcatagggtaaaagaaaccattaaaatgaatttcaatttgtcagataagaggattatggtacaaagatgctttaaatacctaataaaattatgccaaacatactggaagcagtattgtgtacctgggggtctaaacctgagaaataattatatggcgtgagaaaaaaagtgatgacccatgctaaggatgaggagtgaacatatgtcccaaagctccagaagagtacttgaacttttttagctgtacctaactgctgccatctcggcagactgtccacagtagaaaaccttcagataacaaaggcttttcctgttttaatcatggggaagaggttggaggacacagggggactggaaacctaaaaccaggaaggagaattcaccccaaggtggtggttgggggaacaccacaaaaactggggactcagtgcaaagatgacaggtgcaaataacagcaatcagccttctctgttttaataggggaacagattaacaaaagcaggaaagggaccatggaggtgtgaatacagatccatccgtggccgactgccatggttactattttgagatcgtcattacgcagttactattgttactgcttgagaccatcattacaagactgaaggaagggaggaaccagaaatgaaaacttaagacaaaagaaactgttttaaaggaaggggaaccagggaagaagagagagcttcctgcttctaacgagcaaaggcagcccccgagcttctaccactgttcctattattgggtagcaagagcagggaggaggaggtaacgattggttagctgcttaattgatccaggttcagattattgctaacagacttcagatgtgcctaatcacaagaaacacttgtgctgggtcgtgactgccctcagcattccttctgggtagcgcagtttgtcattttgccaacacctgctttcatgagaacagtttgctgtttactcatatagcctccagtggtatagtgagtgatcacgacccctcattctttcggcctgtaacaaccatcaactgcacaaccttgtggacggaaccatttccaatctatggacaacgttaaaggaggaactttcacccaattcatattaaacatttatgtggcccatgcacatattatttaactttggtagaacactgaaccagagggccactcagcccctttctggctaatgcaatcccattccaagtacaacctctcaaaaagtcgtgttgtgtggcttagagagtatgtgagcttagactgccagggttcacttcctggttttccacttactattcccgcgaccttggataaagtacatacccttactgtgtctcactgtactgtctaaaacatgaggataacactcctagaaagctggaaaggtttaattaaataactcacattgcagtgctagcaaacacattgacatacatacaagaaaacttgcaataaatgttaccttcattttgaatagcttggtaggattgttagtgttgacttgggtttgggataggcttgggaaaggtgtgtaaagtcacagagagaatcatggatgcattttcactggataaggaattttaaaatacttcaatactcactgaccagattcataaggcttatttactattcctctagggaaaaagaattagagtcactcttgaaaccagagtgtcatttgaactcaacatagaactgtctgctaacaaagtacagaccaaaataagcactgtctgccagacttggcaagacagatatatacttgaaaagcaaacctggcactttctgaaaagatagtgaagaatacactagagcataaatgacatggagccaatgcaagagatttaggtaacgagtgttcaacaggatctgccacaggcttctcccccaggtagatgaaacacatggctcttttgggtccctgctcacgtagctctaatcggaggcctcgctatccaaaacagcatcacgcacacctacccaccatacacatccatcattttctctcctcttattgagtcatttttcttcatagaacccatcaccacttgaataaaatatatttgttattgactacctcacattaatgaattgtcagctctacagaaccaaggaatttctgtctgctttgctctctgctatatccccagaacctaaaatggagcttgcccatagtaggttctaaataaatatttatgaaatgaacaactactagtgcaaaaaataacataaaaaataaaaagacatttggcaaaagtcttaaactgttagaaacaagggtattaaatacattaaaatgttgttaaagtcataccttttaaaaccttaaagccttaaaaggtattacttttaaagctttataaaagtccaaaaaattatttgaaagtattctaaattacagatgagctaagaaattagagaatagttattcttgaattcagcaaaacttacagaacttacagaggaggtttttgagaaaatatggtttagaatttttatttcagttgctgattgttgattgaaacagcaaacccttctctctccttaaaacgtccacagataaagaaagttactaatacaatatagaaatacattaaagtcaatattccaggttacttaaaatatgtatcatgcacatacagattttattgcttttactaattttagagtaaatgaatgatgagaaagtataaggcagaaaacttataccaataccctgttatgctatgtggataaacttcaaaagaaaaaattttctcaaagaaaaatgattttctctggataatgaggggatccagaaagtacattatataaaatagctatgggaaatgttttaactgcagagtgggtgttcacagtggcaagttagcaggtattttaccatatttcgtaccacagagaaaatgagaaagaaaaacaatttaaaacagttgttatcctttatctttacactgtagcatactccaataaaaaagacgttcacccacaattgacaactaggtttaatccttataatgcccataattttatactgtaacaactgcatacttcagtctgaacacaatacactttgacttaagggattaaaaatacaaataagatccacaaatataaaaataatttaaaaggcctaactaaccaatattcgttgctttttgctttttaggtagaagagcaaagctgacgggaagttgtgggaggaacataaaaataaatttaaattacaagagaaaaaattattagatgtttatacagatctttttgaaaagttattgcttgatgacttaaagatggagttttttgtcatttaattttaatgaaattaaaatttcaacaagattaggcattcttaaactcagaatgccttttgagtaatttagtcaaaaaaattacattcttaaaaaaggttacacagccgtctgtgaaggttttctgagctggccaacatatgctgagacctttagtttttaacgaaaagggctttggtgattttgctctttggtgagtccttttaatagactcttgcaaagttgcacaaaatgatgagatgtgccagaattaagtctgacccagtacatttttctttgaaatgaaaatttcatttctaaagaaaattgatataaacatcccaatgtcattttgccaagccaagaccccagaattgttttgtgcctctggaatagaatccaaatgaaaagcttggtttcaagaaaagaccttttaaccaggactattcacaattgtgaacactgtcccacaaagccagtggctgtcggagagtaactgctgtgcgactttccccagggctccttgctcttgcccccacagcctggtgacccaccctcacccaagctttcatgtttgcttcctcttgttgtccattcatcttaatggagaagatggaaaatataactcagtctgtacttactcgatgttaacacaacaaaaaaaaactgacccaaaatgcatcacgaaaaagcaaatccttgttctgcactgtatcctaagtcagacacttctgatggaacattcaaacacaaaactaaaaattccagaagcatgctcacattacattattagagggcacctgtatagcatttcctctgatgctaaggtccctacagtcccacagtccccacaccctggctacttccttaacactgccatccccaaatgcacaaccacaacctctagaacctggtttcttctctgtgtacctacttccttggtctggagagctagactgcaatattacaataccatagaatttaataaacataccaaaggattgaattgcagaagtgaaagctcaaccagctctgttctttttttaaatttcccactcattagctaggtgattcaacaaaacagatgcagattcaaaccagcctctgctcaaaagatgacagaaaacctaagcttatgtgcactaaattatcagacttctaactttgatatacacaatttgccaattcgaaagcaaatatatatataagataaatctgctgcccccaccctccatgacttgcttagagtcaggatctcgctctgttgcccaggctggagtgcagcgacataatggctcactgagccttgaccttctgggctcagctgatcctcctccttcagtttcccgagtagctgggacacaggcacacaccaccatgcttggcaattttttttattttttgtagaggcaaggtctcatttgttgcccaagcttgtctcaaacttctgggctcagcgagcctcctgcctcagcctccaaagtgctgggattataggcatgagccaccatacctggcagagaaatcccatttcatcaataaaatgatatgcatgaaagagttctgaaaaacctgaaagattatataagcttaattgaggtttaattattgtatctatattataaaaacagttttatggttgagccaataattccatccttctggcaaaattcaatataacatttcaatataacaaaataatggccgggcacaggactcatgcctgtaatcccagcactttgggaggccaaagtgggcagattgcttgagctcaaagtttgagaccagcttgggcaacgtggcaaaaccccgtctctaaaaaaatacaaaaatagcccggtgtgatggcacgtgcatgtagtctcaggtattcaggaggctgaagtgggaggttgcttgagcctgggaggcagaggttgcggtgaacagagatcacgccactgtactccagctgggtgacagtgcgagacctatctcaccaaaaaaaaaaaaaaaaagataaatacttcaatagaattcaacctgtgtttccagattcaatccctctactctattctagggctttctcccgcaacaagctacctcaaacagctgtataattatcaacctcctagagactggtgctgatactgatatttatcctaatttagtatgtataaattaacacataatattttatttaatctcacatccccaaggaagtacaatatgaaggccactttacagatgagggatctgagggtcaacaggttacatgatttatctaagaataaatagccaataactaggaggtctaatatatgaaccatatccacttgtctatatttgggagggccaccccaacacaaatcaattgcaggaaccaaacagacaaacacccactcacttgcctagaacttatctgatgagataatcataactagtaaatagtgccaccattccctttcccaaccacgtaaaaacaattttcaagcctctaggttctgtttcattgcttgaaaaaagtgtaattttatactagatgaatgctaacgtttcaagagcagtatacttttgtgtatctataaaatattccatttcactgacatattatccaggttttgtatcaatattagttttaatgatataggcttaaaatatcagcagtcttgttttattgctggcaagacttgaagcacagaatttcatcataattacagtgtccatttggctatttctgaggaatattcgttcaaaactatcttttgcataattactcttaaatagctagagtctaatgatatttccataaatttagttactttatataacttgagcctctatttagactaaaataacttttgtctttctggcattaatcttttgggaaataagttcagggtcaaatccaaatgaacataatataattttttaatgtacccaacagcaaaatggcagtctctgtctttaattactactattgaattttaacaaatagttctagggacgtctgccaaatttccacaatttagagaactacaccatgagagaatagacagttcacaatttattatgggttatttttcttgagctcagaagtgctcgttgtagttctagttacattttcattttaatgataatgaggataaacaataagcagacaaatcttctcaacacgtggactgcttgcccaaggagacaacccctcagtagtgctactccgttctcacttctatttccgctgcccacgtcacatcacagatcgtccataaggcaaggtggaaactacactatgattaagttctagaaattctaatattaggaagtagaagcaaggaggagtgatgagatgttacaggtaaactgtgtctgcttcagtgactgtgtgcacaggtacctaccatgcataatatctgcacacacagtagatgctcaacatcccctcatatctacaactcatcacaagtattataaacaaaatgtgactataatcaagagaggtataagcattatggatgtatttgtcaattatacaaaacaaacaaaaataaagttggggaaaaaaagtaaaaataaggggatgcccaacacaggcagagcaatctgcagagagaacgcaagcatgagatctcctaggaaggaatgctgtggcaggagatggacaagaatctgccatcgaggaagttaaaagtacggctggcttgagggtagttaattgagtggtacatgtactgaaggtcataattactaaagttaattttgaggcagagcctggggaagttgaagttcaaatagttctagataggagaaacatctctgacctgaaacgagagagttgaaacaagtgcacactcagtcttgaatggaaagtgacagtaaacttgtgtgactaaacctaaatttgcaggaagttatgcccaggattccacaggtacaatccgcatagcaagctaagcgtgctgggctgctgtggacacctggttcaaggctacttaagagctactagttgccatctcagaaagtgtcatcacctttactgggctgatttggcttcgcttgtgacttcaatttctggttatatttccccacagtacaggccagcttcttttctctgcatcccctcagaggaataagacccagttcacagatcctttaaatttccttactttcagcacctttcctatcaatttagcctatacgctatagccgtactattaactgtatctaatcatgccctgtaataaagctggttcaacttctctttaaacaagatcactattaaataaaacaatgggcgcttagcttatggaagaaaaccaagtatgaatgttgtgagggaaactcagttgagaatctgttacttgactctagtggttctaaacaaaaaatgtaggcccacctccaccaaaaatctttttaaagagggggagggccggactcggtggcttatcctgtaatctcagcacttagggaggccgaggcaggtagatcacttgaggtcagctcgactcagccgggcagacatggtgaaatcccatctctacaaattagccagtcatggtggtgcagcttgtaatcccagctactcgggaggctgaggcagcagaatcctgaactgaggagatggggttgcagtgagccgagatcgcaccactgcactccagcctgggcgacagagagagattcgtctcaaaaattaaataaataaataaaaatgaagagggggaggatgaaaaggggagtggatcatatgagactgaaagtgaaaatttaatagtccaccactggtgacacagagggagagccattggtgaggaggaagacagaggcctgggtgcaccagctaagaatcccaggtcaagtactcaatgtctttcagactcaacaaatcaactggttgcctggcaaagaaataccttccctaatggtttgttctagggatagaatacagtattatgttaactaatttcaagcactgcctgcttataataatccctcaattcatggtaaatttttttttttttttgagacgggtctcgcgtgtcacccaggctggagtgcagtggcgcaatctcggctccctgcaacctctgcctcccggttcaagtgattctcctgcctcagcctctcgaatagctgggactacaggcgggtgccgtggtggatgttttaatgatgacgttgatggtactgacactgatattactatttctttccaacaatcttggaacaaggatgtacacaatgcatagtacccaggggcactctgtcactcaaaccaggttttgggataatatatgaagttgggcattctatttaggttaaagattgtggaaaaattgatatcatcatcatcatcatcattattcaccttctccccagtcatgtaaaagtatggataagaacatcacttagacaaataatttaatttatttcaaaagcttgcttgaggatagtaattacactgatgtttaattttacataaataaggtatgttgttgcattaatagcaaagttagcatgactggagcaaaaggaccctcacctaaatttcagaaaacctgcagaataggtctaacttgagacgagctgcccactaagcaatttggaagatgcatctctaggctacgggacatttttgacccgctgaaaatgccttcatcattcattcgacaaatatttaacaagccctgctaagtgccaagtactggtctaggtaatagggatacagcagggaacagacaaggtcctgcttttatagagtttatacaaacactacaagtcacaaggggacagtgtggtgatcagccattctctctgaactccagttctaaacgttttacgaagacaaattaaattgcagagctgtgattactgaccatcatcaaacttattctccagatacaaaggcgcactttctacgcttgtaagtaaaccttactgcttcctcacaaaagaatagcaagtcctatagattctttctaagggtcacagaaaccttgaggctctgatggaacagaagatgttgatatctctttcacttctccttcagcaccatatcttggcaacacttgcgggaagatttgtagagatccacaggagaatttatccaatttaattaccttcctacttcatttcataaaagggaagaatattctggtcagactttccattggtggcatgctactgaaacctgcgcctggttcttcaggcaagtatgacaactcttgggttaatgggcatggtgctgaatcttgacatgggaagatcaaggagaaacccactacccattgctcccaattctgaggaggttggaataatgcaagcttgaatcaatgacacctaaacacaaaaattagataccttgggctacagttttctcaaagactcttggaaaggtgaggattaggaagagaattcagagagaaagaaaaccctatcccagagcaccgcaccttaggaccctgaggcagcctcttctcattgacctatgcttttggaacatggtgcaaaggcggcaatcccagggtgctttcaggtcctcagaagccctcagattaggaattccaacagtaaattctacggctactctacttttacatcctaggatgcaagctaagaaggactaaaaaaatgtaggtactagcattattcagggcacagaaatctcaggtgatatactgggataaattatctcagaacaattccatgttttgggtataatggtgaaacacatcatgcagcatcctcacctggaggctctaagtgtacgtaacttctgagaaggcctgtagaaaagaaatctgttcactttgtgaaacctaacattcctcaaaattatttggccatggaacccaccccattcctggcgaacacattaattttaaaaaaatttatccaaggtttattatgtgccaggcactatcacgtgattaaaggggaatgagttccggtcctcaaaggaacttacctatttaatgtttatttcagaaagaactacttgaggcaaccaatgtattggggtcttcatctgataatttaacctgtggatctctctaacctactaactttccccccaaaatcccatgatctttagctcttgaaggacaaaggtagtaaaaaggtagtgttcttcacaaaacacacagcctccatgggcccattcgccactgtgtcaactgaaagctccgtgccagataccaatgggcttttgtgccatttgtttcatcattatatctttgaatagagcctggctcactgtaggagattaataaatgtgttttgaatgagtggtgaatgccaaggactccctctagtccccaaaattctgataagaatgacaaagttaaaatcctatcttagtctacacggacaaattggatttaggttcccttcattaatgccaaccttactgtgcaaacttgctttatatgccaaattcagatgtgggcacttctattgatgatgttatgagctaatattatttgcaaatgttttaatgaccaaatatatctttttactgaagctaatgtgttgaaacgtaatccttacagacgcacagctgtctcatggtctgacataaaactgggattgaagagcactttctaacagaagcactgcaatttcctttaaaaaattaatattcatgtactttaatttttcagtcagtaaaataggaaaatacgcattggctggctgcctaaatgaagtacatttgaaatttataaataagcaagatgtcaagaagcaaaacatcactaactttgaaattggatgtgaagaaaattcaaaggatttagccaatttcaatctctacgcaggaaacataatgatttcctggctgtaatattcttatcaatagcaagaaaggagtcaaagaaagtaaagtgagtaaataattgtttttcaaataaaacagcctgctgagccttctaaaatgtaaagaatctttaaaagtggaattaattttcccttgatttcacaatgcttttttcttaccttgtctttacatattcaagtggcatatcattttttaaaaccatcagggtaacagaatctaattattttattgtgtagcctttcaaaaggtaaaggaaatgtgaagagttagaaagtatgcaacccatattgttggcatctcagcacttatgatcattacaagcactcaaaaaaagcaatactgggctttaaagctgcactgtatattttctctttctcagagccctgggctatcactgcaaagcacagtagtccattctaagctctgaataaagaaaaggaagagacattaaattataatttccatgcacaattggtacaagtatttcctaccaacaggattaattgaaagcaagatcccagaataaagctgctcagcagagaggatggcagtttagtgtcttgaaatttgattttactgaaagccctgacacatcataatagtgaaatcctatttactgtagaagcaggatggataatgctatttaataccgctgtactgtatgccatcaactcacagcttgtactccatgttctcatcttaccttaaggttaatacttcttgacagcctacatggtaaaagagccccaaattaagtgctgatcccatgatttgcaaatctttcctctaaagttagacaagaaaaactgactccagttaaagggatcattttacctggatgcacttttaacagctcacctagaaaaaaagtaagtctcatatccctaaagccagatttgaaaagcagctcaaggttactaaaccacatttcccattcgaaatttcagagaggttaacagaaaagccaacgcattttaggatttgttgaataatgaattaaggataagacccccatatcctactatactgtattgaatttttccccagagcacaaactagggaaaaaaaatatcttgcttgctacttttggaatactgcaataataaacttcctttaggaaagcaggtagattgtaaaatggttccatctttgccctaagttataaatgtgtcaattatgttaacaaaagatatgctgatactgggccttattatttttctacagaacaattaacatctaagtgcatttacttaaactatcattacttgttgtgataaaaaaaattgagagtaactcaatgtacacaatccaagccactttaataaaaccttgttgcttgtgacattacaattaaaagtggtgtaggcttctattaacttcaacatccaacctgtggactacagaacctcatctctgtttgtgtagctctcggtaactatagaaaccacgggaatctgccctgatctccacatgaatgaagaagccagtacaaaatttcccagtgtcaaggaatagtctatctctctaggttgacaagtgcaaactagtataacccacgtaggcacactaccaggaagttacatttttaactctcatgttaaatttactctgtcacattgcagggcaaaatgagttaaccacatcacctaaaatcattggcaactgtttagaaagcacgtcgcagggggaatatcaaacggtttcttaatcccataaaccaagtttaagttatctccccatctcaaaaaacgactgtttatattttagtatctcagatgtcagtagactaattgtgaatccatctgcattaatcccttgaaaaggttgatccagcttcactcactgaaatattttacaatgaagacttcacctggtagtaaaaatacataatttcttcccataagaagcactctgggctgaaataacctgttctgttgtcatttctcattattatcattgttggcattattttttccccagcttcacacagaggagcacagaagcaaaggtactaattgagaaagaagaagtcacacacatcaaaagccaattaatcatacagatgagcccaacactttatgatgcaataaaagacattcatctgccataagtgagagacttttaaaaattgctcatttgatgtaagcatgaccttaaatttaattagcaactctctccacaggtgacaaactagtaatatacttttcttcttaatgcaatttatttttcaccattctctttgtattattctcttttgcccagcttatctaattcctctcccttttaattctgtgagatttcctgcagtctgtatgcaaattgctgctgaaatcagaggtgtctgaaaactgaaagcaatccatgccacactggcatttatgattcaccagatagggattcaggtgtgtctaagacaaagtttctgccttcgtggaacttctactggatgacgggaaggcagtcatgaacaagttaacaaataatgagtaaactaattatagatctggaaggtgctttcaaacaaataaataggttgatatgacagttagagacagggttcagaagtctatttctgatagtcattaggaaagcctaaaacttgtaagggagtcagagacagctattcagggtgggaaacagcatcccagggaacaacaaaggcaaagatcctgacatgggaaagaatttgaaggatggtatacacttagcagatcttcaatatagtaagcacatgatgaataataggaatatgtttatagacaaggaggcatctatttgattatatgccatggaaaactaacctaaaaaattagtcttccattttttacatacagcacatagaataatattttaagtggcccatctacaaacatatcttcatatttaagaatgcaaataaattgtaaatgcagtggggggaggttagggaggagttctcaaagaacaaatgcatgccacatcactgggttactcaacattgtatatacctaactaaattttctgatttccctcagctcctcaagccaagagggcttcatgctagccaaaaccccatcattcttaggaaagccaagagcaaagtggatgccatagagcaaataattcaaattcataatggagaagttatacatgcaaaacacattatcaaagagctcaagtttcaacatgtcctggggagacaaggcccttcatcctggaagacccatgggagactgtggttctgccctctatgacacgataaccacggtcctacccctcgcttccctcccacaggaccacagactcctgaaaaatacacattttcctgaagaacacacaacgatccaaactctgatgaataactatcagaacactttgtcaaaagtaaaaaaaaaaaaaaaaaaaaaaaaaaaaaagtttgctttctttccagaagatggaaagagatgaaaagatggaaggcagtattaatcaagtatgagcaagtgaatgaagacctcaagaagaaatttttaagctgctttaatgactataatttcttatttcaacgtgaaagaagcacaactcgatattaaaataactcttaggggtatatgctgtaatcgctaggtaataagaccttacttattcttttttggtcaaattttcccagaaatgtcaaattctgggagaaaattatgcatttttgaatgcttaacacttttaggttataggtagcattaatcaaatcataacgtcaggacccaaaaagttgtattagaagctggtaaagctaacttaccacacaaagaactaatgctacaatcagcaggatttacatacagaatgacatcttcaagttggtactagacagcagctaaatgcttaagcatggaacctggctcaaatcagatctatcatattttggctgtatgttcttaggtgaattactttaagccttcacctaacaatagggcgcacagccacacagggttgttggtaagtataaaatgagacaatccatgcaagtgccaatcacaatgtaaatgctcagtaaatgttatcatcagcatgttaataaggatgtataaacaataacaaaatattcaaagttaaacttgactttctcccaggatagaattaaatatgaatttaaatggctagtgaagaagatactaaacatttgtgtgtattttaaaactatcactaattgcataaacataacttcatagtataagcttagaaaatctaggattca

SEQ ID NO: 2898 - DNA, 100000 bp, Homo sapiens
ggaaggactgcaggcagaagtgatagcctgagcaaagacatcatgacatgaaactccatgtgtgaccaagattgttgagttaaaggcagagacaagattgtctataggcctggggttctgaacagcctcaaggagatggtccacaaacccccagacatttgatctcagttgtgggtgctttttttttttttctagagagaggctttttattttcatcgattcttcaaaccgggacatcactcaaaacagccttgggtagcagataagcttggagacatcagcagggcccgggaaccaggaccttgtagccctggttcaagaattcatacttcactctgaggccaacaaggaaccatggtgttttctagctgggagaaagcacccaccttaagcaccctttctagccttaggaaacaacacagtttactgtgagctgaaatagatggaaagtccttctataaactagaacacatctactgtttactgccgtatccctagagttgggcacagtgctgagcacatattgggggtcagtagatatttgttgaatgaatgaatgaatgtgcacaggtgtacatcataacaataaaagaatgtatatctccagggtggctccgtgcatttcttgactgatttaactgaaggtgaatccacgaaccataaactctagagcttcaggctctaacagaaacctactgagtcctgagagatgctaggagtggcggggcaggggtgggtaggggagagtgggtttggcacctgagggttggttacacctggctgcaggatagggctcttcccaaagtgccctttggcgtctttggagagtggaggctacacggtcaggatggccggaattcttcttttcctccttcgacattaaatcatctgcttgtcctgttgactctgtctccaaaacatgtcctctatcccctctatttcctcctctcctccactctcacccggttcctgctccccacctggcctgggccaccgcagctgttcaaaaccagagccatggctgtgcccttgcctccctaccattggctctccatgtggcagctgagggatctttaaaactctccacctgaaaagaacgtgactttcttagagtaccgtgttctaaaaatttaatctatttttgggtcatgtgggaattttgctaagatgcagtttgtgatcagttatctggggttgggctcaagactgcgtttctaataagctcccaggccatacagtgctgctgctcctggaccgcattaggagtaacaaaggcttggagaaaaacccaaacttcctcccatgtcccactttatctggcccctgcatagctctcccacatcatctccagcccttgtcctctccctcatcttgctatggcttctctggccttcactttgttcctggagtatgccagctgctcctacctcagggcctttgcacatgatgttcccactgcctggagtgctcctttctggaacattccacatggcttgcttttccttatttacatcttagttcaatggtcagataaaattctctgtccacttcacctagtgaagtaccttagccaccagagactctcggctatttctttcttcttcttctgcgtagcacttatgattctcagtttattttggtaatatatttgtgacattcatttcctgtccttcccttcatgtatgttccacagggataaggactcggcttcttcgctttgagcctaccccagagcctggcgcatgctaagtgtcctcttcatgtttcttggcctgtgcatgaaaatgctcccaccgctgctgttggtgtttggatgcagacaagctcggaaagcaatgaagggacccgagacagaggagaggaaggagagagtaagcaaactttctctctgaggtgcctcagaaaaagcctcaagaacctggagatgatgctgaaaccctgaatcaaacataatagatcaattcatctaactagaagagattcattctggaaggtgaggaagaaagaatgcatagttcaatgagttaagcatttggaacagtttcagtagacatacagtaaatattatcaaataaataaatatgccgaacccttattttatgaccattactttgtgttatataactgttcatcctcataaaacattatcaccatcttgcaaataagaagctgtgctaccagataggagatttgcccgaggtcatataagactcgtcaaaggtcatacagcgattcagagacaagctgactaccctactctctaaaacagctctattcgaagttgtaaaggccatattcccttccccttccctgcagtgccataccacctgttaccactgacacactgtgcatttatctgctgtctgtttcctctcaccacagcataaattccctaagggtaagaatcttcattttgttcctacccttttccagagcccagaacagggcctgccatgtaagtggcacttcatgaatgctactgaatgttaaaaggatgaatgaagggattatttaaaaatccttatttcggccaggtgcatggctcatgcctgtaatcctagcacttttgggagagtgaggccaagaacaggagtttagaccagtctacatgacacagcaagaccctgtccctacaaaaaatttaaaaattagtcaatgcggtggcaggcacctgtagtcccagctactcaggaggctgaggcaggaggatggctgagcccaggacttttgaggctgcagtgagctttctcgcaccactgcactccaacctgggaacagagcaaatccctgtctcttaaaaacaaaaaacaaaaacaaaaaagtttctccaccctgaggggcagttctgtaaacttgtggctgacagatgactcaaatccaggcaagaaggcggaggccatctgtgaggaaggaaaactgtggcctgctgaatgctctggataatcagaggaagactgtatccacagaggacagactcgctgcatggaacctggcgggagagtaaccaggagctggcatttgtccagtctcaggctctgacatcacccctgtggtgacatgggtgggcagaatgccacaagctggcagtggctcttctcaggatgtggcttcccacataaagtggcccagagggagaatgtgatgaccaggtccctgtggcaataacaagtttgatgtaagtgcataataggcacttaccagaacatttcttgtgagccaggcatggtagttcacgcctataatccagcacttcaggaggctgaaggggaaggattgcttgagcccgagagtttgagaccagcagctgggcaacgtagagagactccatttctaaaaaaaaggaaaaaaaaaaaaaagttaacgtagccgggcatggtggcacactcctatagtcccagctacttgggaagctggggtgggagatcgcctgagtctgggaggtcgaggctgcactgagccatgatcatgctactgtactccacctgagtgacagagcaagaccctgtttcaaaaaaaaaaaaatcttttgtgaattgtgttgaatgagtgagtcgttcaagcctggcagctctggctgctggacagaggctctgaaccagcaggttgggttgtggatagtcccttgagatagttctctgcccactgaccttcctctgtgctaggcttctcaaagtatagacttgcgactgggctcagactaaccacatcagtaccaccgagaacctgatagaaatgcagattctcctgccctgtcctctgatctacaaaattagaaatatagaggtgagctccatggttctgggaattaacaagccctccaagtgattctgatgcagttcaagtttgagaaccacaactagtttccctttcataatagttactactttgcaaggatcggatggggttaaggtaacaggttgagaaattcataatatcgtgcaggcggtcttttttaagttgagtgaggactggatcaatgactctcaatgggaaaggccaggggttagggaggacctccttgcatttggaaaatctcgaggaggggttaatttgcaaaaacaagttttaaagtatagttttgcttcctagacctgatttttaaaaatttattattttttttagagacagggcttgtcacattgcccaggctggtctcgaactcctggctttaagtgatccttcccccttgcctctcaaaagtgctggcattacaggcatgagccacggtgcccagcccttaatttatttgaaggctggtgtaatataaacattaaaggaaggtgtaatacaaactgccatccattattattgttttagtgtctacaaggtttggatcccacctcctgtccaattctcatcctcaaaccaaaaacaaaaccaaaaaaacaactgtctatctacacacacacacacaccctcggctggctgagaggtaaaagaaacatcccataggacctgctgaaagagctcctgaggcacgctgggcctttcttgtgtgccatgcactgtatctggcactataaagagggtacaatagctagtgcttctgcaatcaagcagcttacaagagaaaattgagaggggagacattttttctggttgcagatgtcgaaagcatgaaggtgtgggagctttgatcagagacttggtttttcagttttccagataatagaacgcatggggtgaactaatgggagaggagggtgaacagatgggcaagcttgattgctgggttaggaggcacagaaatgcacagaggacaaaggactaccagtccttgcagtactgtactgctccatggccactacctgggtccagggccacattcagatctgaggtagatagtaagaattgctaacatttatccagcgaccacatgtgccagtaatcaatctagtgctgtacatgtattaactgattcttcataggaaccctattaaagagttatttgatgagagagtcgggcattcactggaaatcgaacgtgcccaaagtctcaccctagaccgtggtgggtcagaatttgaatcctggccacttgctccgaagccaccgacaattcagtgtgctgtccccgtgtctgggctggcttggtgggctgggaatggcgggggaatgggacacttattttggaggtaaatgtggttcagaagaaagctcttcgtctttctccaagcctgagcaatcgttttgcgcaggcagtccagagtagagcgctttgtgagccagctacagaagtgctgtaagcccctcccactagatggcagcccctaaacccacatacaaatcctggaacctccctggtccccacttccagggctgggctgcagctgaggaactgcgggacgcacacccgccgggcgtccaggggcgccgccccatccgggggtcgcgggaagctcctaggccgggtgggggacggaggcggcggggagacgctgctcccccgactctcggcgcctgggggaggagctggcgcggagcagcccacccggggctcccggttggggccggccctcaccgcctgcctcgccgcggccgccgggggggaggggagaggagggcagggagggcggcgcgggcgcggtccggggccccgagggcgaggccggcggctggtgcgcggcgtggactacaagtcccagcatgcccggccgccctgaccagcccccgccgccgcttaaaggctccgggagccgcagccgtcgggtcgccgcggctttgctttgctgccgcggctgggagggtggaagcggcagactcagcggccggctctaccggctcccggctcgggcagcgccgaggggcgctcctggtccagctctcctggctcgggggttcttgccgaggcgcccgcgccccgggctcccagcctcggccgccgcggccccgatgccgagcatggatagagcagcgctgcgcgcggcggcgatgggagagaagaaggagggcggtggcggggggatgcggcggccgcggagggaggcgcaggggccgcggccagccgggcgctgcagcgtgcgggcagctccagaagctcatcgacatctccatcggcagcctgcgcgggctgcgcacaagtgcgctgtgtccaacgacctcacccagcaggagatacggaccctggaggtaagtggtcggggaccaggctgggctcgaggagcgggcccggacacctccctccgggccccagtatcctggccgagttgcatccttgagcccgcgtcgccccccttggaggcttcccctccctctgcactcgctgatgcggcagccggaggacccgggaccagccctcatcttgggcaggattgtggggcgggtgcgtcgtgggaactgggatggaggctcgaggggcccgtgcggggtgggtgcgcgcggacatcccctttccccccttctccgcccccaccccatttccagtttgcgggccgcaggactcgttgtcccaccgagtcacaagctggacttttccccgtgtgactgagccagcacccgtgggccagggtgacggaggaggttcccctgaagcgtgatcgcaggcctgcctcccctgttcccctcacgccccagacgccgtcctgtcccttcctttcctctcctctcagtcttgtctgccgccttttcaaaaagtgttgctgaaactgcatttttgttattcaggcgttggtgctttcctttcacgttgccacggaggctcgctgcttaaaatgtattaataattaccgctgactccccctgcttccccccaaagattggatttaggcttaggaaggattatgctggaagcaagcctttggtgggaagatgaaactgtttaaagggttctgatggagacagtctgagtgtaaagaagaaataagatatgcgggccttcctctctcaaattatagctggggaagttctgaaggatttggaaaaaccagcccgagggttgttggggcaccctgtccatacacaaagagggcaactagtggattctgaatgtgattttggccagggacggggcggtgaaacgtcaaccagttaatagctgccccgtcttgaagaaggaacctctcaccatcttgccctgccacactggcctcctgcaggtctggggatgttttgttttattagatcctcaatttctcctccccaaaccctccccccgccccttattgctaattgcctctgccagctgtcataaggccctctggatcgcggtaattattacaagaccaatccttcctccaggcatgccacaaagccgaatcctgtttgattccaaatgctcgggggtgactctccctcagttttattttcttaaaagctataaaccacaggacattggaagaatacagtcagtgctgggtattattattttttattacagtggctaaagctgtactgaccaaggctttgcttaaaaaacaaacaaaaccccctacaactgcctttctgcatgcatgctgcagttttccaagtattgagagaaactgattttttgaacaagctgagtgtgtttgctcagcaaagttcagtttttaagctgacaacaatagggggcctggaggctcagttccgggaggaggggtcgctgtctggcagagtgtgcgtggttggacttcgtgttgctgggcttggagaatgctctctgtgttggcctctgtgggattgtccccacgttgtctgaagtgctcctggcttccagagtgtgtatataggagaaccacttgctgtgcattcttggaatggccttttgtcctaccctaacttccggagtccctcattttgatggcagtgtgggttcatgacaccccagagcatccagctatttaagtgttggagctggtttattcagtggctccctcctgagtgtttgtttagacgatcatccctggcagcagagaacccatccaaaggccacaggggatctgcagctccctgttcttcccaccgtgatgtggattcgggttcactccattcctgaaaaggcagggcctgggttgttttgggggatgggaatttagacccctggagtggttccatggggctgccaccagctagtttagatgagtcacttcatcccggaggcctcagctcctcacctgcaaaacaaggaggctggagtggatctctgagggctctggaagctcgaaatctctaggttagagaaggagacttggttgggtgaaatcaaatgtttgtgattgtttttaactaccctggtttaagaataaccctctttaagaatggttctaaaatccagatttactgacccataacataggggttaagtttattagaagaatctttgccataggagcagcgtggtgataggaagccccatggctttcatactgggcctgggttctgtctgtgtgaccttaggcaagcccatgacttctgaatctcaagctctcctgtctgtaaaataggaacgagactgctcacactgcagcattttgtctgtcagtccgtgctgatactacgaaaagagtctgcctggcagctcccctagtgagggtccagtagcatttatggcacaggccaccactagggaaacttaaccctactggacccttgctagggaaacttaaccccctactttatgggttcagtaaatctggatttagggaaaggtacttctgcagctgcctctcatttcatacaggtgggtgacacaagccagaaacaatctcagcaagctgggtgggaccgtccaccgccagcagcatgtgttggggccagcaggcaagtggcagtgtccactccagcgttctttcctgttctgtgggctccccacacacaggccgtggccccagagactgtgcttgcaacactggattcctggcttttgaagaaggactgacctggagggcttggcctgtgcaactgcatcggacttatctagaatctgaggagcccagctcactctggccttcattaaataaacactcagtgggagaagcagcacgtgaaatgtcgtggaggtccctgaccagggatgggctgctgctgcctgaaattgggttgtgatggggttagtgggtcagcgtgtctggttgtccggggatagcttttctctgtgtggtggtccagttggatggaaaagggtagaaggagctgagacttaacgtttgctgcctgtgtgcctagcagctgcctgactcttctcaaactcacacacgttcctggagatcagcagttttcatcatacacttttccctctctaaatataaagggagggaggcacaatttgaaaccagggtattaatctgaaacagaagttgtgaggctacttcatcctggcaggagctggtgttctgtctccgctagacctcctaggggtctgaaaactccaccgaggcaaacgggaatgttcttatgccccagtgtctcacagagggacacttggcctgcctaatagctgggcctgcaacctatgccagtaataataccttcattcctttgaatctgcccagcgctggggagacaagggtgtgtagaagcagaccatgttgcctcatggagatttatgttccagggacattgtgacttgccctttcctgccagctactagtactttccagagacaggctctgccatgctgagtctccccaccttgtgttctttggagaaaaatccctcctaagcaagctggcgtggagaaaggggctgaaggactttgacctcaggctttgctgggggaggtgatgttggcaactgtggtaggtgcagagtcaggctgtgtgggaggcgatgttgggaactgtggtaggtacagtctctgcccttgggctgctttcctggcagttgccctggagccgcagggggtcagaggggaggccctcctgccatctggaaggtcgagaggcctggccctcacacagctctgccgtggcagaggtcagagtcccaccgtgtggggacctgagctctccctatgcctcccaggagcatctgatgatggaactgctgggagagggaggggtggcattcctgcagattgggtccttagggtgtgttgaggcacgttccctggacaacctttagttactgttgatgtgcttacctggctggcagccacctagcaagggctctgaataggtgggctgttctcccagtctttggggtctagggacagttctagtctagtgaaggagcaggcagggcacagtaatgactttagtagcacagcttgcaggaccctgcattgggaacccactgaacccttggcccatccaacctcctggtttttttgttttgttttgttttttgttttgtttttgtttttcttttagtcagagtcccactctgtcgcccaggctggagtacagtggatgatctcggatcactgcaatctcagcctcccaggttcaagcaattctcctgccttagctctgagtagctgggattacaggcatgccccactatgtccagctaattttcgtgtttttatagagatagggttttgccgtgttggccaggctggtctcgaactcctggcctcaagtgattacccaccttggcctcccaaagtgctgggattacaagtgtgagccacctcctggttttcgggaaatattcccagagtcttggggacttctcccaagtcacaggtccctggcagaactggactgaaacctggttttgctttcccacccagccactgtctcaaagtgtggcgtttctctcttctgctctgtggccacagttgtaaccctctggccaagtggctccagccgtctctgaaagatacagagctggggctctggcccttttttgtgtccactttcacccgggtaactttttcctggtgaaacctacctcccaaatgtttcttagaggcagcctggagggagacccgcagtgctgtgagcctggggagggctgggtggtgctggagagaggtcttatcagatctggaggttggtttgctgcctgcagctatgggaatgccttcttccacgtcagggttgtttcctcttctggagtggtctgggctgcctcaaaatccaggaaagtgcgccgcaggtattctactcctgccgctgggtgtgtctggagatggaccatgcggagacgctggcccacggtggcagtgtctcaatgccggggagaagcagcaaagcctgtggccaagtctctctaagctatgcctttttaaaggccatcctttcagaagaggctggttgagatctcttttttatgtttaattcaaagggaagctgcataggtgcctttggggttaggggaatgatcttggagtagagagggcagacacgatgaagaacgtgcttgatcacctgttctatgttgagcactccactaggctctcggcattgttgcaccttaacattcacaatgatgctatgaggccttatcctgatgttgcagatgaggaattgcagctcagagggatggagagactgtcttagcaggtggttgaacccaggttgacggtcttgagaacttatgttcagaactccacagctgttgctgtggcggggagattctgtgagggccatggttgctgagaccaaggaaatggccaataataaaaagggctgggccgagggattccgtggctcaactctagatgtttgggcttcctggtggccacccaggctgtgcagcccagggttcgggcatgggtctgcttccctaatgtccaggctagcacatcctcaaagacagactctcagcaccatgatgcagcccgctctacgcttgtctcattctgagaaaggagaagcgcctagagatcagtttactcataattttttaaatggctacctgtcttattctttctgaaagttcctctgataaacagtgtattctttaactttctacttttaattaaaatatttacaaatacataatgatatatgttcactataaaaaagaaagtactagatgtacaacagtgaaaacacccataatgccacctctcagagttaattccagtgcacattttgttgtatattcttccgcatttgcatataaatgtacatgtgtatatttgtggcacataccatgtgcattgccttgaaatgtcttctgtctgtatcagcacatatacatatgcatcagcactattagtggctgcatgtgtggtcataccacaaattcatctaaccggtttccctgtgtgggccattcaggctgttccaagtcttgcttttataaatggtgctgcaacgagtatcttcctacaagtgagatttgtgggtcaaagtatatgaatacatttaatatctgtcctcgtctttaatatctttatggcacataactccccctctcctaagcaggaatggcagccttcatacatttatccatttgccacgcatctgtaatcacactgacggccaagagtttaaaaggaggctgggcctgggtgcggtgctcatgcctgtaatcccagcaccttgagaggctgaggctggtggatagcttgagtctagagttcgaaaccagcctgggcaacatggtaaaccccgtctctacaagaaatagaaaattaccatgcatggtggcacgctcctgtagttctagctactcaggaggctgaggtggaggttgagtgacctgagattgcatcattgcactccagcctggatgacagagaaaaaaaaaaaaaaaagaggctggacatggtcctctggctgagattctgggataagtgtcaggaactatggctctagttttgtggttgcttgtgtctgaggttctgggctatgtgtcaggcattgtggcttcagtttttgtggttacctgcagcaaaggggggccccctgggctgaccaattagaagaaggcttttccttgctccaagatagcggagggaggggctggatttcaggtctccctgtccagaactgatcagctttggtagtacataatcatatggtgaggtcttgatcacttgaggctcataaagtcactttaactgcattcttggttgcatccctaactacaaatactgatcacagtgcatttggggtgcctggctttggggatgatttagtagagttgtgggttcctagggctacaagggtcttggaatttccatgtggtccagccctctcatcttgcaggtgaggaaactgaaggctgagggagaactgacttgccaggaacccctgttaagcagaattaacaaagggtggttataaaggagcactgagttgggagtcagacctggaggcccacacccttgattaagacattaaccaccttgagtctggcctgttgactgagggtgagccactccatcctcctctgattgtgggtgttgacctcaaggggtttcctgcaggaagaagcaaatgggtttgctttcctagctcgtcccagtgccttaggggccctgaggactggagagattcttggagcgccatctggggtagtcacgggtggaccttttttgaaggtcagtctgctcagtgggctggctcagcccgaatgactgtcttgaatctttggagttgtctgtttacttttaagggcttctcatccttgcaccaaagatcccctggaaattaggtgggaaatccttaacttttatggggccttgtgtttgtctaaaagttcatgcgcatggccaggtgtggtggctcacacctgtaatcctatcctggatccttgagtcaaggagtttgagaccaatgtgaacaacatagtgagaccctgtctctacaaaaataaaatattagccaggggtggttgtgcacacctgttgtcccagctactacagtggctgggctggaggagcacttgagcctgcactgagctgtgatctcaccagtgtactccagcctggccacagagcaagaacttgactcaaaaaaaaaaaaaaccagcaagaaaaatccttgcagttttgcattctgtgccactatccattggttttcatgtcaagataatgtaaaaattctttcaattgcttccagaaggagtagccttttaatctagtgcacaggtgtccagtcttttggctctcagggccacattggaagaagaatgctcctgggccacagataaaatacactaatgctacaatagctgatgagcttaaaaaaaaaaaaaaaggtttgtgcataattttcatgataccaccaccacagataggcggaaaagtccttgtagtcaaagggttggacacggctgatctaggtcttgtccgttttggctttctccctgattccagaatgcaggtagagatgtagagacgtctctcaggacagctgttgagataaaaaaatttgttgtcatttattcccaggcacagctgttgtcatttgcattgaaaaagtctccattcaaactgctgtcacatataaaatctatttagtaagtctgtatttttctgttgtcttggccttggtgggcagtagtgtgttttaactgagaaactgtctttccaaataatgaagctgaagtcagcctacctgcttgccatttttcttcccttccatttttctaatctccggataattgtaagaatgaattaagatttgtgtttaaggcgggcacagtgtcttaggcctataatcccagcactttgggaggcagagacggacgtatcgttgagctcaggagttccagaccagcctgggcgacatactgagactctgtcttgtataataaattaaaatttaaaaaaagaagagataaagacccgtgtttaaaatttttaaaaaagggggaaagtgtaatgcaaaatgtggactatgccagctatgattgggaaaaataatttttcaacagcattatctatagatttgtattagcagcatactggtcataagcgttttgctttccgaaatatgatgtggtaagctactttaaagtgtggtggggctttcttccgcatggctccttaggggttgagtcccaatttatccaattaatttgggtttagttttgatatggataagggaaccagcttcattcatggtgcacacacagttttgccaataaggaaaaaaaaaagccacctaatgttcctactcattaggagctatctggagagctcctaccccactcccaccaaggcctggcccttaaaaaggctcagtgcagcctttctgtatctcactgtattctgcaagatgctctgtgaagaaagttgtgctgcatcagccatctccctcctgaagatccctgcggatgaggattgtgttttaaaggttctgagaagtactgcaacaacagttctcaaacttatttgtccagggatcttttcttccactgaacgtagttggggagacatggccttaagccttgagcagagaagagacaagaaactgttggctcacttacaaccaagtgttgtgtttaagttttaggttttatgaaactgaggtgctgtttgagtttccaaataaaattgggtggttgaagagaggctggatccctgtagacttatccagccatgagaaattgccttttttacaaagggaaatagggtgctcctgggcatcacattagcacttaaatacatgtatcactgaatccttctaacaagaagggaaacttgccgagagaggtgtgcccgcctgcctgcctgcctgcctggagtttgcacttctgcctcctcctggccctgggtgcatttagttggtgttaagggcatggtctgctcagtgctaccaggaacctcatgatccccctgatgggcagaaaacaatccaagagaaatgcagatgctgtgggtgcatttgagcttgggctgcagggggtttgggggagagggctgggctacagtgaagaatgcttttcaaaataaaaaaggaaatgctggctctgaatggaaaggaaaggaacagcttcctgtttctcgtggtggctttttgaaaggaggagctctttctggcctcttggcaacggaggcctgggccggctggggccactctaggtgcgctggagtcgaggctcccacacgctgcctgaggtttcagaaagagcgctggttccaccccgtttcattttccccggtcgctagtcaaatggatgcatgtggtttccaaaacgaatatctgtacctgttacaaaatggatggtcataatgggtgacatttacttttacggcaagcttgctttgtgcctggcccccttgttagctttatgtagcatttacttttcacaacacccttgtgaggaaggtcttctcgctgtcccattttacagatgaagaaactgaggcacagaggggttaagtgactttcccagagtcacaagctaaggagagactgagctgtgacttgaacccaggcagtcttaattccttgcctttatacccagcttggatttgcaaactcctctctccgtccagctggaaaatctgttagcataggtaattttgaagactctggttgcctttgtctaggctctggggggtagccccaaaccctggccaggccatagtgattccttggtgtgtagcgggcaagggagaaacttactttttgcccttgaaggtttactgaaaaattaactcacaacatatagatgactaagagaaatggcatataattgattctccctggtgtatcacagaatcacagagcgattacttaatatcccagtgggaccaaatatttctttgaatgttcctaagagatagacattatcttgtgaatgggtctcttaggtgtggttgcgtttttggtcttttttcctgcaatagataatgagataacagtgaggggagaaaaaacaatccttggtccgtggtgggtccatctggtcattttatagacaggggaaagtctctttcagtgtctgttaatctctaagggcctttagtttaaaatgctcattatatcaagagctatgttttgaggtcaagttccctgtgctccatcaggtgaaatgcctaggtctgatttatgttttgtttttttttttttttgagacggagtctcgctctgtcccccaggctgtattccgtggcgcaatcgtggctcactgcaagctctgcctcctgggttccattccattctctgccacagcctcccgagtagctgggactacaggtgcctgccattatgcccggctaattttcgttttcgtatttttagtagagacggggtttcaccgtgttagccaggatggtctcgattcctgacctcgtgatccgcccgcctcggcctcccaaagtgctgggattacaggcgtgagcactgcgcccggccatattttttttttttaactttatcatggaaaggtttaaacttgtaaaaagtagagagaatgttgtgaccacctctgtgtagtgattacccagcttcagcaataacagctgtggccaattatttttttttttttctgagatggagcctggctgtgttgcccaggtggagtgcagtgatgagatctcagctcactgcaacctctgcctcccgggctcaaacaatctcctgcctctgcctcccaagtagctgggattacaggcacacaccaccatgcctggctattttcttatttttagtagagacagggtttcaccatgttggccaggccagcttgtgagctaagcaatttacccactttggcctcccaaagtgctgggattacaggcgtgagccaccgtgctggcctgtggccaatcttgagtgatctagggtatttatgctctgttttggcgatggtgccctgggcagttcgtctctaggaagcagagtgacccagggcggtcttctccagccatcccttccaggctgagctgtacctatctcagcaggctgggaggaatctctgtgttttcctataaaaggcagttttgattattttctcctaagcttgctctggcttctggcagcaggtacatgcagagtgtccatctcactatctaacctgagtcccccgccgcacctgaaacctgttctcgacggctgggtgctttccctgtcccacagcagtcctgccagagactgagatgagagttttaacgaagcagggcccccagacccagcggaatcccactgtgcacatcctgatttccagtcattcttgcccatgcctctagtgtctcttcccttccttttccttgttgcttgttcccatatgagataagtgtatttcagctaacattgattaagcttcactgtgtgtgggccctggaggaagagctgctgagtacaggaaggtgctattctctgggagccccgggcaaaccctcattctgcggttccagcctggaacccggatccagcacctgtaaaagtcttccttgcccttcccgctcttctctcgaggctctgcacagtccttcctgaagcctagctttgttgaccactttccatttcttttctccgtggtcttttgatcccaacaggtagttttcttttggttgtttgtgtttattttggcttttgctgtattctcttgcaagcatttctcaggtgccgagtcacttttgctggctgtttcagtctctgagtttggcctccacaacacaatcgtgatgtcactatgggaagagcccctcaagcacttggtaggacattgaggcgtgcattgagggcgccaggatgtgggggactctggggtgaggatgacatattcgtattctgactccattccttgccagctctggaccttgggcaagttctttagctctctggacctcagttttcttgttagttaaaaggggaaagagtaggttaattttggattcttttgagaaccaagatacagaaggagtgctggacaggcctggtacttagaaggagttcagtgtttcccccactgtcccccgcctttcacgtagcatactccaaaacacttttccatgtttccctattatcttccttttggtcattttagttgcccatgagagtgtgtctagtggatctgctgtaatttggcaaagcattttccgtgttattggcatttcagtagtttctagatttctgcaattataaacaatgtgaatggaatcgtctttattaggcgctttatttttgttcctattctgaatttgttttcttgggataattcccaggaatgaattactggatcaaagagcatggagatggagtgtgtgtgtgtgtgtgtgtgtgtgtgttgtgtgtgtgtgttaagacttgccaaactgttctcccatttttttttttttgaggcggatatcgctctgttgcccagactagagtgcagtggtgtgatctcagttcactgcagcctgcccttccagattcaagtgatccttctgtctcaccctcctgagtagctgggattacaggtgacaccaccatgcccagctaagttttgtttttgtttgtgtttttttttttttttttttgaacagactctcgctctgtggcccaggctggagtgcagtggtgcgatctcggctcactgcacctctgcttcccgggttcaagcaattctcctgcctcagcctcctgagtagctgggattaacgtgcccgccaccacgcccagctaatttttatatttttagtagagacagggtttcacctgttggtcaggctgatctcaaacccctgacctcgtgatccacccacctcggcctcccaagtgctgggattacaggtgtgagccactgcgccaggcctaagttttgtatttttagtagaacagggtttcaccatattggccaggctgatctcaaattcctgacctcaggtgatctgccaccacagcctcccaaagtactgggagtacaggcgtgagccaccacacctagcccctccattaactcctgttgaatgatagctgttttaaaaattgtactcctgggtaagtatctcatatttttacaattctttctgacctttgtacctttcttcttctctcctttattctccccatttttgaccttgttagatattccttatcttgaatttgctatttctctcttctgtgcattcatcagtgacttttttttttttaaatttcagacagagactcaccctgtcccccaggctggatgcagtggcacaatcttgggtcactgcaacctctgcctcccgggttcaagcgattcttggcctcagcctcctgagtagctgggagcacaggcacgcacactacacccagctaattatttacttttagtaaagacaggttttgccatgttggccaggctggtctcaaactcctggcctaagtgatctccctaccttggcctcccaaagtgctgtaaaggcgtgagccaccgtgccggcccactccagtgacgatttattgagcatctgctcaatatcaggtttgttttaggcactgtttaggcactgaggaaggagcaaggaagaaaatagagggcttccttcagtggaaagagaagataatacacatgccaaacagacagacgtgctctcagaagaaaactggaagtgggttaagagaggtgggggtatggaagaggtgacttctttagatggggtgatcgggaaaggccttccagagagggtgacttttgagctgagtcttgaaagatgagaaggccactgtagcctggagagtgttcccggcagagggactggcttgtgcaagagccctgaggcagaatcgagcttgggtggtcaagggccaggaggaggctggtgtgcctggaacacagtgtcaggggaggatggtggccttggggtcaaggaggtaagcaggggcatggggctgttttttcagtgctgggccgcggagagaattaatgcaccaactcagcaaacaggtgtcctcctacttccccctccgccctctggccgggtttcgtgccaggcactgttctggaatataagagtgaatgagagatgtatttgctccagaaagccagcttagtgggggagtttgtggatgagtaaactcatagaaggtgcggtgaggtgtgaatgaaggctcatcaggccgcgcagctgactcatctctgtactgaggttgtagggacttgggaaatgtgtcttgatttgcacggaactgtgctctgtgctgtcagcctcaccgtggtaactgaaactcagttctctgatgtaaagcctggcagtcccggcctgcttggggcacctggacccctgccagggaaggggtcctcagacttgaggttgccagctcagattggggctgctgatactaggtatgagtgtctaggctcccagttatgggaaacaagaccaaagacagccatgggaaacccccttcttactgagctgcctgccctgaccctttctcccctgctgcggactctgatttgtggctctggttgggaatgtagatttggggacattgtgctcctatgggtttcttcccgtaggatggggcaaagaaggggttatgagattgagcagatgcttcgggagtctagagtgtactcacatagcgaggtgtggacctcatgagagtgcctggaaatacctggtggaagatgttggcaccatttcgtttggaggaggctgaatgactcataagccccgggggctctgatgtcattgaattaggggcctcctttgaccagggttaaccagcaccttggttccttgcatgtaagcttgttgctattaaataaatgggaagtgggctgggccccgtggtcatgcctgtaatcccagcactttgggaggccgaggtgggccgattacctgaggtcagggaccagcctggccaacatggtcaaaccccgtctctactaaaagtacaaaaattagccggcatggcggtgggtgcctgtaatcccagctactcaggaggctgaggcaggagaattgcttaacctgggagacggaggttgcagtgagctgagatcatgtcactgcactctagcctaggcacagagcgagactccatctcaaaatgaaaataaaaaaaaaatggaatggaaggccagaacctgggaatgtatcagtaataactcagggccctatcccttcctcccacagttatggctatgtgaagtggacctgcccaggttttttgagacagggtctcgcagtgtttcctaggctgggttccatggcaccatcatggctcactgcagcctctgtctacctctctggctcaccttcacctcccagatagctgggaccacaggtgtatgccaccatgcccagctagtacccaggtttaggcagcaagattctgacagcagttctctcagttaatttctcagtaatgataactttatagcccatgtaggtgatgaaataaggcccaaagtcacacagtaactggtggagctgaatttctgaatttccatttgtgttcatttcattgccctctttagaaatttgcttgatcttgggcttgttcagggcagaaagagataatacaaggctttggtgatgcttagcattttagaagagtaatgctgggtggaaatggatttggcagtctcgtttttcgcatcattggaatgggagtcctcacagttggagacaggatgaagtaacagagcgtggggatctggattaacaggtggcattcgcagaaaggaggctgcaaagcaagaggtgggggcttctggctgagcaggaaggtggagaggggcatccttgtgaggagcagcctgtagggctggggtttgggcagcaggcaggcgaggactttatctgatcacctcaaataattttgcctctgcttggaagggttctagctacaaggcaacatagcaggtagtgcttgggtgtgatggtgataggcacagcggtattttaaaactggtggtacattttaggagaaagaaggtgacgagtccctggggagagtccctgtggtgccatgactcaccgtggcacaggggacagaacagaacaaggaagaatccatcaacgaatgaaacttgtctttttaggggacaggaagctttttttgtgtggttggcctggtggcttataggagaggtgaacatttgagacaaaaccccaggccactcttccagctgcatctttgacattttgagagttttaggaagtagttaaaaaaagaaaaagagaaaccaaaagccaaagacccgtttactcacaatacctgtgtacagccagccatgtgggctgcgatcggccatgtgtctgaggaaactccttcacttgcatccctccctcctagacccctaaaccagagggggcttttactattcttagaagaagacttaggcggcctcaaatgaccagaccttgtctcaagcatctacagcttaggccaaacttcctctctggccctgtttggtttaagcagtttcctggtctggaggatttgttatcttagcacccagcttgtcaaagccgtagtgctacttgttatagcaaaaggcccctgtcaccctgtggctgcaagccaggcaatgcttatgttccaaaagtcagaccgctgttcttactataaagctctgctggaccatgggtggcttctatctttggatgtaaggtgggaggatgagcagcacctcatgctgtgtaagagcacaggttctggtggttgacagccggattcaggctgcactgcctttctggctagctgtgtgtctttgggcaagttgcttacccttctgagcaatagtttcctcatctgtgaaatggggattataatggggtcgtttttcatataagtaagatgagccatggaaaagcacaatgccttgtgcagaatgagaatatttttatatataatattactatttattttatcgacaagtgtttaattagcacccattagggactgggactattcttagctctggggaaaatagcagtgaacaaaatggacacaaatgtagaccttgggaacttacgcttcagtgttgggaggagacattcagatgacaagtaaatatcacctggatcccagttacttgggaggctggggcagaaggatcacctgagccagagttcaagaccagctgggcaacatagcaagattcccatccctaaaaataccacacacacactaaggaaaatgtttatctgttaagtggtaaaagtgctgtggagaaaatgaaagcagggaggggtgcctagaggtggtataatttaaagtgaggggtcaggatgggtttgcagaggaggtgatatttgagtaagacctcaaaagggtagagaagggctccatggggatacagctggaaaagagctttggagctgagctcatgtggaagccaaaggggagtgaaccagggttgttggaaaaccctggggcaggggtgaggccacaaggggccctgggcatgacatttagggaggtgcttgctttccagtcccactgcactcacgggtctctgagcacaggtgtgaaggagggaagagtaatgagaagaaaggtggtgagaggtgctgtgtttatgtgggctctgcctccatcctgtaggatccacagtgattttgaaacttatgtcttactaaaaaatggagttttggggctggcacactaacctatgacttacagaaagtcactttctgactgcgtgggcaggtgacagagcgctggcccggggaggctgaggctctgccactcactgagggcgtcaggtgggtgagccatgtttattcatccgcagcttttacagagctcccacggcaggagatcatgctggcacctgcccggtattactccttcatctatgacacggggacagcgatgcccttccgtccaccccatccttacaggggtgtcctcctgaggcaagaatgcaatagaaaagcaaaacagaatgtatgaggctatttgcatatccataatacagaaaaaaatgaaaataaggtagctgtccagtggtaaggggaggtttgcagaccatggcacagcatgcgatgggtgggtcatcacacacacagatgtcagtgacagagctgggtaagaacatgagcatattcatactgttacatcgaggaaaaatacacagtatttagattgcatgtatgtggcatttgtagtcctgtaaatatgtgatgatatgtatgcatatgggaaaactagaggtgaaattgaaatgagttatttgtggtgggactgtttttcttttgcaaaattcctttattattgctataattgcattccttcatttattaaagtaatgaatatttggcacctcctagctatcaggctctgagaaggtgcttgggtagagcagtggactggactgccggctcctgccccggggggaccatgctcagtgagcgattcttgagcccccaccccttctagcgctcaaggattgaaggctaatgaagtggtgcaaaattcaaactttctggaataaaaggagagttggtcctccaggttctctgcagggcgcttgttgagccagtcccagattctgcgagaaacagggaagtttccagagttgccaccccctcctgagggtagagaactcaggggtgagctggcttggcaccaaaagggctccctgagtcttggctgctgggacttgagcagtgcggggcgctgccggtgagctgtgatcccatcttctcagggagcgcccctgcctgtttgacgtggtgccgttggtatgagaggttgccccaggaaggagaccgcagctgtgggctcatctctgggtgcccaacactcacagggtccacattgcccgtgatgtgccctgggaagcccatgttgactcagaaggactgaaatgttagacagccacagatggtcccactgcccccactctggaaaagccctctggctgtttggatgagggtggtggcgatgaggacatttgtaactgcagacacatgtaaggcctgctgtctatgttctgggctctcagatagcactgggaatactgtacccaccagtcccctccatgacaggaaaggggtcccgatccagaccccaggacagggttctggatctcatgcaagaaagaattcagggcaagtccatagagtaaagtgaaagcaagtttttaggaatgtaaaggaataaaagactggatgctccacagacagagcagccctgagggctctggttgcccatttttatggttatttcttggtgatatgctaaataaagggtagattattatgcctcaccttttcagaccatacagggtaacttcttgacattgccatggtatatgtaagtgtcatggcgctggtgggagtgtagcagtgagaacaaccagaggtcactcttgtggccttttggttttggtgggttttagctggcttctttgctgcaacctgttttatcagcaaggtgttatgacctgtgttttgtgctgacctcctgtctcatcctgtgacttaaagtgcctaacatctgggaatgcagcctgttagctctcagccttatttaacccagctcctgtttaagacgagttgctctggttcacatgcctctgacacctctagctgccctggaaacaccagagtttcttcttacctcctattatacagggaactgaagcccagagaggtgagttagactcttgaggcacaccagtggtgacaggctgagattagaattgtagtctggctgatgaccaagcccatactttgcagtttctttgtcacagctcactggactgtggggtggtacaagttaaaaatctgctacatagggaaaacggtgatgtatagacccctgtctgcctcctgctccacttccggccatccctcccagaatgccatcatagcccctccacttctacgccagatgcttcaggggaagtccctgttctcttcttttttttttttttgagacagggtctcactctgtcacccaggctgagtgcagtagtgcaataacagctcactgctgcctcgatttcctaggctcaagcaatcctctgcctcagccttttgagtagctgggactatagatatgcgccactacacatagctaattttttattttttgtaaagatgaggtctcactatgttgcccaggctggtcttgaactcctgtctcaagtgaggccaaggcaggccttggcctcccaaagtgctgggattacaaggcgtgagcaccacacctggccttcctgttgtctttgagggagactaaagccctctagcttcaaagaaggagttcttctttctttaaggacagactatgtcatgacctttttacccagaaattccgggcttagcccagtacttggcacacagtaagtgctgaggaattgaacgagggttctggatatgtgctttaatcagggctaaactaacctcacagcattcctaggaaaataacacaaacggtataaaaggggatggtgtcagggttaggagtgtggcctctggggtcagacagcctgatgtgactgcgcctgtgctgtggacccttcttaccttggtcaagttattttgcttttctggttccagtttcctcatctgaggaatggggacatacgaatggggacaatgtcatacctacgtttggggctgttatgcggattatttattgttttttgcatgacgtcaccacattggtcagagatgttgtgaggattaaatgaatatggtaggtggagtagggctttgtgcccagtaaggcttgataaacatgagctgtccattattgttctctggggagaatcctgtgcccccaggttgggttcccatcctgtctgtggcttcagagtccagacctaatgccaccgacctccttgccttcctgcacccctaccatggatcaccattggaggagtggggttgggggcttatcacccaggaagattagataaattgggaagtggggaagtcttgggcagactcaagacccctgagtccagctttgtcatgctgtgaccctgggcaggtcccctcctgggaatccatttcctaatcgtgaaataagcacgactgttgctggtgtcacgagaacatggtcagtgccataaagcatgggcgggtggacttccatccatgctcctcccttcatccatgctcctccctccattcatgccctccctccttccatgctcctccctacgtccatgctcctctctccctctgtgctcttcctccctccgtgctcctccctccatccatgctcctccctccatctatgctcctccctccctcatgctcttccctccatccatgctcctctctccctctgtgctcctgtctccctgtgtgccctccctccatccatgctcctccctccatccatgcacttccctccctctatgctcctcctccatccatgctcctccctgcatccatgctcttccctccgtctgtgctcctctctccctcatgcttgtgcatctgtgctctgcccctcctcccccatccatgctcctcccttcatccggctcctccctcatcctggagtgccagacccactgccaatcttatgtgagttcacataaccacatcaataaggcgagagcagatgggtggctgggttcccgttctcgctgcagcatcccggttgcacccctcacctctctttgctcttccttttgttccttctgaggcgggtgtagggagggaggaaggtgccgctcctagtgcaggtgacagggatgggctgctctgacccacactgccctccacctgctttctttgctcagttgagaccccttcatctccttcaagtgctgcagacatgagacagacgcttggacttcccttgagagctgggcatcccagacctctgttgcggctccagggagtgggtaggttctggttggaaggaggaagggcttcaatgggatgtgagcccaagcacgggagagaattacatccctgggtccagatggttgaaaggggccattcctgagcatctgcagaacaggtgctgtggcatgagaatgactgactaacagaggggtggcggcacacacagacattagagggtgacctgtgctgcgggggcacctgggttggaccatattctctgggtgtgtgtgaatgtatgtaggtgtctgcctgtgtgtgggtttgtctgaatgtaaatagaattcttggtgacattcagggaaaagtttaatgataaaggggtcttttaaaatgcaagcagctcttttgcatcatctgcagagaccattgactctcattccacttggggcaaaagccaagtcaagtccctagcttctgtccttcaccccattgctcatcctgctccagccccttggccaccttcctgttctcacatcccctagatgcccccaggcctcctccccttgcctccactccagagtgaggtcttctctaagcagcccatgtaattgtgaaccctcctgcctcccccactaacacatactgtggtattactgacttgttcattgcgtgcctcacctccctagaatgaagctccacagggtaaggatttttctctttcattcactgattttcttttcttttcttttcttttttaaatttttaagacagagtcttgctctgttgcccaggctggagtgcagtggtgcgtcttggctcactgcaacctccacctcccaggttcaagtgattctcctgccttagcctccgagcagctgggattacaggcatgctccaccatgcccatctgatttttgtatttttagtaaaacagtgtttcttcatgttggccagactggttctcaaactcctgacctcaggcgatcccccgcttcggcctcccacagttgtgagccacagcacctggcctattcactgatgttttacctcaactcctaaacagagtagatgcttaaataatattcaaatgaatgaaagaaggaacaagcaagttactaagaaaactgccaaggcctagtgcagtttgacactcagagcccagtagacccattgagtagttttccgatgttggaaataacaccagtggatctgggctcgatcctcttagtcgcatgcgtgtgtgttttcttcttttgtatcagccaggataatgcagggtgtgtccaggcctctgtgattaaggtttcagtaacactctgatgtcattttacaaaacaaaacacctttgatggaaacagcttattgtgtctttagcttttgttgtttttattatttacatccttgactttgttttttggtcaaatatgccagagacatgaaaccatatacctcaacaaagcctgtaagttagatactcagctttgtttacacttcaggtagtttttttttcttaaaataaaattttatttttgggaatttttgtgagtttcgtgattcacatactgctgtgagttactcttggactgctaggttgggaggctgtagacctgggtctgccgtgaactgcttttgtgaccagcgtcctgagccccagttttcttgtttgtggaaacaaggtgagggaattggactggcgatttcttctgaagtctctttcaattctttaattctgtctctcatgggccaaactcacaagatagtaatttaagttcatagcacatacgtgccatattttagctgataaggcatgctgaccttgtacataagatacacgtaggtactgtggcccttcaatcacgagtcagcctcatgcttcctgtcgtgtggttgtggactgtggagccaccagccttcctgcttgactctctggtactgccagcatgatgagtggggccacctgcacttatatagctatctccatgccatggaactcatccttttgggggttcagcttcagggggtgcagtggttttaggttacatggatgaatgtagagtggtgaagtctgggattttagtgtacccatttcccaagtagtgaacattgtatccaatatgtagtttttcattcctcacctccctcccactgtcccttctcctgagtctccctgtccattataccagaactgtagattttattgccagagtttgaagctggtgcccttggctttggagacgatttggtttaaatcctgagtgctatgatgctagttgtgttcattgattgactctgtatgttgaaccttaatttctgtcatccatcaaatgagggcaacagcttctcttgaatgtttttgagggttaaatgttatagcgcatgccagctgcttagtaaaaagcataatgttgttggtggtgctgagaaagaagaactattatgatgtgggggtaaagaacatctccggccaggcgtggtggctcatgcctataatcccagtactttgggaggccaaggcagcaggtctcttgagaccaggagttcaagaccagtctggacaacatagcaaaaaaaaaaattatagtatataaaaattatatccatggccctggggttgcaggagcagggattcactgtctgcaaacaccagcaaggagaagcccccatcttttggagttgctgaggcagatagtgagcctgatgtgtacgacctctggtaactgtgctgcaggtgggaacaacccattgtttacgtttatagatgctagctcaataaagttacatgagtctcggcactggagatttgtgttaaggaccaatatgatttaaaaataatttggccccaggatgttaattgcagcattattttatactgatgcgaattacaaatcacctaaatatccagtatcctatacctacaaccttgggatagtgtgtagtaaaagtaaaactggagcacatttagacctatggcacttaaaaacagcaaacatttgtataaagaattactacttgagaagatattaatgatgaaccactaacaggcaacaaaacagttaccaaacagtatgaccccagttaattattataaatgaaataagtggagggaaagtgaggaaatgcatacagttgttaaaggtgagtggtttgtccaccatcagtggatagtggccaatacttaacttattttccttttttctttcccaatttttcaataaacctacatgtctcggttggggggaaaatcatgtcatccacaaaaaaatattttggctggattttcagtacttcaaatgtgacagacatttctcccatgttatttttgtgcccactgccaagttttaaccattcattgcgcaggccttgtccctggcttaatgtggttatctgctcatgtgatgtggtttgatctacaggtaaaaaaatagattttttttttcaagtgtgtgaactaggaacttgagaatgtgagggagaaaatggaaaattcacatagcaactcatcaacaggttttttgaagtgaaatatgtgctcttaaaaataatctaaaaccaggaaagagcacgttagagcctatcagctcagtgtgaggtagaaatcacagacccagctgggcacagtggctcacgcctgtaatcccagcatttgggaggccaagacgggtggatcacctgaggtcgggagttcgagaccagcctgatcacgtggagaaaccctgtctctattaaaaatacacaatttgctgggcatggtggcgcatgctgtaatcccagctactcaggaggctgaggcaggagaatcgcttgaacgtgggaggcggagttgcagtgagctgagattgcgccattgcactccagcctgggcaacaagagcgaaattccaaaaaaaaaaaaaaaaaaagaaatcacagacccatgcttttcctctgtgactttatgttcatttctttcttaggtgactggactgatgttctgttctagatgaaactccttgaggggccatttgaaaaggcttgatgtgctgcccaaagcccccttcagagctgacttctccaccccagctgccgtgagccttggctgctgacagctcatagctgagtccctcccgtgaagtcacttctgctgaagggtacatcctctcccaaggtgaccccctccaacgtttagtgtccattgaataatgcgtctacaaaaatagaccttttgaaggaagagataaggaaagctctattttctcctgcagctctctttgagggcctctggatgggaattcctagatggagaactccctgtgtgcagtggtggagggtggggagctggggatgtgtctctcttgtatctgcagtgccaggttagaggaggctgacttggggtgtgagaaatatttgctggaagcagacagagagcagtgagtgccagtgaccttggtcagtcccagtgttggaggctccagtggggagccgcccttcctcgaggagggttctgtccttttcacagatttcagagagtgataataatacttgttatttattatttagagacaggttctcgctctgtcgcccaggctggagtgcagtggcacaatttcgctcattgcaacctctgcctcccaggttcaagcaattctcctgccttagcctctggagttctgggattacaggtgtgcaccaccatgcccggctaatttctatatttttggtagagacgagtttcaccatgttgcccaagctggtcttgaactcctggcctcaagtgatctgcctgcccgtgctgggcattacaggcgtgagccaccatacctgaccccgttgttatttatttagtgacatttattgagtacctagtgtatgccaggcattctgacacatgtcatgggtacagaagaggagccctgatccccagcatacacacaattcctatccagtgtgatggggaggtccctgggagcttgaggtcctgcgagggagggagggcgggcaggtgcacagagagggaaacagccgcctgccttggggctaggggtcaggatctgcctctcagaggagccgaagcttgaaccttttgatcagaagagcacggaggatgctccaggcaggggattaaccggggagctgcgcagtttcgtagtggctgcagtgtgcagggagtggtacatcaaatctgtaaaatgtgtctcagactttattaggaagtgtatgtgaataggctcctttaccaacactgtcctccccacggagtggggatggaagattatccccacttttacaggtgaggagacatcccagagaggttaagacgtttccccaagagggttattggtcaagcctggattgaacctggcttcctatacctggccacttccccagcctggcaacactgcccctgcctaatacaagagagtccaccagctctcggccatggctgtctgtcatgggggcaagtatgcccaccctggactgttctcttctctcacagagtcatctcctgggttgtcagcctggcatggtgtccacatgtgggctgatgggtcaccggacccttggtctgagctgaggcagagagggcagggtgatgggtggatgctaggctcttctgtgtttggaactgctggggagacactccctctcccccactgtcaatctggcttgcacctcccattcctggagttcagatgggtggggttgggagtctgggagcaggaagtaacaggctgactggccctctgcagacagagtagatttagaggaagcccagaacctcatggaggggcacagggctatgtctttcacagtgggtttattataaatgaaataagtggagggaaagtgaggaaatgcatacagttgttaaaggtgggtggtttgtccaccatcagtgcctaatagttacttattttcctcttggtacttttttttcctttcccaatgtttcagtgaacctacctgttcacgtgttgggggcaaaatcgtgtcatcaatagggcttgtgcacagggctgtgtcttggtagtgggtggggaatgggccttggagccagccagacctcactttgccatttgctggcttgtaaccttggatgagtgacttaaccccaaaaccttgatttccttttttgtaaaatgcactctcccacccagggctgctcccccgaggattgaaagaggctctgtgtgcaaagagcttgctacagagctgctatatcttaattcatagtgagtgttctccaaacgttagttcttctattagtcttcgtgcttcttagtgtgcctggctcacagtggggtaggatttgaaaagaacgatgaactcaggtttatgagtgtttgttaaataaggaagtattagaatttggattaagtttttctggcctccaatacatgaagcaggcatggtggatttttgctgcaagcaaaaccatctgctttcttaacttcccctggctctgagcatttgtgattcttctgcacagcccttcgagattttctttaatgtaaacacactgacaagggtggtatttaacaactggagtctggtttgctccgggtacccaccgttgtcttgggtctggcatccaaggctgctgagctggtgagtctgtgcctggttggcatgaaggcatcagggtaagtgctccccaaccccatccaccccgccaatgtggttgtgactgcaaagtggccagtatgtggaactccctagtgggcttgcttggcacagtttgctgggaggatctctgctgaggacacaggagtggccatgcaggctgacaatgctggagaataaggatgggaagtgggggccctggagcccgtccacccatctgggtgtacacggctggaggcagcagccccggggatggggtagggaggcttcaaagctcggagtgccaacttgactgtgccctgtgactcctaccttgggatttgtggtcccctccctgaattctccctcccacctgagactgcagtgggggagggagctgtaggaggcacaagcaaggcgggtggttggggttggagtggcctgggaatccctggttgagagagcaggctagataacacgggactgaggtgggacacttggcctctcttcccgagtctaccactcacttgctgggcagcctttgaaggacattcagaccctctgcgctgcagtgtctttagctgtaaaatggggaaactgtcgcttgggtactttcctgatctatgatgctgaaacacactggagaattgccagtgaccttattttttagataggaatgtggtaaaagacactagaaagctgtaaaagaatatagaatgaaaagtaaacctcccttatactgtgttagtccattttatgttgctatacaggactacctaagctgggtagtttatttaagaaagaggtttgtggccgggcgcgatggctcacgcctgtaatttagcactttgggaggcctaggcgggtggatcacctgaggtcaggagttggatacccgctggccaacatggtgaaaccccgtctctactaaaaatacaaaaattagccaggtgtgatacgcacgtctgtaatcccagctactcgggaggctgaggaaggagaatcgctcgaacctggaggtggaggttgccatgagccgagatcgcgcctctgcacaccagcctgcgtgacaggaggagactccatctccaaaaaaataagaataaaaggggtttatttgggctgggtgtggtgatcactcctgtaatcccagcactttgggaggccgaggtcggtggatcacttgaggccagggttcgagaccagcctgggcaacgtggtgaaaccccatctcttttaaaaaaaaaaaaaaaggtttatttggctcacagttctgcaggctgtacaagcatggctgtacaaacataaatttatggtttttttttagaggcggcgtctcaccctgtcgcccaggctggagcaagtatagtgagcatctgcttcacttctggtgagacctcaggaagcttttactcctagccgaaggtgaaggggagcaggtgtgtcatgtgtctagacagagaccgagagaggaggaggtaccaggctctttcaacaaccagctctcacctcttgcttgaactaatagtgtgagaactcacccatgacgtggggacagcaccaagccattcatgagggatccacccccatgacccagccaccttccacagacaacacctccaacatcggggaccacatttcaccatgagacttggaggggacaaatttcaaactatatcacatacccagtcccactgcctcccagtgtccctggtcagaggcattataacagcttttagagattttttgtgcatgtgcacccataaatgtgcacatgtgttccacctttaaaatttttgaattgtgaaatatcatacattcaaaacatatataaagtttaaagatgataaactgaacacccatgtacccacaactcaggttaagaagtgaaatattcccagttctagaccccttctgtgttccacaatccttttactgaagtgagaatatgctatttatgcctttttactttttttacttctgtctggctcacatgtcttgttttttttttaatagctgaaacatttcctctatctggatgtaccattattagtagtagttttttttaagcaatttcctttgatagttacttagggtgtttccaatcttttgctgttaccaacaatgctgcaataattttctggcttccaagaactgacattaattagaatgtgctatgagaagtcctattagctgacatggtggctcactttgggagcactttgggaggccaagacaggaggattgcttgagtctggagttagagaccagcctgggcaacatggtgagtccctgtctctattaaaaaataatataggccaggcgcagtggctcacgcctgtaatcccagcactttgggaggccgaggcaggtgatcatgaggtcaagagatcgagaccattctggccaacatggtgaaaccctgtctctactaaaacataaaaattagctgggcgtggtggcgcatgcctgcagtcccagctactcgggagctgaggcaagagaattgcttgaacccgggaggcggaggttgcagtaagccgagaatgtgcactgcactccagcctggcgacagagcaagactccatctcaaaaaaaatttttttttaaaaatgtcgtgttgtctcagcatctctgacctgtcagtcctttccagagcaatacagaaaatttgcagcacgaaagccctgcatggctctagtctcctaacatgttgatgtcctgtgccctctccctgtacctgggtggtgccagcattcctgtctgatgccatgcctctctggaagccctgggggccgggcccgtgggagagtgtaggatcctcattggatcctcagctgggtgtcgccatgggcgtgcccacatgcagggtgtggagaagtatgctgatgggaactcagctgcagcttggctccaagcagagttccttttcttttgattgtgcaacatccctgcgagggatctggtctgcccttctgcttttcttcatcttcctgcagtggggaatgaggcagggggcctggttgggggttcaagcccaggccacttgagcttttgagacgaggctccttgtttttctttgttgctccatctgccactttcccttttctcttctcttttgttctttctccttttctctttttcatcccctctttagactacaattcctggtaaccctggctcattcttccatccgtgtgacaaaagttctggctcttctctttctcccccatctgaatgagatttgggggcagtagaggaaagtcagagacagtgaattggaggttggggccctagcctgcttttgcttcttctctccctgtggggctgctcttcttggtatcctcactgcctcctcattcaggtgtgtggctgtgaatgagaccagatctgcccaggaggaggtcatgaagaatccacagtagggaagatggggcccaggggttgggaggtggctgggaggtccgcagggagaaaaggaggggcagctgcgtttcaaaaatgacagtgtttccttgcttcaccaatctgggcagaaagggctgacccagaagttgttgcatacaattggttcaaagaggccaacaggccaagatctggaagcattgtgtgttgcatgtgtgtatacctgtgtgtgtgctcagacccttcactggaagatggtaaggtgtcggcaagtgtgtggactctgggatggattgcccaggtccattcctctctacctgttatcacatcctggtgggaccttacagaaataacttctaagtctccgtttctgcatttgtacaaggggctgttgagaggatcaaatgggattatccttaaaaagttaagcatatagtaaatgtttgtaaatgctagctattatatgaggtggttttgttgatacttactgtaaaagaccacagagactatctcatttatcatggaaaataaggttttgttgtaaaattatgagaaagttattttacataaaaccattttatcttccccattgttaaagaatgaagatgaacggaaccttaggttcatcctgtggttttcaaaaaccttcgccagagcaatccccctttttttcccgagtgaatcttacatggaaagccaatgtataaataaggtgaaatggaagctgtactggtaggagatcaggggtgggggttacagaatgtaggcagcaaagacctggggggtcttcctgctggctcctgagcctcattcttgtggtccagggagcagtttgcaactctaatacataattgagtgtacaaataggtactgcctttttggacggtaattgatagtattacccttaggcagctgaccctgtaaattaccatcattattgaaattgaaaatgtatgttccttaggattcagcaattcacttgtgggactctgacacctatagaaacgataggctgtacacatacaagcataagtcaaggttgttcattgtgtaaagggttagagacacctaaatgtccagtaacaggggaaagctgagtcaattttgaacttgcttaggtaaccataaaagggacaaagtagatctatggacgtcttggacagattttcgtgatatattcaagatgcagaacaatatatatagtatgatcctcttttaaaaaaccatatgtatatgtatctataactgtgtgtgtatctatacacacacaacacacatatacacacagatacacaaagcactctaatttttatgtttatttttttagagtggagtctcattctgtcgcccaggctggagcaagtatagtggcatgatactagctcacgtagcctcaaactcctgggctcaagtgatcctctggccttggtctcctgagtaggtgggatataggctcatgccaccaatcctggctaattttttgttagtggtgtgtgtgtgtgtgtggtgtgtgtgtgtgtgtgtgttgggggtggggtaggggcgggggtggaatgtctcgctttttgcccaggctggtcttgaactcctgacctcaagtgatccttgtgtcttggcctcccaagtgctgggattacaggcacgagccactgtgcctggccacaaaacactctaatgctcattctttaggaaccagctgggaaggctacagaccaaactcctaatagtacttacttggggggtagaggggaaactggtgttttttactttatagttttcccctgtccacaaagggtggtacttgtgtaatttatttcctagttggtgttttctttcaaattaaaaaggaagggaaataaagtatgctggtcatcatagaggtgagaaaatgactcacaagggggcggtggatttgcccaggtcgcccaggtctgtgtggggaagtggccggctgtttagtgtgtgcagcaggagagctaggggctccgactgaagttagtctgctgggaggccccttgctcctgccttgtttttgcctcacaggctggctccagggctacactcctgctatactctgctcaccatctgttaagggacagttggtaggctgtgagcagcgcctgcctccctcccatgtctaatttaaccagtcaccttctctccgtcggcctccaccaaggctgtgggatcattctttaattacttacaggggtcgtcacctgatgggacgcctttgctggagacagacggtactgacaagcagattagttgcagttgggaggtgggaggagggaggagacgaggagagtgtgtgtagcagatacgagtgggtgcttcaaaatagaaattcatgaaggctctaggaaagtaattttaaacactgttcatttaaggctgtggttcaggggtgagcaaagctggaggcagcccacccagcacatgttgaccttctttcccgtcagacttgggagggaggaaggcaggagtctcctcaactcacctttgcagactctgaaactgggtctgttcaaagttacacctgctcgtttcttgtgcccgtgaattccttctaggaatgatcaggcatccataggcaagatcttcctcgagagtcaatagacctgagccaaatgtcagctctgtgtctgagctgccatgtgaccttggacaagctgcttcccttccctgcttgggctgagtttctaacattcccaactcaggggatcaaaagaggtgagtcctgtgacttccacagctctagaatgttctgtgagtaatatgcccctacttgctgtttgcagggagcagccatgagttagataaagccccggaattcgaggcatccatcccttcatgctggccacaagcagacctgtggatgttgacttgtctcttgtctgcccatagatgttggcttggaatgggaggaggtgggacttattttgagcccgagttccccatgtacaaaatggggctaacagatttgtcttgcagggtaatgaggatttgtgaaaacatggttgaattcctggcacatggtggtgctcattaaatggtgttatacacttagtacttggcattcccagccttactttttgttttgctggaaatatattccatgcggggagggaaatgggaatgatcttactttatagatgcacttcatagaaagcattggcactgggattgccagcctttcccaaagcagtgtgtgttcttcatcattctgctgatgatgatcatttatggagcaatttactatgtgaggtacatgataccccagtctcctttaatcctcgtgaaaccctatgaagcaataagggactattattatcacactttatacatataaatgaagaaagtgaggctttgtgaagttgaatgatgttcccaagtcacccagttagtaaatgctgaagctggagtcctcagtcttagttattaatgtaagctgcttttcaggacagagagggctttggaggaccaggaagggctccaattctgaggcaaagctgtgaaacaccggggtcaggcaggaaatcatgcccttgaattctttaacagggcagatttttaagtcagagacattaacgatcagctccgtataatgtttatggcctgtgtgaccctccccgtggtgctcggtagaccccactgcccatgtgtgcctgatgattccatttctgtctgcttattgcaagtgaccttgaattacctaaaacccagggaaatgtgttcttaatctgccttttaacaatgctgattttacccttccaactcagatttaaataacctttccttctgtgtgtcgtgagtgtaaagaagcagcatcatgaaaaagcccagccctaaactctctgtaattaggggtatggtggagagggaggggcactgaaaaggaaataatggggtcgtgagaccattgaaattgcactggttatattcagtagcagagctggagatttttgcctgctgctgggaaaatttaaaaagcaaaacaacctctgcctcagccttggaggtttagctgttgaatttactcctttaatttgaggcacctgaggctcccattttgtggtgtgattggctggactttccaccattcttcctctctctggccagagagaaacttggggacgctgaggtggtttgtagcagctgcatcaatgtccgcctttcatgtccacagtggtttggagcagaggcccagaaatgcttgggagtctctgtgaattcagaagaagtctccttctcccactccgctgtctgacagcaggttaaaaaaaaaattacaaagagcttccaggaacaaaaagtggagatgattttttttatggccttaaagacttgaaatttgcaggagaaatgccgtgtggttgcgtaattctatatgtggatatctggaattattcctggagaggcgggcaagcacccagattagagatgtgtaaagtgcgttttgtcttgcagtccaagcaggtgagcattcaggcctgtgggaaggaaggaagggaaagcaggtggcagtaactgggaagcttgcctctgagtgagattaactagaatgtatttttcgctgcatttaaagagccagtgaaaggggcagatttacccagggtcacgtgcctggtcatgccttaaatggacccagggtgtcagccccctctgcctcgacttcaacagagttaatgttccccagagactaatagagggaccgatattagggattccggggacaagtacgaacaggttttcgatttacatttaaaagcagtagagagcaggaaggagatttctggcatttgtgcagttaaaaaccaactagacaaaaaatcttgatggagctgtttcccaatcagcctggcagtctctcagcattgacgtcgtgagaatgaaagcttctctgagagtgccattgggcggtgtccttccaagttctccaggaagcaaattttggaccctggccgctgactcagtgtggcctgctggtggctccctgtgcctgggaggcggccctgtcagtgtccctgggctcagcccataagcagtgccccaggtgatcctgctcccattcagtgactggagaggcagagggaaggggctccgggcagtgcgggttccaggtgggcacagctggtaagccgggcggctgggcagggctctgttcaggtgtgcagagtgggtgtgagttctgcacagcacaggaggtggtttctgcccttaccattgggcagggaaggaagcttgagaaatcagacttgattttagcaggacaggagctttgggcttctgaaagaatgcacgcctcagtggtacagggttctgggggtatatgcagcggtgctcctctcctcctcccctgagccctctaatactgatctcgcactttcctggccttgtcaacatcttgggaggcagaaaagcatagtttatatgtgtgcttgtctttatacaaggcttgtgtgtgagtgtgactgtgggtgtttatttaactcaagaaaagtccaagggacccctccacagaggaggtgaggtgcattggacaacctgggccaggacttggaggacatgtctgcccgatgatgacttaggcccagtcccttagtatccttgggatatagccccctgatctgcccaaaggtggagttgggcgacaggagggaggcttggagatcatttctcgtgtcccttccagtctgaaatctgtgagcaatgttgtccagtaaggctgtctctaccaggtaacacatgactccaagtgggtattttaatcactgtgatttcagaataacagggcgagctctcacagagcatcattgcttcatcgatcatgcagtccctgtggaacctgagttgatggcgggtctacagtagttcagtttacttgtagctgtcattgatcaggtgcaaacatgcttttcaaagcctggatcattttttttaagttggatcatatttgcttattataattggtaaaatttgagtgttgccctaggctctcagagggaacagtttggaaagtgcttccttccaagaagagacgagatggactgcgcataagcctcctttagggttgggtctttatgcaggcagatagtaagtgcttctgaacgttttgagttctgccccctactccatgagccgccgcaagatctggcttgttgggactcatgggccagtggtcaggcccagcattatgaatctcttttggccaagttcctgggatggcctgtttcttctttaataactgcagtgtgaaacaagtcttattttgagtaagagagtaggccccgggtggcgtttttgtgtttgcctaagggagatgcctcatctccagccacccaatgtgactggagagagccatgatgctgcttttgtttgtctctaattacacttaataagagggggcaagggaggaaggcataagagtgccatagaaactccaatttcccctaaaattagaaccctgaaactcatgagttgaatagaaaaacctagataatttgccgccccctttctctttttgttcaccttgctggctgattctgcctgattttaagtatttgaaatatgtctcagcagattttctggtcctctttcctcacctctcccctcccttccaacagaagggaggccccctgtggtcttcttgcctagctgggcctcctgtgccccagagcgagaatctgagaacgcagaattgggttgggactgtgggaaatttgcatgtgccatggtaaccagcaaggggatcctggggatctcaggttaatgattaagccctgagccttcattcaagccaggcagtggcagtggcctcaggatttgcagccacctgccaaacgcagggcctcttacttctgttagcttttcagccgagtgaagatggaaactgtcttggagggataccgaggggctggccgtgtgctagtgatttgctagcagccacagccctgccgtgtcctcctctgagatgagagtgtgggccagcagttagaactctgaggttcagctttcatcaattgcactcagttttaaaagctcacatttgttttctttttgcgtaagcagaaagcatccgacccttcctgctctggtgttttctaggggcgcagtaagtgggcttttcctccttccctgttgggcaggagaatgcggagctgctcattaagtcagcagatgagcagatatttggtcttcagctctttcatttccacctctttgcgatagagacagcagacgttcccaaaaagggcttgcggtttatgttatcggtaacccatttcatcttccagatggtgagtgaaggaccttaaactccatacagagaaacagaggctgaagctgggaagattgaataaccagtgccagggtgggcttcatcctcttatcgtgggaccagctgtccagtgactttcacttgtcggtactgcagtcctttctggaaaatgtcctgggacaaggaggtgcccagatgtggctgcattaattactgtaaaccccataatgaagaagatgtctcctacagccccctttcagtccttgaatggcctctaggagaaagtctgaatgtgacctcccttctaaaaagcaaggagtgggaccaggaggaaacaggccgcaggatcccggccttctgcagcagtggggccccaaatatataataatgttgttttgtttcagttatgcttgtttttatggaatcttctgtatggcacagatactagtgtctcctttatggcaatgagatagtttctttttaaaaagtgagtagatttaagagaaaatattaaataatagtactggtggcatatgccagcttgatgaacagcccatgtttgagaaaccctgtttggctgcagcaacacatgtgcagcaggagggccagcagtattggtgaggaagctccaggagtgactgagaaagagatcttactgaaagtctggcagagtcagtgcgtgcacagcaagaccgtcacggtggcagtttctttccggatgggcaggcaggtttgtacaggttttgctgcaaaaatgaggagtgtgtgtgcatgtgatactgttttttccttcagtagcagtaatattttacccttaaaaatgcctcttgaggctggagcggtggcttatgcctgtaattccagcactttgggaggctgaggcagatggatcactgaggtcaggagttcgagaccagcctggccaacatggtgaaaccccgtctctactgaaatacaaaatttagccgagtgtggtggcgggcgcctgtggtcccagctactcgggaggctgggcaggagaatggcatgaactcgggaggcagaggggcagagggtgcagtgagccgagatgcaccactgcactccagcctgggcaatagagtgagactcagtctcaaaaaaaaaaaaaaaaaaaggctcttgaccaaccaactctacttacacacaacttgatgtgacaattctatttgataatttcaaccacagggaaacagctcaggagtttccaagtaaaaagcccaatggggaaatctccttttcaaattctcccactttccggacagtccagtggttctcaaacttttgtcttgtcagcattgcttggggaagcttatagaagatggaggacccaccctgctgcacccagtaggcctctgtgcgctgtttctcccagggtgatcccgataacactagtgtttgagatcgggcccaggttgtgagtcccagccctggctgccattagaatttcctggagactgttaaagtattgaggcctggatcccaccctagcaaagccccactggaatcttggggtggggcctggcattggaatttttaaaatgcgcctcaggtgatgcggttgtgtgggcaggtggagactcatggctttgatggagactcttagggaaactttaacgaacatgtgggaatgctttgaggaaaagcaaagggcggcatgaggcactgaaagaaatgagtgcagctgcagaggaaccctcagtctgagttaggttttgaggacttctatgaaaaaatggaattagaagtcaagtaagccaggtgagtgggagagcagcaccagcctgttggttttagagcagggccaggagggttaacagttcaggatatgccaagggcatcagaagggttcttgaagatttgttcagagcaagaggaaaagggtgcgatcagcctgaggcagaagccaagcaatacaccattaactcagggaggtgggggaagcagcgcctctctgttttctgttgggcccctgggcagcaagtgtaatccaaccagagcaagagggaactgaggcagaaaccacagtctgctttaaatgaagtccacccctaggcttattttcctgggcacttgggaacctggttattaccatcacagggtggttttatcagtaattgaagtagctaagaagggagatcaaggcaccggacaaccagagggggcaaaaattacccagcttttgggaaattaggaaaacgtgaattccagaaactatagtctgctaaggctggcttcatttctaagaaatttccagaaagcattattaaagcagttgctttgtgagcacatttgagcccagtctgggtcaaagtgatggccccttcctattttcagaacaaggtgtgccagctagccaggcctgttctggtaggtggcagacagccggcccttggcagagctattggcaggcactcatgatgtcatcttcatgtgctccccacagtgaagatgggtctggctctcaggaagccttcaataatgtgttagtgaaaatcctgtggagagacggggactgaatgaactatgtgtgtcagagtttaaaattcatcagccaccaccaaagcagagggggtgtacgaggcctctgtttggaagggtgtcaaagggagtttgttgcaaagtactgactgtggcaagcacatgttcatttgagtgcctgttatctgaggctggtctgggaggactggcagcgattgtagggtgagtcacctgccacatctgcaccagtgctgctgtcatcttgagagtggactcgtgtcagtgggagaaggcaccttcggcgtctgccgttctgcgttatggcatcaccttggataaaggacattactggagacccaggtctgggggagctgagccaggatggatgaccagcaagcttaaaagagtgcaggggtcagtgggacaagggaggttccgtgcaatgcagtgggtgtaaagcttgtacctggtcagaagcctcctagaaatgaaacccttgaagccttcccttgagcattaggtccagagtggccctagtgatctttaagatgatgaaagctgatgttagaagtgatgttccaaggccacccagctgctaaggggtagctgtgcaagtactgacgggatagtgtaggttgatggtatgaaaagacaggtttcagctgctgtcatgctccagaaggctctatggaggtgggtagccagcaaggacaaggacaccttgggccatagcaatacaggtttgatgcttagcctgcacctggaccaaccaggcctcattgagatgttcatgttctgttctgggtaccacatttatttttagcttatttggttaaattagaaactaaagttgttttggaagaatattttaaattctaaaagtagcgttacgacaactgaaaatttgggagaaattgaggagtacacattggagagatgttgacaaacttgtgggtcattggggtgcagagttatgagaaataggaggttttggaggaaggatggcactcaccaccttcagggattggggccctctgcgagtagcgggggaaagggtgctgctgggtccggaccctgactctgccaggccttgcaccagcccctttacagggttgactccaaatccttggctttatcaggagatcaagcttatgtgaagctccaggatcaggattcataacaaagggtatgcaagttatgtgataatgacaatggcggatgtttttcagcccttcctatgtaccaggcattgtgctaggttgcatgagctccaggatacagaattcgaccaaaggctgtgggagtctgtaacagtaattgctgatgtctgtcaaggcctgagccctcactttgtgctaaactcctttcatacattgtttcatttaatccttattgcagccctgtatgcagtatttaggcttgtggttgctttagagtcaggaccttgaccaaggctatatattggtcatcaggagttgtcctaattttctttttcttttttttttttttaatttcttttctttttttttttttttttttttttttttgagctgaagtgcagtggctgtgatcttggctcacgaatctctggttcaagtgattctcctgcctcagcctcaggctgcagaaatttgcataataagtaagagttgaattttaatagctgagacaatggagaaaatgtctccagggcattgcaagaccttcgtggcagcctctcccatcacaggcctggaggcctaggaggaaaaaatgcttttggagggcaagcccaggaccctgctgctgtgtgtagcctcagagcatgatgccctacacccagctgctccagctccagcaatgactaaacagtagctgggattacaggcatgcgccacacgcctggctaatttttgcatttttagtagagatggggtttcaccatgttggccaggtggtcttgagctcctgacctcaaaagatccgcctgcctcggcctcccaaagtgctgggatacaggcgtgagccgctgcacccagcttgttataattttcatcacaatgattgctgttccgacactgctaaatactttccatacattgtcgttagttctcataataacttgatggagattaggaaacatttcgaggtaaaggaattgagggtcaggtgggctgctgtagcagagcatgagactttgcacaaattactgaaagttgtccctcaggtggactgtgccaggtactgggctggtggagattatgtaggctggattgtgcctccatgcctgcctccttgattggtaccttaccaagggctcagactgcatgacagctgatggctctgaagagtgagcaaggggctgagaattggcagagcctttcagctaggaaatggcagagctggaattccaagccaggtctgctgatctggagccagttgtcataaaccactgtggaggggagaaagctgtatgcctgtcagaagatccggtgtagcctcgaccatcctgaggcttgtctttggaagtggtcctgcgaagacaagtggctgtccatcaacaccgcaagaggaatcccccagtgggtggagggagagtgggcttatgaccctgaagtatcccctccctgattccgagaccctgtcttacatgtgaggccatcttcaaaacttaatgtcttaaaatatgacattttccctgtacaatcttttccttttgctaattaaaatcgactccatcctctccttccattctctagcccttggtgaaaaggcagaggccgcctcaagccacgtgcagcctcacaagtggtcattgtaggcttgtgggtgacctagtccatgtcaggagccctcctcgggggcaggcactggtttttcatctttctgtgcttgctcaccttgagcgtcagcacattccagaacctacctcaaccgtaatcacggcacagatgtcgttgacttcagttgttgggggctggggtgcaaatggcaagaattctgcagcagccttccagcttggattcctgtctggggccaggatgaccttgggccaagcgagtggctcccttggctcttgaaaaagaaatctctgcctggctgttcccatcacttctcacggacagtaatgctagcactgtgctgatggtaacagtaacacagtgagccccagttactgacaggcaatgccactgcgcctcacccttaccatttaccatgtgcctgggctgagtgctctaaaggcatttgcctgtgaatcctcacaacgaccctttgaggtgggtaccagcattcttatattgcagatgagaaactgtctcttaagagagttctgagtaagatattttgagggaggagggtgatgtcattatttctttgctctttaataaagagtatacttcttgtaagtctaaagcagaggttctcaactaaggtaatttttgtcctccagggacatttggcaatgtctggagacatttttggttgtcacatttggagagggagtttgccaccagcatctcgtgggtagaggccagggatgctgtgctgtcaacaccttgtgatgcacaggacctcctgcaacaaagaattatctgtccccaaatgttatagtgcaaggttgagattctctgatctaggccgggtggctcctgcctctaatcccagcctttgggaggccgaggtgggcaaatcacttgaggtcagaagttcgagattctctgatctaagagaagacaaaatcatattcagccttttgtccagtttggtatcgttaactcctgctcaatcctgcttgtggtcgttggtgcagttcccatctatttctggttgtctttctactgagacgtggaagcattgcactctcctaccttcttcagttaggtgtggatgtgtgacttgtttgaccagtgaactatgagcagaaagaaacatgacattaaagtggggaaacttttagtgctatgtgatttgccacattccttcctcctaccctctcgtgctcctagatggtggaggcgcctcagcctagtcctggtgtaaggaggtgcgggtcggagctcctagtcaactcacgatgaaacgtagtatgaatgagaggtaacctctgttgtttatactactgggatttgggagttgttgttaccatggcatagcctatgcaatcctgacagatgtactctaagaagaacaaaacaagagttggcatttggattaggcaggtgggtatctggatactgtggataaaagcccaagcatcagtattttatgggttgtttcctatagtgaagatgttgtgcttggccccgtgggaagtaagagaccctggcaggttgcttcatagaagaaatggaagggagtttaaaagatgagtctcgaggtctggagaggtttaatgacttacccaaacatctgtgaaggcacctgccgggatccgcagctgtgcccagcctggctctgtgaggctggtccgcagtcagccggccattcttaccacctcagtcagtggtttcaactcagttgcaggtctgtgaatatttccagggcaaagtcttctttaccttcccagggcctctcgcaggctgtggcacagtcacgtttgttgagtgagttggatatgggggggagaaggcagacagtgagcagtgccatgatggggtgcagctgtggggttgagggttccggggaaagagatgacctgaggaggccggcagagaccctggagcctgctgaagggtgggtacagacggggatggggcctgggcagggagaagggctggacatttctcattctctctgagtttcacatgggcaggaagcaccgcagtcctgagggactccatgagggagagcactgtggcggggggatgccttccctgagaggacatccctgccgccatctgcctgacagatgctgccttacctgagtagcacgtgcccttgggagggctgctcctttgcaggaaggcactgaaggctcatgaattatgctcatctccttcagcggcttggagaataatgatttatgccaggagccggcttatcctggcccagagccagagctgttcccagcagcacagagcaagtcagcttgacttacactcccaggtgcctcagtgttcctgtctataaaacgggcataattggaaagctctgcctgtcttccactaaggtaagcatgtgggagggctctgtcccataaaccagggaaagatgcccttatgggtcagaaagggatggttcagatcttcagggaactcttccttgagagggattgggacgggagccctgggacagctctgatagcacctgtggaatcagacctgctgactatggccacgggctatgacacttcaggaggatagtccgtttgaatcctcgggagctggccagtgagagggagctgttctctcacctcctggttctgggtgctcccagacgaggggttgacctgaactcgttgtgggctctacagtgcaacccgtttgcccctgagatgccatcccccagggtccacaggcctgcgcatgcatgcttcctgtgactctgccccttcttgtcctcattaacccaggagggattagttcttcatccaagaaggtgcctgcctgcagtcccacctgagctgggtgatttgctcggatgcaggcagcagaggtttgttattagtgctctagagaggcaatacggcaaacagccctgctctggagccagactgcttgggtttgaatcccgctttgccactccctggctgtgtggtcttgagcaagctgcgatctccctgtgattcagtgctttatcagtaaaatggggatggtagcagtatctccctcaggagagttattgtgcgtctaaataagttagtgtaattaccataggcagaatgcttataccagtgctggcatatcataacatgtttgctgttaatattttttgttgatgtttcttccattttgtaccaggtattggttcaccaaggggttgccatcaaccatgcttccagttggttctttgatagaaacagtgtattgttttcaatcttacttgaagcaccgtggttctagtctcagcccacccactatgggggacatggggcatcagacctcaggggtgaccaggatggcttgtgcatagttgatgttcttggacttttctcatttttttcttttcctagaagatagcctttaaaaaacgatgcattgcctaacaccataagaatgtaaaaacaactggttcagggcccccacctaaccaaacttttcatattctatgctccctctttgtccttgtctgcaggtggatatgtatctgattcacctcctctccccaaaaacaccacgggaaggcaatagtgtagtaataaggtcggttttgggttttggatctgaggggctttggctcagtgtggccttggccccttgctggctggaccatcttgcttagtgaattttagtttgaggaacctcaccctcactttctctcgtagcatgggaataatactccctaactcatgactccactgcaataattacaagaggtagtttaggtaaacattctagccgatgtggttgtttaacaaagcgtagtttttattattagttgtagatgttcactgtagatttttaagcactgcctgatactcgattatgtggatgtagttggatttgtccaacctgtgctggggttgcacatttcggtgatttccacctccccttcttggtcatctctggagagagcgacttgcgggccggcagctgggagtcccctggagtcttccctttgcagttggtaacttgtgttcttggggatttgtccagcctttatctcccatctccccctcccaccccctcctccccccccaagctgcatttttctgtggtgcgagtgttggttcagctccctaggggatgctttggctccgcaggtgtcatgagtcatggaaacccccagccctgcccaagcctgaggaagacgaggggaaagctttttcatagcctgacaaacaggtatttcctgtcagcccccagctgtcgagaagttggtccctctggtaattcagagagaagagccgcacacatgccagcctcccaccctcaaatctcgggatctgatgaaaaaggtcagctgcactgtctagaactttctgcaatattgaaatgttcattctgctttttccaatgcggtagccatcagccacatgtggcttctcgcactgaggctgtggctagtcctagtcggggtgtgcagtgtaaaaatgcttggtggattagaagacaatatgaacaaaagaatgtaaaagatctctttaggctgggcaaggtggctcagcctataattccagcactttgggaggccgaggcaggcagattacgaggtcaggaattcagaccagcctggccaacatggtgaaaccccgtctctactaaaaatacaaaaattagccagcctggtggcaggggcctgtaatcccagctactggggaggctgaggcagaagaattgcttaacccgggaggtggaggttgcagtgagccaagatcatgccactgcactctagcctgggttcagagcaagactttgtctcgaaggaaaaaatatatatatttttaatgttttatatttattttgtatgttttgtgtgattatgtgttgaagtgatattttgggtatgtttgattaaataaatagatcattaaaatctttattgtttggcttttttttttttttttttttttttttttagacagaatttcactcctgttgcccaggctaaagtgcaatggtgcgatcttggctcacctaacctccacctcccgggttcaagtgattcttctgccttagcctccccagtagctgggatacaggcatgagccaccacgcctggctaatttgtatttttagtagagaaagggtttctcatgttggtcaggctgatctcgaactcccaacctcaggtgatccacctgcgtcagcgtccaaagtgctgggattacaggtgtgagctactgtgcctggcctttgtttggcttttaatatgctactagaacataccaagtacatctcttggatagtcttattctagagcgtgtagcctgcagctgctgtcctgccctagaaggggctatcttggcttcagaggggagaaatgaaaccctctgggtacctccctaatctcccacgtgcccccagtctcctgctccccaacctgccacctgattacaaaggagcaagtgccctgggcagtgttcactgtggcagccaccctgctaataattactctggggtcttgggtcagcaagttaggttactgagggagcttctgttggggtgggtggctggttagggtggactttggaggcgtggacatgggtttgaatgtgtctaactggaagaggaagccatgagccctgtgtggaatcctggctctgagcagttagaataatggttatattgactgggtgcctatggcctgccaagccctatgctgggaacttttatcatccctctgatcctcccactgagctggaaggtgctgtgatgtccattttgcagatgaggatcatcaaggcctaagttgtaacatactagcctggagtcctgctatttgtaagtggcaggagcttgtatgaagcccctctctgactcaagatcatgctctttgccccacatcactcctctctgggctattgcctcttctctccaaccctcagtttcctgatgaaaacaaaggggactggacacttgtcacaggaggtgcaggaagggcagggacaaacacaggcttgagattcagcctgtcttcatgggccctctttcctaggtttgggcctgaattttttttatttatttatttatttatttattatttatttattgaggtagagtcttgctctgttgcccaggctggagtgcaatggcgtgtctcggctcattgtaacctccacctcccgggttcaagtgattctcctgcctcagccaccaagtagctgggattacagatgcctgccaccatgcctggctaactttttgtatttttagtgagatagggtttcaccatgttggccaggctggtttcaaactcttgacctcaggtgatcccccaccttgacctcccaaagtgctgggattacaggcatgagccaccgttcccagcctggcctgaagtttgaacagacccagcagagaagccaggtgcagagggtttgggcagccaggctgatgctccagtggatcctctgcagagtgagcaaggaaagaacagtttcctacattccagcatttttctgcaaccctgcttcctaggccaagtggcttttaaataccaaataaatattaagaagccagagcagtctgggtgcagtggctcatgcctgtaatcctagcactttgggagctgagtcaggaggatcttttttttttgtttttttgagacagagtttcgctttgttgcccggctggggtgcagtggtgcgatcttggctcactgcaagctctgcctcccgggttcacgcattctcctgcctcagcctcccgggtagctgggactacaggcacctgccaccacgcccggtattttttgtatttttaggagagacggggtttcaccatgttagtcaggatggtcttgattcctgacctcgtgatctgcccacctcggcctcccaaagtgctaggattacaggcgtgagcaccacgcctggcgactcaggaggatcttttgaacccaggagtttgaggccagcctgggtacacagggagagtttgtctctagtttaaaacaaacaaacaaacaacaacaaaaaacaaatagctggatgtggttgtgcatgcttatagtcccagctacttaggaggctgaggttggagattgcctgagcccaggaacttgaggctgcagtgagttgtgtttgtgccattgcactccgcctgggcaacagaacaagaccctgtctcaaaaaataaataaataaaataaaagccagacccttcattgtgtgtgagaggccacgttgggcgagcaggggcaatacccagccttggcttaatctccttacctagaggtgggcagacttggctcagaggtagtggagttcatcatatatcctagttttgggggcctgaggagggtagtaccctaagtgccagcacttcaccttgtcctcctcttggcacttgggaactggggaatctctctcttcacacaagttcacctgggccctcctcaaagcttgctgcaccttgtccggagagaacctttctggttttccctttttccatgacttctgatcctttcttctgagggccgtgagttgtggcagaaccaagactctggaaaaacatccctgattagactgggaaggtggcggtgctgccccaccagggctcttcctgaccgtgttatcccagtgacctctggcacgtcacttcacctcaatgagcctcagtttccctcatcctaaaagggagtgttggtggtgataaaacttattcactgaagagttataaggaccgagtagtagacgtaaaaaggcttggttgccaataaagcatgaggtaccagcatgagtggtcatttgtgtagtttaatggatggtttttagacacgatgaaattggaaagagtgtgggagctaagagaaatctaagtcctaacaccgaagagctgagtggccttagcttaaggtaatttaggaacttaacctccccaagcctcagtgccatcgtctgtgaaatagggcatttgagaggattgagtgaggctgcactgccgtccgttcagagcagatgctctcttgctggttcatttttccaatgcatgggttgggggtatgatgtgcttggcagaagcctaccaagaatgcttatctaagtcttttaaaagtgtacagataaccatttcctggctcaattctctgcagcaaatgcacttgatcctcctctgagcatcccgcattgcctgccaggcacccttctgagccagagttatctggtatggagcgccgtaccacccaggagccatgtagcatgttccccattccttgattctacaactgtcttgagagcagggagaaagctattatccccatctgagaagacagagtctcaaaggtggggatgagcctgcctgtgcacactgcacacagctcttggaaaaacagtctagagctctaaaaacaccttttctgtccacttcctctgctgtttacttctttcttaggaaaaagtgagaagggtgaggagtttcctggctagagattctagtgcatcttgctcctgcagaattttggctgtgaagaggtaggccaagaaacgtggggacgcctggctggggctggaacactgcaggcagctgactggactgtcatgacatctcagagccagaagcctcttacctttcttcagtctgagtgctctggaggtgcacttgctcaccagtgtggagaggtagaaggctgggaggtgtggagggtgggtgctgctgcgcattgagggctgtctgtacttggctgggaagaaacgaacagtgccagaaggtagggagggggagcattgttggtcacttggaatctggaactgaaaagacaagaaaacagcctgctctctggagcagttagaccccactcaggaggggcctgtgagcgttgggccaagtttcctgcaggacctggggcgaggtgggagtgggatgcttctggctggcagggctgggctgtggctccatggctgaggtatctgcatagggagaatgtgtgattagaggcagcttggtcagcttaggaaatggaggttcctgaggcaaaccttttcagtgccaagcagggttgcctaggtgagggggctctcagggtcagactcctctgcatcccgtctcacggcgagaccgttggtgtgatgagctgcaagcatccaggtttgtttgcttcctgccacagtggcaattcttaaaactagtttttggtgttaggataagcacacccgacaaacatctgcgaagtgtaagcttgctcatcagggagaatactctgattgatgtggactttctaggatagagagcccaagtggctttgtgcaattgatagtagtcatgtgtatgttaagttagcttgagcgactcttcagggctggagtagaccagatcctgaaccccttatcccctcatcaaggtccggtgtgtctctagcctttgttttgatgaccccagcaaaattccctgctctttctccctgagtgacttctttgttgctttctgagctaggttaggtttccatcactaatctgtggagaaatgtgtatatcccaagccatttcctccttcagaggagcttatgattttggcttggaaaaagagatgaatatactcgaagcatccagggaaggatgaattgctgtacccttgccagtttcagtggaacataaatgtgagcatttcttctctgaagaggaggattccaggcatcctggagggtgataaagtggcataggattcaggttcaatcaagatgtattgagaatggccaggtgagtggcttacgcctgtaatcccagcactttgggaggccgaggcaggtggattacctgagtcacaggagtttgagaccagcctggccaacatagtgaaaccccgtctctactaaaaacaaaattagctggatgtggtggcgtatgcttgtaatgccagctactcgggaggctgaagcagagaattgcttgaacctgggaggcggaggttgcagtgagctgagatcacgccactgcacccagcttgggcaacagaccaagactccgtctccaaacaaacaaaaagatgtattgagaactacggtaggctgggtttgtttggatctagacatcattccttttcatttttactttgttatattgtaaaatattatacagactcagaaaagtacacaaaacataaatgtacagcttgggaattatcacaaagtgagtacccttgtaaccaccgtccaagagaaggaaccctgccagccccccggaggctccctgatcatgacctcttctcttactgccacgcacaacattagcttgctttagtagtagttgcctccctgcttcttaaaataattatttacccaaaatatgaatcccaaacactgtaaatttagttgtgcctgttttttgaacttcctacaaggataatcatgcttatatattctttagtgtctggtttctttcatgcaacattgttgtgaaatctgtgcatttcgttgcatgtagctgtcatttgttcattttcattgctgtgtgttattcgattgactgatagcacaatttttctatccattctcctgttgaacattttgtttgtttacattttgaggatttcctaaaaaatgctgcgggctagatgcggtggctcatgtctgtaattctgacactttggagtctgaggcaggaggatcacctgagcccaggagttcaagaccagcctgggcaacatacaagactccttctctataaaaaaaaaaatgctgctgtgagcattgttggacatgactctggttagcctgtattgtgtatgtgcatgcacacacttgtgttgggtgtacctggaggtagatcactgcatctcatcccatcttcatattaaccttgtaagccgatggggagagtggctcccttagcaagggtgtgtctgctgggaccccagggaagctttgcttactgtcctatgtcttaccccttgggttgtctctgagcttctcttggggacgcatcgttttccaggtgttgtgagaattacagcagtaaagcttgcttgatgcttatgtttaacccctgcaaggcagaatacggagttgcatgtagccagtgtcgggggctggtgaagaagggtgtagggctgtgttggggccagcctgctcatcacacaggtcctccagagtggacctgaacgctcaacccctttaatcttggtgtctgcctgcagtgtttcctcccaagtgggtttggtgcccttccagcatattgagggagaatcgtcggaaaggctgaggcttcagccgagtctccaggccactgcttgcggtgcgctaagctcttaatgtgttttcataatcaaagcagaaaggtcccattgtggcgctaacgctttgccataaagcactttttgtttcctaacaaaattccaagtctcaaaagcaagtcagttagcaaaaacacaataccaatgaatggccatttgccacttgcaacagctaggcaagctccagtaaataacactcggtcagcctgtgttttattggggcaccccaaagacatgaaaatctttgcaggctacttggaggaaaacagtaagatattaggagtcatatttatcaccggggattataacctgatattaaggtgccagttagggtttgcttggctatatatttcagaaaataagtaaggctggggacagtagctcacgcctgtaatcccagcactttgaggggctgagatggtggatcacctgaagtcaggagttcaagaccagcctggccaacatggtgaaaccccgttctattaaaaatacaaaaaactagctgggtgtggtggcgtacgcctgtaatcccagctatcaggaagctgaggcaggagaatcccttgaactcaggaggcagaggttgcagtgaggtggattgtgccattgcactccaacctgggcgacaggagcaaaactccatctcaaaaaaaaaaaaaagaaaagaaaagaaaagtaacactggaagtaagggattatttttcttatgaaacaaaagcccagaggctgacagtcttacggctccacgttgctgcctcctgtctttttgcttttcatcttcagcacaaagcctcatactcccaagatggctgctatatctccaggtttcacattgcatttcaggtaggaaggtggcttttgtcaactgcctcttatccattttaatgaggaaactaactttctggaagtaccaagcaataggctttcccttacatttcactggttagaacggatcacatggcaaccactggttgtcagggtggctgggagctgagcacattgttatttgacaaaatcagggattcccgaggttaaggaaggaaaaggaggatggacatggggaggcagtaacagcaggtgccatgattcactggataaaatagataggaaacaagctgtttcatagaagcgaatttatattcagtaactgaaacattcttgtaagcactaaaatgtattttaatcatttaattgcagtcatgtgccgcattgtcaacaacagaccacgtgtatgacagtaatccctaagattatagtactgtatttttgctgtaccttttctgtgttctgatatgtttagattttcttacaaatgtattacagttgcctaccatactcattactctgatgttcacacaaagccaaatcacctaaggacatgtttctcagaacgtatttctgtcgttacacgccgcatgactgagtttgagaagacacattttcttctaaacaacttaatgactttttcggtgtggctgggatctcagtaggctctactgaggtgtggtttgaacggccactttgcctctcatataatggtccagaaaattatgctttttaaatcttgggtctgcttcgtagttttttttttttttttttttcatttattccattattgctgccaggtcttgtggcctctgtgcatttacctctagaaactggttcttttcaccttaaaaatgttctgctttactataatctatggatgggagaaaccgagaacccaacatggtagaaatgtggattgaggaaggaggctctgggggaaaccatagatctcctctaggttaggtagggctttcatgagcaggcttagtctgttttatcagctctgactcttctggcctatcagataaaagaatttgcctttttttttgttaagggaaggagtttgaatcttctccagtcaaggcactatttaacaattggctctccatggctgacttaatgctattttctcatcaccattcaacatagcttcctccttacctcatctgtctttgtgaatgcagccccattttataagcacaacctctagaaaacctggttttatctaactaagagacctatccatccaggaagttgccaaaggagaaaatcgagaaaaggtagttgtgtgacgttgggctattacctgatctctgtctgttttctcatctgtgaaagagcaatcgtaatgattgccttatgtcattgtaagaaatgaggatgagttaaatggaatagtgcctagcatgtagtaaatgctaaaaaagctattatcattaatattatcatcattatcacagatggggtgtgttaatcacaattaacactgatgtgggattgggccaccctgggagggtgtttggacagaggccaatgtggccatatttacctgatgagagagatcaatccattgttggaacagacgtcttcatgtgccttgtcctcgctccctttctgtgatagtgcagagtagagtctccctccccctcctcctccccccctttcatcctttcttccttccatcattttcatatctgattacaagagtaatatatttccttgtagaaactttgaaaagcatgaaagaaaattgaaacactcttaaaaatgtataatagagagaacttttcgaagctgagatcatcctgtactttttgctctatagcctgctttattttttattttctttcttttttaatatttaaagagatacattctgagccaaatgtgaaaccatgacccatgacagcttcaggaggtcctgagaacatgtgcccaaggtggttgggttcagcttggttttatacattttcgtgagacataatgactagtctaaacattaaaacagagtcttaatacaaaagagaccctttgtggcaatgagataccaaattccaacctgactctagataacatcttaacatcacatgacagatagcaggccctgaaagaaagaaacaaaaacaaagtattttatcctaaaatagatttctttgatatattttgaaatggccctgcaaagctgtccttgtgggagaaatttacattctgtagagaatccccttccctttctaggtaattttctgtcctgaaaagattaactgagatcctagcaccttttaaaggtctgaatgggaaacatttgcgtctattgcctttaagggtggctacctatgagacttcatctacataataagaaccttggctccacaaccccttatcttaacccagacacttgtttctattgattccaggtctttaatactctttttctttttattttatttttatttttttttgagccagagtctcactcactctaggcccaggctggagtgcagtggcgtgatctcggctcactgcaacatccaccccctgggccaagtgcacaccaccatgcctggctaattttatacttttagtagagatggggttttgcctgttgcccaggctggtctcgaactcctgattctgagctcaagcaatccgcccaccttggctcccaaaatgatgggattacaggcttcggccactgcacctagctgataataattctttattttcattggacgataaactatgagtgttattgagtaccgctcctgtgtagcatttcacaaatggatttcaacctggagttggaagagaccactgaggattgaaggtagattggtttcctgggtgagctcagagaatccacccttggcccacttctgtattgtaagacttgctttttctaactgagggatggagtgcattgcagttgggtccctatgttatgtaattgtgggggtgtaagcttggattgtaagtggaagatttggggacttgggatgatttcagatataggcaaaatggaggaagaatgattgtaagctaaagcagtaacacgattcaagctatttattcattggtcattattgaggacctgctgtatgccaccacatgaggccagatgctcttgatacagaataaataagaggaccttctagtttcagacagcatctgtctcagtgagtgaagacttaaaaaccaattcatgcagtaggctgttagagatgctctcattgaaatctatcctgtccccaaaggagtctgaaggagggagttggcaaggggggagctggcaaaggctttgtagggagcaggcattctaggtggagagagcctgtaaacaaggccccagaggtgtgaaacagcttggatgattagcttagcagtaaagaagcaatagctacaccttttcatttctcaatccacttaatatgggtggagtagctgcacttgtgaaatttggcgaaccttaatattcttaaagaaaaaggagaaggtatgtatttcgaaagcatcctatagttttctttccgtcctttcttttggaaaggtagctcaccccctgaaaagcatagaattggtttctgttaactctggtgtttgctgtctcctgcccacccagtgcccattcatcatctgagtgccccctctctacaaggcactgtgtcgggagctcagagcctgaccttgccaggctcttgcaatctgggtcggtggacatctatgtgataattgatgttctgtgctgacaagttctgtgggaaagtggacgtaggagcaagcacttgttggcaggagtcgggaaagcttaaggctgcgatgctcaaaggagaggataaatggtgacactccctagaccctcctccctctccaccaaaggcatagccttcatagtgctggaaatttccatatccctccattgtgccgtggtgggaaaaagacagggaaagagccctccagggactggcatttgttgtggcctgcactggctggttcctggagtaggatgtgtgcatcattagcctgcatagcacagtagctgtgaggaagtgaccgctcaggtgttgggtgatgtgtctaggtcacattgcctagaagagtggcagggctgcgcttgctgcaggcttgcttgatcctgaaccctggttcctctcaccatgccctgggctgcagaactcacttctgggccttgtaaggccctggtgggtaatggtgacagtgggaggagtaatacctgaacagaggctgccctaaataaggcttgtggtggtcagcgcctggaagccctgggtgtggttccctgcagaaaggaattctaggcctcagaaatgaggttttgttttgttaaaattgtcttgggcacccactctccagttcaggtcagggcctgccctgtggctcaagtgtggggccacatggaggttgaatcaactgccccttagggctcccaggggtgggaggacaggaaatccctccaggattgtttagttcagcatactcctccccacacccgtgttacagctgaggaaaggagtccccttcaacccccggcattagtgattctatcatgtcggcatagtttcttctctgacctggccatggtgcgtttgatccaagaatgggcagcctgagtggtgatggtcagtcagtgccactctgtcagtcccgggacccagctgtccccgttctctgcacagcccagccttgggtgcttgcttgtggggcctgcatgtgagtgtttagagctgccagatttgtgggggatttctgacactgttaaaaccaaacaaaagcaaggagctctactgagctgtatgattatttaggctctaaattgggacgggttgtgtgagggacctagagtctaagaccaaaggaaagtccctggtccatggcacaggctttgatgtgggccccaccacctgagagctgtgagctttgggaggagctcttcatccagcccagcgggagtggggatagtaaaactgtttccccagccgggagtggggatagtaatactgaaccggcagggctgctgttagaccatgggtactcagtgcagcagagtctctgtaaatggcagagtggtgctttgcagatgggagaagggaataaacctgtagctgatgtcaggccctttgttcaccctttataccgaatgaattatttcatttcactccataacacctctgaaataggctaactgttcccatttgacagacaccaaaatgagtttcggagagtttctgaaacttgtccaattcatgtagcaaatggagtttaacttccaaattctttccaccttgccatgagaaaatttcattcctgcagaagatggccttctataaagggcaccgaagggatttaagtcacaccttggacacattcctagatccaagtggtttctgtatgttataggccagacagtagcaaatgcaaggtaaatttatgtgcctgtggagggggagaattaattttttcccctccctggactttactctggaaagcttaatcttctaaagcttaatctttagaaagggctcagaaactctgcttgtgcgcataataagtgttgtgtccccaaggcatttgttagataaaacgaaaattaaataataaataaaatgctaatcgtgccaccagccctgaagtctccttgtctctgctggcttttcgtgcagaacgggcacagtggagctttgttcttctgcccctttgtccggacgaggcctccaggggctggctcacaggcagggaggccaggctgtgcccgcccaggtttcccaggccccctgcctccaactctcactggcctccttttcccgagggtggggcggccccctgccagtggttggaggggtgctgccttcccccttacccatttgtcccagtggccaaaaggggctgaaacaggtagctggaggatgcgggagacgtgtgattccctgtttgccagttggcctaactggatcttcctgaaatcattgtatccctgtgagcagacagcaggcactatgggctgtttggcttgggttcgcttcctgccttgggcagtctgtggaatggggcccggtcctcaagcacttgggctgtcaccagcaggaagtttgttcagcaccgtggttctgaaccctgtcctcatgtttaatcatgggtgcttttaaaacacatccatatcaggagcacagccctgggccagctgactagtacctctggggtgggaattggcccaggcatctctatatgtatacccgctccaagtgatctgatacacagggagggtggaaagcccctggttaggatacccaagctgaaaggactgccaggagttgcttgttccacccttcagtttacccatgaggacagtgagttgacaaaggccttcctttttttttttttttttttgaaacagggtctagctccattgcccaggttggagtgagtagctcactggagccccgacttcctgggctcaggcaagcctcttgcctcagcctcttagtagctaggatcacagggtctagctccattgcccacgttggagtgcagtagctcactgagccctgacttcccgggctcaggcaagcctcttgcctcagcctcttgagtagctaggatacagacatgagccaccacgcctggctagtttttgaatttttttgtagagatagggtctcctgtgttgcccaggctggtctcaaactccctaggctcaagtgatccacctgccttaggcctcaaagcgtggggattgcaggtgtgagccaccacgcctggcctgcaaaggctactctgtggaggcaggtgggttagaaccaggtctcctgacgtctgagctcccaaagcaccacctgtgccctgttaatccacactctcatggctatgggaaaggcaggcagttggaattatgatgtgatgataaaaatgtctgcttatcacccatgctgctagggagaccaggcttagttaggttactttctctgttctttcctttctcttgcacatatttaccattgcatcttttcacatgaatcacaagtatttattttctaggccatgagttctcagaggtcaagttctggataatggcgggtttttgttacagccattcttatacactggtacctggccagagcaagctttcaataatgttgtggagtggaaaggtggataccagaccccagccttgagcccggtggagtgtctcttgagcccctgggttaagtgggtcaaggcaactaccctttgcacttggggcaagttgacagaaaaatccatagacaggcagagtcaggaaaaacaggactgagaaggggctatgaacttatcctaggaatactggcttacctgaaactaaacaaccacgcaatcctccacacagctttgcccccgctccccgtggccctcccgcccagctcgcctttgcagtgagcagatccagtatcatgtcacagctggaatctggcttgtgtttggaaataaacaacttggcccctctctctgctgggattttcctttatcaggagatgctcatgagccaccaccagagatgaggtgtttcttccagcagagatgagatgttcttttcagcagcctgcctgagagctccagggaaaagtggagggctttgtggtgggacaaacaccttcacattgtccttttctggttggtattggagaggcttgagtgagtaggctggatatgaaataatttgaggggtggtgaatgcaaaggactaaccaccaaccccccagcaagtttgcaatgagggaaagtctctgtcttgcaagaggagacacatagatagaaagcaatgggtgcaccactctgaatgctggctgcccagctaggttgcttttgcagggtggcctgtcctcaggcagcagccagacaacattttggggagagtagctcagggattcctgtgtttctgctgtagctagttcagggtactaagaaagaaaaaaaggatcctctaccatcatgttaggtagaaattggcagtttagaaatacagcatggggaggggcctccctctcacacagggccctggggagtgtaaattggtacaactactctcaagagaacttgacagatgtggtgaagttagggatacacataccctatagccaaaaattttacttctattgtcgtactggaaaaactagcatgcaagtgctcaaggagaaatagatgtacattgtaacattttggtgatgatgaaaaactagaaggaaactaaaagcctattagccaggaaatatatcaataatgacggtttacacagtgtagtacttttcaccagttccatctgacttacatgaatcagccgactacatttaagaaaaacgttggtagaaaggttgcagaatatctgtagtaatgatacatttctgtaaggttaaaaaaaaaaaaaaaggaaagataccatttttgtgtgtttgaatatttagaaaatgagagacatgttgctgccatcaagttgctcgcagtctaatggggaaagtggcaaataaacagctggaggcttccagatagtgaatgttgatgttattgaccaagttcttgtcttgcaagacatgaccagtttggaggggatattagataaaatagagttcaaataaagtaactcaagcaagttaatttttctcacacataaaagaagtctggatgtaggtaacccatgtcggtgtggtgggtccacaaagtcattaggaactcaggaaccttccagctcaccctctgccattccttatccttatgttcctagatggctgctggaggtccagctttcacatcagtttccagggagcaggatgaatgaactggagaaggatgtgtcatgtatatattccttttgaattaccatgtggcacttccatttatgtgtcattggccaggtattagtcacacagctaccctgcctgcaaggaaggatggaaacgggccagctaaaacctcagcattctgttaggaagaaggagagtggaaagtgggaggccaccactagatgatgaaagatgagatagtgagtttggtacctctggcccatgcaggctggccatccatttgggggttagattggggctggagctttgagtggagtggggttcagagttttctaaattgggaggcataagcgtgtaggtgattgtggagtcctgggaaggaggctgctgagttgtcagaaaggtaggagaactgggaagctagggtgggcatgtctgggaggagagaccacttggccagatgccccagtgaggtcaagcaggagagggtgggagtgagaacatggactctgggggcttctgcaagagcagttttggtggagtgagagactaagatcaatggaggagtaatattgaacagctgaggaaatgtgtcaagatcttgaacttgaagggaatgagagagagaagggggagctgaagagaaagtatttattaaggcagaaagatttgaatgcaggtttggaggctgaaggacagctagatctcccctccccatcccttcccaaggagggaggtattgatgggaggtgaggataggcaaatccagcaagtacaggcggtggcctccagtatctctgcaaaggggcttgtagagcatgaaactggtaagatgctgcccaggaattggggaagagcaaggaattagatagaatcaaatcaaagagctgctaagccgaggaagtaggtcaaaacctaaaactttggatgtccccaacccacctgcacattgagtttctccagtagcaattataggagcagagaaaaagagattacccaggattagaaggctgcagcagagcggcaggaaaaggcagggagggggctctgggttcctggagtggcagtggtggttggagttcaagcagggttatattacattatgctgtaaggtggaaaacggtggggcacatttagaaatattcccattagaaatggtaagaaagaaaaaatcttatgcccatgaagttgtaatgtcagagcattgtctcatcattactgaaaatgtgatcattctagacacacagaatttgctctcagtcacccgcatcagtccttctgtatattttgagttgcattaatttgcaggcacttatttaatatgaaactgtgcctgcttgttacttggtagcagacctgggagccaggtgcctgggttcagattccagctccgcctcttacttactgtgtgaacttggacagggctgttacagtcaagcaggttgtgcactgcacaagggggtgaagggttccttaaatccagactgccctattgccaggaatatgccttttgtgggtctgtgctgtgtctgtgcagaggatgggagcactctttcaccttgcacaaaggcactgcatgggttggttctggctctggctttgggcagttgcctctgtgcatcagtttcgttggagagaataaatgagttaccgcatgtaatgtgttggaacagggcctgacacatggctaagaaccatggtaaggattaaatgctgattatattagtactggaatgagctgagccttctgggtctcctctgaaggcttatcttgagtttcccaagcctggcatttaggagaggatacagctctccaccccttacagtttggtcactgagttgcattttttcccaaaggttccaaaggtttccagaggttctctctaaaccttaagcttttcaggttgcagctgcttaatcttcaggcagctgaccttggtgttcctggtgccttcttcactgaaagaggatgaggtagttggggccaaggacaccccgggtagtctagcaagatttgccttcagacatttgtgtaaatcttctccctaaacatcaaactggagaaatacaggtgtgcatagggagaatgaaaagagccctttccaatttggaacagtttgcgtggaaggtggggcctgcccctatggcatccagatctgttcggtaactgcaactaacttttcttttcttttctttcttttcttttcttttcttttcttttcttttctttctctctctctctctctctttcttttctttctttctttctttctttctttctctctctctctctctctctctcatggttcttgttgaattctaattaagagacattacattcagaattatagcactcatggtgataattttcaaagactgtaacagcttctttgccacttaaggggtacaaagggtgcagctgtttccctgaggaattcttaagttagtgactactaccactcaaattttcctagttgtcgctctgttacagttactgaccgcaagtccatgttccagacattctttgccaacacaattaattacaagaggccacccccaaagtcttagggtgaattgggaaagggccggttaaatgaggaagcaggccttccttggtaaaagtttgtagttttttttcccaatacatcttctctttattgagaacttatttttatcctgtgttcctcctctgccatctcacactctcgctctgtctgctggattttgccacaatgcacctcattcatttgtatcagttgcaattgtaagatggacatttgttgatatgttcagtcctcgtgcatcttttttaaagcaccttcctgagagattttgctcatgtagttttattggctgttattctgacagctgaacacgagggttcaggttgagaggtcctctcagtgttggaaaacgtatgaactctttctcatcatcgcacagttctctatttgaaacagcaatgattcttgggccgtggcgtggtatttgggctcctcctccggggggaggggtggaagggtgctctgcaggaagtagagctgctccagcagcatgctggtgatctccttccctaggactggttactcaggagggggctgacgctccctttcaccttctctctcctttcatgggccatattgttttagtccaagccttgatgttctcccagcccttcttcagctgtttgaaatccggagggacagctcggctgagagttgcattcgtgggtcagcgcctgcaggtacattgattgctaagggcaatagttcacacatcacttttcttacattccagcacatatttgtacttttctctaaaatcagcagggtactcttttctagttctgagaagtatttggcaggttttataattcattgttttgcattttccactatatttcccctggccgccagctatcctgtaatcccagcacttgggaagttgaggtaggaggactgcttaagcccaagaggtcaaggctacagtgagcatgtttgcaccactgcactccagcctggataacaaaaggagacactgcagtggcacaccgccccccccccccccttttttttcttttttgagacaaagtcttgctctgtcacctaggcagagtgcaatggcgtgatcttggctcactgcaacctccgcctcctggcgattctcctgctcagcctcccgagtagctgggactacaggcaccagccaccaagcctggctaatttttgtttttagtagagatggggttttaccatgttggccaggctggccttgaactcctgacctcagtgatccacccaccttggcctcgcaaagtgctgggattacaggcgtgagccatgcccggctgacttcttgtttggggcacaaatcagactgtataagaatcatgagaaaaacaataattcttgggctttcaccaaatgttttatcctggtcagcagtatctttagaagacacaaatttcatagtttcttgattttaggatatatttcatagtttaatatttctgaaattgggaggcttgtacgatgtctttaatgtagtaattctttgctctccccaaatgctgttattacattgttatgtgtctcataaatgaacatccctacctcttgtgggtcatccaggatggaatttgtttattggtcagtagaaaaggctatgacctaattagtgtatcgagtaggtattctgtgtagttaatgcatttattttgttttttattatttttgagatgaagtctcactctgttgccgagctggagtgcagtggtgccatcacggctcactgcgacctctgcctactggggttcaagcattcttgttccttagcctcctgagtagctgggattacaggtgcgtgccaccatgcctggtaatttttgtatttttagtagagagagggtgtcaccatgttggccaggctggtctcaaatcctgacctcaggtgatctgcccacctcaacctcccaaagtgctgggattacgggtgtgaccactgtgcctggccaagttaacacgtttagtctttaacacatttggtctttggaagaactgaagctcaggaatggatcagtaatttgttaaaggtcacaccgctagaaaagagtggtccagtatgtgagcccagctctgtctaatcatgatgttcagttctttctccttcccagggagacctgtacttcttcacttctggctcctgctgtttttttaagctgaggatgtcctctctcttcctattgaaactccatttctgggccaggcatagtggctcacgtctgtaatcccatgctttgggaggctgagaaaggaggatctcttgagcccaggagcttgagaccagcctggcaagatggtgagactctgcctctacaaaaattaaaataaaaaaagttagctgggtatagggtgttcacctgtaaccccagctactcaggaggctgaggtgggaggattgcttgagcctggagtgtgaggttgcagtgagctacggtcatgccactgcacttcaccctgggtgacaaggagaccctgtctctactggaaaaaaaaaccacaaaaatcccaaaacaaaacttacaccactgttccccaaaaacctattggataaaaaaactccatttattattctttcagtttggatacattttatgattataaaaatgacacccgttctttaaaaatacaaaaaagtaaataataaactttccagtgtttacattttgagatgttaattttgctataaaaatagaaattgacctaaagttgaaaaaagaaaattaatgccttaaattaaaataaaaaagatatgtgaagatcaactgcaaatgtagttttcttaccttgagttgttaactttctagaagattatgggcattgctcatatgattaagtacactgttaaaagggacttaaaaaaaaaaagttgcctcatagtgtctgtgattgacacaccagaatgtagttacctacttccccatgtttggctattttaagtacacttccgtgaataggcttatgcttacacttaattgtttctttaggataaattcctagagtggagtctggctcaaggggtgagggccacctggtgaggcttctgttgcatcatcctgttctctgctgccctccaggggggcgatgccgctccacgctcctgccatgctcctgccacgccacactggggagtccctctgccaatgttgccaaacatctgcccatatgtttccatttgtatttccttgcttattattaaggtgggaggtttgttatggttgccggcagaggtaacttcctttgagataaacatgtatatttccttggcctgtttaactgacttgtttgtgcaacccagtcattcttcaagacccaattcaaagctcatcttttccatgaactctttcccgacaccgtcttttctctgaagctggaagctttaattttcatatctgaattctcacagcctgtgttatctgaaaacccttgtcaaagacacttttgcattgcaacttgatatctttggcccccattgaatctgaggtctttagggtaggagatgggtcattcatttctgtgttgtttgcagggcttggcaccatactgggtaactagtgggtactcgatactcttgaatggatggatagatgacacacactgttcttaacaaaccaaccaacccatcccacacccgtcagcaaaatgagttaatgccaccttatgaaattgctctcttcctttccgcatctttgcctttggaatcagtgagttttgctccatctaaagacccagcaggggctgggcgcagtcccagcactttgggtggcgatgtgggtggatcgctggagcccaggagtttgagaccagcctgggcaacatggtgaaacctgtctgtacaaaaaatacaaaaattagttgggtgtagttgtgtgtggcagtggtcccggtactcaggaggctgcggtgggaggatcgtttgagcctgggaggtcgaggctacactggccgtgattacaccaccgcactccagcctaagcaacagagtgagaccctgtctcaaaagaaaaaaaaagacccagcagggcagatggagtaaccagcaaagccgaccttagtggtgagctgggcatggcggcctgagcagggatcggctccaaatagtacgtctaccgtgggctcctgacctttctccctttgctagaagagaagcaccagcaccctcccttttcctcttgtgacatttaaaatgtattattcccattcatagccttataaaatcagtacgcagtaattagagaaatttggaaaacacagaaaagtagaaggaagaaaataattacctatagccttcccactcaatcagcccattcacagatgacatttctgctgtgttttctttcagttgtgttttccaggcaagactttgtgtgcgaggttttgcttacgtagttcttgccatccatcatgtagattttttgtcctgcctgtcgcttagtaaaataacacaaaaaacttcctatgtttttgtaaacctgtcagtggctctgtcatagtttagtaagtggttttaccatcacctccttagctgtgcttcattgttggggctttgggttgtttgcactgtgtccctcttgtaaacaatgtcgggatggaaagtttgtgctgggcgtttccttgtccctttggctggttacctcaggcagactggcccaaccagcccttccccgcttcattctcctcccttggggccagtgccctattcgcctctcggttgtgtttctcagtctccatgtgtagcaatatgttgagaaacagcttcctttttcaggagaaagctcaagatgttgaacctcgaggaggctgtgcacaaaggtgcagagtcctgcctgtgggtcatggccttggcactgcagggcggcccccttctgcctcacaggcccagggttacgaaggtgcaggtgacggggaggccacgcctttgaaggggctgcctggcaaaccttttccctgacagtaagctgagggggtggccctggtcacatgttgcaggtctctggagggggtgtgtgaatacctgagtccattttctgcctggtcccacactcggatccgtcatggaagatctgcccctgtgttctgtgggcgagtgcttgggggagaacccctcctgtggggctgctgagagtgtgctgtgctggaggtggcttcagccctgctcctctgagcagctgcttggggcatgcgttgagctccagagagcacttcagcatatagccagcagcgccctgaggagctgcagtgaaaaggccactgtggcactcaaggctcaggtttggatggtggagtaacattgcctaggttacctcccaccctggacagttactttatctctctttcatctccacttggggatagtaatacacccacctccccagatgaaatgagttagcattttatacacttctcaaaacagtccctgttgttaaataaaaatagggaaccagcgttaccagctagaccactcgctcacagcaggttaacccaggacttctgccatccagtatgggggaaagagtgctggacagaaccaggagacctcctggcactgccttctactttgtgtgagtttgactaagtcgttgtccctctctgggcccagtttcctcatcagtttttcatctatttctgtgagatgaccttaggcccttcttgtctagaacatccaaggattttgtaatttaaaggcatttcagacatctgaagatgggtctggtctgctaataatcctcactggttgacgtggtccttagatggggccaattgcaaaggtcaggggcaggagatgcagagccctgtggggtttgcccggtttttctcagtgcgggtgagctacctccacctggagggttatggtagctgggtcacctgggaacaggccgtgggagaactggctccttgggaatgtgttgtcctgcgcggcagagcactttcaggtacgggctgctctgtgggccaccctgtgctccagcccgcagcacttgagactgacttgccctgaggtttgtgtgacgaaatcgggtcttatgcaacagtgagtgcgtgcatctccgcttcgagctgttacatcaaaagctaaacacagagagcccttgcaactggagaactagcaggaggccctcgctctggtctttgtcagcgggtgggacggggtaggatgtggcttacaggcagctgtggaggagaggatgtgctaggaaagaggttggagctggtggactctctcccaggcgctgcttttccaacagctttctggaaggttctggcctccttctgatcaggtggcagagcatccctggggctcctcccagtattcgtgtgctctgggtcagtgatgtctccatctgcatcactgctggtggagcaagtgggaaaggtcagccttcaaactgtggaaggtcagacccagcgcctcaagcctggagggcagcgtggggcatcagcctcttatgagtttaagttggctctgacacataccagctggtgacgttgggttggcttcctgaccctctgagtccttttttataaatgagaacatttgtacaagatgcccagcattggcctgatggacagtaggcaccccaaaagtctcagtcatttaagaagtaatgtagcccatggttaagagcatgggctgagcagctgaacttcctgggttcagttcttgctctgccacttactagccgcatgacatgggactgttcctcatcctcagtttaccctctgtacaatggggatagttgtgatagggcgtctctcacaggtttgttgcaaggattagtgagttaattcagttgtcccttggtatccatgggggagtggtcccaggaacccctgagataccaaaatccacagattctcaagcccccttagtacagatgcagatgcaaccattctttttttttttttaagatggagtatcactctgtcaccaggctggagtgcagtggcataatttggctcactgcaacctctgcctcccgggttcatgcaattctcctgcctcagcctcccggtagctgggactacagatgcacaccaccatgcccagctaattgttgtatttttagtagaacagggtttcaccatgttggccagaatggtctcgatctcttgaccttgtggtctgcccgctcggcctcccaaagtgttgggattacaggtgtgagcccccgcacccagccgcaaccatcatttttttaaaaagatttctgatctgccgttgaatctatggatgcagaacccacagatctaagggctgtctgtacgcataaagcacttaaagcagtgtctagcgcataatagtcaccttgttggagttagctgtcattgtctaatttcttcaataagggtggtcagttgatttcttagagcttggcagcataccgcctctctttattttgagatgcatccccaccctgttcagctgagcttgtccaaggtgacaggtgcgtgtgcgcacgtgtgtgtgtgtctttttcagccattcaccactatccaggtctggagagtagctccccttgcagcctgggggccaggcctctcccggcttgcttcttcaggctgtgtgcatcttgttacccatcctggtttgcctccctcttcgcacagactgtgctcagaggttcgtgttgcacagtttggctcgggtgtgcccagctcttacctgagaataaagtaagggccaggaaagccatcctttcagtgtgagtgtgttccagcccgcctggccttgtctacgtttgcccattttcaaggaatacaccagggtagcttgggacagccatgtagatggagtcatccaggaatgtgtttaagaatcttaaagcaataaacaagtcgactaactgctttcaaagagtacaagagactggaattttcatgatagagatggctgacatgagtgttaatctattatagcaggcctgatgtcttcagcaatagacatccccctcttccccattttgcagataaggaaactgaggcagagggtggttaagtaatctgagttaaagcagtagtcagtggccgagctgggatttgaacccgggtctgttggcctctaggccccagcaccgactatccatcactatactgcccctggctggcattcctgggattatacagcagcggcatctgttgcctgagccctttctcatcccccgctaatgatagtgctagtaatgtgagtccagtacagctgtgttgcctgaggtgcacagggcctagggggataactgcgttgtctttagccttgcttgttagagaaggtggtcttgccttctttctccctcccagagctgatgtcacctaaccctgctgcaatattattcctgggtttcaggtctgatttttatgtcccctacatcccaatctccttcctctgaccagacaaaatggtccctcaggaaaagagctttgaagattatttgtggagatggctgtggctaatcagtgaccttctcagatcgcttaggaaaagcgtgtggagtccttgtcagggctttcttccctgagaggcatctgagaagtccctggggtcacagctggagtgaccctgggtgggactcagtgtttcaggggtgcttggttttaatctatgaatttaaatcatgctttcctgggtgggagttggggtgggcagtggttgtgaagctggcgccacaaataggatggtgtgtagccttggccatgtgcctttacccctgagccttggtttgcagtgagatcagatgaggtgctgtcttgccagagcgctccgtaaactctgtagtgctgtgactgatgtgaggtgctgcgaccaagtatccataagatacacaatcatcacattggtgtgcgccaagaaagaatgcacagtcatgtcactaggagtaattctggtctcatttgaaactcagcatgtggtttggtgccagaggtgttccttgggcctctggtacaagtgaattgttaaaagggttggatgctgatctgccctaatgcatagagcttcatttcacagccggttgctctccttgtccacgggaagcttgcagacacattaacagatcaacaatcgtgatccttcatctggacgcttccttctgcactcttccccagtcacccgtcctggttttcctatcagctgccaaaggcaagctttgatgttaagattaagattgcagcgaaggaagatgggaaggaatctttgctggggctcgcagtcagccagcagctgtgtcatattgttttgtcttcacagtgatcttttgaggtgatctttgcccctcatttatggcagaggaagtgaaggctcagacatttaattgcccatggcccttagctggtaggagtcagggctgagtttcaaatgagaccagaattacccctagtacatgactgtccattctttctgtggcgcacagcaatgtgagagggccctgtggggtctgccatgatggcagacactgcctctctcccattgctttctgtctgacccacctccacgggttggggaagagttggagatggtactgttggagcagcggcttgtgctgttggcaagcataggttcccctctgtctgggagacagggcaggcacagcgctgaagtgagagacggctgggctgggctgcctgtgggctgagtgccctttgagggtggaatctccagccgaagggcccctcccgagaagcaccaagtcctagtaaattgaacaacaaacagggctctgcttgggtggctcattgctggagaaactcagtgcttcaccttcctgctaaagtatgccggtatgccagaaattcctggacaagcaagaagggaagtcatgtctttatagtaaaaacactaataaaacagctcagaatcttctccttcctttacacccacactgccactaactaaattaccttttgttctcacgtttgctgaattgcagtgcttcttaaatgattttcctgtctttggtttatccacacgccttcagtctgtcctccttatggtttccagaatgaggatcgttcagaaatgcaaatctgacacgtttttcccttcgcttcccgccccacgcctgcaagattgagtgcagatgcctgagttggcattccaggaccttctggaactttgtaggacctgcatgaactggtcctggtccctgctgaaacaaaaaaaaagtggcaccggccattgatctggagggtctaagaaggccctgctatgcacctgaccctgggtggggaccattccatcaggggcaggcccagggccactcattaggtctcttcatcacagtagtcaggactctaggagactctatactctgttggacaaagtaccacagaccaacccaggttcaaggggagaggaaatagacctctagattggaggagtgtctatactttgtggccgtcttcaatctgctgtggttgtctacactcgtatggtagactcagtgatcctgtgactacccaatggggaagaagaaccctcaccacccactgccaggagcggggctcccccacctattctttttctctagcaaatgcaagatcctacatagcctgctttaccccacccttaccttgtgcactctgggaaactgagtcatcatgtatcttcctaagtgcagtgtgcagctgggggttgtattcccaaacactcagcatcaactgaatcagggtagaacaagattccatatctccagctcgtggcaaatgtttgtctgtattccaggtcttatataatagatcgaaggtactctaaggtactgcatgtggtttacagtatgctagggtcctttttcaaggtatgtaactctctcagcctcagtttcctcagctgtaaaatgagattaataatagtacctgctggacgcagtggctcacacctgtaatcccagcactttgggaggccgaggcggcagatgcctgaggtcaggagtttgagaccagcctggccaacatggtgaaaccccatctctactaaaatataaaatttagctgagcgtggtggcgggcacctgtaatcgcagctacttgggaggtgaggtgggagatcgcttgaacccgggaggcggaggttgcaatgagccgagatcaggccctgcaccccagcctgggcaacaagaacgaaactccatctcaaataaataaacaaacaataaataaaaatacctatcgggattcatgtaggtattaggtgagataatatagaatgtatacatgatgcctagtacctaggaatgcccagttaaaaagaatatatccagttgtggttaaacagtcctggaatacaaaaaataactcaacgtgcatcaaaaacctaaataaaaaagatacacaataaaacttctagaacccaggagaatatgtttgtgaatatgggcttgacaaatatccctagataggaaataaaaagcacaaacaaacagacaaaaagattgttaagttggacttctaaaaattagctgctcttcgagatttaaggacttttggaagaatgcttttggatggcattggctcaaagaagaatgagggataccttctttttgctgttgtaggttttctggaagccacaggaagcctcagccttagaaacattagcggtagaaggaggtttggaatactgcggactaatagaactacttttggttgcaagtaacagaaaatgtgactggaataggccattatgttctcctacaatgagtctggagttaggtggcacacgtgtgctggttttgcagctgaacaggatactgtctctggttttccaggcagctcttgccatccttgtggttgcgagatggccactcagcttgtctgttttcaaaatgggcaggaggtgttgggcagccccaagatctgtcccatctttcccagcaggtcccctagcaagcaagtcctcatgcctcattagccaaaactgtcacggtaaccagcttcaagggaagctgaaagtggggactgaatcatcatgatggctgtgcaggaccccattccggatcaattatgtcacactcgctgaagccaaggctcgtgggttgtgattgaagactgggctgcgagccactgactgagaccagttcatcactgggcacagtgctacctgaacaaaactgggtcctgtgggcaagggagaagctgggagctgatattaggtggagatagcagtctgagcatggtgctccacagggtgtggcggttcgggcgcccctcatccttctggggagttcacaatgcattcattgatccctggtgtctggggcactcatctgtcattgcccttgcccctgtccagccctttgtccttttctgtgatggcctgagttgctaagccaacagtacatccctggaaagaaagccctctatctttccagcattgggcacagtctccttctcatattggtgcatataggtcagagtttaaggtgccttgccttccccatccctcccttccagagctccctagggaacaggccttaaggataggtaaggggtttggcccattggcagaaatctattttgccattaggtgcagcctctgcctttttcactaggcccctgcttggtaattcacaccaggtgcctttcagttggcaatgtcaggaatactccaggattacctgttgtgattgagggttgagctgagggggtaaactagttcgtggctgtgccctgtgggcctggtgaccttcagcaaacacatggagtgtgtgtttgaactgggacacaggccgtgttgatgaagtatctggttgtgagcaacaccacacctgtggctcctgacacctgggccagcacttccctcagcctccagcagaagcaccgagcagcagggctgctgtgtcatggacgcttagacctgctgtctgttctttgcctttcctagccctcggtcaggtgtctgtgcggacacatctgttcccccaactttgtgggttcctgaaaattatggacccctgccgcttacgaccgttgtccttggagtccaaggtgccgggcattgggaagaggtttggttgttgaatgactggatgatggtcagaagtccttgttgccgttattcaattgcttcaggcacaggggagttagggggtaaagtgggtgtcttctttctcatgatttagtcctgttggtccccacagcccctaaggactgctggtactaacacacatgagatattggggggttacatcaattgaggcaggaaggaaaacttgaaaggcagtcaagacagatcatttactgacttttcaaataattgctttctgaagagcagtgttttgatcaccttggctttgcaggtgggagctgtattaggctgttaggtcagggaaatgccttccctttggttctgctgcatctcacaacctccgtggcacataaaatggcctagcagttgttgtgagaaaactcgggcccttggccattcactctggcccagctcaagctttgcatttcccagaagcatcatgggtgcttttaaaccatagttgacctcatagtcttctttccctgactgccatgcttagtactggagcagtgggaacaggtgatttatgtgatttatctaaggtgggtgttagttgcacagaggagctaactcatcagtgcttccatacagggtctcctgcacccactctgcaccagccaaaggcagtcagtcatactcttagacaagtgagctcgttttgtctcagctggggttgaatctcccatctacagtctgttgtcaggtcctcagactttgcattcccagggagcatagggaagggtaggaggccctgagctcccagctgtggccgttctcacccctggctccttgggaatatctccacttgtggtctgggttagacttgtttgtttgtgtttgaagtccccgactctgagtttgacgtcaaggcaggattgctagtgggaggcttggcggggaggtgtctctacacaaatgtaaaagcctggcagcttccccaggagagtgcgggtatgggccggccgggagagggctggctgttgcgaaatgcccagctcaaggattgaggtcacttgtacttctcctctccttgccccactttccctgtgtgcctctcctgctctgtcccatgcccatgaagtcagcccccgtgggcgcccttgagggctgggcagtgctgggagccaaggggctgcctcggtcccctcggagctgggtgctatggtcgctgcgtgcctgtgcgtggaactgtcagctgatcacaacctccagaggcctccttacattctcagaaatcattttgcaacaagttggccaggcagccaggctagactgcttagctggctgggttggtgggaagtccccagaaatgcactcagctttgggaaggaagtggaagatgtaaggggagcttccccgaggcatggacagaatggtcaatagtggaggaggagcagcagcttcagggaccactggaatgaaggctggagtaagtgccagggctttggtggcatcctgaagttcgggatggtatagtcagggacttggcaggacaaagactgctgtgggcaccacgtaagagtctggtgctgcctactgaggagaaaggagtagggtcttgtgggtgctggtgagctggaagctggtccacaactgcacctgccacaggagactaaataaaacaagaggcaagtgatggacgaatggagtggctgtccagttacttcgtgcactctgtaaagcatactaggatcttcttaaaagggatggcctcaggttataggcagcagatggctagttttaatgaatttaatgctggcttagagccaggggtggggtacagcccaggggtaggttattgcaagtcaggaccagaggtggtggcccagttgggtggctggatacattagagggtgtgggcaagcctgtggctcttattcacaggattcactgcctggaacagtctggcgtggctggattttgggctttggatcgcaaaagaggtagaccctgcccactgccatctgcttgtaccagtcaagacagcttagggtgtgggttgcaggagtcattattttgagagggcatagagagcattagattgaggttggaatcccttctttaaccacaggattcaagaaagtacaaaggctggtgccttggtttcttcattgtaagatgggaatgatgaagtacacctttagtcttgtgggtttcacatgagaggtttcatgatttgtgagtgacggcaaaggatgagcgtgacttgtcatttggctgaggctggactcgatggcaggcatgcaggtgagcatccctggccagtgagtgagcccagtgtgctgtccagcacccacatcccgatgtagctttgttttttttactcaatgttgaatacacagtacatcccatcagaagtctggaagggtctgtagtatttcagttacacatgattgtattttgtggagggaatgatgtgctttagggacattgccagtttgggtttgtgtgtgaagattgggacatcagtcacccttgtgctatcagggatctacttaattcctagcctctggaattttcactgacaatccaggtagaggaagtgatatggtacctacataaggaaaagattgttaacactactaggttgacaaatgagtattgacatgattcttaactgagggagcctgctactatacatgggaaactggtgtccatgttagcctgtgccttgattcatttactcatttatatgttaacatctgtgacatctgtcacaacagatttaacccctgccctgcttctgagacatgaagatctgggccactgagagggtcctgtggcagccaacaccaaagtcagggttagggtgacaacctataataggccttggcatctggctgctaacatgccaagatcatgggtttgagagttgcccacagaagagatctccccatctcaggccctgcattttagggtggagctgactttgtttgcaaagtcagtcgtctggaaagaggtgttttttcaaaggtgcaaaaaagcctgggtggggtataatccaaacggcacctgccaaaagtcttctgctcctccttttcgaggtcattctgcaggctgagcaggagtaacactaacagagttcttttagtgagcactttatatgttctggacattggactaaacactttgcatacatgagtctcagcaaattctcagcagtgctatggggcatgtattatattttctctgctttacagagaagagactaagatgatatgatctagatcctgccacacagctgatgtgtgatggtgcgagggtagagcctcctggctgccaaacccaagcttctcgcagaggagatgggaccactaactaaggtaggcatgacctctgaccagtcagaacaggtgctggtggtaaacaggaggcgtggctatctgcctgtcactgctgcacttccagccagtccagcacaatggctggcctgtccctgtcacacaccctgtggaagccgcccgtgggagctctctgtctagactgccattttagctgggctaaatggtcttgcttttagaggcaaggcagctattgctccagctccactgtggcagctccaagggatggttggttctgtggccacagaggaacccagcctcccaaatcagactggccatgggtaggttgcctgggacagccatgacacaccatggaggatgggcccaggacccatctatggggcaccagctatggagaggcaggttggggcgcagtgtaaaggaaggatgacaagaagggacctgcagggtaggggtgtgaggcctccatgttcctggggatccctgcagttcgggggctgtgtcctttacctgaagaagtctctttcctcagtggcacgtgcttctccttgcacagtatctgctcaaccaggcccgtgctctccagggatgtctgacaagcctcaccacctccaagtgatactcgtggagcctccatttgggaggcctgtgccagagtcatacccgagcgctggggtggcagatgacactgaggctgatcaggatgccaggttacgggtgcagatgttctttgggcaagtggagccgatgtcatttcattcccgtcacatcctctggtgctgaggttgaggtgagcactcaaaggaggataggattgggttccctggagtcagctgggtgggtacagtcttggccgtctcgcctttagaagaaatatatctgatgcgtgggttcctccagcattgcctgaagtcaagaccagatttcagggtcttccttagtcccatctctgacacgggcagatcccacccatatcttctgtattgcctagggaggtaataagagagaacctgtcggcttcgctgagaagaacaccacccacgtccgctgccgccgcaagagtgttttctgtgttccacacgtttgctgagcactttgcattcatatttttctcatgtaagccttcacaacagccttttgagtagatcaaccccattttacaggtaggaaaagtgaggctcactggttagatcccatggcatgttcacccaagggagtggtgtcaagggactttagggctagagatgtccttcatggagcacactgactcctaggtatggctggataggacccgtggtttgttttttgcttgttccaacactttgtatacggcaactcacttggcctcaacctccataaaatgatactctttttatagtggtaagactgaagctgagccaagggggatttccccaagatctttgattttagatgttgagctgggactagagctgagctccttcggccccagatacttagtgagcgcctgctgtagatcggtagcacccaccaactgtttgtggctgacctgatactattctctttctgtaagtcgactctggtcagggctggggtgggcccacagtacattcttgaagcaaaagaatattgggtgtgagagatgttggttccagcccagggcctcccctgtggccagagacgtaatgactcttccttcttgctgctggtcccatccctgaaaccccaggtgcttgtctattccggaaaattatatcttgcggttttgtggttaagagaaaatgacgctaccaatgaaaggtccccttttagcccccagggctgggctagcaggccccactgtggtttgtctgggaaagtagccccttgggcttctgtgactgcaaccaactttccaagaagtgagagcagcttcatttcactctgacggagtggctgcctgtaggccacctccatcctttgtcaaccagagaagttttgctccatcacagaacccaaatctgtagaggttgtttcttaacaagttctgggagatagcagctgccagacaccagacctgccagtagctgggtcgtgctgcactgcatgtcttcccttttccttgtccaggcacagctagccaggtttatgggttatctgggtgcaaagaagaatcacttcaagtttgcacagttctacccatgggcctgctttgggctgtctagcggggatctctaccggccttaaaaaaagaaaccgcttgctcctcttctagggaagctgtcctggcttttgagatgttcaacccctgtctcatcacttgcccagttggtgtttgtttttcgctgccatttgataaacttgtgtgcctgtctggcacaatgtattgtgtttgtgtgttcatcctttcaacaaaggttttaaatagcaaaccaggccaggtgtggtggctcatgcctttaatcccagcactttgggaagtaacacaagaggatcacttgagcctaggagttagagaccagcctgggcagcatggcaagccccatctctattatgaaaaaagagaaaaagcagcccatgtgctgggtgctgtgctggccctgaggtctgctggtgaccaagaacaccagctggacccccacctcccagagtttccagctgaagagggaagcagacaagcgtgaaaaatcagaactgcgatatgtgatctgggcaggggctggagggcttgaggaaggcttcctggaggaagtggtgtctgagctgatccttgtagcggagagtcactgggaagagcttgcttagcaggggaccgagtgcctcaaagctgaaaaggcaggcaggttgtggggaggctggactggggaaggcccaaacgctggctcaggctaaggcaggtgggctaatctcaatgttggcctgtggtggcgaaagtcttgtgcaaatggcatatttaggaatcactcccagaggcaggacccttgaaggccatgtgccagtgacagaagggcttagtgctgctgcttttagtgccagcagcctgacctctccagttaatgtggaaaagagtgttttgagtttgcacagctgtttgatttatagtcctgtctctggtcagccctttgaagtgtggtttcagagccgcgtggaatggagggaagggctggctgtgagaaacatggggataagaccacacattttcttcctctggcactcctgagcatatgttttatgccaggtgctgtagtggaactggggatatgagggaaatacggtccctgcactgatgtgtaattatagggagatcaacctagtcttttggaggtctccatgctgtagttgaatatgagctaggtgtcatcgttctgtttacaggtgggtgaactgagactcagaaaaattaattatcttccttggggcagtgcgcctagtatatggtggatttgaacccagatgtgttcaactcagaagcctgggagctcgttctattgggggagactgaggcagaagctgttaactgtagtatgatagtaactccatgatagggctctgaaagagtcacacacaacacaccaggaaggggagaggcggactctgacttgcctgggtaggaaactccagcaggtattggaggaatagctgctgggtgagtgcgtgcctgtgggcagggccaggggctatggaacggagctggggggctgggggaagttggagccctggtttggaatttgcctctggtctcactgggcgggatggatcagagtggggtaagccaggatgggcacatgagtgcatcctcttagacctgtaggataaaagctcactcgtgtgtctacggtgtgagcttcatgctctgtaggtgctccccagggcttaggttccataataggacagcaatagactcagagtcctgaacctcagcagtgtgtttgattagcagggtctgctctgggcactgaggggcatggggtgcaggaatgtcaggggatcagcctctgggtctgtggtttcatcaacataaaaactgtacagttgagagtgtggaattattttgattctgactcagcgctcccttccagcagctgtctgcacttgccactgagcccctagtaccctgaagggagcaggggccagggagaggggtaagtaaccccaagggggttgaatctggctctgtcagattgttggtgagctggggccaaactagttttctgggggaaatttcaaaaacgctgatgtggtagcagtggttcattattatgggtctcatttcatgctcacatctctctagccacaggagttcttgacctgcgtctgtggatagaattcagggggtccatcgatgaacgtagatggggaagaaaattgccttttattttcattaaccttaactggaatttagcatgtcattccacttgattgtaggcatgaggcacagttatcttaacaaacacctgtgactcggtcaccagtaggaatcacagttgggagctatctgaaaaagcagtttccacttgtcacaactttaaagttatggcagttattaatgcactgttggatgtttaatactttaataaagaagcttttatgactctatcacaggtttttttgttttgttttgttttgtttttgagacagagtcttgctctgtcacccaggctgaatgcagtcagacaagggatactcagcctgtatctcaatatatttttcttttttttcttttatttgagacgatcactaaggctggcaggctggggtgcagtggcatgatcttggcttcctcaacctctgcctcctgggttcaagtgattctcctgcctcagcctcccgagtagctgggataccggcgtgtgccaccatgcctggctaatttttgtatttttagtagaggcagcatttcccatattgaccaggctggtctcgaacctctgattttaagtgatccacctgccttggcgtccaaagtgctgggattacaggcgtgagccaccatgactggctgtctatcacagttttcataatttgataaatgtgtttaaatagaattgatttcctttataattcgaagtgtgtcgtttatacatttcaaagtattgttctgtccaggtgcgatggctcacgcctgtaatcccaggatttgagaggctgaggtgggaggattgcttgagcccaggagttcaagaccagcctaggcacatagtgagaccccatctcaaaaaaaaaaaaaaaagataaagataaaaaaagaaataaagaaagtattgttctttgaaagagatcatgggcctccctagatttccaaaagggtctatgccccaaactggttataagcttttattctaattgaaaatttggagcctttctagatatttaaattaaaaattattaattcatcatttttttcttcgtaaaatattgtgactctgttaacagagtccttgctctttagaaaaatgtgctaaggtcccggtgcagtggtcctaagtgtttgttttatactcagatcaagtgatctgcccaccttagcctccgaaagtgctggctcatgctgtaatcccaacactttgggaggcagaagtgggcagatcatctgaggtcagaagttggaaccagcctgtccaacatggcgaaaacccgtctctactaaaaatacaaaaattagcccttatggtggcatgcgcctatacttccaactacttgggaagctgaggcacaagaatcacttaacccaggaggcggaggttgcagtgagccaagatcgtgccactgcaccccagcctgccagcttggtgaccatctcaaaaaaaaaaaaagaaaaatatagtgagatacaggctgagtatccttgtttgaaatgcttgaggtccaaagtgttttggattttggattttttagaattctggatatttgtattatacttaatggctaagcatcccaaacccaaaagttcaaaatccaaaatctccagtgagcatttctttggagcatcatgtcagtgctcaaaatgttttagattttggaaggttcagcttctgggtctttggaagcgtttcggattttgggtttttggattcgaaatgacaacctatatttacagatgaaaggaaaaggaatgaattaacaccacaaccatgagggaagcagggttgagaagtgtctccagaagacaggttcctgtaagagactgtgaaggtggtattattttggggggacacttggaagtcaccattaggaggccaccagagtcttagcaacattcaggagctctccctgggtccctgggtcacttggccgtagccaagccaggcaactccctgtcttctggcagtgagctcgtttccatctgtcgagcctaactggcctctgttgggaatggagtcccttatttttcatcagaactgggccatgccctccttgtgcttctctgtatcccggttccccagtccaatgctgggcacccagccagagcccagtgtttgtcgggtttacccaatcaggctgtccttgtgtaagcttttcttatttgaagttttagccatttgcgagtcttttaaagctttggacaataactctagaaaatacacagacttgcatatctgaaatttgcatactttcagggtgtggatccctgaaagcctactgggaatccgagtccaggaccctggccaatctgctgctgctcagtggtcatggctacacttgtggtgctcaccatgtgccaaatgcgtctttcttccgtctctctgagagtcagcttctattatccccatttttctggaggacaagatgagacctttgacaagatggagacttttatagggggttaagtaacttgtccaaggtcacaagctagggtgtgactgagcccttggatcccaacccaggcagttggattcttcgctggaacatcctaggtgggaggttacccattctccccaaaccagcaggtcttccatattagcaataccaactccctgaccccaccctggcaggaaagccttcttttttacccgagacagggtctgttctgtcacccgggctggagtacggtggtgtgatgatggctcactgcagccttgacctctgggctcaagcgatcctcccaccttagcctcccaagtagctaggactacaggcatgcgcaccatgcttggctaattattgtatttctggtagagacagggttttgccatgttggccagctggtaggaaggctgccttttatttaacccagctctctgttctgaccagtgttgcccagacgctcatgtcctgaggtgggcagtgtcagccgccctgggtagggcagggggctcatggtggccaccagcctctgcctgttctcccagacccttctccaccctttcccctcccctgcaacagcagagaggagagccagccccttccctcatcacattgcttgtgtctgcctgagctctctgtagtgtgcttgggcctgccatatggttgggctgcagatgaacacaggcttttctttttggactttctgcaggcgaagctggtccgttacatttgtaagcagaggcagtgcaagtgagcgtggctcccggtgagaggaccccagagctcaacagctacccccgcttcagcgacggctgtacactttcaacgtgaggccggaggtggtgcaggtatgcaagctggttctcagctagggataggcatgaggggccaagcagagggaacacacacaaacccgagggctagcttcccgtggctaagactaagggttgatgctctctagtcttgagaaggaggatggggagggacgcagcgccaggagggatccagggtacatgtggctccaacaagtgccctggatgctattgctgatgaactagggcagccccacgctgggcattgatttgttcatcatacttacaacagcaacgtatctggaagcattggctgtgtggcagacactgtgttaaatgtttctgtgttttgaagatagataatctcacttctcatgaactcctataaggaaattactatcattgttgccatttatactcgaggaaattaaagcacagaatggttaagtaagttgtttaaaatcacacagtagtaaatgatagcttggaatttggaaataagagtcagaatttagtttaatcttctgacgctacaatatgctgtcttccttccattgttctctcttcctgtctgtgcagcctacccactgccagccagccaactaaccaaccagcatactcggagtgtgtactgtgccaggtgccagggtgcaggtcagctctcatggagtgcggattagtcctacttggcaggcatggttcacccgtcagatctcataaatcccctacttctatcctaaaattgaaaatattggcttttgctgcgtgtaaaaagtagcatgaattcattatatatagatactttggaaacagagaaggaaagaatcacatacatactcctaacactcagaaaatctatgatcattaaggtctttttttttttcttcctctccccaatatggaaatcttttaaaaatttctatctggactgtcctgtaaggtgtcacaagcctcatgattatcaagcatttagaacatggctagtccaaattaaaatgtgcataacttcttcccttgctcttacctgtgtgggcaaggccctgtggctctcccccaaggccactgcagacccgcctgcctctctccctccctgcctccagcaccacggtccaggccgcttcacctcctgcagaatctctgcagtggcacctcgccccttgcattccattttccacccacagccagggtgctcacctagaaaggtgacttggatcccatcctttttcagtgcttcctgttccttcaggataaacgccagatgccttccttgatctggcctctctcgcctctgtttgccaccttctcctttgctcggtagactctaacctttgcacttgctccccacttccctggaggctctgcccatgactcatcccttgaatatttttctggtgttgagtgttgtcaccgcctcaggcagtcgtccctggtgatgtgatctaaagatcatcccctgcccatcattctcgcctggcacctgagtttattttctcaatgacactgaccactttctggagtgacctaaccgatttttgtctgtggtctgtctgctccccctgggatgcgagcaccatgagacacggccttgctgttgggtttgtttgccacaaaatccccattgagtgtcgggcccaatatggcagtt

SEQ ID NO: 2899 - DNA, 100000 bp, Homo sapiens
cagaaggattatatgagataaatgagataatatacgacaaatacctagcatactgtctgcagataccagtacaaaaaaagaacagccaaaagagaaaaggagatggactataaattatgtcggaaaaaaaaatcactttctatagagaggtcatttggatcacaagaaaatccacaacttcatccttgtctaggtagcaggttgataggtgcagcaaaccatacgtggcacatgtacaaacctgcacgttctgcacacgtatcccggaacttaaagcaaaaaataaataaataaaaggaaaatccacaagcatttactgatcagactcccgagtcattactgttcttattgacagtttcaaagtcatcaagacaggttgatagcaagaggtgcaaggattgtgactcagtcatttcttacctgatctaggatcccagcagtcacccagaatgattcccagaagaaaggccttagaatggaggaaataatactggagtcagagggtcctgagtactgatgtatgacagaggatagagacagcatttatttgacttacagctgagacacccatgttttagtctttaccttgaagtattttctatctgcatgaccttgggcaagccagatcatgaattggacacattggctctctggagtccaccttccctcctattcaggactctcaacgtggatcgcaacatccattagggacagggtgtgaagtgacttttgtgtacactgtgtttctgcactgaggactcttcccactggccatgtgcctgggtcatcatttgtagttgcattgtgcctagaaattcagggacttgacagccagtgtctagagtgcttcaaaaggagtttgttttctgtcactgtttccctcgactggtttaatcaatggcaccgaacgagagacagaattcctttatgatatcctttctgggcttgttcattacttagaataaggtggcttccaaaccaccttattacttagaataaggtgcagaccagatgtgggtgcgtaacatttctaatcagagtccaaccaatcacagcaaactattttcagtgaaaaatgaagtgactaatggactcagtctaaatgattatgagctgagtaaaattccattttcctagtcaaaataatgtagagctgttaaattcaacttctgagattgttgtgggtttgcatattaatcttcctgaacatgtatactttttactctgtccataatttaatgcagaaaattaaactatatgtaaaaaacaaagcatggactcccaataatattcaaaatacggcagcaagtacataatttgatacctgagtatcttatctttcataaagggagggaaacaatatttcttgcatacctactatgtgtgaggctctgtactagggacctttttcatatgtatcatttattcttcacaacagctctctcaggcacttttaatgatccctttattacagagaggtagtggatgctcctaaaagttagtggcagggttggggtttgaaccccggtctgacgatgctaaaaccctccttcttcctatgaacaaatagtttaattcccatcctagaaaggtaatttcgaatctgcagagtttttctccttaatccaataaatgagcctaatttatgctaagaatttcaaatattaagatgccaactatccaaacttgtcagcaaacccatctgacaatccaacaaggatgataatgacaaatatggctttgtatatgccagccactgttccactttattggatgatctcagttgtgtcacacaaccgttctatgaagtaggtgttgtggtactgattgtggaggttctgcatggtagggatgagatataaactgagacagtcagtctgacttataggccataccttttcactcttctgtacagctgtcagattaagtagaacaaagcaagatgcccaaaactaactaccagtggctgggcatggcggctcacgcctgtaatcccagcactttggaggccgaggtgggtggatcacctgaggtcaggagttcgagaccagcctggcaaacatgggaaaccccgtctctactaaaaaaatacaaaaattagctgggcgtgatggtgggtgcctgaatcccagctactcaggaggcagaggcaggagaattgcctggacctgggaggtggaggcgcagtgagcacagatcgcaccattgcactccagcttgggcgacaagagaaaaactctgttcaaaacaaacaaacaacgaaaaactaactaccagcatattttacttcactcatttggtgaagacaaaatacttgttacaaagctgtgttcccatgttaactagcaaataaagggagcacggtgagtacaattggcagtggtgaggacggtgatgaactgatacaaggtctaacagtacgtaatgttaatatgtcaaagagaagtgataaagataccaacggagttggctcctcaataatggattcagggctgtataacccactgtatcgtaatgaaaataagaggaattttgtgttgtagcaaggttgtgatggtgaagtcaagcagaagctaccaccatggcctttcctggtcttagaaggaatgaagtgattccaccctctccctaagacagactccatcactgtggatttcagctggcctgctccaccaagggaaacttgactccaagcctctctggattagcagccatttctagtgcaagagtgaatcaaagtagaaacgaaaattcaatctgatactaatctctcaggcaatatcttttttgggttttcttttaggtggcaggaatagtggcatatttctgaatctgtgttaacctttcattgttcaaaccactgtttagtatcgtatagtttcttctcggtttgtaagtttaaaaatgtacgaaatctctctcttgccctacaaagtgtggcaggatagggagtggttatacggactctggagccagaccacccaagtcagaattcagctctgacacttacagctgtgtgactttgggaaagttgcaacctcttgatgtacctcagtttcctcatgtgcaatgaaaatattatggggttctacctttgggggttgttgtaagttggtgcaaataaagccttagaacagagcatggcacatggtaagcatgccaatacatgttattggcaactattgatttaccttgtagttcactgttcataacttaggcagcaatcctgagctaaacttaaacaaattagggcttaatccccatgttaattatggggctggtgtatgtgtgttatgggactgtgggcctgtcaagatagtccttctaaggtaaagggtaagttgctgcatttggcccctcctaaaccaagaaagaggcacaatgcctagtgggcctatttggcttttggaggcaacacattctcatttgggtatattagtcctgcccaattatcaagtgacctgaaaggctgccagttttggtggggtccagaacagaaggctctgcaacaggtccaggctgctgtacgagctgctctgcacttgggccatatgacccagcagatccaatcgtgcttgaggtgtcagtggcagatagggtgctgtttggagccttcggcagacccccataggtgaatcacagtggaggcctccaggatttggagcaagaccctgccatcttctgcagataactactctccttttgagagacagctctggattgctactgggctttggtggaaactgaacatttgactatgggtcatcaagtcaccagccacctgaattgcctatcatgaactgggtgctttctgacccatctagccataaagtggtcatgcacagcagcattccatcatcaaatgaaagtggtatatacgtgatcgggctcgagaggtcttgaaggccaagtaagttacatgaggaagtggctcaaacgcccatggtctctaccctgccaccctgctttctcttccctagcctgcaccaatggccgcataaggagttctctagatgaattgacagaggagagaagactagggcctggttcacagatggttcttcatgatatcaggcatcacccaaagtggacagctgcagcactacagcccctttccaagacatccctgaggacagtgctgaagggaaatatttccagtgggcagaacttcaatcagtgcacctggttggtgattatatactgatacgtgggctgtagccaatggtttggctgggtggtcagggacctgaagaagcatgattggaaaattggtgacaaagaaatctggggaagaggtatgtggatggcctgagtggccaaaaactgtgaagatatttgtatcccatgtgagtgctcaccaatgggtacctcagcagaggaggattttaataatcaactggctagtatgacccattctgtggacacactcagcctccttctccagtcactcctgtcatcgctcaatgggcccatcaacaaagtggcatggtggcagggttggaggttacacatgggctcagcaacatggacttccactcaccaagctgacctggctacagccagtgttgagtgcccaatttgccagcagcagagaccaacactagccctcgatatggcaccattccttggggtgatcaggcagctagctacctggtggcaggtgattatattggacctcttccatcatggaaaaggcagaagtttgtcctcactggaatagcaattactccagatatgggtttgcctattttgtatgcaatgcttctgccaagactaccaccgtggactcacagaatgccttatccacaatcatgctattccacacagcattgcctctgccaaggcactcactttatggctaaagaagtgtagcagtgggctcatgctcatggaattcccatcatcctgaagcagctgaattgatagaaaggtggaatggccttttgaagtcacaatacaatgccaactaggtgacaatactttgcagggatgggacaaaattctttagaaggccggtatgctctgaatcagtgtccaatgtatggtactgtttctcccatggccaggattcaaggtccaggaatcagggggtggaagtggaagtggcaccactcaccatcaccctaagtgatcactagcaaaatttttgcttcctgttcccgcgacattctgttgtgctggcctagaggtctagttccagagggaggaatgctgtggatatgggtacagccgggcgcgagatttacacccttcccccgcactttcaagggccctccagagctcaccagatgccgctggaagcgcgacgcttccaaggcgcggacccctctctccaggcgaacccaattccagggcgccctgcccttcacaggagaaaagaactctccccggggcttccattggcttctctgggatccttcgcattacttgctggacgcttggcagtgtccatctccgccactccggattcgggatctgaaccggactcctttcgattggctgagggcaacagaggccatcgcctgtccattcagaatggcgctcactatttctcaggaccgaatgacccatgtccaactgctgttcacatggaacccttctccactcggcctttgaagttctctttagaatatgtgctactaccaccaagatctgcacctgcggggctctgcccgggcccagccctgggcttcaagactcaccgcagcggccctcctactagagcatagcgtccacggggctggcgggcgggggggtggtgacctccacacatacactgctttgttcactctggactgctggcgatggcctggtacaggcccgacaatccagtgccatccatttcaggggaaccctgactaatacagggatcattcaataaaaagactccaactcttagaatcaatttagtcactatttattatattgacatatttacaaaataatacaaagtgaaatacactctaattcaccgtattacacgagggctgcatacaggcaagacaaagtatatggaaacatttacttctgtctttggtattagaactctacacaaatctgcagcatttaaattttccaaacaaagtattaaacgtggacaaagatgtaattggtaatgtcacaaaaaggggctccatatcctctgctaggaaacccccaggcccatgaaatgcaacaggaagactaaacaccattataaggagagggtctattgactaaaataaacaatacatgctacaataccatccacaggatgtttctgcttgtgtgaggctgctccctccataacaaagttcggctgacggcaacagacaaacattcccgagacagagtcgcagataagactttacaggaaagaatccattccaagagacactttgaggtgtaactttattgtacagaacattttataaaatacatttttgtgatcattacacatatacaaagacttaaatggttttagcaaataataatttttctaaaacacaatacagtttacataattctgaggtaaaggtcttgaatctatcctagatgaaaagtcctagccatgagggtctctaacagggggatgtgtccactgaaccttgagttctggcacccagacgattgatgagagggcaggctacacctgcttcatttcagagatgattcaaaatttcagaactaatgctcctggttcagttctactaagttaatgcttcttttttttcccaacatgtaacttctcagtcttgtcagaacacaacttctgctatggaggaaatatttccatcaggaaagggcaagttagtgtcttaacttgactgccttgaatggggactctggaccccaggaagaatgttttaggctcctcacaaaaaagagtgatggctgggcaaaacaaatgtactgcaagacccacttccctccagttaatacactcccaggatgggctgcagagggggagactctgagagaagtggaggcccacaaaagtccactgaccctctttctgtcccagaaatgaataaaggacccattgtgctttccttccaaaatcctcaacaaagttgtttgtgctccaagaaaatgtgggaaaaaaaaatcatgtcccaggtcatctttgtgtgtgtgcgggggaggtggatgggaggaaaggcatgtattaatagatactgctgctataaaatgacataaattatagcccttgatctgttctgtaaacaatgccagcttcttcaggttattggcaactacccctaatatacctagcccgatcctttcataaagtcaagtgctatatttccaaaataatcctatgaaatcatgaaggtgtgaaggtttaatatgaagacaccctctcttttgtgtgcttttttcaccttttataaagagtttgcaaatataatcaggacaccaaataagtaattaaaacccttcagggatagctcattatgatgcaaacctgagcactggcctcatattttataatatcatgagtaacatctgaggtaaaagtgtttgccgggcaatgagtcaccttgttggacaatttaagacaagtaaggctgatctttccagtaagctgctcaaatggcagaactccaatttttcgtcatgctgggaaaagaaaattacacttctgcttctttgtaccatcaaataatctggtgaatggcatgtgagaaaaagcaaaagtgtattaagatttactgatgactggcattcatggtatctgaccagaagagtaaagggaagcacgaaccaatgtgtttgcagggctcttctgggaagaacagctcttggtttgccctggtccctgacaatgacagactggcaggctgtttcttgcacagctctaggcagccattaatctgtcagtaccagcatctttagaaatctcagcattaagacttaggaggggtaaggagggaggatgttgaacagccagaaatgcagctttttaaacacttcagttaattccgatgctgtgcaggcttctatttatcccttctctgaaatttttggtgcagggtgcaacagggatttgaatttattcatcctcttccacatatgtggatggaaaccagcccacctaaaaagaaaagcaaccaacacagcaacatgactttgtatctgacacttcaaaggattctacaacagagtattttgttttcataacaccccaattaaactggggttttatgtccattgtaggtagaagattggtttaactgctcttagaagcctaatagagtaaatgatcgaaatggaggaaaaaataaacagtgttctaatccactagcacacaaataaatatgtaaattaagtataataaggggggctctgctgcataatgattcctatttctgctgtagaacaggatgaaaagacagggtactatgtcccattctttccaatttacatcagcagttcttatagatattttgcaataacataaagtttagctctatggctcagggtctaaaaagaactgaaatgctcctcgactctttccaagcagcaagctgtcccacttgcccaggtgaattttatttatgtcactatcatatcatttcaaatattttcagcgagtccctggtatcagcaaaacacagcaccagtttccagaggcagaggcctgtgggctgaaagctgtaatacagtatagaggcttctccctggtgccacatgggtgcaaacaactgctcagtccccttctttcacatgcaccagcacatcgagagggcaacttaccctgccatttacttctcctctccaccagccatttgcactcatctttgtgtaatcttcaccacatctcctttcaacaaggacaactctctcatatctcttgcacagaagtcaaccgagcgatggcaatgcccagcacttttggacttaacactgtcaagaaatgacaagcatgacagtaggtttgcagttcgttaacaaccataacaacctaatcagatgaatgttattgtgctatcaaatgcacagtcgtgatttcattacagaccagcgataatggcagaggagcttaaagcagcagaattgctgtttcaattcaatcaggtgcaagcaaattcgcttcataagttaaagaaccattgtcctgtttttccattcttcataagaacctcaatcaaagtaaggactatttttataaaaatgaaacaaaacaaaacaaaaaaacaaattaaaaaaactcgttaatattaagtatctaaggagatagattctaaaataatttcatcatacacttcctattgatggccagtaatctaaccagcacctccaaggtaaagctttatgtttttatccagtaactgctttactaacactcaaaacaacgaaatattttgctctgatgtcagtctcttgtcaaatctatgtatcacttctggttaagtggcactttcttccctaacaaggctttctatgttaaaactattggggataaatttagttattgttttctatataattcacctaagtgaagaggtgtgaatcagtctcagagaaggaacacacaaataccatctatattttctttctttgaaacaaatactgcttacagaaaaactttactgatgtatctaatcaaaaataagatgtcagggtattaaatacctgtgttcagagttgagtttctctgtgtgtgtgtgtgtgtgtgtgtgtgtgtgcgtgctgcgcgcgcgcgcgcgcacacgcgcgcgtgtttaatattcgatggcaggagaggagctactttctccctggccctgctggccctgttctgaaaagaaaactccattccagtggttcattttgttagtctctagtgtttcatggcacgctttatattaacttctctacctgttgctcttggggttataaagtgttttcaattatatgttcagtgattctgagaatcactcatcggagttggtgaaactttataaatcttaaatggtaaaggaacttaagtgtaagaaaaagagacaatgggaaacaccaaccatctgtatttttaacagttcccagggctcaggcagcagaagtttgacctgtgttaccctggaagagcctgcccacttggccacagggatctctgacctattatcatggctttgtaatgacagaaatttttttagactccaggtgtccatcacgaaataaataatggcaatactctagatttcagaactgtaaagggagtaaaaataggtcattttgttttctgttcaggacacaaaccactttaatagctttctcactgaaaactgtcccattactgggcactactgttagagtcggtgcacataaaaacacccctatgatggaaaaacccaatcatcactgtgtggtgaccttgcataggtctcctaacccctcaaggccacattttttctcatcttgaaatgaaatgtttgtactagatgacttctaagttttttctagttttaaattctatgattttattgggatgtgcaggttaatttttaaaaatcggtcagaaaacagactttatctaagtataccctaaatgtcatgtaaatagccattaaactctctgggtaatgacagaaatcaaaccaaaatgcccatgcacaaaccgaagaactgcagaattcatgggcgccagtcatctttcaagtaatgtgtactgaattttacttttatatttgaaaacaaagttgggattttatttcatttattttcttcatgaaaatacataaacattggcttttttcaactaaactttctggtctcaagaaaaataatgattttatagatttttcatccccctttatactttcagccccatcctctgcaaactctccccaacagataaattatagaatgtctcatggcatgagcacacacacaacaccagaggagtgaaatgtcatgatgaacggtgactatgacagagaagagtaaagtgatggtggtaatggaactcgagggattgtctgtgaggagatgtatccgtatgagaagccaacatggaactcaaatattttatttgcaagcagaagcaagttgaagagacaaataaaagtgtaaagcagtacctgaccagaaaggagtggaagaagggggaacaaagctgtagtctggagagttacaaaagaaaagccacagaacaaagagggggctttgagaaagaaagaaaaagaggaagcaaaagagcatttaggtattggcaaaaatatctcaacacaaccattttcacccactctttcctatcaccatttctaaatgaagaacaagccaaacttttacattttgatagacatagtattttgcaattcagagctgtctatccttttacaggcaaacacagagaatacccacccacattgccatctttgaaccccatccatccaaggatggccaacaatggcctcatcctttgatgtggtgcccaattcccactttgttacatcagtggaaaggggtaacctgtagatgctactgtaaagtaatccttcacatcaaaactattataaagaaaagcctgtaagatggtataatgaaacatgcagaacccatggaaaattcaagaaaattattcatacaatttgttacaaccacctccatcctcccagccaagcatgcacatcccagcttattttcaaaaggagaaaaggcagttagaaatgaaaaccactctgactcttatagctggaaaaaagtaaatacatcctcacattgtagagatgtacagaaaagttacatgtctatggatgctctaaaactttcattttcttttaatataagagctaatcacatttatcaaatggttttgaagtcttagataccatgcgaaagtgccatactcagtatttcacttaattgtcacagctctaagaggaaggtactaatttatttcccctttacatatgagaaaaatctggactcaaacctaagtgatgtgactccaggtacctgctcttagcgactgctgcactactgtgcaactgccactctgcttcaggcacctcgcaggcagctatataaattgacctgctgatactatggtgccactgcaatggaaaaggaggtgtggttgtatactttctcccagtatttattctccccttctttcatgtcttagattagcattgggctatgtttgcctagagagaaggctacatttctcagcctcccttgcagttcgtatagccatacaaccaagttctggccaatggaatataaacaaaagtgtcatgagacagctctgggacctttcctaacaatacagtggacacacgcctttgcctttctttttggctcttattctatcctgctgtctggaatatgaaagctactatcttggttcatgaggaggaaagccccccttcaggatggtggagcatgagcctgaaagaaactggatcgctaaagatttcctggacagagatgaccagccctgccctccagccctggagtatttctaggattttttgggaaaggaaataattatcttcttgaagcctatttaaggtttttgggttgctgttacttgtaccatgcctaatctgaactgtgacaaaaagttttctacagccaagcatgaggtaaaagtgagctagacaactgggaatgagttcacatcatcttccaatatattctgcctctgttcaggtaacgcttgacttgacagccacagaattcttccaaagttaatactcttgtcatgaaagggtccagtgatatttgtggatagcagtgacttattaaggagattcccagacaccacccaaacagctggccaagagaattggagggagtttagttattcttagaatcaatggccttggagccctatatacacactgatgcattaatgacagacttttctcatgaatggcctcatgtttactttcacctaccatgaagtatactcttgttgataatcaaagtccttttctattccattgcacatctgcagtacattttttatttttaagtatactgatacatgccattacaactaatttttaaatcagcccaaatcattttcagccatgcagtagaaatggtacattttcattttcttgagtcatgatataattttagaggacaggatgccacctccattttaatgagcaaatgacacactctaactctattattggcagaaaatctggtgctaagatttctatcctatgtctgtgaaacttcagttagaagccctcattctaaacattacttctgtcaggcattagaattctctcctggactgttttctttctttcttttttttgagacggagtttcgctctgttgcccagtttgggtgcagttacacgatctcggctcactgcaagctccgcctcccgggttcacgccattctctgcctcagcctcccgagtagctgggactgttttctaagtgtccatccttgtgtctctcttctgggactattttatccataaagaaataaaacactatatttctccaaaattttcaatgaggtaatttacaccaagagtctggaatataacaagagataagttagctctagaagagagaatgataagccagtgaaaacacagttaaatgcaaattaaataatttcaacaataggtagtaaattagataagataacctatctgtaatcttaaaatatctactattcctgaaggaatagggtaatacttgaccaaaggacttgaaactctgtttcaattacagaatatcagggtgctgccctctctcttatctaactctaaaagccttatcatcattcgcattcctatcaagtagcagaattagaatcctcttaaatcttatctaaaatattataattccacccaaacagtagttgccctcacagttaggctttggccccgctgctgtcttcacttaaactaatgtttttccctatgaatgcaggagattcttcgatatggtttggcttctcacctgaatttcagactatggctcaaatgttttcatgacactgctatgaagactagcttttatgtctgatttaatgtgtctaaaccaaattcctcaacttattccctgtaatctagctcaaagtcccatgtttcccccctcaagaactctcctgttctctctgtgaactagccttgcaaagttagtacaccgttcagcctccttgtcgcctttctaagtaaagtgctttctttctctgcaatatgaagttaatcgttcgtaattctcagctgcaccatcccaattcaggtatctatatcattcctactctcagaaaatgccagccaaatggtcttcttgcttctggctttctttctcttctgttctaaatactgcccacagcagctcacctttgatgtaaagtctatcatgctatttgctaaattatgaaatccaacccttggcctgaattccatgacaattcataatctggccactcttgtctctctaatgaatctgcatccatttccacatgtgttctctttacccagaccagcttcctactacctcctgagccctcagctacatttccaactccaaatatctgctcattctggaatgctgctccttcccgacctctgctgaccttaacttccctgtctcaaaagtccagcccagacccctcccaggagcttccctgacaatccagacaacactctggccccttctttgacctttcctagccctctggaggcattgcatcatggcacttcatggctctgatatttaattactgtacgttctgtgttgatccccaattagacagcgattctggagggcaggggccagttctaatattgcttctgcatctccacaggatcaggtccagtgctaagcaactgaagctgctgaatggacaagtatctcgcagggtatttaattctgcaagttccttatgtctcctccttccattcctttagctcatctctgctcacttaaactgctccataagacttccaacaaaggccagcaaaacaccaagcaaaaaagcgaaatatattcgggttctattccgcaggcttcctgagcaccaccatctatcagtatattcctaaaataactattattttttttttctgagatgctgaacacctattaaatacttatgtctcacggcattaaccatactctatgcctgaggaatcttcttaggagtaaaaggtaatcagtttctcctgccacccagtgtatagctctcagccaaacattttaaggattggtaggatgctttctacttttctacacactgtagcgtgacttattgttgccactcttcctataatcaatggtaaatgcctttgggtccttaattcctttgagctggaaaaacagcatttgaagcctggcacctactgagacaagagtaaaagataacatgtttctccaggaaagtatggattaaacccagatgtaagcaatatcagaataaggtatttgataaaaatatttttagaatgattaacctgtaaaatatatttccatccatactgataatatatccacttgtttctatatattggatgcatggtttcatcatcaaactcctcctaccacaccaagaaacttctaaagtaaaattattggtaggtacacgtcctggaatagaattaaaaagggcccagtaacagtgacattaaatgggaacgttgaggtggttatcatctcccggactcttcattcactgcctaacattaagacaacctacctgcatcatgttgttctggaagcttcttgaaagagaactcttttatgctattagcatccacttagataatattacaccaatactgcgacctttttcaataggtaatctttgcaaactggatgcttcgtttaacggcataactttcccccttttacaaacactttcactccatattagcataggcaagggaggccaccttgcttagagagaccatcacacttaggtggtatctggttattttgcatgtgtatgacacctggctctcaactgagctaacatacatgggcattattagcaaatgactcagtggctcataatttagtgacttaaagtttccaattagaactattaagagcacagtcaaatattatttatcaagttttccaagttaagcaaaacctgagtactaacattacctaatataaatagaagttatctgttaaataaataaacttggaataaagttatcagcatagccataataactgactggcaaatcattagtggttattattcagtttgagacctgactgagaagataacaccacaaaacacagaagaatgccaattaaaaagaaaagaacacagtgtttatggtaggataaaaaagtactagtgactggatatttgatgcctatcttttgttgccaaggctaaggattgttttaaagtattatgttctgccttgatcgtgctataatgttcatgagcagatgaaaatttactcagttttcagtaatatttgaaatttttacaattggaaaccaacctaatcgacactcttcgttcaggtactagttatcaaatcctaagtattttgaactaataattatcctttacatgtatcagagaacattaccctaagttgcttgctagtattctctgggacagacattccttaacactcagtttttagttgtaacaagcacatgtttctcactcaggtaacaaaaagttgttagtaagaatatgagaagattgggtcaatggtatgtcaacactgatcacttgcgtttgctgcccagcagtggccctagatgttttgctgaagactgtactcctaagtgggatgctttgatgagcagtctaggaggttcgttttgccaagatgtctacagatggcctaacaccagagaacatgctgagaatttaatgaatgcttaatttaatttgtgatccttaccctggttttattttagaactcaggcatatcgttttagatgccctgaaaattcatagacagagtatcaactatctgctccccaatctctcccaaacaaaatgaccaaaaccctattgtttactgcttattgtatatatatattttttattattatactttaagtttagggtacgtgtgcacaatgtgcaggttagttacatatgtatacatgtgccacgctgggcgctgcacccactaactcgtcatctagcattaggtatatctcccaatgctatccctcccccctcctcccaccccacaacagtccccagggtgtgatgttccccttcctgtgtccatggttctcattgttcgattcccacctatgagtgagaatatgtggtgtttggttttttgttccgcgatagtttactgagaatgatgatttccaatttcatccatgtccctacaaaggacataactcatcattttttatggctgcatagtattccatggtgaatatctgccacattttcttatccagtctatcattgttggacatttgggttggttccaagtctttgctattgtgaataggatgcaataaacatacgtgtgcatgtgtctttatagcagcatgatttatagtcctttggtatatacccagtaatgggatggctgggtcaaatggtatttctagttctagatccctgagaattgccacactgacttccacaatggttgaactagtttacagtcccaccaacagcgtaaagtgttcctatttctccacatcctctccagcacctggtgtttcctgactttttaatgatcccattctaactggtgtgagatggtatctcactgtggttttgatttgcatttctctgatgccagtgatggtgagcattttttcatgtgttttttggctgcataaatgtcttcttttgaaagtgtctgttcatgtcctttgcccactttttgatggggttgtttgagtaagagctatcgtgacaaacccacagccaagatcatactgaatgcgaaaaaactggaagcattccctttgaaactggcacaagacaaggatgccctctctcaccactcctattcaacatagtgttggaattctggccagggcaattaggcaggagaaggaaataaagggtattcagttaggaaaagagaagtcaaattgtccctgtttgcagatgacatgattgtatatctagaaaaccccactgtccagcccaaaatctccttaagctgataagcaacttcagcaaagtctcaggatacaaaatcatgtacaaaaatcacaagcattcttatataccaataacagacagagagccaaatcatgatgaactcccattcacaattgcttcaaagagaataaaatacctaggaatccaacttacaaggatgtgaaggacctcttcaaggagaactacaaaccactgctcaatgaaataaaagaggtacaaacaaatggaagaacattccatgttcatgggtaggaagaatcaatatcgcgaaaaggccatactgcccaaggtaatttatagattcaaatgccatccccatcaagctaccaatgctttcttcacagaattggaaaaaactactttaaagttcatatggaaccaaaaaagagccgcatcgccaagtcaatcctaagccaaaagaacaaagctggaggcatcatgctacctgactcaaactatactacaaggctacagtaaccaaaacagcatggtactggtaccaaaacagaatatagatcaaaggaacagaacagagccctcagaaataacaccgcatatctacaactattgatctttgacaaacctgacaaaaaacaagcaatggggaaaggattccctatttaataatggtgctgggaaaactggctagccatatgtagaaagctgaaactggatcccttccttacccttatacaagaatcaattcaagatggattaaagacttaaacattagacctaaaaccataaagccctagaagaaaacctaggcattaccattcaggacataggcatgggcaaggacttatgtctaaaacaccaaagcaatggcaacaaaagccaaaattgacaaatgggacctaattaactaaagagcttctgcacggcaaaagaaactaccatcagagtgaacaggcaacccacaaatgggagaaaattttcacaacctactcatctgacaaagggctaatatccagaatctacatgaactcaaacaaatttacaagaaaaaagcttattgtatattttatatattgtcactgaaaaaaactaggaataatttagattaatttcatttaattgaatgctgacatctggtaagagacaaatttctgttaacccaaagtccaaagctgtaacaaggaaaacttatgtctaggatattgtaaaaaataaactactacttagtattcaatgctacagagtataaacatataaagcattaacaagaaaacaaactaagtataaggtctttcttattgctatggaaaactgcctaggatttcagattatttatatgcatatggcttatcaagatgttaattctaaatctatattaaaaaatatttggcagacatgtattatattgctaatgtgccaaagactgctaagatatctaggagatataatgaataggtacagcctctgacatcacaggagcttagaaattagtgaaagatagacacagacagaaattatgtagagatatggaaatgattgattttggattgagaagctatgattagactttaggctctattggagccctcaacacaaaacaaaaccttccaaaccccagttgctcagagcaaaaaccttagaattattcttaagtcttctattactattatactcacatctgatgtgtcataatatccttttggatcaccctcaaaatataaatatagtcactatatggctacgtgctgttccaggccactatcatctcttaccttgattgctgtatgggctaactggtcttcctgtgcctactctgtcatctattttcatggttttttttattataataagaaactagaataatcctattaaaactttaaagacagaccatgtttctcctttgcccactccctccaatggtttcctgtttcttcaagggtaaaagctaaagtcctttagggccttaatgatctggcctcacttaccccttgaacctcatctccagctactcttcctcttggtcctttgctctggccacattgcccagtcagacatacccctcccttagcactgacagttctctcttcacctccttgagagtcttgattcaaatgcaaccttcacaatgaaacctgctgtgatgtctataaaagtcatggatccacaccactagtgccatgtgatggtgacagaaacagagcttttgtgggaacaacacacaatcagagaagtaggtagcgtgcatgcaatctcccaaactccattgtcctactgctgaggtgaggcacaaatgctctacacacactgtagttacagtttcacatcctgctctatgtattgacaggatatttatgcaaacttataatagcagaagctccctgtcacacaagtggcctgttagaaagaagtgcttctagagccagtggctggtgtcagcctctctaccattgaactaactcagaagtgatgaaccagctttctgctacgctaccagaaaggggaaaatgagactatagttttgtttttcatcacccaaccagcccagttaaaaattgtagccatccctcagcgctcatgagtaccactcccttggcatagttttttttttttttttccagagcgctcagtaacgtctaacataatacacttaattatttttctaaatccattagctacttccctactagcaagtggcatctccattagagtagggaattttatccatgctattcacgctgtattttaacagtgcctgccctgaagtaggctctcaattaagatctgttgaatgaagcattaatgaataatgaatgaatgaatgtggggaactatggaggaggttaatggtgaagtgcaacaactaaacagtaaatgaggaaagaagtgcttggattcgactgaaatatgtagactgtaccctttgaggaggaaggagaaagggaagggtggaaattaactgttgaagaatgattttgaataaagaaaaatctgagccaatcagtcaggcaatattgaaatttttgtgcccgtctgacaaattggagtgcatctatcagagggtggtgaagatggtgggaaattgacaacctttacatgatgaggaattgattaattattttgaaaaagaaaaggaaggaatgaagaggtggaaggaagcatggggaaggggaaagaacataccagatgaaaagttaccatgagagggaagtatatagtatatttattttgaatgtacaatgcattatttttatagtatatttggggtatcttggtaggaagaatatatatttattttgaactaatcacagtaaatagctatagtactcaaatttctagatcaataaaagaaaaaaacttaatttgttcagaaaatagggtgtttttgtggtattgaacataaagtcccttgagtgttcaagcaaagcctgatgatgacttctcagagtgttacagaacgtttaaaaaaacttgtattagggctaatggggatggtaagtttgagtgcctagatacaagaagagtttctctggcattcctacctattgtttagatgttaagcttattgtatgtaacacttgagacgtgagtatgatatagtatttaatgcaagcagaggctcacaaatgttgaatgcacgaagcaatgaatgaaagtataacttaatgaaaggaaaccctaccgaatatgtagtcagcttattaatgttattaagagcaagagagctgcagagttaaaactgctaccttatgcagatttgggattcagcagggaaaatcaaatatcagtcatatatcagaaaaaagagatatcagcattgatcctcataactaggagcctggttaaatttttaggaagaaaactgggaatttctccccatttagatgaatttgtttgtttttcaagcaagagactagaaaaccaaattcttggatcagggctgttatatgaaagcactatggtaaattaactgcatgagaccagttatgtatgtatgtttgtatgtatgtatgtatgcatgtatctatgtatgtattattttttatattgagtctccctctgttgcccatgctggagtgcagtggcaccatcttgctcactacaacctccacttcctgggttcaagcaattcttctgcctcggcctcccgagtgctgggattacagatgcgtgccaccacaccgggctaattttttgtattcttagtagagaggggtttcaccacgttggccaggcaggtttcaaactcctaacctcaaatgatccacctgttcagcctctcaaagtgctggggattacaggcatgagccactctgcctggccgagaccattttcaatttagaacatgaggttatatgagacactataaaagtattaatgaacagtataaagatgagaaattctaagatcataagtactgctctgagccttgaaacatttaaaagatacactgaatgaggttatctgaatctgtagaatttacacctgcaagccatattctgaagggtcctggatactggttgctaacttttaaagccatcaggctcagaataaaaatgctttagatagctggtaaagatcctgaagtaactaaataaaaaagggaagcccagcatcacttactatgaagatgtgcaattgcagttgatcagttgttcaagaactgtaaattatgtggacatcaaaatgaagagagaagaatataaaaatgtcagcaatatgttataactaacttagtccataaatagtgtgtataccggaatagtgtgtatccaggaaatagaagtaggaaaccaaagtatagggaaaaggagaaggactttataaatatacttaaaattgtcaaatgaggctaatgtaaacttcacactgggtaccagtattggaagtggtagcaggagcagcagtagtaatagcagggcaaaacacatagcacttcccacatgtgagatgctattctcagtatttcacacctactactcttttaagcctcctaacatgagcattaaacactatgagacagtgttgcatgatgaaaaaactggggaaaactctagataaactgtcactttcctagaagggaatacatcatactagagcatttcttatatatctgtttgacaaaagaaatcttttcatggtacttctcacagggcagagattcctggaatactccattggagatattgatctgatatttgtaaaaggggtttgaaagtaagagtgtcctgttaatcatcaaattattgaatttcagaattcttaggttctcttttccatataaaatatttaatacaatgtttcagacaaatggtcattcaagtattgtttagagcctgcattggctagaagtgcagtctctcagaaagataaggcatttcaccatggaaagcaatacaattcattgaaaacactttttttttgtattaaagtagtgtttttcttgtataatctcattcactgactgcctgactgctgtaataatgtaaagtcctcttataactccaagtacaaaatgacaaaaagaaaaattagaataaggatggaaaattttagagaaaagtttaaattaatacagtggaactgcagtgggtcgaatggtggcccttcaaaaagatatgcccacccggacctgtgaacctgtgaatgtgactttatttgaaacaggggtctttgcagatgtaattagttaaggatctcataatgagatcaagctgtatttgggtgggccctaaatccaatgacagtgtccataagagaaaagaagggacaatgatacacacagaaggtgacgtgaagaccagcgagactggagcggtgcatctataaaccaagccatgccaaggattgccagtagaaactggagaggagcatgggagggattctccctcagagcctccaggaagaattagccctgctaacatttggttttcaacttctggcctccagaagggtgagagagtaaacttctgttgttttaagcacttggttcgtgataattttatagcagtactaggaaaccaatataatgagattaaaacaatatttaaattaccagaataaaattagatcatatcaaacccaattgcaaaatgaccgagaaaagatgacaaaaaaactgaggatacaataaaatcagaaaataaaggcaggtgaatagggaatgctgaattaaaagggcaagggagaaactaagttaagtggatggttaggaaccttacgaaggagataataaatattgtctctattctattgtaatataactaataaatagtagtaaggaattattaggatgtttaaggaattatcaggaataagaatgctactttatgttctctgagttaaataaatacgacacaaattatccaagtttctgtttctacccaaaatactgataaaaatgaaggataagcatgttgttggatggtgaatagaataatggggacagtgggtgcaggaaagagaccacacccagggagagacagcctaggctctgttctggcttctacttctcctgcaaggtcaaacttatggctccaatgacaaaagtagcctttgtcaatctttgaagattgctacactatttgtcaccacactgaaaggaacatgctgatctacactttgttttcaactcacccatattcccatgcttttccagtttcaacttagcactctaatatctgctgtgtccctgtgaaccttagactctgacttctcttatttagccccttctgaggctatttcatgcaggcatgtgcaaaagtacaattgagaatgacaagcaaagggtcctggcttctagggctccgcaaacaatgcaccagaagaaattaagcctatatacaaatgcctataattctcacatcatatattctatgtgaactatgaaatggagtattaatgattcataaaattctaccttcaatcagaccactctcctcagtgccagctgcatcctgaaccattgaatatccgcaggtacctaacactgtgcaaaactgaatatattctcttttctcttaaatctgttctatctcttctgttcctggattgttaatggttttatcacttgccagttgtccaaagcaaatacttatgtaccaacttgtactaatttgatttcaaatcctttatccaatcaactcaacctctaagatatacgaaacctgccactatccttctctgctgtcactatgcaactcatgttcaaagcatgcttatcctctcacggacatctgcaatagcctcctaactcatcttccctctgtgcatgcctcccttaggccactcctcaggaacagtcagtggtcttttaagacaatgtaaattagttcatgccttttctgtctgtaaaacttcaatactttcctagtgcaaatatcagaatccacttactatctcacaacacattggtcctttttcagttccttaaaaatatgaagttctctaatgcttataaccttcacacaaacgacctctttgctatgcaggttccctattggccaccaccccacacctgtcagctcttgtagatcctttaagtttagcctgactgtcacttcttcaaaaagccctctctgaccctgaaggctaaatggccctgctcccatttccttgcacttatgcttcagcttataaggattatcaaaatttgtgattattgaaggtgtttgtttttgtctgttcttgttcacagattgtgtatcttattcactattataattcaagtatctagcacaaggcctagcacatctaagtactgaaaatattttcaggataaagggatgaatgaatgaatgaatgaataaatgatgaatgaatgaatgaagcaaatccaatgaggtcacaggtaaggaacggatggcttcaatatgatctgttcagtacatgctagtgttccacacgtcctgaaatcaatggaccagacgctctatgtctgaagcaggcaaaagaaggacactgtcactacctcccaattcttcagatatgccagcaaatgggatcatctccacaactgaaaacttctattctgaaatatttcagacttaagtagcaaggagagcaaaaggaattcccacatatttttcattcagactccccaaatgtaacattttatgatgtttgctttatcaatctatgtatttttcctgagccacttgagaataattgcagacataatgccccttattgctaaatactcagcacacgttcctgaaaaacaaagtattctcttctcttatataaccacagtacaattatcaaaagcagaaaattgcattgatgggtactattttttaatcaagagaatttattcaaaatttgccaattgtatcacatctttttagcaacatatatacacacatattttataacatatacaaaatatgttactatacacacaacatatatatacatacgtgtgtgtgtgtgtgtgtgtgtatgtatcttcccaacccctgtctaggattcaatccaagaccacatgttatatgtagttgtcacatctcttggtctcctttatctgaaacagttcctcagactttttctttaatgacactgaaggttttagagtatagacaattattttgcagaatgtcttttagtttgggattgtctgatgtttcctcatgattagatccacttatgctttttggggacaataataccaccaaagtgttggtttgtcctgcttggagattatattaggaggtacatgatatttatttgtcccattattagggatgttaacttcaatacttggttattactattacccttttgtaattaataagttcttacagaagatacttggatttatataaatatagtgatagccatttaaaaaaattacccaactctactctgtggcccaataattctctacaaataaaaacttggcaaaatatttaaggtctgcttatgggtcacaaaaagctaaacatacaacttttcctaatgcaccaatctgttaacattaccttacctgcttcttcatgcaaacaaaggaaaaaacctaagatgctatttttaaaagaacattataaaatctcaatttcattcctcattcatcagatgagaaagctaaggtccagacaggctaagtgactcgctaaggtcagacagctactctggcagacctcaaaataattatgtgttcattgtagagcagaaatgcaaaagtcaatttaatgcccttcaaatatacaagccctacaggtaaacctaaacaatctaaggcaggtttgagatgaccattttggaaaataatgggatttttacaaagatcatagaacatctttcatggagtcactgaagtttctagaggaagcccaagagctccctgcttgcctgagttctctctttgttctttttctttctctcttttcttctcccttagaaatgctttaagtcattccaaagacaaagataaaatcccatcactctgggagagaggctgagagacgcctacaatgggcccctaactttaaaatgttatgctccttgcccaatactttggacactgcttaattctaatcaatatctttttagatgttactttgaatttgcataagatagtcctgcataatcttatcacattgtacatacttgaaaaaataattggtaaacattctacgaacatctaacctagagtagcccaaaagtaagtggccactacagtgccctggggctttcttttccaggtgactagattatttaaaaataataacaataataaacagcaggtttcaggagttgaattctattctcaacctctactcagaacacagaatggttccaagctttaccttgcctgctcgtatcctccaaggacttttagaagtaatggagatgccatttctgtccaacccagtatccaaggtaataatgcttggcaaatgttatttttagatgatagcagcatacctaaagctatgaccaaaggtaagcaatatgaagacatcttgcacaatctttctatacaaacatgcagcattcctccttaccacttcctgggatgtataaaatgcataaaaatagaagcagtctttctttagggtgagcttttatcaagacttggtataaaaataagcaagttatatttaaaaaatcataaggcaaagatgtacattgctatgagtcataattagtaaatgtattcaagccttagaaaataggaaagtgctgtgttagaataagagttagaagtagcagcagtagtagaggaagtagagttgtagagtcagcagtaacttttactgtttaccatgtaagagcactatgctaagtgcttatatagaacacctcatttagtcctcagaaccatcttagtcttcctctaactttatacaagttagtataaagtaaataaaacactggaatggtatcacaaatttgatctaagattgtatccttctttgcagtaacgaatgactaatcttggagtgttaaccactgtgcaatcattacaacctacaccccttctctccttttgagttgctttacgagggagatcttacctgaccacctatataaaaatatgaaactcctccaaaccagacttgcctgagtttccccattgaaatgaaactccataaaggcaggaactttgtcttcttaattgctatatcccagaaccagaacaggccttgtatgtgttaggtgtttaatatatatctgtttaacgaatgaatgaataattgataacaaaaccaaacgataacaaatataaaattttcaatgaattgtttgctttcccttcacattacaaaaaaaaagttttagtggcttgattcaagttgtcagaatctcttaaaaagactgatagggaagtttgaactcatgagtttatttgctgaaaaatttatctggggctagcatgatattcaaagacattctactggctatgcttttttttaagaaaaagtcctgtaattccctcttagttgtcaaacaagttgagcattaaatacttcattaaacatgagacataattttaattagacaacttcattcattgccgggctacattctctgagtacctccatgtactaaacacaaggaattggctgggagtgaaccacagagtgaaatatgagggttagtgaccttcctaccaatatgggacatctgttctccctgtctgccccacttctccctcctaggctctctagagcaagtgaacaactcaaacaggatttttcatctaactgacctccctggcaacttttattattcttgctgctgggaaggcaaagaaacagagcttcgaaaattacatgtttcatgctggggaaatgtcatagcttcaacagagttttaagatattggtaggaaaattgtttttttggagaaacttccatttttgaatgagcaaaaattatgcctatttgagaatctaaaataatcaggtatcttgggctaaaaaataacaccataaaatctaataggtgtttaaagttttaacataaattcgctctactttcattgcacgagcttaggcatacatcattgatcactgtgaggaaaactatattaagttacttaaataaaaaatatgtcagttgatgtgacagattgtttgtttactgaattgaaatgtataaaacttcactgatgttgttgaaacccagagcattacctgttccctttcagtttctgctttcaaggaaaaatataaagttatattaaaccgacgcaaattctgtttcaaatacctctagatatcccagtgttgcttaggctaaagattctaagagtaatgaaatgtattcacttcttccccaaaacacttatttaaaaaaaataaagtgatatcagattaagaaataaaatcacaccttcttgatgacatttttcaatttttttgttacatgctctatctcaggaagattatgtaacattaaacgatgagagaaaaggttttcgacttagactcacagtcaaccataacatgcttttgtttgcatgctaatcttttgtgattagttgtagcacacagctattctgaaagaaagtggccaatgtatggttttagaaatactagcatccaaaaaaacacatagtaatgtcaaaattcttaaagtagtcattgaaatagaccataagcagatttgagatataggctaactggagagctgtgtaccagccctgcttaaatactattactcaaacagaatttgacctcacacattacatgtaagttaaaaagagtttagttaatataaaagtcaatgaaagtatgaaatgtaaatattagcatatcttttacgtttctgctggatttttggacataaactaatttttaatttgccataaagatctataattagacatgttcacaagcctgttggtccactgactctgcttaactccagaaaagaagtccttgctcatgcattagcgcatccattggtatattttaaaatttggaaggaagatgtttaatgttattgtgcccctaatttttaagtgaagcaaattgtattctcaattacaatacttacagctgttgcctgctctattacccctctgccagctgaatgttctggctccttgtatggaaactgcagagttgtatctaaggttctgaaccttccttgagagaatgatgcttgtagtactccacaagttcctttggaaaaaagaatccacatatttttgataaggatacttttgttctcaaacacatgaactcctgagcacataaatcaataaggatgaccaatttaatgctaaattttccataggtatatggaagattaagcaaagataatctctccctgctgtctggatgtacatgacacctacctaatagctgtccttgttatcaggccattaataatatgagttaccccctattgttattcacagatggagaacatcctgcttcagtcagatgtagcaaatgaaaagaaacaatactaaacctcagtttcagagtagtattattgttcttatttatgaaatacttgcctttctaaaccaaaataaaaggaacagctgctgctgaatatacagcaatttctactttcctgcacttattttctttcaaaatggcagaaaacaaacttatgctttttcgtggtaaacaaaagttgataaagcacaaatggtacttgacatgtttttagtttctgatgaagtatagtacctgtcatagctccgcatatctgctactcacgaggtcaatgtaattctttccaattttctcttataaataatttgtcttaaatacatctaacctaatgtaataaccacatgccatccttcagactatcgtttcagaaaatttcacaggtggtttcatagattctgcagaaatctgaatctctctactgtaaactgaaactgaataatattcacaataaaaatgtatcttatcatcaaatgagtcctgtagatataaaatttcttataatatctgaaatgaaaataaacgaaaaatcacttttaacttaattattcaatgtttctatggagcgcctttttaaaaataaaaaataaaaaaaaaaaaacagaaaaaaaaaccacttgttcttctaaaaatcccactgccatcaacttaatatctctgttcagtggttatgttcaaagtccccagacaaatcaatgagtccaaaaatcagttgaaagaagaaaaagagaatcatcaagatttattatttatgacaaaacttgagtatgttgtggaatgcactgtaccaggagcttcgaggtcacagagattataaagataagcctcctgccattgaggaattctcatcttggaaggaaagttcaaaggcaggagagagaactttgttttgtgtatccaatgggaagggtgacagaagttttgtaatacaagtagcttggcttaaactgaagaactagtaaaattacaatagccggaaccagggaaagatcattttaggtagagcaggcaggctggaaacagacataaaggtgtaaacaaagaccacctttcataagctaaaagcagcatagtttggctaaagcattggatagggaaatggcaatttttcaatctcacctataaaatggggctaataaaccatttcacagagataacaaagaatatataaagtacctaatacatgtgaaaaactgtaacagctaccccatatcccatgtgccaggccctttacatggctccttataactttcactcaagaacattatgaatgggccttattcccattgaagctcaaatatcagtgaggtgagtgaacttaggcaaagtacatagctagcgcctttatccaaagtttgtgctcttaactgtatcatactattagcaaaagtgcctagcaaatgtaaatacaaaaacaagagccaggcatggtggttcatgcctgtaacccagcactttgagaggctgaggcaggcggatcacctgaggccaggagtttgagaccaagtggccaacatggtgaaaccctgtctctaccaaaaatacaaaaaagttagccaggtgtgtggcaggtgcctgtgatcccagctacttgggaggctgaggcaggacaatcacttgaaccgggaggtggaggttgcagtgagccgagactttgccactgtactccagcctgggcaacaaaacgaaactctgtctcaaaacaaaacaaaacaaaacaccaaaaaacacacacacaaaaacagggaggcaaaagtgaaatagtttttgctatgtgttcatgatgtactaggaactttgtttcttagacttaaaatgttagggtcttccaaatattatatctataacttgaaaaatatgatttcttcctttcttccttgggcccagataatgtgggtccttgttgaagcaagaaattttaatcagaccgacctttaaaagcaaagagaaaaagaaacaaaagaccatgtagaagttttatctccaaaatggtttcaatgatcagaatatgcatttgtattttggtgaattttaacagttttgcgcagacaaggtatagaattaaattctacttagtgaccaatattgctattcattttttaaaatataaagcaaaattttgtgaggtctctggaatacacacacacacacacaccacgtatacataatgtcactgatacaaacgataccgaagtttctcctagtcttattactaaattgagtaaaatgtgttattttctttagcaaatgtgaaaacaaacttgaaaggaatttaagccatagctttgaacttcaacgtaattttgttataggtaatatgaattttatgattttgctatgaattacaatttatgtgaatttggctagaaaccatagaattatcatactgaaaatgatttggtgattatttaatactcgcccacccccaaattttatggaagaaaaaatgattttccaaggcctagggtcatgcggcttacttagtaagctgcaaaacactctttatcactcactaagcatggaagatattttagttccatttttacagtcttacgagggtaaatcttctacatgtttctaactgggtagaactaaatagtgtcaccatggatcttttccaatttgccttatgctttctgtattttagtctaatccacccctgccttaacagtcattgaccttcaggacaacaagtaaataagaagactctaaacaaaagaaatcgctaagctttccttatctcacctgacacagcagtgtcaacaattcaagtctctcaaaaataatgagtgagagccagtcatccaattaccaaggaaacaggcaatggagatggtttataaacagcatttggacatggacttctcgcatacatgaaaattagaacaaaattaatgccttgtaatctggatacagaaattctttaggatttgaatttaatgactaagaaagacaaagattctgattaaccaagctattgaactcaagggaaaaaggttaggtcaaaaccacctaaggccaatcttctcactgagaaaccgttaatttaaaagaagctctggagtttgcttatgttttacacactttccagatttaaattaattccaggccctattgtgtttcacagatagaagagtaaactaataccaataacaagagatactgaactattcttaagaaacaactcaaatccacagatcactccttacttataataacaagtgtgttatttgactccaacatgataaaaggtaactccatgaagtttgtatgatctgattttgagaaaccttcacaccaattaatcatcttctacctccttccagaagttcaggtgctaaaacatgagccattccttctgaccaagtatccatgtggcatttcccagcctaggtccaaggactgctctatggtgaggttcttggtgtagacgtatttactgattcttaagctctttttagaatggttaagtccttttgagttctccagaaagtgatttcacattgtaaggatcaatataaatttgctcaacaaatgaacagaaacaaaatggaggggtagcttcagattattcagctgcctcttcagcaatttttatagttatttactaaacttgataaaagcactttttgatattgagattttttttccagctccttgtttttcttttcataattacatcctttgctatgtttgttagtttcattttgctttgctaaaattcttagtcccttccctttaacacgcttgatacgtgcttccttacaaaagatgcccagatatggagaagaaaacacatatgcacgttctctaatagtggcattgctgagattttatacataacatataagaaaagcttactttagcctgtgacaagtacttttagttatttttccagagaatatcattgtagaaacttttaaggtctctggcacaatttttttttaatgctgggtctctattgctttcactataatcacagctttacatgcagataggaactcatgtatctatgtctaccaatccaggtcactgtggtattatggcttttcacatctaaccttggcttctgaagaactgccttgagctgaacccaggtgaccaaagctaaattcattggcccttttcagtgacgattcctttcatcttctttgcttgtctctctgatgggagttacttttgctactttcaaagtctgcaaggctggcagttatctttggtctgcagcagttttttaagtcccatagtaactataacactgtggagcagcctcattacctccaaggaagttctgcaggtgaaagctcaagctggtacgtcttgcagagatgtggagagccctgtgcgtgcttttatcatgtctcagctgtgtctgtcattcattatttgtgcatccattgccacctccctccaagttttcattttatgaagaacctcctctggtccaattctctcttgctcagcctgcttgtttcaacagaatgtaagttacttccagcagggaggatgcctggacttggttacaaatttgacagagtttacattttccaggacatgaccttgctgcccatcctagcttttgaactgggaatgatctttacatccatagagattttcttatttttctttcaaccaagatgcttcaatttctttaaaacactgacacctgccttgaagcagttctacatttttgataaggcattcaagctggcctattttgtaaggctcccttacactcagtttaactttaagttaacatctgcaaagtgctttgagatgttttctggaaggatgcagtatgtatcatttgttgatggttcattcaatgagtggtccttcccaatgttactcaaggtacttagcagtacaatgcatcttatgtcctatatccaaactcttcattatctcagaaactaccaaacttgagaacatacttgagaccacttaaggaaatgtgaatttagagtttactgttagcaacgcatactgatgatatatacacattgtttaaatgacatacacaaaatattcttatatgctaacaaagtatgaataagttctattttttttaaactgggaataatccttattcatttgatgtgattgacaatatactatttccatttaaatatacaattcctatgaaatatcaactgttaagtggaaaaatgttaccttgttaatgcataattatctaaggtaatgaatgagaaccatggtagaatcacttaaaatagcaaaaaatacaaaaatcttttcaatttgactttatattgcatttttaaaaaatgaacctaaatgttagacatattttactaattacaactttttgtgttataattaaaatactgtcctctgcctgaatcaggacatagaggcaaaggaagaaaaaaagaggaagaaaggtatatttaaaatctgctgtatcatttaaacacaaaccaaaactctatctaaactgcaaacaatttacaatgaagattacgattcgagcaatataaaacttagagatttataattagaattttcaggattttgttgcaaaattagaatatgattatctttaaataacttttcgtgagcaaaatttccaagaaactatagaattaaaatgacctttctaacaaaagaaaaataggatcccagattgaaaagaaataatcaatgcttaccattaaacttttaaattttctatttctgcaatgtgaaaaaagccatctcttgttaaaatcttgatgtgctttgcttcattatgtacctgtgggcaatgaataacttatgaatataaatgtgtttttaatcagtagaaatcataattaccagagggcatgccccaataacattttaggaattaattctgcagacaaaaataatacctatgccaatacactggtgacagctaattaacaaaatatatttactggattggttaggatacaaccaatatttgaagtgagaagggaggttggatttgactattcattatgcacatttattaagttcagtttgagaatatagaaaaataagacaaaaatctagaaatttatacgttagtatttactagaaatatacacacatcaaaccaccaaaacacaatattatgaaagaatctaatatgccaattagcaacctataacactttttactgtttttcaaagatatattttaagtattaatgaactgtctggatagatgcattatttctccttcaattagaactttggtttcaccttcagtgttatacatgtcagatggtctatgcaattatgaaaacaggaaatctattctgtaaaagtacttgtcctacttacttaatgctaattgcatattctcctgactctttgtcctgtgcctcacaaggtaagtactatttaccctattaataagttcggtctctgcttgcatctttccattgctccagcatacctgtaaaaaacaatgacacagaaaatttggataataacctggaagagaacagaggctaaaagtaagtatctctcaatatttaatttagtggcagactgagctgttggtaattctatactaattacattgtttaagaaaaataaatcagaaaaagtcctttaatacgtccaaacacaaatgctctacaaaactaacaacagcaaaatgaacaatcctaatacccactaagcacctagtaaataaatgggacacagaggagtcagtgggtattggtaaaaagacagttgtggggagcttagggacaggaaggaaaaagacttgtagggagaaatgccctgtataagatacacagacacatttattttagcttttctatatatactatgaaataaatctcctttaagtatctttttaaagaaaattctagcaataagttattttaaatagtttttgttatgagattaattcattcgtccacaattttgataaattttcttaagcaattagtataatgagtaaaatttacttttaaaaggtagatttttttttttgcatagaaagaacattctcattctctttatttgctaaatacaggcaagcccaaagcaatgcagtctatttaacatctagtaactttttttttttttttgagacagagcttctctctcttgcccaggctggagtgatggcaccatcccagctgcctgcaacctccgcctcctgggttcaagggaggcctgtgcccagcctcccaagtagttgataccaccggtgtggttgatatttttcaaaaccagaattcatctccctagactttgctggccttaaacatacagaaactccataataactgtaataataaaggccaaaattcaatcttaaaataatctttaatgacccctcaaatcatacataggtgtaaatctcctggcaagttacatcagagattttagtcaatagaacttaaaagaaaaattctgttagattggttctctttcaaagctagtcaataattaatgtatccgaaaatcctctgattacatatagacccacgtaactttgtataaacatccacctgtaatgcaaacttaatattcattaaaacgcacatgacaggcattcagcaaaagtttgttgatggaggacatgttaggtttcatctagtataaaagaggaactaaaggcattttatgcagatggtaccttgcgttaaaagaaagttataacaactcatgaactactaggacctagtataatctgactcatgcctacctccttcaaccttatctcttacatctaccttcatcactagtctccagccttctttcagatccggagtttctcaagctccttttgcgcttagggtcttctcacagactgcactcttgtctggaacactcataccctatcaacacaatattccttctcattgttaaggtttagaggggtctttctgaccataccatctaaagaatgttgtcctgcatcttgtactacctactccattattccattacagtattcctatttttgtggcacttatcacaattagtattgagtgtatgcattttatcaaagctatgcattaatatagttttaaaagtccattcacattataataatgaaaaacagcagtattccatcagaccagcattctactccaagttccctttcaaacactgtacctatttttatttctacttgtgtatttctaaacaattatatgacaatttcttatcaattttaacataaggaaggaaaaccatcttcttcctgccacctgtgctcactcctttatagtgctgtcctcactcttgtctttctgtaacctctacaaagccaagctgtcatctggcctagttttgcagggtgttcattcaaagaatatctgccctccaaaataaaattgctcatgtttttgtttttcaagttctctgtctctatcacagattctttccaaatatacctcccaaaaatacattttcaacaacattgctatggtttgaatgtccccttaaaacccatgttgaaatttaagtattttataagagtattgaaaggtagaatccttaaaaagtgattaggtcacgggggctctgcctcatgagtggattaatgaccttatcataggagtggttagctatctttggagtaggttccgataaaaagaatgagttcatccactactctctctctgtctctcccactgcttcctcgcttgtgatatctcctgccatgttattatgcaatgagaaggccctcaccagatgcagcccctgattttggactgcccaacttttagaaccatgagacaaataaatatatcttctttataagtaaccaatctctgtggtattctactatacacgttgagcatctctaatcttaaaatctgaattcagaaacctccaaaatctgaaactttctgagagtcagcatgtttccactaaaatgcgattatagtcaaaatgcagtcgaaactttgcttcatgcacaaaatttaaaatattacataaattaccttcaggctttgtgtataagatatatataaaacataaataaattttgtgtttcacttgggttccatcctgaatatatctcatgatgtttatgcaaatattccaaaatctgaaaaatctgaaattcaaaacacttccggtcccaagcattttgaataagggatactcaaccatagctgcattaattgaattaagacaaccacataatctacctgttaattttctctggagcttttcttctgagccctccacgctcttctaattgatactgcttgctctactaagcctgtgaattactgtagtcctgggacttctctttgctcccctttcctggcttctatatctccctttccttgatttactagctcatccttcagctttttctaaacatacacaggatgtaacacttaaagtcccacatctatgaaaatattttattttacctagtaattcatagtttggctatgatattattgcaatattcatagtttggttattgggtaaagaattctaggtgagaaattatttgcctctcaaatattaatacattgattcattgtcttctaatttccattcaataccattctaattctttgtatgttgcctgatttttttctccctagaaaccttcaaattctttctgtttctctatatactgcaaaatttcgtgataatgtgttttttatattgtccttgcctttcaaagtatcttcaatttggagccacatgtccttcggttctgagaaatttctgtatcatttcttgataattgctgcccttggttttctctttctggaattcctgctacttgaatgctgtatccctgggtcaacagtctagcttccatatagcttctctcatattatccatctctgacttttggaagatttgctaaactttatttcccaagtcttctataatatttaacttataagagctctttttattttgactgttttctaaaacattgagcttacttccaatgaacttaagttttccttaattttgaagatgtaaataaaagtttttttaaggtgtctgctcactccaatggtttttctttttttttttttttttttttttttagttcaagggtttcctcaaatgtatggttacctttgttgtttgttacttaagaaggatgcatccacaattgactggaaactctgtgtgtggagcaccaaaataggtccactgggtaggagtctgatcttttttttttttttaagatgaatctcacactgtcacccgggctggtgtgcagtggtgtgatctcggctgcctgcaacctcccctccagggttcaagtgattctcctgcctcagcctcccgagtagctaggattacaggcaccacaaccacgcccagctaattttttgtatttttagtagagatggggtttcactatgttcaggctggtcttgaactcctgacctcatgatccgcccacttcggcctcccaaagtgcaggattacaggcacgagtcaacacgcccagctgagtctgatcatttgacaagaacctgaagctgagctgggaaacacccaaaggtctggattttagatttttaactctatttcgtttcttggccaaaaatcttccaaattcctgtctgaataccaagacagggtagtatgtgtatatggacccagctgtcacagtgctgaaactgagctacacaagagaactggagagcatcatcactagtatacagagccctctgttttcactatggcatctccccagtctctgctaggcttgatcttccaaatctaggccctacatggttcaccttttccacataatataccttctaactccaggtctcctgccactgcaggaaagggcaatttgtccggactaccatgggaaaaggcagggacctgacatctatctcttgttctgcatacagattttaggatagttccccagtttgcagtccaaatctcattcctatcttttgataccccgaaacatagattattgaagacaatcatcttattttctattttatttcattctgtatgcaagagacaaaatttaccttgtgcaaacaactacttttaaatgtagaaataatgagtagataatatagttggtgatacttaacttctcagtacttgagaactaccatgccatcaagcaaagtaattttctctaaatagtttagtatttctaaattgaaggttctattttctgggggagttgatcattttgttccctagcagaagacattcacatcaaactgcctgcttagtttaaatagattgtccaggttgctcaagaaaaaaagaaagtaatttaaaattctactacatctttatttcttcctattttcaaggctctccctttgctgaacatcttgcttttataagaataatattattctaactggtcatattttcagtaggatttacatattggcaagggtgcattttaaaactaagggtacaaaacctaccttcgggtgcctgaatggttcttaggtacctaataagtttatttcataaaatccatgcagtttgaggtatagcattttatctctcaaatcattacctttgtaactataatgcccagttacatgaaaaatgtataagagaagaaacctaatcatcacactttcaagatttttaacagttcctgatgttttcagtttgattatcaatgctatcagctctagacctcaaattaaatttctttcaggactaagtttaaaattccacagacactaatgacttcaaattgtcttcaatcaggtaaaaatgaacacattcccagttctatcacaaacctgccacaatttcttcagcaagctcagtgctgaggccagggagggatatcaggaagggtagacagtaactacagaaggcagagtgactgccagagagggaaggtggaggagggcccgaggagagtcccatacattgcacagtggattcctacatttgaaaagtaactcagcattttccatgcttttgttatagaacagaaaataatcagaactgtaaaaaatatcagataactcacatggtaacatgcaaacccaactagtactatatattccaggatattatatttatatatgtattctgatatctcatttctatgcatgtattttaatccaataaattaaaaatagattcagtctttttaagagaagtcaaacacaaaattcaggaaacaaatagaaatgagtaatgtgttcacattctgcattttgggggcagtatagcaatgtaagatggcataacttggaattctggctttaccactcactagttgcatgctctgtttcttttttcttcacccataaaaaataacaacagtcaccaccacttttcttatataaatgttgaaaaataaaacaaaacatgtacagtacaaagcatatatagtaaatactcagtatatattagtattatgacatcatgactatactaaatcctaaatatattttttaatagttggagatatcagaaaataataattactatccattacacttcctaggttttgttaatgatactttcagccccaagtggtaagggtgccccatccttatattttgttgctctcatatgttgtaaattttattttagaagctactagtgtcaaccagaagcagtggctcacacctgtaatcccagcacttggaggatcacttcagcccaggagttcaaggctgcaatgggttatgatggcatcgctgcatccatcctgggtgacagagcaagaccccatctctaaaactataaaaaataaaaaaaaaactactactgtcctttttgagctaatttttagtttttagacaatgaaagcatatttttcttctgctttattaaatctgtaaaatataagatacatatgcgtatgttccattcctttctgggctggtataaactttaaattatcagtctagggcactgggcactcgcatgcacacacaccccctcgcagataaagatatggaaaggtcagcaatacatgaattcattatggtgttttgtacatctgaaaacacctttagccgagacaaatggaaatggaatatggtttactaccccccatttaaggcatcctggagctaagggtatggtatttcaacctagctacataaacattttaatacttaccagggttggcaagaataatctactggtttgggcacctaggatataaaaaacaaaaacagattaagtttacataagggaagcttttagaaatcaatcattaattcagttcgctgactcagctctataaaaccctaagtggcacagtcctggaactatccattggtaatttatacagagtgaatcatagtatctgtcagataagtagaaaataattcatttcactttaatcattctttcattcattttactgccactgtaactctaagaggagagatagcaggcgaattgaactggaaacttttaatatttattatcaaggcaatttaatcctaccaaagaaaactaagtgaaaacgttattaagaaaaccgaatagcactttacttttccaagaccttggaaaaaatgcaaaataaaaaatatacactggatgtgggtatttaatatttttaatattttattattattatcaaggcaatttaatcttatcaaagaaaattaaagtgaaaacattattaagaaaccaaatagctctttacttttccaagacattgggaaaacatgcaaaataaacaatatacatggatatagactcttattttgtaataaattccaaattctgatttaaaaatctaccaactagaaccttttattcagaaaaaaggcatggaaaatacttatttttccatttgtttcacatgagcttcgcacaaggaaaaatattgcatttgctattcaaacaaagaaagaaaacttgtactgctaatggtcaaatagaaaatgaacaaagacaaagcaggtatattaatgttaaaaatagaaataaagtacattctatagagagggttactttaaaaattcctacgaataggagtacgatagtttgtctcatgtccaaatatctgatatatgcattccatgctattaatgggattttatatttggtgattgaaaatactgttccctcatttggaacagtaaaaactatagtatttagagaactagccaatgtgaacatgtctctagccatgctggtcttcataatgtgctgttatattttgcccttccaggttaagagttatctacaggttgagcatcccttatctgcaatcctgggactagagatgtttcacattttggatttaaaaaaattagaatatttgaattacattcacatccctaatccaaaaatctaaaatcgtatgtgctccaatgagcatttcctttgagctcatgtcagtgcttaaaaagtttggactttagagcatttcagatgtcagattttcaaataggaatactcaaactgtatcaaaaatcatctttctagtcagaacatttctttgattattatattcaaatatttttatcctatggattacatttttaaaatcacaactttgtaaaatccaataaacagcaattaatgttgaaggtaaattatacccattctaatcattcaaatagtttttacataactttgctttcacaaataaactgatcttcaatagttcaccctttgatgacaaatatacatggcttctgaaatgtgatgcgaaaaatatttcctctttccctctccctgtgtctttaaaagtataatgtatatatttattcttaaaccaagctttccatagagaaccaaaaaaaaaacaaacaaacaaacaaaaaaaaggagacaggaaggaggagagtaaagaatttcaaatattctggctgtggactcctttggctgttaaaaaggctggagatccaaaaaaggaaaagtgacagaagattctaaaacagaacaggtaactgaggctgttccaccctggtgtcccatagagcttttctctcttcagtgggtgcattctgacatgtgaagatccaggactaccttccagccatgatccatattactcaggtggggtcctatccttttccatcagtcataggcccttgcactttcttctgtgtactatgggtccttgtctggcaagtacttcatatttaagattaagttaatttccttttgggaactttttcatctttgagtatatggttactatttttctctatgccattttctcccagcaccatagtccattaacactgcaaaacttctgctatgaacatgagtttttaaaaaacattttattgagaatatagtatccgtacaaaattatatatatatattacacacacacacatacatacagaaatatttatatgggtctatatatatatataaataatatatatgtgtctatttatgtgtgcttcttcctgaagtataccttatgaagctagatggacacttagaagtgaagtttgtgtttgtttgaataaactatcacgatttcatccttttttgagaaatttctaagaggatagtaattttctctcacaacttttaacatattcttattgttcagatattaattcagacattgtagtttcacactgtacaatctctacttggttcttttgtgttcctatttctcttttgaggttttctgttcattcattatgaacatgttttcctttgtgccttgagcaccatgataacagctgcttttaaaatcttttcctaagtcatcaaacaggaatcacagggttgatctcccttcattctcttttctgttaagtatggttcacattttcctgccctttgcatactgagtaattttatattgtatcttggacaatttgaatgaatgataaacttagaggctctgtattttcttatgttccaaaaaagaacctggctttccttaaagtttataacagaatttgaggtttcctctctctgactctttttaagacttcctacctccttttccagtgctgagactgctttaaactcactccataatctggttctttaagccagaaataccataagtttctatctgaattttagctaccctgcatggtacaatccagtgcctgcctttgagctaccataaaacaaagaaactcatcctagtgccattcctttttccaagtgtcaatcttctccgggcagtgccttcagatagttttgttttgatattttgtccacaagttatagttatgtgtggagtattggtccaataggagctattcaacagttaccagaagtggaaactcttgttgctctattatttctgttgttagctgggtctaataatcaaccttttatagataatctgtctttctctcagttttaatatttgtctttaatgtcttctggtttcattacaatgcatccaggtgtgattaattttaatatatgcttcttgactctgaagattagttttattatagaatctggaagttctcaggcattgtttatttgaatattgcttttctacaattatctctattctctcctctattaaatgtatttgtatctcatcactccattttctgttttatttttaacttcttaattctcttaactgctccttgagcaatttcttcagatttctcctcaatttcctacacaactggtctgatatgccatgtaatatgtccattaaggcttttatttcaattactatacctgaatattttcatatatacccaattagtgtcttcctttcctcttagatttttgttccctttaattcttaaaccatgttaagtataaaattttgaatttagtatctaaaattcaaatatctgcttatttgtggatttaattatatattttattgtttctgctgatcttggcataaggtggttttttctggattgatttaatgatttcaaattgtgagtgtatgttgcctaggactttatgttaaaatcctttgaggaatgtgtgcaaagaggctccaatccagacagcatttgaattttcatgggagaataatcaatgtggaataatttttttaatttttattttttatttgagacggagctcgctctgtcacccagactggagtgcagtggaataatctggaataattttaaactacattctagcttagaattatttaggtagtagagctggtatgaattccagcccttcatctggaggttttggatttaagattagaaattctcaggggatactgctttccttttttctttccaacctgaaccaataccaaagtaggcatatcatcatcagtgggatgggttttctcctagttctccaccaagagctcctggaatcggggatatacccaagtttgcattgtgctgcagttccagctttgtctctagttgccatattgctagaaatgaagttgacccatttatgaaccgcctggttttcctcagttcttggtttctacctgcctatatcagaatttttgaggagatggatgtgcaaatgcaggaaaataaattttaagcccagaatagaacattcagcactactcatggacccgataaacaatatatcccagaatcaaaagcaataccattttctaaactccctcaatcttcccctcctcttcaaattcccctctatttatcttcacttaacttgccctataattaaaaaaaaatctataatttcattaagcagtaaaatttaaagtagctactaatataaaacaacctatttagtagtcttgcttacaattataagttactctacttctctgtcatcttaaaattttgaacatatttctccttctagccacttcttgggtcagcaaatatcattcaatatgattcacaggctgatttaattagtatctaccattgctaatgttctatatacagctagggacttgatttgctttttcactcctttgttcattcattcaacagtaatttattaaatgcctacttttgctagactatccctaaaacaaaacttcaagtgctcatttttatgccttattcaagaggtgtaaacagaaaacagtacatggtacattcaatgcttaatattcttgatttgatgtcttaggttcccaaacttcttaatgttagaatgtataatatcctgccacctgcctacagatatcatcactactttacagataggaagcctgaatcttgttcatacaaagtccaaaaactagaagagaatcattttagcttatctaattaaataagagtggtatcaaacttcaataatctttaagactgtaatgtaatataagacaaaaaatatgtaacattatagaccaatgaaacagaaaaagagcccagaaataatgccacacacctaaccatctgatctttgacaaagctgacaaaacaggcaatggggataagattccctgttcagtaaaggggagaaacaagattatgtccttgcagcaacatggatggagctgcaggccattatcatacgtgaattaacacaggaaaggaaagcaaataacacgttctcacttgtaagtggcagctaaacatttgataaatgatgctgggtaactggctagccatatgcaggactgaaggtgaaccccttccttatatgatatacaaaatcagctcgagatggattgaagacaaatgtaaatcctaaagctataaaacccctgaaggaaacctaggaaataccattcttgacataggacccagcaaagatttaatgactaagatgccaaagcaactgcaacaaaacaaaaattgacaaatgggacctaattaaactaaagggcttcgcacagcaaaagaaactatcaagagagtaaacaggcaacatagagaatgggagacaatattgtaaactatgcatctgacaaaggtctaatatccagcatctataaaaaatgtaaataattaacaagccaaaaaacaactccattaaaaagtgggcaaataacatgaacagacactttggaaagaagacatacatataattggccaaaaaaaatttgaaaaaatgctcaattttactatcattaaagaaatacaaattgaaaccacaatgagataccatgtcacatcagtaagaatgcttttattaaaaagtaaaaaaataacagatgctgacaaggttgcagagaaaagggaatcttatacactgctggtgggaatgtaaagtaattcagcctttgtggaaagcagtgtgacatttctcaaggaacttaaagcagaattaccttttgagccagcaatcccattactgggtattacccaaagaaatataaattgttctacaaataaaggtatgcatgcttatgttcatcccacaatattcacaaacatggaatcaatctaaatgcccatatgtttcaggataaagaaaataggtacatatacaccatggaatactatacagccataaaaagaaacaagatcatgccctttcagcagcatgggtggagctggaggccattatcatgagtgaactaacacaggaacggaaagcaagtaacaatgttctcatttataagtgaaagttaaaattgagtatacatggacatgaaagggaacaacagattccaggggcctccttgagggtggaaggtgggaggagggtgaggactaaacactacctatcaggtactatgcttagaaactgagtgacacaataatctgtacacaaacccccatgacatgcaatttacccaaataataaacctgcacatgtacccctaaacctaaataaaagttaaacaaatgtgatattagatcacaaaaccaacagagtaacagacgctttctattctctttgattttgaaagtaattaagcttgaatgagtggagtaaattatcctatgggcacattctagagccaaggatggcagattctcatgtttctaacagtaaaaagaatgtcagtttggaaattcagtaactactgaaatatagcaagcacgatagattaaggagagttttccccttcaggcaatcatctccatcgtattagtaaagaaatttcatttactttggagtcataaattaaaaagttgtgtggaaaacgtcacccataataccatattatgatactaaaatatgttaccctaaacagaagtttatcagtatcataacacaccagggagtacattttaggtacattcacctgtaatattaattgaggaaatgttcatttattctccttttatctgtgtttatattttcagaaaattccattatgacattatataaaaagtaatgtcacactaaagtataaaaatatatttagacatttgattgaaaaatttgtggacttttcattttctagcaagcttcaaagacatcagctgaagtgtaatatcgccctgtaacccaagtgactggaggcagaccgaccattctcagttcagtgggaaaggggaaacctgcacaatgcgtctaatttgtagctgtgtttatttcttctaaaaccttttagactacttagttatataaattctactaagtaaaattgcctcttctatatattttcttaatattaaaaaacatattctgacaatagaactataatatgttgaaaataatgattcttccagaaaatattaataaaattaataactgacctggccatatcctttgtagatttttgcacaattaatcacaggatcaaaaacaaaatgaagcaagagaaattaagatactaatacttacacatgggcaaggcttgactgcatcacttggaaaaaatcaacctctccagatgctaaatttctgccctaaggaaaaaaaaaaaatgccagtgttgagacaaatttaccacaaatgataaccccatgatgccccatacatagcactgttacttaggaccttagaattccttatgtgttatatccagtcctgagcattaacttactgtggatcagaaaggaagcaaaagcagagatagttttcttggttgttcaactttacatgtggtttcaggtctgatcataaaataattcaagtttatttttcaatctacccttcaattttgttagctttattctctcaatcctatagcacagtggacaccaacgtttttggccccagggatgtggggtgagtgaggtgggtgctgggggcgtggcaggtggtttcgggaggaaactgttccacctcaggattagactctcataaaggaagtgcaacctagatccctcacatgcgcagttcacagtcaatctgcgctcctatgagaatctaatgccgccactgatttgacaggagggggaactcaggtgtaacgcttgctcattggcagctcacctcctgctgtgtggcccagttcctaacaggccaagtctgggggttggggacacctacgatagagagataacagcagtttctatctttcaccttatattcattggcataagcagatcatatgaattttgtgaaggcatataattatgaattcatataaatggatactaccggtctaagagaagacatgagaatgtctttctagcaagatgaatttcaagatgtgaaaatagaaaacagtgaaatgtaagttttggatgattttcagatttagaaaaagaaataggatacttattaacagaagaagaccgtaagattttggagaataggatctattaggttggtgcaaaagtaattgtggtttttatcattaaactgcaaaaatactaaacttattgaatccttaatatgtgctagacactgctctgagtgttttatttaatccttgcatgatcctttatggtaggtccaattactatccccacattacagatgaggaaaatgagaccagagaaagtaaataatctgcccatggtcacagagctaacaagtacagagccataaatcaactcagatgttctaacttcagggctctgcactgcctctctgtacaagcataatagagatcatgaagaaagacagtgggacttaaatataaaaagtagttaggaaacaatttgacagtatagctgaattctatcattggtgatggcatttctttaaaggtgttgtatgttttagaagcttaaacttgcaccaatgtggaatatggctcctagatgggtctcactttcggagttgagatatcacaaggaaactgatcccatggtaaggaaaggaattggagggagagaaacacatgtgaagacactatttaactaagtctgctgaactggccagtggattagatatgggaagagagatgatctgtttctgagttaaagactgggaaaagtatgaagaatggaggtaggaggtgatagagaatccatccatacaacacagacttagatgacttagagaggaatctgaaaattgggcaaggctgcatcacttggaaaaaatgtagagagaagatagaagacagaatttacagaactagtgaaacaacaaggcagaaagaaacgatcaggagagagaggaatcagagacctggggggatggtagcagtaactacaaggttgggtgaactgtttgtttcattcagctgtgtttacaagtgctctataatggtttgttttcagcaggcagtgagatacaagtaaataagtatggatttgggactataccactagccagacctttatatataaacacactacaatgctacctgatgcaaaatataaaggagtgtggtaggaaccatacactgattaagctcagaagagaaaagataagaatgctttaaaaaacaaacaagacctttgagagtacataaaggaaataagtctatttgcgaggaaaggccaaagagagagctctgtaatggtctttccaaagtgtatttgaagtgtatcaacaaattggaaaattatggctattataaatagtaaactgtcaacttccactctcttcagaacaacaacaaaaggctttaatctatagaatgcagtgtacaggagaataagtatattttgtgacagtgtatgttggccaatgtaatgctatctactttctcagagcaaaccgatgcagagcccctcatgtaaattgataccttcattctgttcctcctccaaaactcagtcacacattacctactctgtcatctcttccccaaggagcagatcccagattgaatcccatcacacctttccatacccttggtgatacatgaagtagtagtgctttagtagtattcactctagtagtatatgtaattattgttcaacatggtcttctctattaatagactgtgagttcctggcataagggataatctctcagtcatttttgtataacaagatgtcagacacagagtggcccttaataaatgtttctaaggggagatataactcaatctgatagttccctgtcaatgagagcatggccctaaattcctcttcattaaaaagaataaaataaagctatgtgccacatgtgacatgtcagtcaatgactaactttataatgatggtgctcccataagattataatacctacttttactgtactttttctatgtttagatacacaaatgttataactacctacaatatcagtgcagtaacatgcgatacaggtttgtagcctggcagcaagaggctatacacgtagctaggtgtgtagtaggctacactatctaggtttgtataactacactccataacatttacaaatgatgcatttattagtatgtatcactgtcattaagtaactcatgactatatgtcacttttttttgttcacacagacaagcactgacaaggattaagctgactgtttctataggaaatattcatatagtgacattctttgacctgtccctgacatattctataaggacagcgttgggagtgcaatgtcacaaagcagagaaaagaggatgagaacccaaagaataaaagagtaggaaaagagatgaattttttagctgatgaaagtgtatggactggcatagttgtttctttctcctttgtagaaacaggtgttccacacaaaagacataaatgggaactgaaatcatactagggggtagaggaagagaccgtggttgtataagaaatgctctaaaactagatgaacatatattttccattcaaatcaggaccttttgagagtaaatgggtagtgactaataactatgccaaacaaatggtataaattgaactgttctgggtaaacaagtacacatggtcatcatatcaaactcattttttttttttttacctcttttaaaggacactcttggaggtccttcaggagggaaaaatttcactaaacaggctgccaatgtcattctgaattgttttttccttaataaaatccctagcagttcaggtcccatttcttaaatggtcataggcattccgtagatgacagagagtgagagataatttaacctattttaacgtatgaataaagttacaattacttactaattctagtcttatcagctttagctatataataacttctacttattaaaaagatagctatcctaaacatttggagaattcaaaacaaagtagtgtgtaggagggctttctttggtttcttggtgatgtgtgtgggatgtacgttggtaattcattaatactaatgggtggagcagctgtcaacccctatgcatggatgaaattgcagactgtaactatgacatagaccaacctcaaatccatgatttagtgcactttatgtgatgatatgaggtttttactaaccttggtgagagacatgaactgaatttccttcttctttacattactctgtgggcattttattctgggtcagataatagcttgtcatcccttttatgagtattacaaatgccaaagatagggaatcatcttttagtatcctcctgcctcgtatttgttctgtaagtccctgaacatcttcaaggtcaacttgaaacattcctctctcatacttaggtgtcatctgatataccatacggtgctatctttatatgctttattctgcagggcatctctgtactatgtgatgagacttttgtaaatctaacagtacagttgggtcattcttatgaaaatacattctttggaaagcacatgagaaaatatcttatggtactatatggtaagaaaaaaatgcacctgtataattttcattcaattatctggagcagaataaagcaacataatattaaattataattcataaaataacaatgcctttttcctgaaaacaatttttttcctgtagaaaatgtatcaaactaaaattattgacaacttcttctgacatcccgaacatcacaaacataaatgcatactctggcacttatttatttctaactgaccttagttttaactattcttcatttttcttcaataagaatccacactgaatcataatgaattaaactacttcaggtttgctggtagaaatgatattcacaatctacctgtacagagaaatacataaggtatgccaggatgctagagctaaaacctcatttttaaacccacagacaaggatggttaaaatgacaaaacatatcttctgaaaatcttaatcataaattgcttggctcctaacttgtaaaaaggagaaagaactgctttgagaaaaatacagtgtctcttccctgtggctcattatccccttaatactacctggattggagccttaatgcactcctggaatagcactgaacatttgaaacagatgtggaaagctgaatgtaaaagggacagattaatggttatttatgaacattggaaattctcccaagttacaatgccctaaacactctcaatgtatgcacgatggtgcgtggagattactaagcaatttatcacacatgggtaatggtcagagcgactgtcaccctgccagtcacttcccgctgtcagaaatacacaggttgagtgtttggggaaagaagatgtacgcatggccatgaataatgggaatataggtgaatacactgtatacacaaattagtttattattggatgggcagatggaaggaaggaaggatggatggaaagatgaacacactgtttttgcattattctgatgaagtttgtgaggacatgcaataaaagaaaaaaaccagcaaagaggagtgatcaggaaaagaccgagtcagaaactagcctttggtaaggagagatttttaatcacgctgcagccatattgtaaccatcatcagttacatatacataagggatagttcttggaaacacacaaaggcagtatcataggatgtgtcatcagaagagcttgttctatttctagctctctataaaaagatgtgcaaccttttgcaagtttcagtggtaaaacagggatgatgacaagtctgccacacatccctcactaggttgttacaaggatcaaagaattaatatgcatgaaagactttgcaaatgctaaatacttgttttattttatctataatattgtttcttgattattgcaatcacttacttcatttctaagttttccttttttatttggcccattcatgtgttattaaatagaaatgtctaatcctatgtacaatcctaccactctttatatttcagtaaacttgcaagccgcaaggaacatagactctcatatcactttcacctgaacgggaactattatattctgacagtccattcctttactcaaatgctttcttggcagtacacatattctttcattgttattgcttcctatatgatgagtaagatatgcattttctatcagtgaacactttgaaaactgccaagcctacctgcatatggttatatgatggccactaccattaattccaaaatactcagcacacatacaaaagaacaaaaccataagctatgcatttttgttatttcttagtcaaaagggatatgatccttaacttttgtccaatgtataaacagtgaaagttcatgaggttgttcaaagacagtacaaaatgtccctatctctggcatagttctcttgtaaagtggctgtcattgcttagaattctgaataagtctaagaaactcataccttggtctaggatctctgaaattaatttaccttcaatttgtatgggtttataattgcatcgagtcatcaaaatacatgacaaagcttcaattatagttgatggtttttccaattcacacaaaattgtgtttattacatctctaaattttggcagatggaagtgtcaaaaacccttaaaaattaaaagttgtgaaatgtatatgagaaaaaaaacccactaaaagccataagctgtagatttgagatgaatacaacactggatgagacttcaccgagtgtttctcctgttactcaaaaatgtatttggtgaggtccctgttttctgcagcaagaaagggaatcctctgatcatgggtgtcttaatgctttttctccaaatctcactgggtgggatgtacatgatacaatcctaaattatagtcttatgactgtgtgtggtgtgtgtgtgtgtgtgtgtgtgtgaaagaaacaagagaatacctttaatgatagaaaaaaaaatttggcaacaaaaaccagtctacatgtaggtaagccaaaacccacgttgttactaatacaaaatctggaaagaatcaggttctaccatatcttggtgagaagccatataacccaaaccaatccaggcttaacaaaggtccaaagaaatttgcttttctaatactggcagacacaaatgaatgtttttctatccttggcaattttaatcataactaattacaaagaaaatatctgagtcatagcaccataaacactaaatgctcatggcagcatgagatatttttaaagaagttacttttctactaaaagcaaaagtagtgctttaaagaaaagtttattgacttcctaaatgcacaaggcactgtgttacatactaaggaattaaaaatgaatagacgtggacacaatttcaaggatctcattcagacaatgccatttccttaattcacttttgctttggttattttatagatttttgtgatatttttgatcaggaaaaaacctgtgaggtgataatttgataggatagggagttgggagcctgggttttatttttggccttctgatcttgaataggtcattcaaccttcttggcttcattatcctcacctgtgaaacacagagcacgacctaaggatttccaagtctcggctaccaccaatgttctttgcttatattatataagcacttttgcaatgccccccagtactccactcagtcatggttggccaaaaaacatttgatccacaaattcttaattaggatgatgtgtgtcagtaatttaatctttttttttttttttctttttgggacggcatctcctctgctgcccaggctggagtgcaatggcgcgatctctggatctctgctcactgcaaccccgcctcccgggctcaagtaattcttctgcctcagtctcccgagtagctgggattacagcacataccaccatgcctggctaatctttgtatttttagtagagatggggtttcaccatgtggccaggctggtttcaaactcctgacctcaaatcatccacttgccccagcctcccaaatgttgggattacaggcatgagccactgtgccaggccagtaatttaatctgatagcattttttacagaagacaaggacatttcagcttcttagtgacgtttttaactcagtgtgaagcgtctattttccgaagcacataaaggttgatttgttagaaattgcattcattgattcattctcaggaattcaaattatcatgaataattaaaattcaatatatgctataatttgataaatatttggccacaactcttaagggcatgtgcacatgcatactttactgaaaccacttgcacatcaaatcaataatcacgtcagatggaattccaaattcatagcccactgaaagtattcttgattgacacaaacttttagtcattatggcagaatgtagcttacatagtaataaaataaggaagaaaaaggaccacaacagaatttctcagaactttctcccataatgttactcccttccctgcaggaaaaaaaaagagataatacttcattgtctgaacttctacttagatggcaggtcctcatctaagtatattataacctacattgcactgtaccaagtattggaaaaatacagaattgttaaccaaaaatgcccattttgagaattaacaattaggacctcacccactttgcaggaggcctgccaattcccatactacagtctgtacacttggaaacattcctgcaaattagtttatgatctatttaatcaaagccagttgacaatcacccagggaaaatgtttcttacggcctttactaatgcctattatcttctataatcatctctcccaaggcctcccttgttctgtgcagtcacatactgcctttttctcctttcctgtaattagggactctgatttaactcatatttacaggcaaatacctgtcaaaatcaaggtctcatgattacaggacatactaatgcgactgagcctctacactttcacatagctttttatccccatggccacagtttcaattctgcttggcttctactgattttactcaagggatggggttaataaatcagtggtaagaggcagttagaagaaaagccaagatgaacagcgggacactgggaaaacaagctccaacactgcctaaaaggatcattgccatgataaaatctgagtttgagacatcatgaagaaatgcccttggtaggaatctgaaggggaaaaacacttaccagttccaagaaatgtttactctctggtttaaacccaaagcaatgagtcttttggtgtccggaatcagttttcttaacaaaggagatctgttctttcttacatttctgtaatgttcttctttgcctctgatgatgatgcagactaacactgaattttagatcaggaagaaaaatacacagctttagaaaattctactggagctaatatgttgtgtggtctagaaaggattagaagtctccttttaatctagggcaaaggaaaagaatctttgaagtgactgatttctgaagtttcagggagaggtgctggagggaaagatctactactccactcagctgcacctcccttctccaggctcagagggtttctgggttgtgcgttattcacagatcacttatgttctcagtcacattccctaggcagcgtttgttttctgtaaaccctatctctctttttccttccccatctccatcactctctgtgaggtatcctgggtcttcctaatcaaacctgctctgagaaaagggctcatgatttttaccctgatgattatttaaatcaccaatctcttcagaattgatcatttgcatttttatgtctaattatgaagtaaaagtttatctctgattaaagaaatttcaaaaactgggtatgagaattgggaaggcagaatagtctttatgagaccatatgtgccagtgggactcttcacattaaatattgggaagaggaaacctaaaacaaaaccagaaacaaaaaatacctgattatcatttttccatttctggaaaataaagatgtctttcaaaatcattaatcattatacccaaatacacttttttctccttttcaatctttttcaagtttacttcctatgagactcacaacactccatgagtcatttaagaattaaaactcattttatagaggagaaatttgaggaaacaatgttaagtagttttaaaattattctggagaaaaaaggcacatttaaatctgacagatgaaaaaatactttaatggtctttcaaatacatcataaagtataatttaataaacaattccttttaaaacttgtaaataacaccttatgagatcacaactctaaataggcttattcattccagacctatggactgaatgcctattttttctaggaactgagataaagtaatgaaacccatagcttttatatttctggagtgctctaccaggcaggaagaaggataaaaagacccttaggacacagtatgatgggtgttatgatagagcctttttggttctgagaagacgtcagaaaaggcaacccagtattgtgccttgatgataggaaggatttagctgacagaacgggggtgaaagggaaaaccaggaagagggtaacataacatcaatggttggaggtttgagaaaacaggtctcctgtgaaaaagatccccctaatcacccttcatttttctattcagcttaaaatgaagaaaaagtatctgtaaaaaaaagcaagtacctggactgtttgaagaccaaatacagcagtcctgtgggaagtaaaaattattgacaagtaaactaagacaaaggccagcttacagaacattcatcaccattgtgtctggatggctggaggatggtagcagggaatccagcacctggttgcccctggccaagtcaagagcccaccacccccaggttcgttgcctctgaaatcagcatgactagaaatgcttccttcctcctgagacctccaagttctctctaagctcaacttactttctgactttttattttctgtgtgactctcctgttacacaaaaagttatacataaagtgatgttttgtttactattttttctaccaaaaataacaaaactgcctttaaaagtgtgtttttcttagaggtgttagaaaattaaatgacctcctaaaacaaagtacaatggtctaatatatagaactaaagtaggggaccacaagtctaaaaggactctagttttaactctacaactgcaattttataaacaggtcataaatttggcctttaaagacacagttctaaatgaaggtaacatgattttccatttaccctctttatgaaaccttgtgaattaatcggaatgtgtgtaaaaacattttcacttcttagaataaagatcggtagatgtatgattagtaagcatgaagtatcacaactattttctaagttatttaacttgattgtggataaaaatatatattatttttggcactgattacagttctactgcttataattccttttggttccaattagcttacaaaactctccctgtggaacatttggatattcgtaaagacaatggagcaaataaaaccccatgatataagacacagaatcctcactgtttcacagttttattctaagaagaaaacacatatttctatgttttctatgcattctattgtaatagaaccatagatgacatggcttaattttacatttgcctgtttctctgtcttgccctctcttccttgtgataagtatagttatcttttctgggaaaataaagtttgtaatatgaacaatttctccagcatgaaggatattctcaggagttactaagacttttttatcacatattgcaacaaaacttaaaagcaacatgtttatcatcatcaattggatgacacgatcagaattgtcctgcagttgttaggcttagtaaaaactatgccttacacctgcactagaaaacgtgccccaaatgccaatttcctattttatattcatttcacttgaaggcaattttatagagctttcaagggagaggaagaaaaaaagaagaagacaaagaagaaaagaaaatgctgccaaaaggaatcctgaatgcaaagattgaacagagtacatttttacagctcaattgataattcattgtttgaaaaagtaataatgaaaatgcagatagcccattcattcaatagcattagaaattactgttgtataataataatacagactaaattaatagctattcaaagaaagaaagttcctgatatatatagaggataatttgtattctcctgacatagagtatgtggaaaacatgacagtctactacaaatctgacttcccacactaatgagtgaagtcatcaacttgcaaaaacagagaaaacagtcagaaagcataacttctcaaaaatttccaaataagccaaagcacctaactagtacaaagacatttttgaaatcaaatacaaagccattgtaacatctcgataagttttctagattttatctataggtttaacgctagatatatttgcaacaatatgatttacaaaaaccttaattaaaaactcaaaatgaaaaccaggtgcattacctatcctgagttctgatcattccttacatatggaggcctccaggttagaaacgggttctctagtttctggttctcccaacatgaaacaagtcagttacatagtaggcactttataagtatatgaatggatgaatggtaggataaaaaatggaagaagatggaggatggatggaggatggatggatggatggatggatggatggatagagccactatttaatgggcactgtgctagaactcctttgtgtatttgctttattttgtagcagtgattgttacttccacttgacagataaaactgaggcccacttcagagtaagtaattatttaaagtcacactggtatagatggcagagtcagtaacactcagcaaaataagctatatttcctaaacacataacttgcttctccagagctaagtgtgtagactctgaagattaggaggaaccaaaaagaggtgcttaaaaactatgttctcaaaaacaattaaaacacattcccgtgggggagtcacatattttaggattcaagccataaagtacatgtcttctttgagtatgaaatcagcaaattaacataaaaggggccactgtaaacatgcctaaaaaaacacatggctcaaaggatcaaccagtacatgattccacatttagacccaataaggaggaaaggtctttgtcagaatttttttaaaaacatggcattccagattacgccattgagtaagtacagattcacccagtttcctacatgtaccttccatatgtccagtctatgaaacaaaagctaatttaatatgacagccttgaaacattgtaagatcttaagtgcttttttcaattagagaagactatacaagttcggtacaaagactgtttagcaagtgattttttaaatcatacactaatttgtcaaaaggtaccccttatttggtaactatcaaagccaaagtattgtaacacctattttttttgagacataaaatatactgttttatttacagatatataaaatttatatttatactaaatgattgttatcataatacatttaaatatgagtattacaattttatcactaaacctttataataaaattgtaaacttactaaaatgcaggcataatacatgtttagcagagtcagctaactttccatggtccctacacagtacatttgtaagattatataacattaaaactggtaaaagataagaaatttggagacatctaaattttctcttattttcttcttccactctagtatacttctcttttttaattttattttattattattatacttttaagttttagggtacatgtgcacatgtacaggttagttacatatgtatacatgtgccatgttggtgtgctgcacccattaaccgtcatttagcattaggtatatctcctaatgctatccctcccccctccccccaccccacacaggccccagagtgtgatgttccccttcctgtgtccatgtgttctcattgttcaattccacctatgagtgagaacatgcggtgtttggttttttgtccttgcgataatttgctgagatgattgtttccagcttcatccttgtccctacaaaggacatgaactcatcattttttatgctgcatagtatttcatggtgtatatctgccacattttcttaatccagtctatcattgttgacatttgggttggttccaagtctttgctattgtgaataatgccgcaataaacatacgttgcatgtacctttatagcagcatgatttataatcttttgggtatatacccagtaatgggttgctgggtcaaatggtatttctagttctagatccctgaggaatcaccacactgacttcacaatggttgaactagtttacagtcccaccaacagtgtaaaagtgtaacaccttatttttagctacgtttaataataccaattaccaactggtgagctggggatagtgtcaaaattacatggtctcttaccaattagataatcaaatcaatggctcacattagattcatctggggtttataaaatctacttatgcctgggctcaaccaaggccatctgtgtcttaatctctggaaggaggctgtgtgttgacattattgcaaagctccccaggtgattcagtcagggtggtaagcctgctctggtatagccccactcaggtaatacatgaagaaactaagctacataatgattaatgacttgaccaaagccatatagctatttggctacagatacatgacttgaatttagttttctcatactgccagtggttcatttcaataaaactagcatttgctggctaaaaattctttattggcttagaagtatccataacgcaattctgacccaagttacatctgtatgggaaacatagatgaactttaaatatgtgtgcaaaaactcaaacatattactggctgctggcaagcaaatgattcttctaaagacaggagacctaatgtcaaaccaatgataggaactgataattgagtgttagcagtgtctgagtagtgaacagagttggcactcaatgcatacttgctatctgaataaatgtgttgtttttctctgttctaaacattagccttacttgtttctaatcattactataccccagacatacccatatatattgtcatccatgggttctcatttctcctatgatttcctaagtgtctccaaaaccattctaatactataccagaaaatcttcaagtttataggcgctgaaaggaaatgacaactaataatgtctttttgtctagaaagaataggaggcagtagatttagtaaaaaatggcactgggctagttgtcacagaatctcaattatagttctactttaacattatgtggctgtgaggaatgaaggaaataatgaatctcaaaacatgaaaataattaaagcaccatctaaacctgtgataggaaaaattagtgaataaatgaaaaaagatactatcataattaagttttacaaatctaaggtttaagaaaaaaaagatgaaaagaaacagagctggttagaaaaatatgaattccaaaattatctttctaaagctaaatgcctctaagcatacttaggcatggttctaggactcctgcatgaccttcagagtgatctcaaacaccacactttcaagccacttatacgcaccaagatcttcaacattttgtgtttggcttgactacttcctgctctttctttgttgtgaaaaactgattggctttcagtgcccttggaacagctcacaaaacattttattcttagggctgctcatgcggcttcaaaatgttttctgtctgtggcacactgtattttggtatcctggtgaaccacacctcctggtatttgattggtatggtccccttcctttgtatctgggctggccatgtcttgctttaaccaaaaaaaagcggcaaaagtaattctgaccagctctggtgtttaggcttaagaaggtccagcagtttccacttttacactcttggggccagctaccatataggaagtctaagtaccctgcgatcaccatgctgtgaggaagataagaaccactgaagaggtcaacgtgcagaaagcctctgctgagttcctagacagaggctaaactaactgccaatcctgtggacacgggcattcgagaccttacagctgctcccaccacccaaccatcaactgaagcagaagaaccaccttatcacccatagcattatgagaaataataactgttatataataatcacaaaactgggtaggaagaatcaatattgtgaaaatggccatatgcccatggtaatttatagattcaatgccatccccatcaagctaccaatgactttcttccagaattggaaaaaactactttaaagctcatatggaaccaaaaaagagcctgcattgccagtcaatcctaagccaaaagaacaaagctggaggcatcatgctacctgacttcaaactaactacaaggctacagtaaccaaaacagcatggtactggtaccaaaacagtgagatagacaatggaacagaacagagccctcaaaaataatgccacatatctacaaccatctgatctttacaaacctgacaaaaagaagaaatagggaaatgattccctatttaataaatggtgctggaaaactggctagccatatgtagaaagctgaaactggatcccttccttacaccttacacaaaattaattcaagatggattaaagacttacatgttagacctaaaaccataaaaaccctaaagaaaacctaggcaataccattcaggacataggtatgggcaaggacttcatgtctaaacaccaaaagcaatggcaatgaaagccaaaattgacaaatgggatctaattaaactaaaggcttctgcacagcaaaagaaactaccatcagagtgaacaggcaacctacaacatgggagaaatttttgcaatctactcatctgacaaagggctaatatccagaatctacaatgaactcaacaaatttacaagaaaaaaacaaacaaccccatgaaaaagtgggcaaaggatatgaacgacacttctcaaaagacatttatgcagctgaaagacacatgaaaaaatgctcatcatcattgccatcagagaaatgcaaatcaaaaccacaacgagataccatctcacaccagttagatggcaatcattaaaaagtcaggaaacaacaggtgctggagaggatgtggagaaataggacacttttacactgttggtgggactgtaaactagttcaaccattgtggaagtcagtgtgggattcctcagggatctagaactagaaataccatttgacccagcaatcccattactgggttatacccaaagaattataaatcatgctgctataaagacacatgcacatgtatgtttattcatcactattcacaatagcaaagacttggaaccaacccaaatgtccaacaatgatagacggattaagaaaatgtagcagatatacaccaaggaatactatgcagccataaaaaatgatagttcatgtcctttgtagggacaaggatgaagctggaaacaatcattctcagcaaattacgcaaggacaaaaaaccaaacaccgcatgttctcactcataggtgggaattgaacaatggaacacatggacacaggaaggggaacatcacacactggggcctgttgtggggtggggggggggggagggatagcattaggaaatacacctaatgttaaatgagaagttaatgggtgcacacacaaacatggcacatgtatacatatgtaacaaacctgcacgttgtgcacacgtacctaaaacttaaagtataataaaataaattttttaaaaaatcacaaaactgaaacactgcccaaatttgatggtgacagtgaaagaaactcacaaaactagtttctttaattagcataaaacagccaccatcccaatatccctaaggtgcatgaagtttaggaaggcagcatgagcttctcataaataacatgattgtaaaagaagtgctagagcgtaatagtaaagagattggactctggccggaattcctatgtccgaataacagctctgctaagttactagctgtgtgtctttggcagactattcaacctcacagtgcctcagttcactcatctataaattgaggataataatgtaattcattttatagaattttcattagtatcatgggtattaacaaagatattcttaaactctaccttgtacataaaaatgcatagtgaacattagttgttggtgctattgttgtcatattactataaggaaagaataaataagaggcaattctgcctggttagaaggaagacactgaagactttaacaagaaattatggaattgcatttgaattttgcagtgatgtggattatggcacaataaaccataagattctggaggtgagatcagttagaaggtaatctcagatatcatcaacagcagattagaatagaaactccacagtggagatgggccataaaataattctaaattgtctgggcaatccctaaatatttcaaagctaattaatgtattcctaagcaatctataaaagaaactgaaagagcaattagaaagtacagatgctccttgacttataatggggttatgcctgataaacccactgaatattgaaaatatcataagtcaaaaatgcatttaatacacctctgtactgaacatcatagcttagcctagcctaccttaaacatgctcaaaataattatatagcccacagttgggcaaaataatacaacacaaagtttattttataataaaatattgaaactgatataatttattgaatactgtactgaaagtgaaaaacagaatggttgcatgggcccccaagtatagtttctactgcatgtgtatcatttttacaccatcataaaattgaaaaatcttaaatcaaaccatcataaggcaaggaccatctgtattttgaactgactgaaaatgaaataaacagctttgcaaaattttgggaaggcagcaaagtagcacttagaaagaaatttgcatactaactaactatactagcaaaagaaaggaaagtacacaaatcagtgagcaaacacccaccttaacgaactagcaaaagaagagcaaattaagcccaaaagaatagaaagaaagtaaaaaaatcagagcagaaatcgatgataggggaaaaaaacaatagaaccaataaagccaaatctggttctattagaagatcaataaaatgcatacctatctagtcgggctgaccaggcaaaagagatacattactgatatcgggaatgagatggataatacaaccacagattctatagaattaaaaggataatgaagaaatattatgaataaaaattcatgccattaaatttgacaactagacaaaatggacaaattccttgaaaaccacaatctaccaaactcactcgaggagaagagcaagtaacctgaatagccatatgtttgttttataattttttttttttaaacttctagccaggcgtgctgactcacgcctgtaatcctagcactttgggaggctgaggagggcagatacttgaggtcaggagtttgagaccagcctgggcaacatggtgaaacttcatttctactaaagtacaaaaattagccgggcatggtgacgttcacctgtaatcccagctactcatgtggtgaggcacggtaattgcttgaacctaggaggcagaggctgcaatgagccgtgatcccgcgctgcactccagcctctccagcctgggcaacagagcgagactccgtctcaaaataaacaacaaacaacaaaacaaaaccttccactaaggaaactctaggcctagatagcttccctagaaattctacgacacacttcaggaagaaataatgctaattctataaatctcttttagaaattgaagagaagggactagatcccaattcattccttgaacattacattattatccaaaccgacaaaggtattacatgaaaatgaaacaatatataaaaaagataatatataattgccactgggatttaatcatagaaaataaatattgatttaacatatgaaagtcaaatttgccgcataataaaaacaaaaattatatcatcatttcaatggatgcagaagagcatttgagaaaaactgacatctattactgatgaaaacttgcagcaaactaggaatagaaggcaatgtcctcacttaatgaagggcatttatgagaaactacagataatgtcatacttaatggtaagagactaatgtttttcctctaagatctggaataaggcaaggatatactctctcatgacttctattgacattttactggacattctagccattgctacaagtcaagaaaaagaaataaaaggcaacagattgcaaaggaagaataaaacatggtgtctatattacaaaatctgctggactctactaaggaaagctacaagaacaactgaatttaataagagttaaagaataagagatcaacatcaaaaatcaattgtatttctatatctcacaatgaacaacataaattaaaatattaaaaccatttataatagcatcaaaatgaaatatgaaataattacagataaatatgacaaaagattatatgaccttaactctgaaaactgcaaaacacttctgagaattaaagacctaaataaagaggagtatagtatgttcagtgattagaagactcagtcttgttaggatgtcaattttccatattgatctacaattcaatgagattccaatcaaaatctcaacaagcttttttattggtaagttgacaaggtgatcgcaaaattcatttgacatgcaaaggaccaaggaaacccaaaaacctatgaaaaaaggaaaagaacaaatttggactaacattgtctgacttcaggacgtctattagctacagtaatcaagacagcatcacattggtacaaagatggacaaagaaatcaattaacaaaataacagtccagaaacagacctacatatacatatatatgaagatatatataccacacatatagatacacacacatataaagatacacacacacggcatatatacacataaaatatatatatacacacacatatatagtacatataaatatatgtgcacatacacataaagtatatatacacacatatgtatggacaacacattatctacaaacttacaaaggcaatccatggagaaataattgcgttttcaacaaatgctgctggagcacctagatatccacatgtaaaaaaccttagtaccatatacaaaaaaaaacctcaaaatgaatcataaatctaaatgtaaacctaaaactataagccttctagaagataacaaaggagaatgtctttgtaactttggggaggcaaagatttgttagatgtaatacctttagcatgatccatataaagaacaaattaacaactggactacatcaaaggtaaaaacttctgttctatgtataacattatcaagagaataaaaaaaagccacagattaggagaagcatatggaaataaaatattttatgaaggacttttcccaaaatatctagggagctctcaaagccaaataataaaaaaatgcatggctcattaaaagctgacaaaatatttgaacaagcacttcaccagcaaagttatatagatggtaaacaagacacaaaaagatgttcaacattattaatgaattaatgattaaagaaatgcaaatcaaaatgcaatgagacaccactatatacctgctagaataaataaaatttaaaagactggctcatcttgtaatcctagctacttggcaggctgaagtgggagggatgcttgaggccaggagtttagaatagcctgggcaacttagctagacactatctctaaaaaattagccaggcatggtgaacatgcctgttgttccaactactcaggaggctgagatgggaagatggcttgagcccagggtttgaggctacagtgagctacgattgtagtaccacacactccagcctgggcaacagagaagaccctgtatttaaaaaaaaaaaaaaaagaatgaccacaccaaatgttggcaaggatagaggcacctaaaactcacaaatacagttgggagaaatgtaacatggtataggcactttagtaacaatttaataatttctcaaaaacttaaatgtatatctacatatgatctatatatcccctcttggcattagtatctaagaaaaataaaagcattatgtccatacaaagaattattttgaatgttcatagaagctttatttgcaatagccaaaaactagtggcaacctgaaagtcatcaacaggttaacgggtaaacaaattgtgctatctccacacatggaacgataatcaggataaaaagaaagaactatcattacacataacaacgtgatggaatctcaagataatcatttgtgtgaaataagccatacaaaaaacaatatatgctatgtgatgcacatcaaattctaaaaaatacaaactcatctccagtctgaaagcagaacagtggttgctgagggttgttgcgaaggcggaacaaagcaacaggaaggagcatgatggagggattaccaaggggcacaaaaattttagggatgatattggatatgtttattatcctgattatagtgatagtttcacttataatatgtatgtacgtatgtgtgtgttcaaacttatcaaattgtacacttaaactatgcacgtttaccatccatctcaaagctgtttttatataaagttgcactaatgatccaagaaggatagtttctgcaagaggctggcttatgaataggacatggagtggtagaaagtgagcatagctacttccccaacaagcttagctttggttgtggagaggaagagggtgaaagagtgtctgcatgaccagacaaaaggctgagttatgtgtttaatatgggaggagactgagcatatttaatactatagaaaatgagccagtggagagaatgaagttgaaaatttaggagtcaaaagccgctgatggaatacgggataaaaagtccaagaagaaagataagtcttgaatgtgaggaacttatggctacaaatgcaagtatgttttctggttaagctgacagacacagaagtggtctgagaggtggtagaattcaagtctgttgttctctcttttctttttctgggaaggatgaagttggaaggagtgggatacttaagaagaatggtggagctttggaaaaatcactggctaccaaattgaaatggtggttagagacaaacgttcaatctttgggcattcttatataacaagatacagacaataaaatagatgtaagcaaataaaatagctgtcccttctgcatgtgcacaatgattattatccaacagtcttttctctgatttctctctttttacctctaaccacatttcatcgtgataacctttctgttggtcctcacttatttttccctcaatgcacaatagatttttaacgaattctttcctcaacatcattgggaaatatttctaacatacacatgaaattcgagatttaatgaacagctttactcaatcttaacataataccatatttacctaagttcaaaaaagtttcaaccaaataaaaaggtccaccggccaagagagatttcatcatgggcaaacatcacatgctcacttacttttcacatttcatagattttatgaataatgcccagagcacctctagaactccaggtattactgtgggtaggtaaaaagcaaatatggtcagaaatggccacagcaagctaattaggtagttcccctgaagtgaactgttaatatattaaagccatgcaaattgatcatacccagaggtcctcggtttggaaaaaatgctctggtaaagtaggaatttttaaaaaaatgataattatgaccccacagcactgatagtatttttctctagtgttccaattttgttgcaactttggcattagtaaatataaaaaaggttaataaaaaatattttccgcatatatgtaaagtttctgaagctgaaagcatgcagtttctaaagacaagagtcatttttctttagcagtaataaatcatgcattaaatctaacaaactgtaattcggatagtgtcagaggcggtgaaccagagcaactccatcttaaatgggagctgggcaaaatgaggctgaaacctactgactgcattccctgacaattaaggcattctaagtcacagtatgagataggaggttggcaaagatacaggtcataaagaccttgctgataaaacaggttgcagtaaagaagccggctaatcctaccaaaaccaagtgacctctggtcgtcctcactactacattcccatcagcaccatacagtttacaaatgccatggcaacgtcaggaagttacccaatatgatctaaaaaggggaacatgaataatccaccccttgtttaatatttcatcaagaaataaccataaaaatgggcaccagcaaccctcggggctgctctgtctatggagtagccattcttttattcctttactttttaatcaacttgcttttgctttgcactgtggactcgccctgaattccttcttgggcaagtttaagaaccctctcttggggtctgcatcaggacccctttcctgcaacaacagtacctgcaaaacagactgtgtgcatctcctttcagaagttcaacggtatccccggcctggagctgaaagggggtccttcatgcagagctgggggtggtgttccagaatagttcctaatgacctgatctttggtaaacctgaaaataagccaaacaagttttagaattgagaaaacaatgatgctgaagtctacatgaactttacaaaaaatgtcattattaacattaaaaagtgttaataccccaagtccaagtaaacattttaagtaactataatagaatgattttcaactttctcattaatgagatggtaatagaataagacacatatttatcccatgatccctgacatagttttccttcccttaccatcaatctcttttttagttgaaaaaatatttctccttcagctgatgcctgttcataaaaaacacatcacgtacagtttaatggaaaagaatcaattttttcatcaactcatcctttctgcctattactttcctcttgggcactggctgatttcatcactgaggaggctatcctttctgtgtatgtatcacattgcccagtatatggatcatatcttaaggttatcttgtaattcaaaagcaaaaaggtgatggatgtgccactgcaatacttaagacattcatatgagaaactcttcaggctcaaatttaggcttgcaaaacagacccaataaagggaatatgtcaagccaatagcaccaatgatatttgaaatacagatccattccttctctttgtatttcttgaatgtgcaatgaaggcctcagttcacgatttcatttttgagagaacagcagcttcaatgaacatgggtctaggtgcagcaatactggtcacaatggacaacctcacagtcacttattatttacaggtgaaactgctcccaactaagagaggtccactcataaacatgatattttttcacatttaaggactgaagcctttattaagcttcaggactttttattctaatgattaacctggtgaagctgtaactggctgaaaatgctgcactaaacatgtaaagaaggatgaatgacgtcattcagttctagatgtccaagttacctagaaaactctcaaaagctacatgaaatgctcagcaaacagtttattaaagtcctcaaaattcttttgaacaacatgccagagggagaaaacaagtgtggctataaactgaacagactagaaaagttttagtcaacacttgtttatcatccaatcaggaggcagaggttgaaaaacactgtgcccttcaccccagtttagctgctggactgctgaggcttgtcaggagttgctacatcctcctttgcttctgttcttgtgccgcagacccccagagggatgattttaatctcacattcatggagcatttccctaccagatgttataggtctcaccctaacaccaacagcagatttcattgactttcccctaaacaacactctatagagaactcctctcagttaaatgtttaacagacttgctctcaatacactgcaaatgccttagtatagagagtttattttacatattctattaagttgctactgctaatttaaaatgaacctaaatatcccatacacaagtgattaagaactccaacaggtggaagaggatgtaatataagtggaataattttttaaatggagtctggtttgcatgatagttaactccgtgtttaaggagagaattgcagttcacctcctttttattgagcatacctagggcaaggaaagcatctttttggtagactccctgggtaattttgtttttctgacagttttaaatataggcggaagtcagaaagaagatcttttaaacctcaaagagctgatgtggtctcaaatactggggccagtttgagccgtggacttcactgcagttttctgttgccaagagccacagggataaaaagggagagcgtcatgtgacaaatgatggaaagagctgtttctttattgccaacatgcccaagtcatcattcttaagaagaaacaactgaaaattcacagagtgtttaggaaaaaattaactttgtgacatttcaccacccaaatatatattagggattaaaatacagaaatgcccaggctccaaagaggctgtaaggtgttagggatggagcaatgctgcctcatatgtctttctgtagatgactggaatgcccaccacatgcccataacatgtaaaattatatttaacattacaaagggtcatactagtgtatacactagtatgtatacactagtatactctgtatactcgagtatacaagtatacactagtatactctggtcaagtaataggacttagctattctagcttttctagtccacttattcctaagttttttatttactctatcttttctggtattgctttcttcttggtatgagcttcatttaggaagttcacctagtagcacactactataggtatgttgctgacctttccccaaagcaaaaatgtgtaacccttgccaagaattatgcttaagcccaggaaatagcactaggacattgtcattaacctctattcagccataatcaacttacaaagtatagtgttcttcaactcatatggttttttgtggaatgggttgtgagtttatgatataatggaatgtattttttttttttggtcatttgttagggttatctttggcaatttatttcttactgtcagccttccaatttcagcatgatctgttgtcaggggtacagagatcaaaggataaaaggaatgaacaagggcacagcgatataatgaattctgacaacttgctctttgcttctgattttagctatagtaggtgttctacaatacaggtgggataaatggttgctatccaaaatgccctttatatctttccacttatgaaaaaggcaccattacattgctaagaatgtgaacacactcacataactggaagacaaaaaattgcgattaagaggaaatgggttaaacctgacgtcagcattaatcatcaataaaattcttaacacaatctactgccacagaaggcatcacacttcacaaagagatcaagaacggagaataaattagatttacagatgtttatatttcgaacagtcatttgtattaatttaatataggttttcttctccccttagaaaatatgcctctgataggtttttacctctgtttaaaaatgtccagggcagaacattcaccacacatccccatgacaactcagcattgttgcagagtttattaataaggtcttcttgaaacttacttaaaaatctctacgtacttctctccattgacctactgccttccatctggaattatgctgaagatggcaaatctcctttcatagattagtctttcaaaatttgttcaggcttaaaatcaccagttccttaaaaaatccatattttcccttggctaccatacttcaaaggatgctgaggtgcaaagtagcgtaaatacaaaacttgaactctaagtttcctcactggcagtgattaattggaaacagacagtcaattccttaaaaaatgacaagaaatacacatttcattatattataaactcacaactaatccagaaagttgcttctctcttcttgggaaaatacagacccaacaattgtttagtttctctcactccagaatttatttacaacagatgtgttagctgagttacagtgttgctcacccaaaatgaatatttatattgcaactaccttcagacattaaatgcaaaataatcacatgtacttcaccatatgtatttgggcaatcttagaagttcctaaaacttttatataatcaattataatatccaagagaatatgattaaaatactaagccaaaattagatctcctgccagatgtttattattttaccttgttttatcccctacaacaaaagctttgttgtacagctaactatgccctaatatataacttgacaattttgctcattaacttttgctcacattagtaattgtgcttgtcttacatcagacaaaatacccaagtcaaacttatgcaggaggaattaacaaacaaattgcaatattaaaaggatagttacactctactaatagtcgtgtgtttctggttaaataaaataaagctacatgtaggtatgtagaatgctggagtttcccaaaacaatacagaagtgttttaaaagggggacctgaaacaaaatttcctttcaaatctgaatttagtaccgctaagagtacacactccaaatgacacatgtgctttttttaaaagttaattctaagtagaaccctattgaaaattttctagatataaattgtttcactgataattttcacataaactttcaaacttcatgaactgaacagctaattataggagcatcaaccactgtgtcttccaagcagggcaagagagcgattgctacaacatagattagtatctattcatgatgctgttatcactgccctaatcaatgggcttccccgaggcaataacttagaggagagtactgcctactagataaatgggcgtaggtaatatgctagcctttcacctctgaggcccaatttaaaatctaaacacagccacttaaaaaataattagttttacaagatatcagaacatgtagatgttttatcctgggaaacgatcacaagcataacatattaattcattcatcaaatgtgacttcagcattccataagtgtgggcatggcagtttcagaagaaagcaagggaaagtatcctgccttcaaacagcctatatcagtccatggaatagacagacaggtgaactctgagataacaatacaactgggcatggactccatccagagggaactttaaaacaaataaatgttcatatctataaaaattttcagaattttcctttcataattcttgggtaggaccctaaaacatgtacattattttttctataaattcctaggtgtgacatccaaactctagccaagtttgggaatcacattcttgtgggtacagtgcaaaacaccatgaccaacacctaccactgccaaatttgcttttgagaaaattacaggaaataagtgctgcctgtcatcctcccaactaaaaaaccctttataaattaacatctggcctttcctgatacaagttcacaatctaagaatcaggtcctaagaatcaggttgagcctggatgctaggtgctgggattcccctgccatcacagcttatagggctctttctaagagagctgactttttcattgatctgctggtcttcagagaggagtaaaaggaaccacggcatagaatttggtggaaaaattccatgctacaacagaagcaggcaatttggtggaaaacaaactggctaaagaactgactgttcacaaagggaacactccccatcaataatttttaaaattttcacagagaagcctacattatttttataaacaatgatgactcaaataatggaaatagcactgcacagctcatataaaaacaaggatgaggcagagatgccttccttcaacttcataaccacgactagtcactctttggcactgtctactggagtattagtgaatcatgaatcaaggatgaagatatgataatgtctttggaagtttttttcacctttattaaaaaggtgtttataggctccaaatataaaataactataaaatttcatgtgttacttgaaaatccatgcaaatttaacttctgttctgttatacatgtacattttattggaaaaaatgtttccctaaaatatttaagtcaaagcttcaggagaaaatgccatgtacttggcagacccctggcaaacagctattcccgggatgtaaggaatccagtttcagaagcatagccctgagctatcttatcatcttctttaagatagaaaaagaacacaattacacaattttacagagtattgtcacctagtctaaccacttatttgtcacattataaaactaaatactaaaataaattgtctaaagtcaacagctaatagaagcaaaaatggaacaaaaatccaatttatagactcttagttcaggcttccctacttaggttggtcattctatgcaacctacagggaatgagactggtagaaaagaggccacttgaatggctgatgtatgtttcaggatgatctgagtacccgccacatgtctggtgttatcttggaagcaggaaaggaggaggtagaacttttcttcaagtggtgaacaactgagagctcaccatactaggcaaattccaggaggaaggtaataactcccagtaatatattctaaaaacagctcaaaagccctcaaaaaacaaacaaacaaaaaaaaagcaagcactgtattggacaatcttagaactcttagagcctgacacgtctgtatgcagctctgtggacgtgtgagttagcagcacagggagttctttctacataaggttattatcacctaaaccacattattctgctcatctactacacccaagtaattcagggctggtgattaacttaactcaaagactgcaataaatagcttaacatgtgagacaccagcggctgaagaggaggccaagagagacagtctaaaggagcgcactcattgaagaatatttgctcttacagaacatggaagcaggaggcagatatctaagcagcaaagaacaatttctgacttctgtaaacaaaagatgactgagatcactagtttataaatggttggtccagaaagattcccttaaagcctcctgtactcttcccttcttctaaggcctgaggtccagagtgattattgagatgatccccttggctttttttttgttgttgttaactcctaccataaacacccagctcccagagcaactgagcatgttttctttctcgcaaccaaatgaaccattatcagtccactcataaaggatatctaaaggagaagataacagcgtaaaataaaaatgattaagggcactttgcaagaacctaattttccttctttgttctatgggttcttcatttattcagcaaatatttacagatcattcatgcattgatattggctttgcactgtaatgctaccataaataagactgactacatccctccctcataaagctcatattttagtggggagacaaacacaaaagcaagtgaatcaatgtaataataccagataaaagtatcataaaaaccacttagaaagagattctggattagagagtgacaggggtgtgtgtggagtgggggagctttatttaagggtaggccatcaggtcagggttaagacctgaggagaagacagtaggctttgggaggaaaaatgtaacaggcaaactgagccatatgcgtgaatgctctgaaactggaagaacttgaaagtacttgagggacagaaaaaaggtcagtgacactgcatgaaagcaatgataaaatttaaacttgataataggcagtcttgagggtctggcccattttattactccttcctacactcattctgtgaattacttgaaatttattgaacaggtcaagttctcattaactactttaccttcttcctggcatatacttactgatgtctgaatattcagctcatccaccacccaagggaaaaaataatctgaactactattcttactccttaaaactcatatataattttactaataaacccattgctatagactaaatgtttatgtacccccaaatacatatgttgaacgtaattcccaacatgatggtattaggaggtggagcctttttttttaaatttttatttattatttatttatttatttattattattattatactttaagttttagggcacatgtgcaaatgtgcaggttagttacatatgtatacatgtgccatgctggtgtgctgcacccattaatcatcatttagcattaggtatatcttctaatgctatccctcccccccctccccccacccacaacagtcccagagtgtgatgttccccttcctgtgtccatgtgttctcattgttcaatcccatctatgagtgagaacatgcggtgtttggttttttgtcctggcgatagtttactgaaatgatgatttccaatcacaatagcaaagacttggaaccaacccaaatgtccaacaatgtagactggattaagaaaatgtggcacatatacaccatggaatactatgcagccataaaatgatgagttcatgtcctttgtagggacatgaatgaaagaggtggagcctttgagaggcattaggccacaagggtggagccccatgtgcagaattcctgcccttgtaaaagaggccctaagagctccctcaccccatctaccacgtgagaacactgagaagacagccatctgtaatggccttgccagacactgaatctactggcaccttgattgtagatttcttagactccagaacttcagctgtcatttataaaccacagagtctatggtattttgttggagcagcctaaacagataaaacacctaccaacattcccttaagtgcattttaagtgccttaaacatacactccttagatactcaatcttcttgcttcagtaccactcaatacaccaacagtatttatttagtataagtgtaggtaccagactatagcaccttttttttgtgtcttcgtacagagtttatatctctagactgtgaccaaacaccatggtgccataggttgtgctctttatctcaattatttattattttttttcaaaaaggaaggaagaaacaaagtaaggaagggagggagggagggaggggggaccctttctctcccaaaggccacccttccaaatatgcatgtgcacacacatgcacaatacttgattatatctctaaaatttctctctaatcaaaccatttcttgccaccttcattctacctcccagttcaagcactgtctttctaattggcttttcctcattcaatcttataattttgaccatcctacacacagcagcctgattaaaaaaataataaattatataataagtttctattaaaaacttgctcactgcacttaaaattaaatttgaactcctggtcactgcatacagaccctatatattttctggcacctgataactctccagtttcatcttgttccagcctcaacttgctcactctttttagtcatgctttcttagggttccttaaatacctggagcaagtagtctgtcacagacgagtgaaccagagcaacgccatcttgaataggagctgggtaaaataggctgacacctagtgggctgcactcccagacggttaaggcattctaagtcacaggatacctaggaggtcagcacaagatacaggtcataaagaccttgctgataaaacagattgcagtaagaagccggctaaatctcaccaaaaccaagatggccacgggagtgacctctcctagtctcactgctacactcccaccagtgccatgacagtttacaaatgccatggcaatgtcaggagataccctacatggtttaaaaaggggaggcatgaataatccaccccttgtttagcaaatatcaagaaataaccacaaaaatggccaatcaacagtccctggggctgcgctgtctatgggtagccattattttattcctttactttcttaataaagttgctttcactttactctatgactcacctgaattagttcttgtgcaagatccaagaactctctcttggggtctggattgggcccctttcctgtaacaggtccagccaaggcagtctacattatgaacttgcaattcacatgttatctgtttacttgttagtatctatctcctcttgttttcatatatatatttatattgctaaatttgtatgataaacatttattttcatagccaaatttagcttttaatgatacaaaattcagttattattggtattatagaaacaaactgccacttgatcattagtttttacttgttttaaactacttttatttatttgtgcttctacccaactatcaatatgctaagtgtaacgacattttccaaaaaaataaaattgtttttgacatgtaaaactgctaatatattccttaaggttcttactaaggccctcttaataatttatactcatcctgaatacactttaaatgagtgacttgcatcatttatgttaaagaaaaacacccaacttttttatttcctatacactcattatttgcttgcttttctttatttttctctgttctcttgacctccctccttcctgtgatttctgcttgagtagtagagagcatattcagatgcattcccaaaagattcagattcatgcgacagggtttattgatttataagctaaaatgaagagcatgtgcaattggtatttctgacggcaaagtttcagagaatgcaaatgactctgcaccatcatttcgatgtgctgattttttttttaaagaggctatggagcccttagctcagagaacaactatcaacatatctacagaaaatgcacataaattgaacaatctctctacccttcttacaaacattcttccataacaaactctgaaatagaacaagggaaatgcagaagagtagtcttttatttataaaatggtgctacattaaaatacttacttggaagaatttctaacctgctcagtcattgtaaacttctatgagtcactttcaaactctgaggatccgcaatcaccacaatatctaacaggtaactctaaggttagtccctcccttatttttatttgaagttttcctccttaacctttttctgaagtgaaaaaggaattcaagtcagatagaaccatttagttacaatcctatggattcagacatgagcagatgaatatatacatttatcagtttaaaatcaagcaaatgtataactattattcaaagccacaatgtttcataggaggaggctaactatgtgtcttcattttttgaaaacagataaaattttcctttaaattccctttccctggggccaagtgtcaaccaccaacatatttacctatgatatacattaactgaaaaaattgctcccttcccaggaacattccttcttaacagtgtctaaataaagagaggggaaaacatctgaaaccatgctgagttgtgtattcttttgaagtagtctgttctgaccacgaaaacactacatgctagcacagtgcctgtgtcaaagaaggttctttttagccaaatattttcatttacatatgaagcaacttaagtccagttgcatattctagcaaaagcaaaagtggtgttctttccaaaaagcactttgttacccactaacggtggaatcttgattgaccaagaaaaataagtttagattagattacagaaaggtcacaagtacttatttagatttcaatacttaatgaatgcatcactactcttttccaagaaagctggaaaagaaatagactcaaaattttctagtgagaatgatagcttttatagacaacagtaaatcctttagatattgtaggaatttcagagatttagtctcaaaatctctacaaccctgggattataatatggaaatatatattgtctccttcctataaattaattgggaatactaaaaatttaaggcatatcctataagcttttgtcatctacaatttttcaatgtaaaatatttgaaatgtaggtgatattaactttaggaatagtactggtattgctttgtcctttgatacttcaatatttttccccaaccatcaatctgaaaactactaactctctccctgaccttccttcctttttccctcatttatccttagtctaattatctccccaaatttttagtttcccatcttttttctacataagagtttctttaatcaactttaaataccaaaattatattatggttttcacttattcaaattagcataacaagctactcaaacaagtcagcctttcccttatccccacaaagcttagagttaacagggaaaaggaaaatgttagatatacactggcttctaatcatatgaaaataataagaaatagtacctacattctaaaagtataataaaaatatacaacaataaaaatgtaaacttaggctataaagaaaaataagaatgttaaaataataacaaattgtgccaagaagttataatcatctggtaggcagtccactggtaaaattaagagttatacatagaaatgacacactgaataaaacttttatttctgcctcatttctcaactaaaacaccagtgacacttagcacaagttcacatgcacaactgttcaatcacagtttataaaagcacctgaacataacacaaagcaaagcaatcctggacaaatggactaaagctggagatatcacactacctgacttcaaaattaatacaaatctatagtagccaaatcagcatggcactggcataaaaacagacacatagacaatggaacagatagaaactcagatataaatccatgcatttacagccaagtcatttttgtaaaggcgccaagaacatacaatgaggaaagggcaatctcttcagtaaatggtgctgggaaactggatacccatatgcagaactaaaaatctagacccctatatctcagcacatacaaaatcaaagcaaactatattaaagacttaaatctaaggcctcaaactatgaaactactagagaaaacctcacagaaatgctccaggacactggtttgggaaaaggttttttgtgtaagactcaaaagcaaaggcaacaaaagcaaaaatagaacacgattacattaaactaaaaagctctgaagagcaaaggaaacaatcaacaatgtagagaatgggagaaaatatttgtgaacatcatctgacagggaattaataactagaatacagaaggtgctcaaacaactaagaagaaacaataatctaatttaaaaatgagctaaagatctgagtagacatttctcaaaaaagacatatagtcgtcaacaggtatatgaaaaattctcaatatcaataaccatcagggaaatgaaaacaaaaccacagtgagatatcatcttaccccatttagaatggcttttatcaaaaagacagggataacaaacaccagtgagggtgtggagaaaggggaaccctcatatactattggtggtatgctaattagtacagcccctatggaaaatagtatagagcctcatcaaaaaactaaaaatacaactacagaatgatccaccaattccactactgggtatatagccaaaagaaaggaaacaatatattcaattgatacctgcactcccttgcttattgtaacactattcataataaccaaatatggaaatcaacctaagtgtccatcaatggatgggtggataagaaaatgtggcattatacacaatgaaacatcattcagccatacatgcagccataaaaaggaatgaaatcctgcatttgcagcaatatgagtggaactggaggttattatgttaagtaaaataagccaagcaagaaagacaaatattgcatgttctccctcctatgtgagagctaagaatgtggaattcataagatagagtatattcatggttaccagaggctgggaagtggggtagtaggtagcagatgagagattaatgggtacaaatatatacttagcagaaagaagatctgatgttcaatagatcgtagggtgactacagttaacattaatccattgcatatttcaaaatagccaggaaagcacattcaaatgttccaagcataaagaaaagataaatacataaggtggtagatatcccaatgaccctgatgtgactatatcagtgtatcaaattattgcaggtactccaaaagtatgcactctattatatatcaataaaaataaaaatataaaaaaggaaattatcctagctctctgtgcgcctgcaatgtcctttcctctctgaccacctatgacagtctttcccaagagtagaaaaaagtaaacattactcctgcatataagcctaacttctgacctcagcatatacaacaacacaaacacatttacacatttcccattttcagtcaagacaatccttttttttttttttttttttccgagacgatgtctcgctctgtcacacaggctggagtgcagtggcacaatctcagctcctgcagcctctgtctcccgggttcaaagcaattgtcctgtctcagcctccgaagtagctggattacgggcatgcaccactacacctggctgatttttgtgtttttagcagagatggagttcaccatgttcgccaggttgatatcaaactcctgacctcaagtgatccgcccgtctcgcctcccaaagtgctggcattacaggcatgagccaccacgcccggcctctgtatcttgaaaattaaagtaagacttcagcttatgaaacaaaacaatttaacagcagttaggtcaatgtgtataaaggggactttataagaaaattccacatgtattaaatcatggcctacaaataagatcagtttttattttttaagaatttcaaatgttatggcctatgttctcttaattttcccttctggctatctcaggaaataatgagcactatagaaaaggacggctaagaaagaattgtatacacaggaacttaatcctttttgacgttttgtcccgagagttgcctctgggtatatatgtcttagacaccacagtggttcatatcactttggacgtattacttctgatctagcatgcactaccacagaggtcaactgaagttccacacagctaccatagggagagcaaaacacagattccatgcaaagattgtagcaaaatattctctgggattcacagaacacatattatgataaagttctattaattataaacataaaacagaactggatattaaaacagcattttcatactgttattcagttgcattttcaggtgcttcactggtgttgttaaaaatgttatgttcaacacttaatcattagtacagtcatggaagagaaattgctaactaattgctattagtacagcatacgagaggaaatacgactagaaaatctgcaatgtaggttttagtttttattttggcaagaatttatatgaggatgtaaacatttcaataaatgccattttgcctcaatttacctacgggcacaatacttcaatatctctttctaatgaaagaaaaccgtacttcctttcaaattatggcctcaataaagtacgttcaacgtgaaacacacaataatacaatatatagctaaagataacaggcctatgagtgagaacatgcggtgtttggttttttgttcttgcgataatttgcgagaatgatggtctccagcttcatccatgtccctacaaaggacatgaactcatcattcctatggctgcatagtattccacggtgtatatgtgccacattttcttgatccagtctatcatgttggacatttgggtgggtttcaagtctttgctattgtgaatagtgctgcaataaacaacgtgtgcatgtgtctttatagcagcatgatttataatcctttgggtatatacccagtatgggatggctgggtcaaatggtatttctagttctagatccctgaggaatcgccacactgcttccacaatggttgaactagttaacagtcccaccaacagtgtaaaagtcttcctattttccacatcctctccagcacctgttgtttcctgactttttaatgactgccattctaactgtgtgagatggtatcttattgtggttttgatttgtatttctctgatggccagtgatgatggcattttttcatgtgttttttggctgcataaatgtcttcttttgagaagtgtctgttgaatccttcacccactttttgatggggttgtttgtttttatcttgtaaatttgtttgagttattgtagattctggatatcacacctttgtcagatgagtaggttgcaaaaattttctcccttctgtaggttgtctgttcactctgatggtggtttcttttgctgtgcagaagctctttatttaattagatcccatttgtcaattttggcttttgttgccattgcttttggtgttttagcatgaagtccttgcccatgcctatgtcctgaatggtaacgcctaggttttcttctagggttttatggttttaggtctaacatgtaagtctttaatccatcttgaattaatttttgtataggtgtaaggaagggatccagtttcagctttctacatatggctagccagttttcccagcccatttattaaatagggaatcctttatatttttaagacctggaggctaagcatttttatttaagatatttttgaaaataccatctttcagaaaaaaaaaagtataaaaggcctgacttttacttcaaaactatacataggaaatgcgaatggagattagataaattcatcaaagaaatcaccttactaaatatattaatggccacagatggtcctgttaaaaataactacttacattctacgaatcctatagacttcagctcttcacaatgtccaaaaaaagaaccacctgggatccaaagtttcttctttaaagtatgcagaagcactgacaaagtgattgttctttttatgagaagtgcttttatttttatttaactatatatgtagataaacataaaaatattttgtattttacataaccttcttggaatctacagaaatgtatcccgatttagtcatattttttaggaatgcctactgagcttctactatacatcagctattatgtatagtattaaggatatgctggattaaggatatgctgttacccgcacttggtttttgttgaaggcttctttttatacatgattaaaacctgcaaatagtgttctgtaaaatctattgattgggtaataaaatctccaatggaaacaaaagggagagtggtgagggctaaactagaccttttccatccctcatccgcacatgttaatgaataaatcaccagaatactaccaaattcttaatggcaaacatttatacttcctttcccccacctcaagacacaggaaagcttcagaaatgccatgatgtatcagggaaattctcctacaactgaaatgaaaattccttggcatctaaaaagtattcccacggatcatctattcaccttcaatttactcacttctttccccactccatgtttttttctttcccagtttatctcacttgttccagtttcaggtcatagcatgttgaaccctgcaatgctcagaaagggaattcctttctttgcagacctttcccacagagtcattacttttcgagtaccagtggcaacgtgagcactgctttcaaggtgccaaacttaaagacttcttttctgctacacagttatatattgttattttcatcttaattatccaagtgagtgggaaggcattttgagatttggctccttggctttgaaacaaggtaactagaaaagaaactaactcatgtggcagctcctatagactccatctatttcttcacagaaagaaagacggaaatacgcaccaggccaaggcagaccacggccttatagcctccctgtctgacagactgaagctttcactttacacccattttccctttatggaacacatcattcactgtggctgcaaagtgaaggagatcctaggagataatttgtggtatttcagctttcagcttctgtttgttcatcttttcctaaggcattcattcatcacttgcatattaatttttttaaaaacacacccaatgcttattttctgcttggaatgtgaacacataataaacaaggcagtttttcccttatcctcaaaaacttagagtctaacagggaaaagaaaattatacaggcaaatattacaaagcattatgtgttttacattagaaaaattgcaacgctacggaagcacaaaccaaaaggacataatctcatcaagtgttcagggaaggcacaagttcaaacatatggttgagggaaaaaatcaagttacaagcagcagtgtatacaagatgactcatttttgtttttaaatatatctatatacacacacacataaagaagtacagaaaaaaatccataaagacataggccacaatattaacaatgtttcatctgatgtgtaaaattatgaaacttttttccttatatggattttctaaactttatgtagttaactttataatattatttacaaaagtttctgccccagggtagacactttcccatgccaggatctgctagctggagctagtccccaccagcctccttcacggggcagctctgtgacatgtacacacaagaggtgccatcttgcacgacccattatgcacccaaagtgcttgctaccatcctccgcgaagtaaaccatcacttccacagtgcaaggctatgctttcggatcattctaatccctcaagggcaccgccctgcaatgtcttcgcaaccctcccaggcagatacactgaacattcctttgttcaactgttttctgaatttttattatagttatttaacataacttgtatattaattttgttttgcttttccccacttgaatataagctttacaaggccagggaccatgaaattgttcaattgtttatcaaagtatagtgtttggtgtccaataatctctcaataaaagtttgttaaataaatgaaacatatgtgcatgtttatcattaaagaatatattttaaaataattttaacaaaatttttcgcatttcttgactaattttgcttgtacaaatatgacaatatggggccattctgcgtgtaatgtgttgtcaaattctctatttcaaataaggaatggctttagactgtaagtccttagacaacatcattacaactgtggttctgttgtatatctaacatgttacaggacttggtgatacgaatttccctacctaccacggaaaattaagttggtattacagattagttgaggaaggtttttcctctcctaaatgaacaattattacttagattttcaagtcactatgtgcctataacaaaagaattaagctgctctgtaagcaaacagaattttaattcataatgtgaataattgttacatggcatagacctaaaatttgaaaactagagcactgtatttaaagaggctgtgtttttttaaaaaatgaattgctatgattttttcagcattaaatccattttgcaaaatgagatgtcaacaaacttatatccccacacgacatgaatacaaatgtacctagtccccttcctcgagtgattaaaattgcattttaaaatatgacaaattgtttttataaaaaaactataaagtaaaacattagggaagctcaaaaaacatgcacaaaagaatactgtctcaatttttactcgctcagtttggattttttcctgaaaggatttctataagggaaaaaaaaatatctgcctcagtggagacaataatgtcacagggatataagttatctctctcacacacacacacagtgctttccagagcacaaatgctgctgtttttcaatgatcaatgtttttagaggcccaatagtatcttttctatttcattaaaagcactaagagttgaatggattttattcaaggccactggcttaaagcttcttatagcccaaatgcaaccagattgacaggttatgtgctgacgttttacaagaacatttactaaccaaatgaaagctctgcgaggtaccatacttcccagaaaaacgtaacgaaagcacactttctgtgggcctaatgggtagaaaaagacatattagtcatatgataaggggcaaagcaatgaagctaaaagttggtaaccttatccaactccagcagttgaaacactttcacaatggggcaggtgtcaatcagaaagcagaaattccccaacactgaaaccccactatccacagcaatgacctgcacatcgacttctcgggctgctccaggctggtcttgtctcctgaagcttccctgggttttcaattacagttctttacaagtctaagcatattttaatatgttgaagaatttatgttttaagaatatatgcggtaaatccacattcttgtataaacaaaaaacgtatttaagactggaatattgtgttactctagttcatctggttagtcaggataattggaaacatctgagggtgataattacctaatgcaaagtgtattcagtaacttaaaatatactttccctttgcagatattcaaatggaattctaagatacagacttctacactgtttacaggcttgtgtaaatctgggtcattaaaataactttataatgaaagaaagatgagaatgtctgtcctaaaccaagtatttctggtccaaatattactcttaaaaaaataaatatgctagtattctattggaaaggctttgaaaatatctctgggtcttctgtaacccccataaacttctctagatttttgaatccttggtaactttggatcgaaaatgaatataatgaaaaaaaatggtttgataagctctttcaccaaacatattatagctagaagaatgtaataagcagactacatgccacatgattcaagataattgcctataaagtggtcagagcttcaaagaaaaaatgccaatttgcaaaatgaagcatttggtagtattttacctccgctgaaaaatctgattgcttgactttcggtaccagcaaattcccctttataatttcagcaaatagtgtcatagtaaactctactgcagctacttatggatcttaaatgaaactcctattgttctaatttggctctagtggttgatattagagacaaatgattttcacttgaagattcttgcaaaatttatcaaatatcactttataagacatgtctgtgttctatgatgctgtgggtttgaaatcttttattattgttcttatgatatgaaaaaaattaacaaagatagtatgggctcaccaatactcaaattaatgcttttcattatttttgtacattagtctcaaaaataagcaattagtaaaataggatgctggctcattaacaaaccattttctttttttcttctctttcttaatggtttaataagatacattagctattacataatgttttctaaatttttcaccttgttttgtacaatcactcttgccctcccctcctattttatttttcttcaacttttaagttccagagtaaacgtgcaaatgtgcaggtttgttacataagtaaacatctgccatggtggtttgctgcacagatcaaacatcacctgggtattaagctcagcttccattacctattattcctgatgctctccctcccaaccccccacaaaaggccccagtgtgtgttgttcctcgccactgccatgtgtccacatgtctcatcgttcagttcctacttataagtgagaactacagtgcttgaacaaaccattttctaattttcaaagtataagaagcagcagcataggtcggcttttcaaaaaggttaaagaatttcacaccacaaaccagtgttcccttttataaagttgcgcttccaattcagttcaatattatttcctgatcacctgctatgttccagataccatgggtataaatatgaaaagatgaagtccagttattaaggagcttatgaaagattgcagaaagtagatgtgcacccagaccattaaaaaaatactatagcaatgttgtcatgggagagggacccacaatgcacaccagatatgggtattataaagtaggattcttggaagagggaatactggaattaagtttagatggatgaagatagataaataggaattaaccagatatagaagtagagtaaatagagaagtcaagtcatttgttcagaaacaagagcatgacccaaggtatagtggcaagaaagaattcagtacatgtgaaaattaccagatctctgctattgcaggagtagtagaaataagttaggtatgaatcagtcctgggggccttttatagttaatatactgtagactggttctgagtatgcgctgaagagttaagtaggagaggccatgctgtctctcctttaggtaaatcattcttctgatagtctggggagtcaataaaagaagtcaggattggaggcaagacgaacaattgggagactattacaaagctgacaaattgaataataatttactaaataccagtggtgtagaagaagggttagatttgggaaaatatgggggttgagagtggttcatgtcaggctggacaacaaggggtgcattgctggggataatttaaaaacaataataaaactgtcttttaatcaaagctggtttggttttcttatcacatgggccagcaattctcagcaatgtcagtgataaaatatccttccccactataggtagactactcccattgtatccaccctccttggtacagcactgctaaacacttttggtgaagggttctgcactaaatctccctaggaaatgtaaagataaagaccaggtgtttgtctcaaaggagctatcagtctagcaagggagataaggcagatacctcaataattatagctacaaatacactttcatatgatcggtcatatgacaaggtcaagggtgggagccaactagtttacatacctgactgcacacagccatccctgctgagggcagagccagtgtcttgcaggcaatactagaaacactctgtcccagcctgatccagagggaggagggatctctccatgtcatattgctgcatacctactaggtcgtctcctggttgcaaaatcacacagccaaaatgcatgcagctcttgccatctctgctttatacacacactagtgatgcataaagaaacaaacggtaaggatattatctgtaaatgcaactgttgaaggaaggtagaattgtgaggaaaaaggaactgttccagaatcaaaacaaggagggggaagagtattttcagaaaatgctcccaaggtcctatgttcataagtaacaccacgtggcctgaagaatagaggtttttatgccagtattttaccacacacattatcttcctttagcccttcaccttacccttcctcttcactgtagaaagatattaggatactaagatgtgaacaggtatttgaaatcatgaaatccaacccaccaatttcaagagtaaaataatgtccagaaaagttaaatgagctaccaaagtcacagaactggctctggcactcatgaataacgaacaatgttcttactcttaagggaaaaaaatataagagttatgtcttatttctcaaaaatatagttcttggagaatgccagagtgacctgaagcaaggtatatctgcaatttggaaattggtgtgtgggctttcaggactgtgatggccattaactatgcaggtaggtgaaatctgtgatgtctggaccaggagccactatttccagaagcagcacaaagatcaccgtggcttctgatccctcactccctttcatacttctatggcaagatcatttagacttttttttttttttttgagacggagtctcactctgccaccaggctggaatgcagtgcacgatctcagctcactgcaacctctgcctcctgggttcaagcaattcacctgcctcacgtcctgagtggctgggactacaggtgcacaccaccacacccagctaatttgtatatattaaattatgtgccagtccctgttctatgaccttagtatatattaactcgtttaagcctctgacaaccctatgaagtgggtcttattatttccattttaaagaagttaaggtac

SEQ ID NO: 2900 - DNA, 90572 bp, Homo sapiens
  misc_feature 33050, 33051, 33052, 33053, 33054, 33055, 33056, 33057, 33058,33059, 33060, 33061, 33062, 33063, 33064, 33065, 33066,33067, 33068, 33069: n = A,T,C or G
cctcttcaccactccctggcctacgctggcacccaccttcccagttcccctcctgtcctatggagacatgtcttttctccccactctcccggacctccctctctgggggaaatgatccctcttcctctagcattgctccctttcctgcttccttcccagtggccctggagagttcgcttctttctcatcttaagaacaaaataaaaaaacacctcaaaaccaggtccctctccaccctgccctatttctcccggctccttcacagaccacctttttgccagcatcctcctccccacactttccaaccttggaatcgctactcaaggctatgcagcaatcagctaggatatgtgtacaagtcatctgttactgaaatggctgaactattttcaccgaagtcagggcagattccagtccttcccatgtgaatatcaccaccctcgtggctcctgctttcgcgccttcacactcatccttgtctatacgctgatcccacggggatcagtgccctttgcagctgcaaagggaagtcaggaggtaggacattttgactggcagagatgtccagcaacaggacggatagcccaacggccaggagcacctgtcactgcgttgactgagcagaaacaaccaagctggctgactccaatagggttctgggctgaggtctggtctttgatggggagcagggactggaagacccaatggagtctgaaactaaaattcaacatccccatcttgcctagacctggggccctcccctgtgctcccccagccatggatgggcactcctgtgaaaagatctctccagggtcttgcaggtagagtgcaaaagtcagggtcacacgcccctgtgaccacgagagggcgcgcagggcctagactgccctgagcgtgtaagtggattgggaaggttacctggggtgaggtgggtccaggcagccggaaagggctggctgaggcagaggctgaggctgggctctgtcgaaggtgcagttagaaaatccagctcaggtccaatgccggcctcaaagtcaaaaaaattgattggaagcagagttgtgttatgttgtctttaaattaaatatatgttgctattatcaatgattctgaacttttaatgcaaaatggacaatgaatgtgtgtgtactgccccccgacatgggtgaaggctgggtatgggagatgtctcttgggcaagggcagggggtattcagcattagagacatcagagcagagatagctctgtatcctgactctggtgtcctctacccatcccctcgccagtcacagttacctatcctggttcccaagacacctttcactgtgtcaccctgacacgaaccccacctccaccaaagcctcccggcaatgatgccctcagatgtaccttgacatatgatttaaaacaggcctgaagtccttcctagcctctcccttgctcccatctgcttttattgggaatctgagtttggtccattctctttgatcaccctgaggcaaggagctgaccctctcctgtacccccacgctcgggccccatggcccatctggcagaaggaaagggctagaagggacttgttccttggtggcttccaggatgcctcactctccgcccttctcctagccctgacaactcaatccagctgacagacaggaaatgggagtgagcccagggtctacagccaagaaggtcccttttccctgctgagtggggatggggcttgggcccactccacgcagtaccctctccagggctgtgcaccatttcacccactgtgtctggaaaggaggcttgactcttagagctttctgtccttgaaacaaaaaagttgatgatatgttcaaatagaaatgaagcctggggcactagtgactccctagaggtcagccaagggggttagatgtcactccaggagaccccggaggacctggggaggggtcagattgatgacagtttcaaaaccacagcatcctggagtaaggcttctgctactctgaaaaaatcctccagctgttgagagaggtggggtaagggagggagggagggatgatttgcatttaattgcatttcatttacatatagttcttttgatgtccaaaggcacagaaatttcctgtcctgcttctttttccctttctttcttctgttcctttctaacctccaggcaaacccctatctcctctcttccccacagcttttcctctcctaagctaaacagggacagggagtatcaggctcggggggttgacattttcctctctatctcactccagcccagagctcaaaaaaccggtttctggagtctccaagaactgctaaaggaggaaggggtaaaggagttctctacgttcccatttagctcatctaactgaaatgatcagtgagcaagtctgagagagaaggaataaagattgccaccattccccctcaaccctatacacaggtgggacttagagggcaccccagccttctaacctcagggcacatgagggagaagcagggaagagtagaaacgtctctgctgagccatatgttgttctgttttctggggtaagtccccctccttgtgggcctcaggtccctcaaatgaaggttcaatgatatctaggttctttctacctcgttatctgataagagaaggggaagctcagttcagaaactggagggcaggactaaaatcctggctttggggttggcagccctgggtctaataccaactctgtagtctactagctgcgtttacttctctgaacctcagttttctcatcttaacgcagggctaataattgtaccttccatctaaagtggcactgactaaaatcagatgggtatgttcagcatggagcacagttcttggcacgtaggaagcactcaatctatattcattagtgaatgagtaaatgaatgaatgtgagggagtatctgctatcctctccccacccagcccttctgccccgttcatcctcctacctccacactccaagtttggaacccaaagctgtgccccagctgtgaacctccaaggtcctatctgtgcctcagcttccaccccaatccccacaagactccatatccccattccccccagaaccccagaatcctaggctgctggagacagaaggcctttgaaattatcaaatatgggcctctctgacttttggaaaactaaagcccagagaagaatgtgactttgcacatgaaaaagggcaacgggccccagataaggtggtcggagaatgagccctcggtgcacatggccatgcaaataatatgcaaatagagatatggaaatcacaagcaacaggggtatataagctgtgtgcaggcatttttccagaatggtggtaggtgagtgcagtgtaggtaagaaatggacttcagggaaggggccaaacctgaagttggggaggagaagaaaggccagaaggggatgggagttgggggagtgttgaataggagggaaggaaggaacagaggtgagagtgtcctgagagggacccccttgggcctccaataagcccttgctggtctctttctcacccagaagaaacaagaaaaagtgcaggggacggtggctcacacctgtaatcccagcctttgggaggccgaggcaggcagatcacctgaggtcaggagtttgagaccagcctgaccacatggagaaaccccgtctctactaaaaatacaaaattagccgggcatggtggcgcatgctgtaatcccagctactcgggaggctgaggcaggagaatcgcttgaacctgggaggcgggattgccgtgagccgagatgatgccattgcactccagcctgggcaacaaggtagaaactcatctcaaaaaagaaaaagaaaaagaagcaagaagaagtttctctcctcccttcttttcggagcgtggggaagggaggtccatgtgactggggagggtggtgtatgtggacctgaagagcaattaagtgcttcctgttcctctggggccactgtagcacccacagaacactttctgaacctgttgtgtgcccagccctgttctaggtgctggggtgctggcactagaatgaagcaatgatcagttaccaaccagggggtaagctaagaaaaggccctcagaacctgccacgaaggtgttaagaacatggaacttaggctgggcgtggtggctcacacatgtcatcccagcacttgggaggctgaggcgggtggatcacgaggtcaggagatcgagaccatcctggcaacgtgggaaaccctgtctctcctaaaaacacaaaaattagctgggtgtagtggcacgtgcttatatctcagccactcaggaggctgaggagaatcgcttgaacccaggaggtggaggttgcagtagccgagattgcaccactgcactccagcctggcaacagagcaagactctgtctaaaaaaaaaaaaaaaaaaaaaaaaaaagaacacggaacttaaactctctaagcctcattttcccctctataaaatggcaataatcatagtacaatgtacaggttttgaggactaaacaagaactaaggcacgaaagatgcctttcaagtgttggtcaccccagtgcttgatacacagtgaaggacacgaaatgctgggtgttatcgtgggcatgactggagtgcacggtgggatgggcgtgcagggggaaaggacactgtaaacaaggtgtagaggcaggaaagcccaaaacctgttctgtctcagaaagtagcccatgggactaaggagaagacatgttcatgaggagtcctgtctgggaggaaagcgaggccctgccctcctgtctgcacacagctttctgggcttccatgcaggcctcccgtggtgacagaccacttactgggacttgaagagacgaagagaaaggggtgagccttgatgggtgctgcaaagagcactggagtgggagtccagagacctgattccagccaggcttgtcactagggaagtgtgcacctttgagcaagccgcttccccgctctggaaggtggctgcaccaaaagcctgggcactggtaacttccacatccatcatctcgtagagcctcacagcacctgggacctggggcgggagactggaggggcaagcaggaagcagttgtgtgcacctggaactctgctaataataaactgcaccccgtctaaatcccacaatgctgtgaggatgccatggggctaggtgagcttggtcacctgctcagcccaatagggaacccgattagcacctgtccgttttacaggtgagttaaatgagctcagggaggtgaagaaccttgtcccagccacactgtggtaagcggttgggaggcgagattccaaaactgaattctttccagcagacccccgcgattctccaaacactccaactccttgcagcgcttacacttcgcgatctgtccagaaggaagtcgggctcaggctggagaacccgccagggcttcctaaaaagggcgagcaggaccaggagtggcgccactccgggcgcggtgaggaggtgctgccaggctgggttggagcaggcaggtgtccgcgggatcgagacccgccccggcagcacccccggccccctccccaggtccccagctcatgtatgcaaatcactgctttgcatgggcctggggccaggcgcggggctcctgccaggggcgtggccggcggcccccgccccgcgccgcgtgctcacctggggagtgtggcaatcctgcggcgccgagtgttgcccgggccggagcagcggagcgcgcgacagtggcggcgacggcccggcagcggctcccgcggcggcggcggccgggaactggaggaaggagaccctggcttccaggggccccggctggggcagaggcgaggggcctgggggggcgctggctttggccccgctggggcaggatggtgaatctggagtccatgcacacaggtgaggggcggagggaatgagcctgacaggtgtcactgcgcgtgggcaggggtgaaggagagggacaacgttctggttaggaggggggcttgtttcccagcggccaggagagggcggtgtggatagcgggttgtcctgggtgggtgccggtcagtatttggggactaaagggaggggatctgggataagaaaccctggaaagaatgagggtgggggctggtgaagggcgggagggcttcgaagcccccggtctggggatggcagttgtatgggacgtgggtgtactgaactgtcatagtctcaggaggttgcagggagggtggttcactcactcagccaggggtgtggacctgggagtgcataagtgagggaaatggtatgtccacatgctgtgtgctggtgtccgggcatatgtgtgaaatggaggcaaagcggcatttaggtggttggggggcttaggagaagtggctgaggtggggcaattacagaggtgccctggggcaggggccatgcccccatgtgtttgagaagggatggtgacagacacatcctcgggttccatgtcccatgccttccttccctaaggggtggaaacctaggagatgcaaatgcttgccgggagtcaggcttccctgaatgaatgaatgagaggtgggcatggagggaacccacccctccattcaccttgctgttcctccttccacagctgggctaaggcaggagctgccagcagccaggttgggcttggcttggggcttcgtgttagggtgggccttctggaggtcacaggcctgagcaaagaacaagtgaagaaagcggtacctgacctggccatttctaacctagcacttactctcaaagtgggcaggacccagtgatctttctttaggatttcggggctgttgatggaatgttgttacctggtctcctttctgggagagtagggaggaggcaatgctccagaccaccccaagaagcagagcaggcctgaggcctacccagcctgaaaacaagcgtcagtgagtcccggagggaggggacctggagtgcccagttccccagatgctgtttcctggcagggctggtgagaggcagactggcagtgagatgttggcactgagtggctctccaggacgtgccagaaggctaggtgaggcggaagaagccatccaactgggtgtcatccagagtctgaggaaagttgtttctagactgggcatacctggggcagatccccgggtaggtgctctccccttcactgccgcagagaaggccagggtttgaatgggagcaagtctcttcagaaaggtgggcttagcatggatgggaagttttttagcaccaagatcacagacttcctgggggttttccacctcctttctactggaggctcccattctgtggaagtgggagggggtgggacagttgggacccagcaggaggcagcctggggcctcagaggatatagcagagagcagagaacaccagaggatgaggtgaggcatagggcttggcctctatgccttccccaggagtgagctcctggctgatgcttccagaagcccagacaccttctccaccctgtccctgtgagcaggtattcccgacacatgggggagactgagctaaaccccaggtggggtgattcctcagggcgggatctccatgtacctggggtagattgcccaattcatctctctccatttgcctgctccctccccagcccattccccctcagggctacctggcctccctgtgcagtttctgggtcttggcccctctgtagtgtctggggttccccttcagtggcacctccagaggtctctgagtttaggactttctgtcccatcttctaactgggtctctattagagggctctctttgctgggtcctcctggtggcctttactgtcaagatcttctttgtagggtcttccagtgcgcaccctgctgtggggtctgtgaaggagatcgctcttccctctatggaatatctcattatgggtccctctctagggtcccttagtccggatcctcttttggaaatgtggtctcttttgagtcccattttcccccgccaaggtaatctgtatcctactgatcttgataaatagtacttctcctgtgaattcccagggctgggtcctggggtctcctccttaattgacttactggaggagtttggatgggggaaggaggaggaacagagcacacaaactagagcataggcttgctcccgggtcgcccactccaagggctccactccactgaggccagctggagttagccccattgtcttgctctgataacctgggtacgagccagattcaggtctgcctggagccttcgcaccttgtactttatagagcatctctcacctggagcacaaagacctgagcaggcagagggtcaccagacacaggggctctgcagcaaggagggctccctgctccctgactaaaaacaggcagagaagtagacccgagacagccagctagggagcagataagagacaaaggaaaacagtgggaagccagctggtgggggcacacctggtttgcccaggtgtctctttctctgcccttctcctcactgtgagcttttccccaccaaggttggaaaggggggctgagtctcacagacgggtgccaattggagctcaggaatagcatttgggtggaaggcctgatgatgggactgagaagaaatgagagaagtctcctctggcggagagttgagccttggctagctcagaagtggggccggtgggtcctttgaagtctcccagtggaagtgcgccatcagcaggtatgtgcgggaggagccagagggagctcccgtccttccaagaacataagatggacactaggagagagggctgtggcttctgctttcccagagtagcctggtcccagaggtccaggaccctcagcctgcagcctggggggagtgcttcctctcgagctttcttcctggggttcacagatgtctaaggagggcccactcctggtcaagccaacgctaacttcaggtgtgatggtgctgagtggggcagccaagggtctgcagctggtgtctgggctctttcacaagcagctgagcctccccagggaagggagtgatggcaaggagcctactcagtgtctggctagataacacagaggagcctggccccaccccacacctctctcactcacccctggcaagtgtgtccgacaggtgaagggttacagtgtctcagggagtttcggtgttggcccatttttagctgagacccaaaagctcgtcccacccatcagcctcagcctcctacccaacaggaacaggtctcagtgtcttagcatcctatgggactcaagaagaggcttgataggttatctcaccctcccctccaatcctgaagtggcaccttgttgatcccataatggatacatcaaatgagtagcaacatggcagatgaggaggggagggggttgatgcctttgaaagttatttttagacatgttaagactaaatgtcaggctaacttgaaggatgaatgagagcttctgtgtgtatttgataaggtgatgtggagaatgggtgttggaggagaatttgggttctaggcatgcgattacagttagctaaagaattaccttcttaaatttcaggagtttgaaatgagttgattcagagacttggtcatcatcccagcgtcactgcctcttaactttttcctgtcctcatgaacacttttttgtgaagtcagaatttggagaatcctaatggtttcccagataaaggacaaattacaatgtgctgagacagaaaaccaaagctattccttataatggggcaaggggttaatggaggggctgagaagaaggcaggaagggaagcggactagcatctaagcctaagtgtctgtttaattattcatttattaggtgcttactttgtgcctggaactcctttcctggcagttttcattcagatttcatttaatcctcacaaaaaccctgggaagtgtatatcattattctcatttttagggagaaaattcacatccgaatatgtggctagggtcccctagctagttagtgatggcattggattaatccaggtttgtctgatgccaaatcccatgctctgaatcctggtgctgatgaagaaattgaaaccaccagtgggggagaacttcctgtgcacctttccagcagtctctgactcgggcctcttctcagcactgttgaagaatccccatggtgaagtatgagctgagcagatctcgttaggcaatgcccagctccaggggggatagtacttaatgggtgggagaggggagccctttctccattggaacagaaggccagtggcagcagaagccctttgcaaatgtgtctgggcgtccatagtagttattctgcatattcttgcatggcaaactatagagagtttgagactgcgcaggacggattgaggttaggctcaagaaatgcctccctaaacgctgtgcactaggagggagggggtggggtaaggttgcaggtcttcctcagagctctgtgaccgaccacaaagtgcgtgtagatttgtctggggagggttccatagagctctaagtgtttaccttggcgtcttcctcaatttggctggtcttgaaaactccttaaaccacagtgactcctgactttctcccctattctggggtattctagcctctaaatctctggatcccccatctatgtcttgtttggcatcaagctgctacactccagaggtgtacacctcggccggagccacacacgttagtcctcacaacatgaaaaagtaggttttctcccctctttccctggggcacaggtctaccctttttcctatcctgatcatctccagacctgggcatccggactgccaactgcctgattacctgatgcaattaagactgcctgcttgactgggattggctggggagctgagtacgcaaattggctcacaagactttatctggtttgaaagagttaaagtgctgccccagagaagggggggtgtggggtcaacatgatttgaataaatattcttctgtctttaaggcttcagtctttgggtggtttataaggagaggagcagagagagagtgagttggttcaaagttgcctctcttcttccccctgtgaccccaagaggagacttaggggcctcccacataggtggtggcagctgtctgttaaggtaaatgtttaatttattgaaatgaagcagggcagagaggctggaccagcaggacttggggctgagccaggggcctggtgtaggtattctctttctgtggggcactgacccgctgccatcctttctcactgagccagttgaaggagtaggagagaaggtaaggatccccaaaggacagatctccaaggaggacaacacaggagctaggacttgatccccagactgtgggctgacctcgagaccagacagagaacccaggcaggacctgggaagaaaggtgagaagggcaagccttgtttaagggcactcttaccttccaggatggggttattaagggaaacagagctggggaggcggcggggagggataattctttcactatttaaaaataaaataaattcctcagatcccaaagaaacgagtgttggaaatgggaagtgtcccctccacccccttgttaaatttttaccaacgagtcctggtgatagaagcaagtggccatgaatgatgcaaaaggtgagagaccctgcagggcaccggggaaaggggaagagaaaggcaaggagaggaggcgagcatgggaggaggggaccgtgccctcaagcttatgaatattctaatggttgtatgttcgggaatcaggaatttgaagtctgatggttgttgtaattacacattcatctttgttatttagttaaagccacatatgcatagcaagaaaaattgtgacctgttattaaaatcagttgtgttttccctgcagatatcagatgagtggggatgtagccgattccacggatgctcgcagcactctcagccaggtggagcaggtaagggtcttctcttctcggggatggagggggtggggggaagagagttgttgggattgttgaacaactggtgtctcttcttgcttggtctttcagccaaccagaccccaaagctggtcttaggaactaagggaattccctgaggacatgggatatgattctggagcctttgaaagtagatattgctccacagtggaacaaaacctctggaattaggctaggaagagaccagaacttaaaaacagaacaaaaccaaaaaagttcaggagcagctgtgttcccaactgctgtgctggcagaggcagaacctgtctttcttagatggggacaaggccttttagccccagatacttgatagtcctactcaaggcactaaccaaagaggcctgtgtacaaatgtttctcttccaataacgtgcatgtgggtggcaaataggctcagagagaaaggcttggtgcctggaggtgatttgctttggaaagaagggaaaggatgtcagtagtcccagctagtcagcaggccaaggtggaggattccttgagcctaggagtttgaggctggaccgtcccaaaaaaagctgagaggacaaagaagaattaaaaaagagagtttcatagctctctatttttacctccatagttcaagcttgctttgaaagctccatataattaaaaagaacttaaagatgagtataaattgtagcacaccaaataactttaatagcattccaaccagacctcaattagtctttcatctggatcatagagacatagaaattagaagtggaagagaatcaatgtcccccagagctaaaatctttttaaatcttgtagagcagtgtagttccattcttgaagctatgagattcttgtcaggggcaaataattgggggtcttggcggggagggcatccacagtatgcatttgccataaacttttctctccccagtttaatactgaaacagtgtttccttgcacaggtagcaatacacatcaaactcaatctttctattttgctttgcttatgtacagaggcagcaagactaaggagaatgtgggcggtcacactcatgtttcaatagattatttagcagagtatcttttactaagggtctgtgagaggggcacctgttcttcccagttgagaagaagattcccttttatctcaaaaacctgacaagactttaaactcagttcagctagagagtgatagatatagtccccacactgacaccctccctagagaaaaaccagcccaggagccatgatccagagaggctggattgcccttttctgaagcaggctggctggagccaattctgtttacctggggcccattgcccaggtgtgtgggacacagctaagagagcgtccacatggaaagaagaccacgcctaaccagcttgcactggtttctgttactaagaccaaatcagggtaacagtgttaggagtgagaatgagccacatagaccctgaaagaggagccaggaaagggagggagttcaaatcctggtgggggttaggaaggtagtgtgttatggtcaatatgagcaaattctggcttcctatctgggagctatatataaagaggttaagagagaaagaatccagacattggctaagaccttcagaatctgtctcttatccgggataccaccaattcaatatgtgaccttagaccagccactttgcctccctaggaggtagaacggatgagctttgaagagtatggatctagaatcaaacagacctgggataaaatttgagctccactgcttactggctgcatgacctgaaaatttatccttgtcccttttgtaaaggggaaaagtaatgcccaacttagagagtgggttgagagttacttgagatgatgtctcaagccttagcacagtgcttggcacatggcagctgtgatcgtcattaagattctggaatatacgatgggcatcgctgctgagtacttctggctcattccccgctttactcaggccagtgcatagcccggaaggttggttttgctccctttcccatttaggaaaggattctgcacaggtccctttcagctccaaggagcccgtgatgtctggaactttaccaccaccaggagatctttcactcagggctcccggctggtagcatcaatacttaggtgatcttcaaattactgcctgtgttaagggcaagaagaaagaggtggctaattaaagtaaccaaacttcctggaaagtcgttctactcattttctttttacagaagaaagcttattatgagtcacaatggttaccaacttggttaatggcttcctttggattttaaaaggcagattcaccttctcagcagtgcatgaattaagggtggtttgtctctgggttttaaaggaactataaacaaaggtgacttagaaagccccactccctgaaagcaccccctgtgctgcgtgaaatccccaaggggtactggggggtaagaatgggaaagggaggtaaatttccccatctgcactggtcaggaatgcccaggggagcattccagggccagacacagacctcctggctggtggagacgtggccgggggcacatgttttccttctttggcctgtgaggaagccgaggcatagatgaagaataagctgcccacgagctcagatgtctttgcagcagcacaagggaccagccaaagctcagagcccctgttcagtactctttctctttctagatttctgaactatcagcttttctgtccttcctacctaatgcttcctcattgttgttacttttcctccacttctttttttgagacaggttctccctctgtcgcccaggcggagtgcagtggtgcagtcatggccactgcagcctcgaactcctggctcaagggattctctgcctctgcctcccaggtagctgggactacaggcatgagccaccgcaccgggactttttccactcttgaggctgagaacaatttttttctgttctcaattatgtggttgatgagaattagccttacccatatttcaaaagcccccaggtctgtaactgacaacccccaagtgcagagtggctaaccctgtgacttttgaccatgctggccacatcattgcctcaatcacaagggagaaagaacagagggtcaggaggaaggagggagagatcgtaacattcacagagcctcctccacagcaggcacatgtaggcaactttatttacagcatctcatttaattcttacaataagctatgagatagagacacgattaaccccatcttcattgatgaggaaaccatagctcagaggagaaactaacttgcccaatatcacacagcttatagccagaaatcaaacttggccttgttgactctatcagactcttatcctaggtctgccattaactccctgcatattatcttggcagcgtttccccacatggaccttcattttcctccccatagaggcggggtttggagtagatctctttaaaggctgaattttaaaggatgtgtgcccagttctgcttttcacaattctttcctctgtttccagatcttgcatttttgtgcagctttcctcagctctgagctctctctctcctcctttttcctggttttctccccattcctttctttccagcttccctttcagtcttttctctctgacacccacagctgtcttctctgtttgggctccgatcctctttgacttagcttgtgttgtataaccaacatctttggaggatggcttggtggcagatcctgggctcagatgaaggcatccctgtcctcaaggagttgtccttctagtgcaggaattcatggctgcctggataaagtgacaacatgtgtctgtaagggtgttctcaaatacttcatgcatttggcctttacaaaactctatgagagcaggtattattagcctacttcacagatggagaaatggaggctggtgtgagaaagaaccttagctacttttcccaagctcccatacctagagaatgacagaactaacctgagtctttctagtgactttctacctaaagatggtggtaggaagactgggagtcaactagagaaccagggacaggggacataagacaatggtagctgtctgggcgcggtggctcatcctgtaatcccagcactttgggaggccaaggcaggcgaatcacttgaggtcaggagttcagaccaacctggacaacatggtgaaaccccatctctactaaaaatacaaaaaattagccggcgtggtagtgggcacctgtaatcccagctactcagggggctgaggcaggagaattgctgaagccaggaggcagaggttgcagtgagccgagatcgcgccactgcactccagcctggtgacagagcaaaactccgtctcaaaaaaaaaaaaacagggtctcactctgtcacttacatagagtgtggtagggtgatcatagctccccgcaaccttgaactcctatgctcaagtgatctcctgtctcagcctctggagtaactgggactacaggtatgcaccactatgcccagctatttttttaaattatctctttgtagagccaggatcttgctatgttgcccaagctggtcttaactcctggcctgaagcaattctcccaccatggcctcccaaagttctgagattacatgttgagccaccatgcccggctgacaaccatctctagatgaagcacatgtgtgagcctgtgctgcgcacacacacacacgcacacacactctccctccctttttatgattaaatgacagagaagtctgaactgtatttgtatgatggagtacaattttcacagtccatcattaagtcctgatgcacttgtgcccaggacttgaatttcttcatcgtaatagaaggagaagggtagtgcagaataaaatgaagcagtgggctaggtagcctctaggatctgcacctcagtctgtactggtccatccctcacctctctggaagagaggaatgaaactgtagtcccccccagacatggaggggtcctgatattcctgctatgaattcctgagaggacatcttgtccatgcctctctcttttttggagacatttcaaacccatccctggaaaatgagagaagctgctttcttagagactattttttgtctattttatatctctaagaaaaaccaaccccacgttttctcttggctgccttttttttttttttttttttgacagagtcttgctctgtcgcccaggctggagtacagtgcatgatctcagctcactgcaacctctgcctccagggttcaagcaattctcctgcctcagctcccgaatagctgggattataggtgtgtgccaccacacccagctaattttttgtattttagtagagacagggtttcatcatgttggtcaggctggtcttgaactcttgacctcatgaccaccctcctcagcctcccagagtgctgggattacaggcgtgagccaccgcgcctggcctggctgcctattcctacaggatgccatcctcagtgcctggaagtcctttcttatctctccctaagaccctcatgctgctgcataagcccattacctcttgttctgcttttctttttttttttttttttgagatggagtcttgcttcgttgcccaggctagagtgtaatggcacgatctggctcactgcaacctccgcctcccaggtttaagcgattctcctgcctcagccttctcatagctgggattacaggcccaccaccaccacgcctggctaatttttgtatttttagtaggacggggtttcaccgtgttggccaggctggtctcaaactcctgacctcaagtgatttgccgcatcggcctcccaaagtgctgggattacaggcatgagcctccgcacccagccttgttcgcccttctcagagtggctcccaccccaccttgtttctgctttctgtgacagggaaattataagtactgattcgccactcagcctgcagactgtggctccatgtgccagagatcgcagacagcctgtggtgccaggatttgcttctctgcctccagcactcagagaaccttatcaaataagcagccacagcagcagctcacatccgtaccatgacttacaactacagatactttctctccatagattcccacgccaacacccaggactagggtaagcagaggtggcaggattgtatgttcagatgagccgtgaggagttggctagccctgcccgacaccattccctcttcctcttgagatctccttaaggaaatggtcacccctcgaccccagttgccacctttgcagcccccatagaacttggactccttttctgttcaacgtaagaggggaaaaaggagggggagcctggttgggaggcatccataagccatcttttaccacccagagttcccttagtttatgagtggtcttctttagagcactgcttctcaaacagtctgggaggaggaccagtgtttatatttccagctgtcacagacatgcacccagacctactgtgcccgacagcctgcagcttgcacttaccagcgtactcaacagcaccaaatggctcacacccaattcagctggagggcccactgatggatgcttggatgtgctattaacatttttaatttttttttttttttgagatggagtctcacttgtcacccaggctggagtgcagtggcacagtcttggctcactgcaacctccacctcccggttcaagcgattctcctgcctcagcctcccatgtagctgggactacaggcatgtgccacatgcctggctaatttttgtatttttagtggagacggagtttcaccatgttggccaggctgtctcgaaccccgacctcaggtgatccgcccacctcggcctcccgaagtgctaggattaaggtatgagccaccgcacccagccaacatttctaagttcttatactcactctttgtccgagctggtcctggacctccacagtgcacagaccagctttggtcgttgcggggactttctactaaagatggtggtaggaagactgggagtcaacgtggagaaccagggacagaggacatagacaatggtagctgtccgggtgcggtggctcatgccttgtggtgcactaccttagtggatttgcgttgtgtattagaaagtctctttcctgtggcctccgtgagcaatggctccacctaccctgggtacatcttcgtatgacctccttaccattcctctcactccctccctggagatttgggggatgatgatgggagacccagcaggagagggaggtcccagtctgtcctttgctgccggggtggcatgacacccacctaccctgcagactggaagactgagcagcatccagagatcaggccactgcagctttctgagcctcagcccttcactaaggcacccaaaattgcagaccccccagccccaagctgggagtaaatcctttatgtaccttgggttcaccttcctccctcgaaacgattagggcgatgaacacctgaatgtggaaaagtgctgaaaaagtggaggaagatttagaaagaaatgagcgttcaaattagacaagtcttagggccttgaagagcagccagacccaggcaactgacatgcagctacagtctgtcccaacccagcccccaagcacccgcataacaagcagacatacacttcagaccccagagttgggggtgcacctagaggcagtctctttctggtcgaggttgctctttcaaggcagaattgggtgcttgaggaagtttgtgaaactacggaggggcagaggagatgacaagttggagtttggggccagcatttgttatgggtctgtgagaccacttccccccggaagggcttgcccaggatgacccactcctaggactgtctaggagtgaagaagtggaaagggggaaaagcaggagcccttcctctcatccccattcctcatagctttggtttggaggaagagggccagagtcaagctgagagtacttaaaaggaaagcggcagaggtcaccccaacaggggcttctggggttctcccacattggagcctgggggtctggcagacagggcaggatgtgtgaccagagccctcataagtggctgggtttcattcctatgggctcagacaccaagagttcaaagtgcccacctgggctctccctggactggtgagcttgctgtgggcgctcctggggtaacagcagatccctgggagactcagggagggcaggcctttgtgcaagccaggagcatgggaaacagctgcaggcatctcccaaaagcatcagtgctgttgttactcaaaaaataataggtgttcatttgcatggcattttacatacagcttccacacactgctttcatctcctaccactggcaccaccaaagccccccatgtgtctcctttcctgcctgcacctctgggggcctcgtggtctcccccagactcccagtcttccccaccacagcctagccacccttggcttagcccagccagaaaaaccagcggttggccttgcctgggtgtgcccagtcaggtttgtacgagaggtgtgggcaggtaggctggcgtatctggaccccactgggcacccagctggggacactccacctgccccagtagggggcttgccttcccttcagctgcttgggtggaaaaaggaacgaaaaatcgaagccggggagcccagagaggtgcggaaaggagaggaactgggtggttgctatgacgatggggtctcggcgcccaatttgcatagggcgatgatttcatactgcagggtgaatttccatatccctgcctcaaagcctgttggggtggggaggggggaggtcatttgaaattcaaatgaggatgattaaggttttcttgaggagggaagtgtggaaaaaggggttaagcctgctggcaaatgtcggctccagggctccaggttatcaaagggagtgtgtacttgactggctcccttcccaccccatctccacgggaccctggagagctgggggggttggaggagtcggcgctgggctgggtgttataacttctgcctcacaggagagccggcgggtctccgtcccttcctgcacctgggctccatttagcccctcagtgtcctgaggacattgagttcgtgggaaggaccactgcgtgaattctggggctgggttcatgccttcctcccttggtgaccttggactgatcatctcaggttgtccctcagcgagactggggaataatccctcactttcttgtttggcggaggaggtgtgaggacagatggattctggactcatctttatccaaacctgcgaactcacctgagttaccgtccctctttcggctggagtttgtgcataagagaagggtctgaatctgagggtctctaaaacaacttccagctctgagatgctggggtctggaacacactccaatccttttcacacatcagttagtatttgtaaggctgtttgagcagtggaattgctgcacccctaagtgtctctgatgtgttgagaagggctcctctgttctgacttggggtagttacttaaaggctatctgctcagtttcttcctttataaaacaggattaatgaagtccctacctcatagtgctgctgtgaggattacacaagtcaacatttgtaaagcacttgaagagcgcctgccagatgataatgctatttgctattattagtatcagcaggacaaagttccaagtggtgggtgctgtgaccaccagccactccagggagcctcagtgagaaatatggctgttttccaggaagacttgcctatacattcactcgtggtcagcacactgtcgtgtccaacatgtccaggactctcgagttggaagcatacttcagtgactgtcaccccacaagaagccactctgccacccagggagatgcatctgtcacattaacccactgtgggctcctcatgttatcctaactcaagtttgtctttgcttcttaggaagtaggaacatggcaggaagaagggggggagctggtggaagcaccccctcctcccaggacccagtgctaagagatggtgcagattacggagactagatgttgtagttccagaagatctaaaagtctttttttcccatagagttttgcagcaacttcatatgaggtttcatttggagataacatggtgtagtatggacagccttgctggtagacagatgtgggtttcagtctctactcagtgatttattaatcagtaaccttagcgaggtaattaaccattctgagcctcaagtttcctcatctgtaaaatggggataataaaacacccactcatagggtagttgtgaggattaaatactgtcctgtgtataaaatgtttatacaaagcttggtgcgtagtaaatgctcaataaatgtcagctactaattaatccttatttttgaaaacagtgttctgctgccaaagtgttggaaaattctctgatcttgccctattttctattttataggggaggagactggggtcagagaagggggatgattttcccaaggtcacacgggagttcaagacccacgtttccttaggaccctttccctgccccagaaacaggtcctcgtcctttgctttggttttgttcctttctgctattttgttctttccttggacagagcttccctccgcctaccacccttccctcagaagtggcccggcaccacgtgacctgctcctgccaatctcggggtcaccatacccttcaattctcactttcaggggctctctgtgaccctggccggggtcccgcggctctagcttctcactggctcctccacaagggtttttgctctgttctcgggcctctgagtgcacctttcccctgcactccagccctggggacaccactccagagaggggggagagtgtgaccctggcagcgtcacaccacgtcatggaaaggacatggcatctccatctctgacaagccctgacccctctgagcctcactttgctcagtggtaacacaggatttcgtaattccggccctgcagacctcacaggcagggtgaggatcaaacaagaaatggacatgaagtgtgctgcaaaacgaaggaacaactgcatttgagccaggcattttggtgcaaatgaccatgcattttggtggccagcacatggaccttggagccagaacttggagctctgagttcttctctccagctctggagcaaatgaccttgggcaagttacataagctcttccagcctcatttccttatgcgtaagatgtattgtgaggaatgaatgaaatgagtctatctgtagcagtttcaagtgtgagttgctttacaaatgtgagatagcatctctaggtgtaagctttctcacccacacgcgcccctctgagctgcactaagcacatctttgtgaccacgtgagagccagcgccagctgaatcttgcacctctggtagctccccctgctctttcgctctctaccccttctccccccactttcctcaccctgggggagaggactaggaaagagccccttggactcttactaccttaaacctctctgagccccttcctctggcaaggctggggtaaggctggagcggtgctgtctggaatcagtgtttaaagaactccatgggctgtcatgaacatagtcaagtctgggcttggagctcagagattttgtccctgagttgccatttgctggtcgcatgacttttagcactggcttgtcctttctgggactcagtttccttacctgtaaatggtgggtccagagcaagggtctctggttcctctctagcacaaaaaagctctgatagaaaaatagcgtctgggtgggggtttctctgagatgtgtttttgggtgcaactagaacagagctcttatttaacttcctttaagttggacttttactatttttccaaggctgggggattatgagtcaaggttttgattggaacttggatcttttggccccgttccttgcagcagtggcctgagtgcctggacactttttctgaaacctggtgccgtctgctcagggtgctccttctgcttagccctgaccatgctgcccttttgcccctggctctatgactgcagcatcagtgtgtggccaacaggggatggggttgggcagggatctcctgttgcatgggaagcccagagggccccatctcagactgagaagaaagtgggttgtatttcctaacgaacaaagagaccttgctgaggaaccttccctttctcaaaaatgacatgaaaaattgcagtgggaagctgaggggatgctgggctcctctgtagcaaagtgggtgcagcagagctcctctgtcccctgtggcatggccctagcctcctggtatctgtggaccggcctggagagcaggcttcagggtttgatttcatgactgtgcatttgaaggaaagcatcagaatgccctatagtccacgtcacaaggaagccctgaggttggtgatgttgactctctctgggtagagaggtatgagctttaaaccatgaaaactccccaatccacagactgtcggggtagagagaacctgacagatcatccagtcttggagtagcaagtgagtgtcttcagggcactaattctggtcacctctagtggtcggtgagccctgagtttaggaaagaaaaagggaagccaggatccattagtgatgtctgccttgggcatggcttgcacacacgcggtgtcttgcatttgctatccacaccctggcttgacccaggactctcagctagtggagaaataagaccagacctcccaactcctaaaccagtgctcttcccacagtccctcatggggcctcctgggcctattcttcaggtggcttcaaggattgctttcaggcttctcctggatatttcctcactctaagaaggaggtggcaggaatggagacagcaactttttgttttaatataatgtttagagaagttgaaggctacggagattaagccacttgccaaagttgagcatgaaacagcctccaagtgaccctagaacccagtttactgtgcgttttctggacagaactctgaccattaggcccacttcccagttccttggatgaatctcaagtaccaaaaaatgtaggcataatgtctggggcatcctggaaaaaacttgttttgggctggtttaaatgaccacgctggaagcttctccattgttctggtggctggctgctgaggagcgcttccaaggtcccagtagcttaatggttgcctcccaggaaatgccagcaaggtgctagtgtcactagaagtcttactgggttatactggaagtagagctggtgagaagagaaccagagatgggagaggctcggccccattgccgaatgtctctccattgtttaccaggcagaagtgaaaaatcctgcttgaacagttctccggcttcacctccctcacccagagaattgctccccaggcaaactcacatcccagggctgccaaagcatgcaaatcagccttctagcctgggctgttggctcatcttggaggtgggaaagcaggacctcctaggggccccacgcctagctcctggtgttaggggcttggccagggagctcaggtcctgttggtgggcatccacggtgtccacagatgccaaggggaggagaggtggaggcggagctgcttttgacactgggcacctcctccattaggatccttggactttcctctgcagcactcattgggtattatggccgtcttggcctaaggagattgtattggaatcctggggctccccgaattttagtgtgccttttactctcttgatcacttaattcaaattctgtggacctagatttctcatgtttaacccaaatccctccaactgcagcttggcttctcactgggagctgtttgtggagatgcacagtcctgggcactgtgtgggagcagggatatgctggcgttggggggtaagttgggtcttcgatgagtcctcagacattctccgagtttgagatgccagaacctcgccggtgactcatgcctgtaatcccagcactttgggatgccgaggcaggaggattgcttgactcaggagttccaggttagcttggacaacatagtgagaccctgtctttacaattttttttaaattagtcagttgtggtagcacacctgtggtcctacctactggaaaggctgaggtggaggattgcttgagccggggaggtcaaggctgctgtgagccatgattgcaccactgcactcagcctggatgacagagtgagacattgtctcaaaaaaacagaaaagattccaagaatgggtcttgccagagtgggaagaaaacagtgctttggggttggagacatggtttttttttttttgttttgtgtgtgtgtgtgtgtgtgtgtgtgtgtgtgtgttttgtttgtttgtttgttgcctccccctgaggatcattccccacatacctgcatgctttaaaagctctttcactttggcaatcacttacccttgttcggtctcaggctcagtttcctcacctgtaaaatgaggtgataataaaaccacatcttcccaaaggcctggatgatctcctgcattccctcccagccttagagccagagttcctgggcatatgccctctcctactttcttgccattgaggcctcctggccagagattcccaggggtccatgagaaccaaaagaggcctggagagatcccagctgttggccttcctacttggcacagatctcatccatttgctcccaagacctccagacagggaattcggcacttcctttgtgagccctttctgccctacccctcccttctgtgtacttaatctttttttgtatacagaaccaacaggacccagggaaatggtgaagagagttctttggtcctcccgtgcctctctttgcagatgctgtagacagtgacaagattctgggagggaaagaaaaagtctggtacgtttcaatcaaatgcattgaatcctaagacttcagcagatggagggaatttggaggtcacttgagatcccctttgacgctatcaaattgactcatcaattcaaacatcagtctgtaacagccctgaaataagcagcctccgcttgaatattcctgaggatggggagctcttgacgctgcaggtttcactgtggacaggtacactttttacagagttcttccttatgctgaaggaggcctgcttccccacagcttctaccattgttctgctctttggagctgtaggctagcctgcttcacttccaggccagtatatggggaggaaggaaaagtccactgacatttattcagcactgactgcaccaggcacagggccaggtgctttcaaatgttccctcaatgaacctttcaacttttattttgaaaaatttcagacatacagaaaaaggaaaagaaacttcaatgacagccacatatccatcatctggattcaataatgaacatttcgccatatttgcttcatcttttttctgaagtattttatttatacatttattttcaatatctttttattctggacattttaaacaaacacaaaatgagagactaatacaatgagcccccatgcactcatcaccccttccagcaaccatcaaattcttgccattcttattactggaatattttcttttaaattacaggattataacatttcagtcctaaataagggaatatgcatctctaaaacatgaagacattttcttcttaagcacaatatcattatcacacaaaacaaaacgaatccctcatttaattctcaagcaattttgatggtaaagtatcttaaaatatgcacacgcatttttaattgctttatgttcagctatgattatttctattcttggttccagtttgaggttggttgttggtattgctgaagcagtcttcatgaggttccaccttgtagcagatggtcttaaaagtggagcatatctttcgcaattgaactgctttagctgactatccaatatgaagtagaaaagcggatttccagttacattatttgtcaaaatagaattccctaataaaacttttggttggcttttttatattttctatcgtggtaaaaaatgcataacataaaatttactgtcttaaccatttcttttcttattatttaatttatttatttatttatttatttatttattattattatttattttgagatgggtctcactctgttgcccaggctgcagggcagtggcacaatcttggttcactgcaaactcgcctcctaggttcaagcaattctcctgcctcagcatcctgagtagctgagattacaggctgtgccaccacacccagctaatttttgtatttttagtagagacgtcgtttcaccatgttatcaggctggtctcgaactcctgaccttgtgatctgcccaccctggcatcccaaagtgcgggattacaggcgtgacccaccgcgcccagcctaccatcttaaccatttctaagcatacgttccacctccccatctttgattttatatagttgatttttttagcctaaatacaggacttgtatttattcctgttacattttatcttgttggtttgggtctcctgttagagcctaccaatattttctaatcctgattctgtggtctacttttatgtattgctttctgctctctgcttgaatcacttccagatttgatccgcatctatcttctttattagcctaagctgttgattaagtctaaaaccatactcaatttttttctgcgtcactcaatgcgttggagttatcggaaaactgtgtgagtttggtagttaagaaatctgagctgttgtcctggttcaggttctctgaggtatgtgtggcctcaggaaggtgttttcccctctgaggttagactttggtgttggactctaaaataatgctgctggccatatgtgttctgtccttttctggtttttctgcagcggcagcatcttccaaagacggagccagggcttggaaatagaacgtgttcaggtttctgtggatgggatgcctgtggtttcttaggtctgaataggaggttagtttatgtcacagtttctcagtgtttggatctgttaaacatatgatccttcagtacctactgttttagacacttggggcataagatgagcaagatataataaccctggcctctgggacctcacaatctcatgagggaaacaacacataagccactgactctaaaaaacatggtatgtgctataagggataagagctgggccagtggctcatgcctataatcccagaactttgggaggctgaggcttgaggcccagagttaacaccagcctaggtaacatgataagacctcatacacacacacacacacacacacacaccacacacacacacacaattagctgagcatggtggcacatgcctgtagtcccagctactcggaggctgaggtaggaggattgcttgagcccaggaggcagaggttgcagtaagctgagacgcaccactgcactccagcctggaaaagagggtgagaccctgtcaatgaatgaatgaatatgcagaaacacagaggaggaaatcctttgttttgctttggataagcttcttggagaatacttttaagttgggtcttgaagggtgagtattttctaggtagaagaggaggagagaaggcctttcagagggagcagcatatgcaaagtccccaacacaagatcagactccaccttttggggggtggtctagggtgtctggaacccagctctgcagtttagaagcctagccatcagctatctcactcaattctcactgtattcctgggaaaggaatgaaacaagaatcatgaccttgtttaccactgagatatcaggaggtccctgctttgaccaagttcacatagcttggtggtgtggagctcaggctcgaacctcagtcctctgacttccagtccaggactctttctaagcatccctgctgctcctccacacagcatcttacaggagtagaaaagtttctggtgatcgtggacagtttttaacacaatataatcattgcatctcttcctttctctgggaaagaggagtacctcagtactgtttcaaagatgaataaatttaagcattgcaggaatgactggccagttgcctaatctggagcattggggccacagcagagcccccatgacctaaatcaccatctgcagttccaggtaccaccttccatgccttcctgtaggctgggtggggagagctgctccatggaacagtccagtgaccacggaaggaaagcaggaacaagcatggcagtaaaatgagggctgcggggttcctcttcagccagatccggagggagaatcaacagcatcaccagatatgaacctaaacctccagtagactatgtccctatgtctcggcctagacacatgggctcggagacatgaggaggccatgtctcccaagagctgtcttacctgagtgccaaaggctgagccatgtgccacctctgccctcctgcagcgtaggggccagtctcccgggaggccatggctggcccctgcacctaatcctgcccttcattgtgcctgggaacaaggaaaatgagagataccacagcagatagaatgaatttgatgagaaggggaaactccatcatcaggctccaagtggagcagatgcatctcagggtgagatgcctcttgagaagggggccacggccaaacttccgggcaacagaaatgttgattgtgttggtcattttcaaattaatctctgaattgtgcttacacacctttttcagttatgggtctcactaacaacatcataatggcattcacagaaatcaaaagtgaagacacttttaattgtccacaaacctgatgaccctctccaagtcaaactgttatacaatgctattttctcactttctaggtctcattcaaatgcatattgtctcctttcttgaaagcccctctctcttacactccagggcagcacacttacccggtctttcttccatttgcctgcccactcttctcagtctcttttgctggtgcctcctcatcatctaaacttgacccttttttcttcctcactaggctcagttcctttgtgacctcactgggtcctgcggctttagctaccacccataagtgagggctacacaattgatacctcctgaccgaacacttctcctgagtcaaactcatttcccacctcttctgggatatctaattggcatctcaaaccttgcatgtcgaaagcataactctgagttcttccccaagtcaccccatcgtagtgagtggcaccaccacagcttcaccgaggagcccagaccctaggaatcatcctggattcctttctttcctctgccctccacatccccgatcagccagccctgtcagctgtccatttaagtacatcctggccctgctcactgcatccatgccaccatcctatccagcccgctgccctcccacttgagctattgcagcagcctcccagtggtctcccttcctcttctcttacccctgcaggtgtaaaggcttaagtcagatcatgttctcctctgcttggaactctcagattgacccatcctccttggattgaaaattgcagtcttatcacgacccaaccagcagatcccatgccaactctccatcactactctctccagccatatgacctcattattgtccctcagcgtgcaagcctgttcttgcctcaggacccagtctttcatcggaaatgatctttcctcaggacttcgaaagactgggtcctcactttgttcagagaaatgtcacctcccttgagtggcccttccaggtcatcctgtttctgatcagcctcagatacctctaccgccttacagttccttcttgttctccacagtaattatctgtaaatgaaagcacgtgcatttttgtttgcttagttctttcttatgtcttctcaactagaaaagaaactccataggccagtgacttccttcttctccaatattgtatccccagtgcctggaacagcaccttgacatagactgtgcttagtaaatacttgttgaattaatgaatgtgttcttttgtcaagtcttgaacattactccttattaacccaatgttacaacatcacaatgtcacaaagggatttttttaagagaaaagcaattttaccttcatctacccctttcaacacagctattgcggctgtggtccttcccatctttagctcccttagcagatctcttttttttttttttagacagagttcactctgtcacccaggctggagtgcagtcatgcgatctcggctcactgcaacctccgcccccgggttcaagagattctcctgcctcaccctcccgaatagctgggactacaggtgccctcaccatgcctggctaatttttgtatttttagtagaggtggggtttcaccatattggccggctggtctcaaactcctgacctcaaatgatagacccacctgggattacaggcttgagcactgcacccagctcccctagcagatctgatatatcatcatagctgatctcaaaaccaggtttgctcagagatcattttgcatctcacctcttcctctttctcgggaccccacctgctctcatcctctgctgccaccttgccagcccacctgctctcagagatgcgtcatgacctcataccacacaggaaagggctgtacttgcccatggttgtttaggacacagctgaggaaaagggttaaagctccagggaattctcttagaccccattcattcatctctcaggtgtttcttgacctcttatccatgttaggaactgtggtcattttgtggccactgaggacaaaaaaaaaatggtgtcactgtccagctctcaaggaattcatagactagcagaagagggaaacatacaaaagggagtgacacaatgagtgccacgcaaccagcagagaggcctcccggattcccagagggagagggactaactaccatgcgagggagcagtgcacggaggcacggtaacgtgagcgtggtgttaggannnnnnnnnnnnnnnnnnnntgcatctcacctctccctctttctcgggacccacctgctcttcatcctctgctgccaccttgccagcccacctgctctcagagatgcgtatgacctcatgaccacacaggaaagggctgtacttgcccatggttgtttaggacacagcgaggaaaaggggttaaaacagggaattctcttagaccccattcattcatctctcaggtgttcttgagcctcttatccatgttaggaactgtggtcattttgtggccactgaggacaaaaaaatgggtgtcactgtccagctcccaaggaatatatagatgcatatatatagcatatttatatgcatattaatatatatgcatatgctgcgtagtgctgggctctgagggtaccgtattagtaaataattattttccttgctgttatagaaccaataatacaggagacccaaaggaggttgtgcggcagctccagtcctggagagctatgtgaataggaaaagcaattttcctatcacatagcaaaagagtgaaaatgactctgctaacaataggtataagtttaagcaaatcaggtatatccatataatataatattatgtaaccattaaaaatgatacttataagcatagagcatttatgatgttccttaatagcataggagaaatatttatgatgctcactggaaaaaggggatagaagtctatacagagtggtatatatccatgaagagaaacaattataaataatacataaaatatacaaaaatattaattatgacgtcctctcggtagggtgatttttccactatttagactttttctgaaccaaaaagctttgcttttcttcctcttatgtatttatttattatttattttgagacagggtctcattctgttgcccaggctggagtgcagtggcacaatcaggctcactgcagcctctacctcctgggctcaagcgatcctcctgcctccaccccctgagagctgggactacaggcatgtgccattatgcctggctaatttttttgtatttttagtagcatggggtctcactgtgttgctcagcctggctcaaactcctgagctcaagtgatccttctcctcagcctcccaaagtgctgggattacaggcatgagccaccgtttccagccaccaaaaacatttcttttaagcacatatttactttttcagcccaacatttatggtaacagttgaggtgagaaaaaacaagaaagacagctgtctagctgacatactttaggtgtcatctctcctgagggctgggctagtagcatgacttctgtcctagggagtcctttgggatccatgctggtccttcttggtcccttggtccctggagggatgtagcagctgccatctgagggggaagcccggcatagaagcatgcggtggagtgagctctccagttggcatggccagctgtcctccccacgactctgatttgctatgtgacctcagacgattcagcctcccttccaaggtgaccctttaccagctatcaccaccctggaggagactttccaaaggcgtttccaggaaacaggtcgaggggaggatcccaaccacaagcgaagcaggtgctctttttcaaaatagagccacacgcctccaacatcctagtttttttctaaccttcagctcttccaaacctgctaccaactaatatactatatttttatcttttctaggaaatgatcgaaatggcctagatttcaacaggcaggtaaaacttgggtcagaaagaaacgtttattctataaaatttgggcatcacctatactgtctgtatggaggaagacaagattaagtacagtttgggggtgtttattcacaaaccccaaccttcaggatcaaaggaccttgagcccaacctcccaccctaacccatgagccaatgttggggttcttcagtactctctcagaaaagggctaacaaatggagcacctgtttagggtaaacttttgccagatgtggtccagaaatctaagacaagagctcttttcctgtcaatgcttagcctggttgcctcttgggtgggtgtttgcatgaattgactgtgtacagaggaatttatgcagcccaaaggatgaggtgcctgggttgccacagagaattcctgatttaaaggaagaagctagaaacataacaggaaacagataggcagaaagagctcaaaaaagagcaggtaaccaggctcggggcaatgtagacatgcgcctggtgctttgcaaggaaaccaagttgaatgaggttagactagttaggaagggctttgggcagaagaaggtggtgttggaaagattgcaggacagatggtgtggatgtgtaaagagaagggggaagccgagggagaggacttgcccttgaggttggagctgatgggaagatggcggggtgggaggtaggacagggtgtgatgtcagaagcagatggcggagtgggagagtttgttgggaggagaaaggctaagctggagccaagcagggagcaatatggggagtcctagagtgagggagaggggtaagaattaaacacaaacttagaaagcctggttttcgtcccatttctgccactaactaggtgtataaccttaatcaagttatttaatattttggtctgagttttctcaactgaaaaattaatttattccataaatttggcagtgggggatacttgcactatgccaggtatgggaacacaaaattaggacatggtctctgccttgaagggctcaaagtctagtataaggacggggtggaatgtctatagagagagggagagggacagattactcttaagtgaataattataatacagcctcatttatgttttactagaggtatggaaaagtgtaaaatcaaatagaaataggaacactgaattcttcccaggagctcagagcagactcatggatgaggtgatatctgagtctgtctctgaaggatgagtaggaagttttagtcaggaagagtgacgtagaaagggagatggcaagaaggaaggaaaagggctgcattgggtaatactaggattcctcccttagattctgctatcctgagtccagatctagatggaagtctaggtgggggctggagatcaaaggcagacataggttcttctcctcctttatctgcagagtgattgaagtcactgttttgtttttaagacaggctatcactctgttgcctaggctggagtgcatggtgtaatcacagctcactgcagccttgacttctggggctcaaccaatcctcccacctagcctcccaagcagctgggatcacaggcatgcaccaccacgcttggctaattttctgtatttttgtagagatggggttttgccaccttgcccagactggtcttgaattcctgggctcagcaatcctccctcctcagcctgccaaagtgctgggattacaggtgtgacccacagtgccggcctgaagtcactattaacatttcctaaaaggctgctaattctgggtacattcttcacgtcagagagaagaataatgttgagtcctaagccaacaccttttaggcaggcaaattctgagttttattcatcaggaaggctggggagtttgctaacaaatgaaagccaactaccctcctttacacctgagaactaaaacagagataggcttcaattaaagagagatctaagttagctcagagaggaaggacttccagccaatgcagtttattaaaaactaccaggggagggaaacttagagtcagcatctcactcaaggtctttaaatgtgagacaggttcttacctcagagatatttggccaggtttgcttcaagggcaggaaaatggaggagatgcccaaggattctgtgatctgatggattctctgatcctgatcctaaacaggttgggatgtgtcttgggccctgtgcttctgccctgaggactcaggtttccccagcccagggcccacctctcctggccccagcccctgggacaagatgcacggggaggagcctcttccataccgagacatggcaaggccagccttcggggaggtggccagcttcacaggccccatgggcttggcggcccatgtgatttgttggagcttgagacacactagtgctggagagaaggatgagggcagcccctctgaccctgggaggccctgacccttggaacatctttgtagtatggtttccccacacggtggctgctgctgggatgggccttgctggagtttgtttcccttggatgagccttgtggggtgagttgtcccctcctcttctgggaggggtttggattctcatcactgacaagaacagacacgacagatctttccttaaagagggtggagggaattttggaggaagagacactctgcccggtcacgttcatttaacactcaggctggagctctcctccgctcacactcacaccagctcacctgcaggtcagtggtgggcacccaggacttcccaggcccctgcttgagggtcacactctcacacttcacagcagggaagcaaactaaaacttgctaaccgccaggctcggggcaaggcgcttctggcactgatctcctttaattctcactctaaaccaatgaggtaggtgatacgatcctcatttcataatgagaaaactgcctcccaggcagccccgcctttttcagagaaggatttgagagattaaaaacctgatgaagttcacacaattggttgacaggctgagccaggatttgaacccatatcttttgactccagagcccatttttcccatgaggccttgctgcacctgccctgctccctgtaccacacaccatccctggggagaggcctgggagccagagattgagtgtgacctcaccatgctaactgggaggaaatgggaggtagaaggagtagggaggggaagaaagaatggttgtgtggagcagcctctgcatctgacacagacaaggggttggcagaaacaggggagcagagaaaagccactgccctgggtgaagctcctgttgcaaggccccaggccagttggtgcagccagatctgggtgaaccacagtcctgaagttgcatgagcaacgaatgctcatggctcatcgggagtttccacactgagcctgttaacttcctggtcccaggaaggcagactgagtctgtctggggaaaagggtgggaaggtcaagggacccagaagcaaggccaaccctccatccccaggacgataagatagacttgagaggcaacaggctaaggccctggatagggactcagaagtcctggttccagtgctgtctgtccctcactagttgctgccttatacaaacctcttctttctgggttctgtttcctgacaaataaactggaaaagcttggctgagatgctgtctgaggccccaacagtcttcatgttacggtgtcattacttatctcttgccataatttggctggttagttggatctgacttccactcgacttccattttattttatttgtccattgaagagaaatcaggaaaaagtcacccttgagctgtagagagtgaggggaaatatgtcacatggaatttttccagctttatgattgtgtgtgagccagcgaaaagaatcatttgaaatctagagggtgaaacagaggacccagtaggctggatctaggaccatccattcaacctttgaatatgcagccattcttagtgctggatagagaggtgtctgttgtaagaagataaactgcaacgatgcatagtgaatctgtgagagacatgagaatgctaagctctacctaaggatattacagaagagatggtgtcgaagtgggtggtgagggaagagtagggctttgactagcagagagggttggcaggaatatccaggcctaggggatagtgagttgtctcccttgctgggttaggccaggctatgaagatgtgaatgcctagcaaagaagtctggggcttattctgtgggcagtaaggcgctactaggtgtctcaagcatgactagtttcatttactagaagagcattggaggggagtgtgggtgagaaggaagggaggatgagtgatgaactgatgcaagagaggcccagtggaatgctgctgtagcagaaatgtgaaggatacagacagagcatgaaagttatgcacacaggccaggcgcagtggtcatatctgtaatcccaacacttagggaggcctaggtgggtggatcacctgaggtcagggttcaagaccagcctggtcagcatggcgaaacaccatctctactaaaaaatacaaaaatagctgggtgtggtggcaggtgcctgtaatcccagctactcaggaggctgaggcagggagatcgcttgaacctgggaggtggaggtggcagtgaactgagatcatgccactgcactccacctggatgacaaagcgagactctgtctcaaaaaaagaaaaaaaagagagagagagaaagaaagaaagaaagagagaaagaaagaaaaagagagaaagaaaggaaggaaggaaggaagaaggaaggaaggaaggaaggaaggaaggaaggaaggaaggaaggaaggaaatgcacacaacatagagcctggctgcctggctgtgaatcctagctccagcactacctgaccatgtgacctgggcaagttctccaatctccatgtgcctcaatcttcccatctataaagtggggagaatgtgatatctgtctcacggggttattgtgagggtcaaatgatatgtagctaactcttagaaagtatcttgaacatatacactgtatatgtgctattattattactatttcagtaggcatgagagacccagctttaagagataattctgagataagatcaggaagattttggcgacaggtgggcatggacagcaaagaagagggatgagttaaacatggctgagaattctagcttgagtgctgaacattggtggaaccacaacctatcatcaagaagacaggaggtggaacaaactttccagatgatgggaggagaaggaggggcagagaatgagctttgggagcccaatgcatggaagaaatttggatctggagcccaggagacaggcaggactgaagatgcatattggggagtgccactggatcatattacatggagtgatgagagggaatgggattacctggggaggatgtcagagtgggaagaggaccaaggacagacctggagaagggcacttaagggacaggctgagagtggatgtctatagatgaaactaggaaggaaggtcaaagggacaggaggggagccatgtcacaaaggagagatgttcatgaaggtggggaaaaccaacagcatcagagcatacggagaatacagtagagtctgaagcctaaaagttggctaggaacttggaagtcaggcaggcaagatagcctctgcctggtgtctgtctggtccacagtgagagtggatgtcaagcttgctgccctgaggggtgagtaggagtcaaggaaatgatggagacttggactgtagaattccctttcaggaatagggtgataaagagatggaggtgtttggcttaagatggaggcagtgtgaaaagaggcttttgtggaggaaggggacttgagtgagtgtggcctgggaaagctaggaaaggcatgcaggagaaaggaaagagggatctggtggtggcagtgggaggaccccagtggagggctttctgagagggaaggagggttgagtgccctggcagttgtgttcaggagcccagggcacactgtccttgcctggagtctctccactccatttcctgctctttgggccaccagctaacttagaagaaaactgggaggtagaattggattaaaggggcttgggggttccaaaatgacaacgcatacgtaggtggcctcacacctgctctgttccggtaacttctggaaccctcatcttcagggccatggatttccaccaggcagatcaggacagtgttttatgtatgctgttgagcatgtgttgcttgaagacctcccaaaagtcctgtgaggccagaagagagtctgaagcaagttgcagctgtccttgtcccacgtttcctgccccaaaagctgagaatcagtggcctggggttcctctcagccccacacttggcagcattctaagctcacctgcaccaatggctctcccatgctgtttctggacacctgcgccagctcgtcctgaggagttgccctggtgtgccctagtgtgcatttagttttaaaccaactgggattttccatcattgttttgttgaatgtgaccaaccactaccacggttctctagctgctccgagtacaaattgacttgtaattaattggctcgttgggcatcttctttaaaatcaacaagattcaggtacggaaaggtctccaaggacccagaagatggagaggtttcttcagggaggccagtgagggaaatgcaggggcagcagtgccaggcctggagttggcaacggagggtccgtggtgatggcagagtaagtgcccccccacaaccagagcagcctcaggacagcaagcaccaaagccactgagcctgagagagcaagggagggaataataggccatgttggattgtttagttccacaaacctgcacttagctgactattaggaagcacagaagagtacatcatggtccctgcccacaggagctcccagcccagtggggaagatgagggtctgccgcagagagggaggtcagtggggctggttcagagggcctaagaaagccatccaggagaatagagcctcagggtagtgggtccaatggagggaggctccgagacctctttggaggatgagaactgagggctgaaagactcttgttcccctgaggattgcttgcttctgtccaggatccagcctccagtcctgtacttcctggtggacacaggatttgggggtggtgggcagggcagggcggggcaggctaagaaagagaagaggatgaggagccaacaaaccacatttgctcaaccctaagcagtacagctgggttttcagggtcagtctataataacctctctctccctccaaaatgtcaaagcagaaatttaaatgcaggagcctgacagatagagctatgttgagatacggttttgatgcctggccacaacaggctttctaagacctcactgcagaattaacacatccactaggcacagatagagccggcagaaaacagacctgaaagcaccctcctggcgggtgcagtggctcacacctgaaatcctagcactttgggaggccgaggtgggtggatcactgaggtcaggagttcaagaccagcctggccaacatggtgaaaccccacctctataaaaatacaaaatacaaaattacaaaaatatgcattttttactaaaaaatacaaaaatacaaatacaaaaataaaaatactaaaaatacaaaaatacaaaaaaatattaaaaatacaaaataaaaaaaattagctactaaaaatccaaaaaagtttagccgggcatggtggtgcacgcctgaatcccagctacttgggaggctgaggcaggaaaatcacttgaacccaggaggcagaggtacagtgagccgagatcgtgccactgcactccagcctgggtgatagagccagactctgtccaaaaaataaaaaataaaaaaattttaaaaagcaccctcctagtcaacaggcagatctgacagaaggcccatatgggaccaagccacaccctccacctccttctaaccctgatgttctagttttatcagatccagtgtctcttgtaatgaggctcctgtaaaacccctttaatatctagagtgaaatttatagaaaacataggccaggtgcggtgcctcacgcctgtaatcccagcctttgggaggctgaggcaggtgggtcacctgaggtcaggagttccagaccagcctggccacgtggtaaaaccccatctctactaaaattgcaaaaaaaaaaattagccgggcgcagtgcttatgcctgtagacccagctactcaggagggtgaggcacaagaatcacttgaatccggaggcggaggttgcagtgagctgagatcacaccactgcactccagcatgggcagcagcgaactccgttacaaaaaagaaaaaacagatatacaaataaaaatcagtaatattgtctaattgaataaaaaggaaaaagcaaagtaatttataaaacaatgtgtatttcagcaggtatatcttagacatattcccctaaaaggtttaatgagacagtaggtccctcatgcctctatgaggtgacagacacaagtacaggctgatattggtatgctatcctggctgctcaaaagccacatctttcaaagtgttaaacaactctttgtaaagctccagccaaatctaatacttcctcaataacacagaaaatggcatccctgggtaaaatgcatattaagagtgtgtaaaagatacttgtgttcacataaaaaatagagttgggttttgggcttatatgattatagtcaggctgttcccgacacagatgtccggtggggcacttggaagtcatataaaaagttgtatgggatgcaagaagtgtttatttgatactgtcttctacagcgcaagatgtctagagtacctgccctcagccaataaatgcaaaccacgcctcctaattattaagacagccagagaaaccacgccacagtttcagaaaacatctcccggggtagctgtgatccccagtgagaacgagtgaccttgaccaccaaggggataagtcacttctcttaccaggagacagagccagatgtgactggctggagctttccacatagaaatacaacaccaggaaaaggcgcccccagaaagaatgcatacagccctgccctcagagaacttacttgctgtttatccagtgagggagatgggtctgaaaaattctaaaaatgtcagagcaaggggtgtgtaaaccagcgccacccccacagggaatgagctgcctgactgagtgattaggtggatatggagcagaatgttcaggcaggagataattggcaagttaaataactctccatggacacaagggcctgtcagggggtggagggcaaggggaaggatgcattagaagaaatacctgataaaatgacgggttgatgggtgcagcaaaccatcatggccgtgtatacctatgtaacaaacctgcacattctgcacatgtatcccagaacttaaagtaatataaaaaaagattaaataactcccttctccaaagtgatgtccccattgtagtcaagaactataataattatagcatttcttgaactctgactgtatgccgggcattgagtataaaaggtttagcaaccctgtgaagtagttgtcatcattcctattccatagatgggaaaactgagcactgagaggttagggaattttcccatcataacactgttcacagagaagtctgtatttaagacaggcttgccagactcccgactctgtggttctccccccaccactgcctgcttgtccgggaggaggccgtgtgatatggtggttgggtcatattgtctgtattggtcaactcctcgcgcctctgattcctcatgtgaagatgagaacagtaagagtatctatttcctagggatgcgtaagaatgaatagagttaagatctataaagtacttcgaataatgtctggtatacaatacgcaccaataaacattagctcttattattttctgatgaataagaacccatcattttctcaccacccttctccctgtgtggttacttagctgggcttgcaccaggttggagggctgcaatgctattagagaggtaatttttttctggaatccatcatctcccaatctcagccccaccccctctgcaagcgtgggcggggaagcagttggtaaacgtgtttgtttttggagaggtggaatttgtcctcttttgccagccatgcttggtgctttggcctgaggctcaggtgtcaacttttcctgtttgtagcctgggcagcagccccagtactgggtggaccaagccctgtggcaaccccataatgaacagcacagaggaacaggaacagctgtctgagttctccagaagcctgtcctagtacttgctgatctaccagacagccccaaacaccaccaaaaagcccctctgcagctggggtttgggcctagctgattccggctccagcactggcatgagctctgcatgcattctgatgggtagcggagaccgaatgctcgtcttggctcaggtgttgggtggagaacagtgagatgaaggagggagaagaaggtaggggtccttcacctgattgtgcaggagccaaaaagtgcttctctctggagatttcagtgagttgcctttggtggatgcagacactgatgacactaaagcagggccaggccttccctttttcaagcaggcgtctctttggagcaaggcttttgaaaggaagctggatttagccccaaacaataacaggggaagttaatactatttattgaaccttagtttataacaggcagtgggttgagtgctttgcaagcagtatctcatttaaacctatagcacccagagcagtagattttatatttccattttaaagatgaagaaactgaggctaggagggtcaagcaacctgcttagagccagaattcaaaccaaagttgaagtgctgtgccaggcatttacataggtgatatcttacttgagattacctaattaatccttacaacagcctggtgagtaagcattattcttcccattataaagctggggaaactgtagctcagagaggttaagtacttgcccaaggtggagctcagatgtaagacaggcctgtctgactttctaccataccaggtgcttttgagagaaagaggacagacagagagagagagagaaaaagagagagagagagaggtgtgtgtttgtgtgtgtgcactcctgcaaatgagacatgacctaatgttacccagagccctcacttgacatgtgtccagtacttttccatgtttccaaagccctgtcagtcataccacacccgcagacctcttctggctgaggcttgccagctgagatggtagagatagtatctgcggctcagggagggttgccaggtaaagggtggggtggagaagtgttcccacccaaagaggttcccctggcccttcgagaagccgcctccctgggcctgtgcgtgagaagggtccagggagaggcagtgtttgcctgtgtgtgcctgcagggagggggcgggccctggctttctctttgccccaagtcaaagagggctctgcctgcagctcttgtaaccaaccagagagtcgtcttctccagaatcacagccttggctaaaaataaactttttccaccttaaagcttccttccccctgtctgacccttaagcggctttggaggccaccctggggctcaggtgctgtttctgtgtcctgtacacttcctacctgataccaggtcacagcgagttttatgtccctctctgcttgacacttccagagggcttctctaagccaataggtttttttccactcacaagaactgtgtcaaggggtgttagtgctctcatttaacaaagaagataactgaggcccaaacggttgactggccgcaactcagtagcagagccaggacttactccattcccttttctctgtgactgctggatccaggggctgtgctcactacaggtctgttatctccaaatccagcttgtcccactgatcacgctgccttcatggcccccataccctccttgacctctgctgcttgtgttcagatcaagtgtgagacttccctcccttttccaccaaagccctcttggctcccaaatgctgaagataactagttcacatcctgctgtgcttttctttcttggcagcccctcccctgcgctggcatctaccatatttcctcccgtatacttcatcagcacggactgctgtggggtgtccctggttccagcctgtagcagacagtgtggttgcagatcgagctctggcattacacagacctggctttgatcttggctccaccaacacaatctgtgtaacctggtgacttatgctctccaagtgtcagttcctctctgttcaatgggaggaaaaataggatcaaccttataatgctgttaggaggaggttcaatgaatcttgagtgtaaagtgtcttggacacagtagacactcaataactgtgagtgttgttattcccattgcaacaatttagcagcaatgttggttccagttgccccatttcattccatgtggctccagttcaccccttcttcttagctttgcccttggaaggctctgaagactctggttcctccgtttccagatgacagtgcttctcagattcccccaactgctggccttctctgagtgttcttacctgtgccctggtgcttcactcagtcattactaaagcagtcataaaaagccatgctttcggtctgggctatgcactcagtctgggccaggcaaacacaggcatgctcactatacctaacagggtggtttttgaaatgttgtatacaaatcaaagtttcatcaagaaatattattttccttcaccagagaatctgtgtttaaagaaatattaggctggtcacatggctcatgcctgtaatcccagcactttgagaggctgaggctggcggatcacttgaggcaggagttcaagaccaggctggccaacatggcgaaaccctgtctctactaaaaacataaaactagccaggcatggtggcgggcacctgtaatcccagctattctggaggctaaggcacagaatcacttgaacctgagaggcagagcttgcagtgagtcaagatagcaccactgcactcagcctgggtgacagagactcggtctcaaaaaagaaacaaacaaaaaaaagagaaatattgactgaatattttcagagatcaaagaatgaatttttatggtcagttagagccaaatatctctataggctttgcttaaagcaagttatacattaagatttttatgtttatattttccccttgatgacatctcacagtgtgtgatcctaacaagaaattttttaaaacttaacctaggcatcactgtggatggtttcatctgagggcttggaagtgggttttgcgggccacttatgtactggcaaactgagcctaggaagatttggatacccagtcactggcagtaaacatgggttctgcagaggccaatggtggagagctgtgctcctagctctgggctgggacttttgcaagtgggctgagaagagtgatcaagctggacttggactctaaggcgagagctgccaagccagagaggctaaccactctgtctgggaggaggaagcagtgaagctgcctgaagacaaggagtcctccctaggtgtctgacatgaaccagaaccaacttcctttctgaggatttggtgcctccctaaggatggcctgtcagcttggaagagggcagctttctggctatttagggcactccccaactgtgtagaggctgcacttgcccacgtgacctgggagagacaggtgcttttctggcataagcaaggtatggagcagcagcatctggggtttgtgactttgtccaggatgtggcaaccagcagcatccagtgggctgccccgtcctgctcaggcaggcctctgaggatctggggagtcaagtgcataagaggcctccagttcccctccttccctgggccctaaagacttccaagtacacctgggaagcaacgagaatcctgtctggaatgatggaagctcccgaaagcagagaggacagagaagtaggcatcttgattctggtttgcatgagccctgaccctagcctgcccccaccactcccttctccccacttcccatctcattctcaggttcctgttcatctttccaaactagttcaaatgcctcattctccaacttaccccctccactacctccacctgtgtgccttaaaggcttcgtgtgtgtgtgtgtgtgtgtgtgtgtgtgtgtgtgtgtgtgtgtgtgtctgcctgcccaccagtcagtggaatatttgggaaaagggtctgtatcatatttatggtagaacgtgcctgtgcggttcagttactggtgcattcagtaagtgtgttctaaataaatgcatggggcaagcggatcacttgaggtcaggagtttgagaccagcctggccaacatggtaaaacccatctctactaaaaatacaaaaaattagtggggcacggtggtgcgcacctgtaatcccactacttgggaggctgaggcaggagaatcacttgaacctgggaggcggagattgcagtgactgagatctcaccatggcactccagtctgggtgacaagagcaagactccatctcaaaaaaaatacataaattaagtaagtaaataaatgcacggttggattattgggctgaacctctcacctgcctatcaccccgcttcctgggggccacgaatgcccatctcctctgctcttgtggtgctttgctccctgttgtcttttcttgcatccagtgatccacaaaacctgcccccttttccaggaaggtgaacttgttggctttatgcaaatagagtgtggaatgggctccatccagtagctctggtaaatattgcctaaccctaccacttgccggctgggcccgggagctatttacgaggcatctcagtgttggcttggtggttgttgggtgctagggcctagcctctagggaccggagtgtgtgcaggactctgaccaacccagtttgaggtttgtagttaggtcagctaatttcccaagccagaacagggctcctactaaacgccccttaggaagtaacgtggccatcctgggctgcctctcctggccatttgaatggaaacagtgtggttggggacatccagtgacacagacatcactgtaacattatttttcataaactgtggagataaatttgtgttgagcctttaccccggggtgagtgtgaaactcacagacttttagggctaatgggtccttgaggccgtcttcccctgttttcagcagcatcccacagagccccgctgctctgacacaaggctgtcttccccttttaatcctgtgtgttgacacgtttgtttattcataatataatgtctttcaccctcgcggtgaaattttaaaaggagaaatggagtgcaggtgtacagaactaaatatattccattttatcgttcaagattttgcatttttggtgttaaaatatttagtgcacgtaatgaaacgaggtcagagtcggtgatgttagttactttactattcttatttggcaaaataaaacaacttatctgactctaaaaaaagaaatgtttactaatcatgagcctcaaaagcctaagaaagatgattccagtacgacctatgcctcatataccaattctgctgacacccctgtcagatggctgtggtcccaagtctctgccaaaactcatcctgggttttcagacttgctaccagcctgctcaggactgagtgggttgaaatgctagacgccatcacctctcttggtcactctgcccgctctgtttcagggcctgtgtctgtcccaatcacatggcagcccttcaatatttgagaagatcatcaccctgaaatcatcccttttctgtgtaaatatcctggatctgtaaacgattccaatgttatgctgctgaatgccttccttaaaccagttatatacttaatacatgaatactttcggttataaaaaaatttcataataaagattaaaaaggaagattatttttatccctgttctgctcagtcctcttcccagaggtaactccttttatcagggtagtgtatatatgtctggagactttttctctggatatatattacaaatggaaatgtataaatttttgtggcctacacaatatgtacaaattataccgtatatattctttagtggcttttaaaatttttaaataatgttataggttgtttcatggcagtacatagagagttatatgatttttgttaatgaccacatatgttctattgtttgggggtttttctgttttttttctgagacggagtcttgctctgtcaccaggctggagtgcagtggtgctatctcggctcactgcaacctccgcccccagggttcaacaattctcgtgtctcagcctccccagtagctgggatcacaggcgcccaccaccatgcccgctcatttttgtttttttttaatagagatggggttttgccatgttgaccagggtggtctgaactcctgacctcaagtgatctgcctgcctcggcctaccagagggctgggattacagggtgagccactgcacctggcttgttctattgttttaacataatcttacttttccattcccaatcgatggatattaggttgcttccaatactttattttacaacgctgtgatgaactcctgaattcgtttgtgccttgttgcctttacatgcatgtgttttggtctgccaatcactcccttaagtatgagatccacaagtgtacagcataacactcaatgctcaggtgagatccaggcggccagagcacggtgtaactatttgttcatctagccatccatttacctatttgaatgtattattgagcaggtactatgcctttctcttgccctgatttctacttgtgccagctgcaaaaaggcagtaatggggcctgccctcatggaataatgcagtccagtacaggaaactccctcattcagatactctacttctgttagtaccgcctatcctatggggttttttaaaggtaatttgtcacactgtcaacttatacgctctttgagtcagttaatgcatctcaagtcttttttctataaattgttgtctcaacttgtgcagttaattttcatatttctaagtaaaggattttttatttgttcctatgttttatcttatgacttgcttcccttcctgctatatgtttgagctttttttttgtgaatcttgatgtccgcgcagagtattagctggccctgctcctcatgcagaatgtaataagtatgcatgctacatcttcatccatcttactgataacattcttagccacatggaccacaagcagggtcctgtggcataccattggagatgtccctcctagatgacagtgcccatcgttaatcaaccctatctcagcccataccacctcatcttgacctccaggacagtcctaaatacatatttacatatttcaatgatagtatctgtctgatcccccattctaaaaactgatgttaaaggaaacgaacctagtttggcataactttataagtcacatgatatggtgaaagagggttgatttgggggatttggtcaggcctagattcaagctctgccacttagctaatggcctttgggaaatcatttgacttctctgagactcaatttcctatatgcgaggactgcaaacgtatttatgcattagtaccacatatgtttaataagcacttactaagtgatggacttatgcactgtgctgggcaggccatagtaagcaagataggtctgtcaggtattaagtgtcaaaattcatatcttcaatcattttagtgacagaaataaggaaagccctccctggaacagttttctagacattcagccctaacccttgagacctggggatgtatcagagattatttccttttatacatagggaaactcagatacactggtagagtcccttggctcaagtccactcagcttttggtaacaaatttggtagctgctccctagccttagagaatttatcttaaactgtcattgagtaggttcagccaacccttgtgcctagagccctagagccctgtccccagctaatggtgtaacaggataggcacttagttaatacaaattaagccaaagcacaagtcaagtgttaagagagcttcatggcagtgctgcattgcctcacttatccagagagccagtagccaaccatttagacagctgacagtaagaaggaagcaaatgagacctcaagccaggccctttctcaagccttaaacttttattttagggatggtctactgagcttaatgatgtggtttttctaaccttagcagataaaagtgcaaattcaagctggaataggggattgctagaagcaagcatacaacagaagcagagataaacttgattgtgagaaaggaagaaaaaaaaactgggaaaagcaagctcagagctgaaaaaaaagaaaagaaagaaagaaaacaaacaaaaaaaccaaaaaaaaaaaaaaaaaaaacaagaaaaaagggcagtctggggccatacagtactacagccaacagggtcaaacacatcagtatccctgagggcatggttgcttttaaaacaagttagaaattatactctgagtcattgactaaattatctttcaggtatgctttaagacaaaatagggatgtaatgatacatttcagcaagatctctattcgaaaagaaaccaataaatgtctatccaaaacgaaataaaaggctttggagcttcaagagatagatttctgtgactgaaaatccacttcttaggaaggattcctgagaaaatcctaggcatttgaaaggtacgctgaattttagatgactgagttcaagtcacagctctcctgctagccaacatgtgccttggacaaatctctcaccgttatgaccctgttttccacaagcaggaataacattatctaccttttcaatctcatgaaagattctgaaaatcaacagaaatgtgtttgaaagtgctttgtaaactgcagaacatcatgggatgtacaagtgaggtctgtgggccacacccctggtgttgcctactgcgagacagtgaccaaaatgtggacaaagagatcaattccaagtagttgctttaaatatatacatacgcacagtatgtattacatacgcacatgtatgtattacatatgtacatgtatgtaatacatacattgcatattttcatatatgggtgtatgtctgttcatttagataatgtacctttaaacctccaagacacctttttcacaggcaaaagaagcagctctacagctaactttgtcatcttgtgactgtaacattctatatagacacgtgacgttttgaatgcttactaactttcatcttaatttctctaatctaacactaagaattcgcttttaaaaatcaaacattgcagaaatatatggttagaaagtggataccttctagaaccccaaatgctctctgctgcatctgtgattagcagttggcttagggaccttcagatttttttctgtgctagttctggtcctggaagcattcaacgacaattcctgaaataaacagccctttgttaaaaaagagaaacctttaggggtggaaatcattttatattctaaaagctctccagtctgcgctgtttgggccttaggctcatcttcttagttcttacttaggcaattgcggtaaatagctttttaaccggctaccctcgctacagtctgctctcttcaaatccatattccacagggctgttaggataactgaactaaaactaaaattcactgcaatcgctcccctttactttagttccaccatgccctcagagtcccttctgaaccttttgtcttctgccatgggcccctgcctgctcacccgcctgtcctctccctcccctacgcagcagtcccaaattgctggtagatcctgaacaggaagagaaagccccgtttcacccttgcgactttggacagagccgcttcttccacttccgcttcttccacttccgcttcctgggtggctttctttgcttttgctgcctggcaaacttttcttcatccttcagggttgcttagaggacttttcttccgagagccttcttcatctcattcccttttctctagctattctcctcctgacaaagcgaatggcagccttttctttgccacctcttacctgcttctgaatgttagaatactgctctgtaggagatgactctgacttgcacagcctctcaattaacctgggggcttctattcatctttgtgtccctagtgccttttggtatacagtaggtgcttggtaaatgtttgtggactaaactgaaatggaaggggaacctttatagggcaggaaactgtttcattcacgcacacagaagaccaccttttccagctgctgttgaaacagacctcgggctgcctcacttgattggggtgccacaggagtacaagagacaaggaagacctcagtcttcatggaagactaaacatgaaaattaccagagataaccatttgcttcatttatccaatgcccttcagaggcaagttccaaatcacaggtttactcaggaaatgccaaagagattcccattcagacctgttgaaacttcactctcagtaactatttgggccacaaatatgtgtaaagtcccagactacacttgaagtgtagcctggaaatgtttaccccaactgtgcaccatacataaaagcaatgtagtaccagaagaggctggagtgaacaagcacctctcagtagcttccagaagcccagaattctgatgggaggcccagtgcaggtgcctcacagcatggtacaggcagaagggaggggtctggagccaaataaccatgtagagagtcaggctctcctcttcctagctgtgtgatgttgggaatgtgcttaaattctctgagccttggttcccgtatctgttaaaacagtttggtaagattactccctcattgaattatcaagaagaataaatgatggtatatttgaaagtgtttctcatctcacagtgctttaaaaaatattttttctctttcttgagctaatgctcctgtaactaatctggtagtgcttcacgatcataagttggtgtgtatatgtgtgtgtgtatgggcacgcgcgtgacgcgtgtgtacgttcaggacagggcatgtgcacttccttttattggattcatctggaacccatagtaaaatacacactaggacagagatttcatgacattcctgagccacctttttctctctttacctcttctcctcctaatgggggaggtaagagcaaatatcccaccttgtagtactttgtatatgtgagactcaaggaaatacaggatgctggctccaaagccaagtgcatttgtttccatatcaaacagatgtgtgtttatctgattctgaaccttgccctgcatagtcatgagaactctgagtggggttcagagttctttcttttgactgcgactaaatctcagtagggaacagcaggattagggctacaactgagttattacaatagccagagtaggcaacaatttagagtgataaaaacagatgacagagacacgtggcagtgcagtagaatgaactggacactgatagggagttagcagatccgtgctaatcagccctggcttggtctttaggactaacttgctgtagctctagctgtgtttccctgagcaagttattttccttctctggcttcagaagtctactgtaaaatgaaccaggtgatgtctatatttccttccagttctgatggcgaaggaagcaatcaacacattttggaatatctgtcatacacctagtgcaacctacaccaaacaacttgaagagtctataattctataattccatcacacacacagagagtgaggattgtacagaaaatggagtcagaccaacttagactgaaatctcagcttcattatttaccagcagtgtggcttatgcaaatttcttaatgtctttaagcctcagtcttttcatctataaaatgggtcttgtacatagcaagcatacttacatgcttataagtctactcctactctctctttatacattataatttcttttcttttttcttttttttttttgagatggagtctagctctgtcgcccaggcggagtgcagtggcgcaatcttggcttactgcaagctccacctcccgggttcacaccattttctgcctcagccccctgagtagctgggactacaggcacccgccaccacacctggctaagtattgtatttttagtagagatggggtttcaccatgttagccaggatggtcttgatctctgacctcgtgatccaccaacctcagcctcccaaagtgctgggattacatgtgtgagccatgtgcccagcctgaatttcttaagtagatttcatctggtctatttctcttctttttggagaataatctaggactacagagatgagtgaagtaatgtaatattaggtcatgcaactagtggaggcaaggatgggtcctgaagtcaggatcctgattgattctgagccttgtgcttattgctggatgtcttttttatcatccccattggggacagcaaagtccttccctgataagcagccagggatatgttaaaaaacaaaaaaaacaaaaacaaaaacaaaaaaaaagtgtgatgagaactgcatttctacactagatgcttcccaagaacagccactgggcttggaaacagttccagagtttgatgcttagcatttcttcccgcctcccacaccctctccttctgccatttcattatttaggggcagaacagccttctgtggggggcaaatcaaaagttctgtgtcgtactttccctagtcaaagaaccagagagggtagctctgtcctcttttctaccaggtaggccaccaaagaacgagcagatgctggctcagaggggatgaggttcacaaaagagaactcccatcatgcagctgcccactggggaggatgctgcaggtgtctcaggagggctccgcagcagtgcttggttaaaatgattcaagtcctgggcaccatgaagcattagtgagggtgggtctgccatagggcacagcgccctcccaacatttttagaactgaattcaggggatttatattccagaggagaagaaaacttttatgggcttaaaatgaaggggtttttcatgcatgtgtcagcactacaatgctatgtcctaagaactgaagccaaagcattaaataacatgactgataagattgtgcatttccagagtaggcacaagcaggaaaaataaggatggctttttggaaagcgtctttcagcagtagcaaccccacatggtcccagcctcctaggagccatatgtctcctctcttcctccctccttttgtagaagtttgatgctctcagggtgataatcccagtttgtgtggccaaggcacacctaggctgctatatagtaggtttgattagagtccaggggctggatgaggtcactccccaagcacttcctagaggcatctgaggaggcaggagccttggactcctaaggaacgctaagagccatggagatgggagaatcccccaagcaaaaatgcagccggtatctcttgggtactttcagccctgttcacttgagaggagttacccgtctgccccattccaccacttagatatatttttaaaatgttttcatttgccaatcctttatatatcagttacaaaacagaaatcttcctcactgctagggagaagtgtagaaagggggagaaagaaaaaaaaatcttgcctaaattgaaggcaggttgggagatgttcacgctttgaaacgctccttcttgtgaaatgttatgaaacactttccacaaacgagttatgcaactgggacaacagctttgatcattttcataccagtgatatattcattagtgttgagctgtcttcccccagagagggccctgtgaaaattcatggggagggggttaaagatgagtaccccagcctcaccatgccccattccatgaaccaaaacagatggtcagtaaggaagtctcagtgtacgtctgggccagaagaccaccttttcgtcaccgatggtctattctctctcctacccttgggatgtgtgtaatattttttggtagaaaagcaccagaggagggtcaggagaccactctcttgtcagagttctgccggggtattgcatatgagtttataaccatctctgaagctctctgagcctctgtgagatggaagggtgaaccttgtcctcacacctcctggctatgagggtaaagccaaggagggatgcagaaagggcttcacctccttggaaggggctctctccttccagaatgaggctactgctttctgaagtaagtatgtcagagagttcactgggatcagaaaagataatcatccctgatacatttttaccttctggtcactgcccaagactcagtgtaatacctttgcacagcacagtgggtggagaagatctaaaccaacaaagcttgtccaatagctggacaggctgctcagtggctgtggcagggcaggcaccctgtggtgacccacgtctccagggatgcgtccgtcccaagtaaagtctggagaacactccacctgcatgagaagaactgccaaagagaccctggagatgatcttcttgattccggcaggctgtgggtttggttgggttttcacaagcacgggggagattgggttttcgtccatttgcctccggttctcacattagaagtcaatgggatccaacagaagtctctctatctcacttccagatccacaaccaacacccagttgcctggaaagcttccaaccttttccccttaaagctgtaaaaagggatttttgtaaattcaggaaggctttatttcttaatttcttcattttgaacccctgagagtgtcaaagatgtctgtcagaggccatgggaattgtcgatgtaccctcctccttcctgttgaactcagctaatagagaccgctgatcaaagctgagatttgagaattgtcctcaagaaagcagtgtcctttattatctttcaatttgattggttaggattgtctcttttggggttactatcagcacttcacacccagaaggtaatgaattatgaaaaataaaaattccatatccaaaggaaccgtaaagaagataaaaataaataaataaaaattataaaaggtaaaaagtcggtcaaacgaatcataaaaataatgcagagggttgtcagaaagcccccaacttacacccaaagggcttttctgctatcacgcacttcatttttacaactgggaggttggagtgccccccaaagagtctgaagggcaattgatccaggaagcagatgaaagggtgcgtttcttttatgatggcgctggtttctgaaattaagtgttgcaggaagacctggcacagatctaacagatagcgcccaggttggaggcaaagcacatgttttcaagctctgtcatagctgctctccttatctctcccttgtgcataatgagtctacagaggaaccctgccacttgcctcaagatggaagtgggccaagctgccagaggctgttctaccagcatgattttacctccagtctccacgttctccctctgtcccccttcctccatcctgcctccccagtaccctctgggatgcagatgcctgggggcaggaggaggttatgcagggaagaggtggggaccacaaagacttgcttaagtaaaatcccctctcagatcaaaccttaaagttgtagtggtggtggtcattttaaataagtagtttatcatctatttctagtttttaaaaacttgctaacacatgttttcctgaatctaaggatgtggaaactctaattttggggagaagaactaggacaccagagtttctagagatgccaagtgtggatgggcacagctgaaggggcatggagcaaagaagtggggctctggagacaactcccaggcagccatgttttttgagttttctgaatgtctgactctctaccccacagtgctatttcccatctctcccgcttccttctctttgcttccagagttccataatgtctccttaagtgagaggaatgatttccaaagactgtccctgaaacagccatcttcttacaatttctgtgcaaccagggcttcttggtgttatttagatctgctttgtctaagaacacgcagcaacctggatgggccacgtctaccaaatgcactagggaattggaatttgtaattcatttgtcgacagggagaaaaatcatggactatcatacaatagacggggaaattgagtccatagaggctgagtcccatagaggctcaagattacgtagtaaattagagtcggagttaggctagaaacaagatcagcattcaatgcacatcttcaacattttcttccctgtacctcattgaggctgtggagaaatgggttttgcttatgtcttttgttcaattaatgttctttgggtttcactatgtgaaaggcaccatatttaggacattagctccctcctcagtctcaaatgttataggatcttcctaattgtccaaccaaagataattcttttttcattttatctaacttttatttaagttcaggggtacatgtccaggtttgttatacaggtaaacttgtatcatgggagtggttgtacagattatttcatcacccacatattaaactgagtacccattagttatttttctgatcctctccctcctctcaccttctaccctccaacaggccccagtgcgtgttgttccctctatgtattctcatgatttagctcacacttataagtgagaacatgtggtatctggtttctgttcctgcattagtttgctaaggacaatggcctccatcttcatccatgttcccatacggacattatctcattcctttttatggctgcatagtattccatggtgtatatataccgcatttctttatccagtctatcattgactggcatttaggttgattccatgtctttgctatgatagtgttgcgatgaacataacccgtgcatatgtctttataatagagctgtttataaggattctttctttagtgatccaaagcaccatttttttccgcaagaattaagcacaagtttagtgttagtctgaacttttaacttaggttaaactaacacaaacagaagatatcccaggatgcagtgatattcgcagtgtagaccaagaaaatggtttaagccagcatctctatggctaaggtttctatctggatagggaacaaccagatgtccacataggagggtctccccaatatctctataagtatggtctagagctcgtgcccccatcacattatatgaatttaaagtcacatggcaccctcccaagggacttcctgaaaagctgcaagagggtagttttcctgggatgggatgggggtaggcacaagcagcacttcctgccctgccctgggacacctgggaagcccacgcatggtggttagtactgtcattgcagggtggtggagactggagagaggttggaaaccaccacggcccctcaggctgtaactacagcattggctgtgagggagacatgccttcacctgtaggagacaggcaaagactgtcactaaagccacacaggtgaagagggccagctgcagaggcagcacagaggatggagaggtgtggagacaaatgagatggggagggagactcctccagatcatggtgcccagattttggggtttcatagatgagattccattgaggaaaataaaacacagatttgagggagatcagtaaagagttgccagttttttactctgtgaggtaaagagttttaaaatgccatttaggatcactatcctgtcctaaataaattttaaccttcttcctcctaagaaaaaaagaatatcatctcagaatttctaagaatttaatccatttttttttaagagacaggtctcactgtgtcacctaggctggagtgcagtggcgtgatcatagctcactgcagcctcaactcctgggctcaaatgatcctcctatctcagcctcccaagtagctgggactataggctgtaacaccatgcctggctatttttttttttttttttttggtttagagacgaagtcttgtatgctgccctggctggtctcaaattcctacatcgagccctacttttgaaactcactacctatcgtttttgtcatttcagggtcactcacacaggcctctgcccagctgccctggctgaagggcacacacaggcaggaaaagtaagctgcagcccagtaggccctgggctagctctccctctctaggctggtcactcctttcctgcctggatcttcctgccatttccatctctgacgcctgacgggatccagcactgacgctctcctcttgcttccacttgcagattaaaaccgagatctcagtgactccctgcagcagaccctctcccatcggccatgccacctgagtcaaggcctgccatgatgtccggaaaccaaatgtctgggctaaatgccagcccatgtcaggtaacctgtgattttcacagtgggccagtgtgtttaacccaatccctctgtgaaatgctcgactccatgcttggtactcgtctaaagaaccccctgcaggcaatgtgggaaagagatctggagctgtgagtagggttctaaaacagtcctcttacaggtgaagcctagctagggaggtgaaggggaggcctctacttctcagagacaaaaaggacccaggcttgccaaagccaaggacctacagctgagctgctggtgtctgccagccacattcaggggaatcctaggttgacagctgctctgcagttagagaatgtttctgtccccattgggcccactctgcctcccctaaggtttttgttagagccaaactagaatggagtgctggtgggggaagaaagaggcgtctgagatagtacagccaaggtccgggagggcgttcacatgacgagacctcttctcagcagggatcacctggggagaaagagccacccctttctggaaacacataagaatatgcatctgtcccttcacctccatttagcagggcttctcaggtcttctctatgtgcacaaacctaagctcaacctcatgggcacagagctctggcgtctccattgcagaggactccccgatcccccaagcatcggaatattagtcctatgtcctgggctggtaggagaaatcctggactttttgtttaactaaattgttttattaagaatgaatagtttgctccaccccccaactcccaccccaacaccctccaggaagattctggcccaggaaacagccgaggcatggcttttagcataaccaggtggcatgagtttaaaaagaattggatagttggggattgcatgttatctctaggataaactttgagagagggtcatacccaggctttgccttcagggcattttatagtctagttgggagacaggactgcacatacaaaaattaactcaggaggcaagggttaagtaacaatatgtagtaaggactccaggctgagggcagaagctgtaacaataccagtgttaacggagtagctactatttgctagcactggggatacacagtggcataaaccaaggtcagcctgcaaagtctctgagtctggagcccctgggacggacgagtggcaggcagatggggctgatgtccccagcttgtaaattctgggtgtatgtgtatctctccgtgtgtaggacatggcttccctccatccgctccagcagctgtgctggttcccggccacttacagtctgtatcccagttcctgctatctcagacccagccgggcagcaaggtaagaaccctgggggtttccacctagaccaagtccagtcaagtgctgcgttgctgctgttttttgctgggtgagggggcctaattggagagcatgcgtcagtcagtccccatctgctattaagacctacttatccaccccagggtctgaggaagggaccctggcaagctcctccaggcttagtctccttctctgcttccccttcccagcctcctgttgggtggtcggtccacctcctcaatttcgtggtgagtggagacggaaggtgcaggcgtggagcagagcatgctgtacaagggaggggaagcgccctgggaaatgcagtacagacaagtcccaattcctggaaatctctcctggacacagattcagacttgcttcctggaagcctggctgtgattcttttggagagagcagcagtgccacccacaggttgtagaaagggtgttcaggttttctttgcagggaagttactcgcagagaacttctccctggccaagagcaaatagattgaactattataaatagctaacatttcttgagcatgatgtgccaggagctcttctgagtaatttttctgcattcctcaaaataaccttgtaaagtaggtagttctattatgcctctggtgacctactggaagttccagaaccgtttagctgagacccatactcttggtcatcacagtgtgctgcctgcccactcccatctccatcaactagggtcaaaagtgatggagggttggccaggctcggtgctcacgcctgtaatcccagcactttgggaggccgaggtggacggatcacttgaggccagagttcgagaccagcctggccaacatggtaaaactctgtctccactaaaaatacaaaaattgccgggtgtggtggtgcatgcctgtaatcccagctactcaggaggttgaggcaagaaatcaccggaacctgggaggcagaggttgcagtgagccaagattgcaccactgtcctccagctgggcgacagagcaaaactctgtctctgaaaaaaaaaaaataatggaggaagtataaatctctcctgttgcacaaatcccaagtagaggttttggaaatccagaatccaaacaaaatcaactctgccttccgcccttagcacctgcacaaatgacagtcactatccttagtttccaggcacctcagaatattatggtgatgaatgagaccctatttgaatttttaagtgtttatttggttaaaaaataaacatcatactcctggaatggaaaagggaaggtaacagtttaatttttttcagaagactggagagcgacatgaaaatggcccaggcttataaccacctaggtcaggtatgatgcagtggtggaaagacacttccaaatttggagtcagaaaaatttactggttttttaaaaagtcacttactaactgtgtgttttggggaaagttacctaacctctctgagctccatttcctcttctgaaaaaatgggataatagcaaggctctgcctcatgagattattgaagtcacttgaaataatgcatgtgaaaaggctgtatccatttcaaccgccatgtcagaatgccattagtacccaagcctctcaactcccagttctggattccttgtaagagctttcttgctatgtattttaataatgaacaatgaagccctgactttttgaaactgaagagcataaagtcaacatcagcagatgctgtatgtacattgtgacccagaacagcctagggaaaacagagccccaaagtgctgttgagtgacaagcgattgggatgaccaaccccattgtctgctttggggtttgatggccccactcctgctgggagagtgagccaccaaccaggcagagtccctcattaccgttttcctggggaggatggagaagccggtataatacatactgcccaagggagtttcagaggctcagccctggactttccctcctctctcagccctctctcccaagtataaaatgcctggtcagccacatgcctctggctaaggcccactgccctttagagccgtatggtcgtactgcttggtctggcatcctcgcagatttgattgggcctctgtagccataacccagctactctcctgcagggaaagccaaaatcctcagccctagcttgaattctcagcagccaccctgatcctttcccttcttggttttcttcagctctggtaatcagatcccagagtagatcgtctgaccctccttagcctctacgcctctccagacaggcgggcaggtggaaggactggtttgggactgctgtttacatgtctgtttatccctgtatctgatttgcctccacctgtatgtggcatgcctggcagtgctaggagggcctctccatgggacttgaggtgggtggagggacctgacaggtggcagggggtggggacagtgatcgtggtgccaaagttgtagcacatgtgtttcaatagcctggattttatttgtctgttcctttgtccctcccctttcacccaggtctgcagcaaatctcctcccctttccacagcaacaaagcggtctcctcctcccacagactgggccggactggcatcccaggtaaacaaccccattcttcctgtttcctctaggaatgtctcagctccactgagtttaactcactggtttccccctacccctttaacagggcactaacccctctgggagaggggatagcagggaactatccattggcacaggggaaatccaagctacagcaagtgggggacaatttaccaagtgtcactggtggggccacagttagaatccagagattccagctccaggccagcctccttcatgctccaggcactgaactccaaccctgcacaggccccagcatgctcctctgagagccaggctcagctcacttctcaggcataccaagatggccacgaacctacctaggtgctctcaagccccaagagggagactagaatactacagacctgatgtcccaaccacaaagccagtgtctttcacctctgggccactattccagattgcctcctgcagtggcacgtatataggccagtgggctgaggtctgggagaggggttgtttgcagagctgccatgttccacacagcaccttttttccaactaggaaaaaggcacctcttctggccaggtgcagttcatgccaaggtggacagattggcgacagcagcatgagctgtatcttagctgccattcccccctgatctgggtgcccctgtacagttaataacctgcacagctgcatgagatggctctcacagatggttgggcagaatggttgggaatgactgcagagatctctgtgctaagatcccatggctcaccaagagcccggccttcagagagggctgaggccactaaaagtacctggagggaagctcgccatctagtggttgaaatggggacaccagcatcataagctgctcttccgcccctcctggctgccctctccagaatctcatagccatgggcttacagctggaagagatcttgaatcttcaagatcaactctcatctcttatcatattttggcatggagagactggtagcaagagaccacatagaagattatgaagatcatccaggggaggggtcataaaggattggcttgagttgtggcaataagaagaggggatgattgaggagatgctttgggaagttgaatcagtcagtttgccagtggattggagatgaaaggaggagggagaaggtctagcagagagccccaaagtctttgtcaaatgaaagaacaaatgatttaatgaaaaggaaggttcaaagaggactgggctttgtcctgagggtctggtctatgccacactctcctcacacaccctctccctgcaactaagaccaaattcatgatggtttcagactaaaagacccttcactgggggaaagactctaaacttctctctagaggtccttttaccttcttcatcataaggatacctatctgaatggaaacccaaatatcccagaggagaagaagtaatgtttagtctacaaaaagtaaatcaaaaggagagaagaggtggatttagccctttgagctagctggccacagtgcctggacccctagcccagattccactctatccttgtggaatgatagatgtccttaagattggattcattcctaccccaaataggcacagcatggttctaggtttaagggtacgttttcctatgaaaataagtcaagaaataatatttggctgggcacggtggctcatacttgtagtcccagcactttgggggccaaagcaggtagatcacttgagcccaggagtttgagaccagcttgggcaacatggtaagccctgtctctaaaaaaacaaaagttagccaggtgtggtggcacacgcctgtagcccagctgttcaggagcctgaggcaggagaatgacttaagcccaggaggttgacgctgcagtagcagtgattgtgccactacactctagcctgggtgacagagtgagatcctgattcaaaaaaaaaagaagaagaagaagaaaaagagagaaagaaagaatatctcctagcaacccaaattgatcaaggtgcattttataaaggtactgattaaaatacctttgattaaaaacaaaacatttcatgaaagaaaatggtggtttagaaagtaaaatgaggcacaagagtttgacattttggaaagttctatgaaggccatgagttattggatgtcccctgttatcttcagttaatgccgttcaacacctcagttacctgctttatggaaaaaaacaaaaaacaaaaaaacaaagcaacaaccttttctttgtccagttctgtgatttgtttttggaatctttgtaaacaaccctgcagctccttttatggtagaaaactgaaaggaggaagtaacctgctaagactcaaaaagtggtcacaggctaaactcaggccacctccctatcctgcactcctgatgtttctacccagatttccagttatttgctatacatttatagaaactttaatttccacttccatgccactggaaaatataagactccaatgtacccagggtgtatccagggatctgtcatcctctaagtgggctattagtaaaaaaaaaaaaaaaaaaaaaaaaaaaaaatcagaaaatgttatttattgatttcgtggtggatctgcttggcgtgtttcctatcaggcatttgggcgccctgggctgccagatcctctttagaaccccacctggaagcatcccagcatctcccagtgcccaagcatctaccagctctggaggggccgatgagcccagtgacctcgaggagctggagaagtttgccaagccttcaagcagaggcgcattaagctgggcttcacacaggtttggttttaggggaaaagaagaagaagtctagccgagcggctggagactgggcttcccaagtgcaggtttcaagagcgccagaggctcgatgtgtttggggtctcctcatcatgtccctgagttctctgagaataggcacagttgccattggtagggaaactgaggacgttgctggtggaggagaatgagaggtggaaaggggctggctctcctgagcacgtgggcgtggtccactgagagtctaaggagagaaaaaaccgattcttcaccttagagggaggagacttggaaaggagccgagcatgggtgagcatcaaagattcaggctggctgtgtgatcgatgctaggaccatgcaggatgtgggcaaacagaggagaaggctgcctctcatgttcctccccctcggtccccacgcttagggagatgtgggctggcgatgggaaagctgtatggcaacgacttcagccagaccaccatctcacgatttgggccctcaacctgagcttcaagaacatgtgcaagctcaagcccctgctggagaagtggcgaatgatgcaggtaggcctcgcaaacacggatgccaggggccctagagggctctgcaggaagggccagtgacttgtcgtgttggggcttttgggagtttgatacctaacacccccttctctcctgagactggagccgatggagaaacaagacacaggacacaggcaagtgtagatgaagtgtcagctcgactactgagaagccctcagaaggatgtggatttaggtctgtgtccataggatttgtccccattccattcctaccccatcccacccagcatagatcttaggacagctgccagcaacaaagtctggatctgcagagcagatacacttatgcagattgctgtctggaaaagtctagtcagggatacagggcagtggggcctctagggtctcactgggagggggagacacaggcacgacacagggtctttccctgggtagttcttgaggaggttttcagcagacaggacttactgcaacccaggctggtcaggaaagcctgacagcaggaatggggtttgcaggagactcagtgaggggtggtggccgggaggcaacccaggagatcaagcgtgtaagccaagggcctcacatttggcagcagggactagcatacaggatggggcttctcaaccttggcactatgacatcctgggccaggtcattcttgttaccagggactggcctatgcattgcaggatgtttgagcatccctggtccctacctactagttgccagtagcatccacccccagttgaaacagcaagaatctctccagacattgccaaatgtcccagggggagtggtggtgatgcagagtccccccggttgagaactgccggcctaggcagagagagggagtgagccagtctccagggctggctctattcagtcgattcatatggattcgtggttacactggagagggagaaaagggtgggcagccagccagggctgttactcatacggaagggcctccacacgcaagcatgggaggggcaggaagctccccctacaggctgtcccttagacagcctttatggaagcactgaaatgaggaaatgatccgaaggtcttcgaatctctggggaagggccctgtgaccattcctagtctcatcagatgcctgaatccttcctcagggatatccctcctatggcccctacagccttagctaaacatttgcactggcaggaaaatgactccaacaccaacagtctgtcaccaagtgccatgcttttggctgcaaatctcatttcacatttcactcagtattcacatccaggcatatctgaaacagcagcctcacgagcattactcacaggagccctgccagtgcccccttacacccactgtgtcaccgatgcatgagcatccctcagctgtgaccccaaacactggagacactgctggggggccacagagggccatggagggtcacggagggccacagaaggccatggaggacaatgagggccacggagggcctttgccctgagcaatgaaaagaaataggattcttggtctgtttgggctccctgctgggggaggggattgctcctgaaaatgccactgcagagcccatcgggagggttgttggacctcagatccatgaaggcaccggccactcatccccttctctgagcttctctggtccttcgtgtccctgcagagtcctctccgtcagacccctcagtgagcacgcccgctcctaccccagcctcagtgaagtatttggtaggaagagaaagaaacggaccagcatcagaccaacatccgcctgactctggagaagaggtttcaagatgtgagcagcaccttcggggggcacgggtgggctacctcacacaggtagggagagcagacacggcccaggccccttggaccagcccctccgcacctcacacctgctctgggacacgatcagaaaacacattatcccatccaggcgcccaggtattggagtgcaaagctgccctccatctcaggttccaggaacctctcctcctccactgacccttcttgccctgacatctatttagggccctttgtttttctcacgggagatttaaagaatgggctatagggtcccagaacacagtgtatctctgtatccagttaggtaaagggagcaaagtcaggggattgtatgtaagttctctattttctatgcagtacatttgtatttttcaaattataaatgtaataaatgcttattgtaaacaatttaagtgcaggaagtagaaagaaaaaaaacgcccatcgccaaatgccatctgacctcatttccttctactcttcttttctatgcacatttagatacttgtgatcgtgttatacacctacgttttttggacttgtagcaaaagcatgtttttgagccagtatgtggaagctgtgagccccgtgtgggctgggaagagaagagggagaaacagatgtggcctagccagcctctagccaggctccctcagtcccagcctccagagccgccatgggtaccacgcgtctccaaaggccccaggcctccaggctgctgcccctccagcagattcctcgcacatttagctcaaagatttggtgcccatatccgctagcagaatgacaggaactggcttttccttctttttaggctttctagagtggcaaggtaagggagggtgtaggagtaggggaaagtggccggggctagagaccaggtgtgaaggatagaacaagggagtggcgcccgtgtagcatgtattgctatgccacagtcctgatgggtcccatgttttagctttctcattttctgctttgagacaggaggacaggaagaaatgacaaggaggccaggcatggtgactcatgcctgtaatcccagcactttgggaggccgaggcaggtgatcacctgaggtcaggagttcaagaccagcctgcccaacatggtgaaaccccatctctattaaagtacaaaaattagctgggcgtggtgatgtatgcctgtaatcccggctactcaggggctgaagcagagagaattgcttgaacccgggaggcgcaggttgcagtgagcggagatccgccactgcactccagcctaggcaacagagcgagactccgtctcaaaaaaaaaaaaaaaaaaaaaaaaaaaaaaaaaaaaagaaatgacaagggagaaggacatcaggtaataaggaaaacacagaagggagcagcagctctggggactctacctgccccacataactcatccatggcttctctcctctgaactcatgaatgaaggaaagacagcctacatctatggagaccctacttgtatcaggccctgtgcttgacagtttacacacattttctcatttaattctcacaatatcctatgtggtgggcatgattattctcatttcatagatgacaagacaggctcagaaaggtaagaaagttttgtaaggacacgtagtaagtgaaaaagccagtatttcatcctaggtctactctaaagcttttgatccatgtatagttgtatcctgtttctttgggacctctgttcccgcccctgattcccttctcttggccatactctgtcctttcggtgcctatagaacccaaaaccagctcggaggagatctccatgattgcagagcagttgtccatggagaaggaggtggtggggtctggttctgcaaccgacgccaaaaggagaagcgaatcaactgccctgtggccacaccatcaaaccacctgtctacaactcccggctggtgagtggccaggaaccaagctgtctgcaagcactggagggacatgatgcttggaggggaaggtggtggctgcagggaagaggggacatccagtaaataaataagcaaagagatgctgtatagaatatagtataaagaagggcgaggaatagaaggggatagcggggagatactctttcagtagagaggtcagagaggacctcctgaaaagggtgtgtgaacagagacctagagttgtcagggaatgaaatacatggatatctggggaatgaatgttctaggcagaggacctagcaagtgaaaagagccagtatgcttaagaacagcaaggcaaccagtgtggctggggacagaacgagaaaggggaccagaagtaggagagaagtcagagaggaaacaggaagcagagcgcccaagatcttggaggacattgaaaggccctggctttcagtttgggtaaaatgagaagccattggagagctctagccagagaaagctggctggttgacacaggctgctatgtggggaataatctgtgtggaagcaggagaccagctagagaatgacaatggtcaggctgtgtgatggaggcttggcccagggtggtagccatggagtgaggaggagtggttgcattctggctagactttgatggtggagtagcatgatgtgctcaatatggaatacaagaaaggaagcaaagatgactgaaagggttttggcctgagcaatgcgtggaaagcactgccatttttttgagatgatgaaaactgcaggaagagcaagtttgaggaaaaaactaagaatttggggctggtcatattaagttgaacatacctacaaggcatccaaggtgagtatgaaggagttatatctgtgactctggagttcaagggagaagccagggctgggacaatttgaagttctagggagacaatgaagtttagggggcaggaaataccttctccatgagggagaaatggtatctggagggtgggtgtgggaaggttcttctctggggatggtgatgttgaaggttaagggagttggggagaatgatgttgcccttcagtctttcagcactgtaagtgggtgaaatgcagccttctcagggtgggacacagctgtttcccaaaaactacaccattttgattctttcaccaaccagctaccgactaccttctatatattgtgccaagtgctggggtacaaagataaatattgtttgttccctgtcccagaggacctcactgcctagcagaggagaggtaaataaacgaatggaaaacagcatgatcatttctccaggagaacttaggagcagcgctaaccagccttgggagctggtgattaggacaggcttccccgaggagataattaatactgagctgagtctaaaggacgaagaggaatgagaggcaaataaatgtgggtggagctctccaggggaaagtacaagggctgtggaatggggcagggagagtgtggcatgctcacagaacgcaagtggttccatgaggaggagtgttgaaagatgaggctggacagaccagcaggggccgactgtgcagggattgtacacaatgctaaggaactgaaggtttgggggaatcactgaagattttcataggatattggcatgataattttctcttttttgaatgatcactctgactgcagacaaaggatggcttgaaaggcccaagatgggttgcagggagaccagttaggatgggacgcaggtatccagcagagaaagactgagggcaaagcaaccccatgaggtaggaatgacaggtgggagggattcaagaaatccttagaaggtcttggttaatgaatggaaagctggatggggcagggagagagatgaagaaaagggaatcctctgcgatgactcttggcattcaggctggctaactgggtagatggtattgccatttacagaacaagaaaagcaggaggagatggcttggagtgggaagaagtgatgatttcagttcttatgtcatcatgatgtacagtgaggcctgaggatacccatgtgggaatgtccttgggcacttgagattatgggtctggaggtgagactgaaggctgggatggagacatggactagggagtcacaagtgtgcaggtggtgggtgaaatctgggtgaggaggaactcgcctatggagtttatgtagaggaagcaaagagcaaaggccagccaccagcttttgcaagatgggcaaaggaagagtatcaggaaagaaactgagaaggaggaccagaaaagacaagaaactacaaccacgtagatgtgcggagtgttgggcaggaatgaccccataggagtgccatgggaaccaagaggaaagacacccaaatcagaatgggtcccagagggtgaatatctaatttgtttggagaacagattagtaattagcaagagtagtgtacaagcagaaggaacagcctgtgagaaggcatggaattttttaaattttttatttatttttatttttttgagacagagttttgctcttcttgcccaggctggagtgcaatggtgcgatctagctcactgcaacctccacctcctgggttcgagtaattctcctgcctcagcctcctgagtactgggattacaggcacccaccatcacacctggctaattttgtatgtttagtagagacgggtttcaccatgttggccaggctggtcttgaactcctgacttcaggtgatctgcccacctggcttcccaaagtgctaggattacaggcatgagccaccgcacccagcccaaaggcatggattataaaaccacatgatgcatttgggaaatcacaagcatttcagtctggctggagcaagggttcaggattaaaattagaggggctgatgagtgtgggatcataatgggccatggatgtgaagtaccctaaactctctaagggatcattgaacatgttaagttggaggcaacatgatttcattcattatttcttccttaagcattcactgagcacctgctatatgtttggtactgggctccagtggtgaaccgcacacgtgacccctgcttacagtgtagcaggaaaacagatacaaacaaatgctatttgtgatgaaggcttcagagaagaggtacgatatttgaggtgcctacctagtccagggtatcaggagcttctctgaggaatgatgtttaaactgacaccagaagatgaatgtcaccattgctattaacagggaaagtgtttgagttggggggtgcagagaggtggagggcagggaagaatattctaggtagaggaaatagcatgtacaaaggttccaaggttgtggtggggtggggtaggaggaaagaagcacagaaggccagaacgggctgcaaaccaggggtgagggtgtgaatgaggaggctggaatggtaggcaggggctggattatgctgggaatctaggccttgttaagaaacttgggtcatgtcataggaactttggaatctttaaagattggctttgtttagagcagatgggaagtagtagattctccctttggttcagtgccaacccaggcatcaacatggtgagaaatggagggggcctagaggagccatgcaggggccccattcccctcagctttcattcgacacatatttactgagcacctgcaacgttccaggcaccgtagaaacactgggggtgcaccagtgaaccacacaggcgttaccctgccctcatgaagtctacagctaatggctgtgaaggacatgaaataaatagttacactaacacttgtgatgtcatgaaggaaaggagggagaaaattttctgatcctatctttgggtctcattgagacagtcccttgggctaggacatagtttcttctgcttctggaataaaatgattagcaggtagaaaggcaaaatgtgcagatcagtgtgggcagaatgctacaatatatctagaaaataaaaaaggggaaccagtatatgtctgttcgcatatgcctagcctgtctccagaaggaaacaagctggccgcactaccaaatacattatcacttatttaaaaacaacaacaaagccaggcatggtggctcacgctgtaatcccagcaatttgggaggccaagatgggtggatcacctgaggttaggagttcgaaccagcctggccgacgtggcaaaaccctgtctctactaaaaatacaaaaattagctgggatggtggcgggtgcctgtaatcccagctactcgggagattgagacaaaagaatcgcttgacccaggaggcagaggttgcagtgaaccgtgatcgtgccattgcactccagcctgggtgcagagcgagactccatctcaaaccaacaacaacaacaacaacaacacatgtcttgggtggacagcagggagggaggagaagaggtagggagattattgataacatctcttaccactctccacccctcccaacctgtgcccgtctccacccttcacaggcccccagcctactgaggagctcattgtataaggaaaagtaaatgaaaacaggaaaaccatttctgattaatgacgaaaaagtacatgctgcatcctgttagggtgggatcttccaaactggggagagcagaactaccttcaatagcctttgcgaacacctggtcagagcttcccctgttagcatgagaagaataagggcagtgaaaatacacagattttagctcaaaagaagagtcgaataacatctagaaatatcagcagttgacagctgcttcttccagaaagggagagaactagcatttaacaagctgacatctttgccagctgttgggttggaagctttacagacattatctcattatgacttaattaaatatataatggaagtattgctgctattttacagatgagaaaaccaaatctcagtagggtagataacttgcccaaagtcacacagatagtggtggagctgtcttactcccagacctgttggctccaaagtctattctttctattacatcttgttctacattgttctaggatagtaacatgagggggaggttcctgaattgcatgggagggtaaacaaagttatcccaggtccctttcaatctcagagctgatgatgctatgaggtctccagggcaaaataaaaagcttcagagaccaagttcagtgcctccagtcacctctggagagtccatgctccattcatccatcacagtggaaagcctgcgagaggctgctaggctgagcaaccctgctgtcctcagcaaaagcagggttttttagggaaaaagcaatggagaccagaaaatgacaggcaaccagcagtatctgccacacagggcccaagaggcttgtcttgctcacctccagggctctcaggcaaggcagccttcggttggcagtgtcaaagaaaccttatcaggcaatacacattgtcaggggctggagggccctgtgttgacaccagggaacttccggggcagactggacctggttctggatgccagtatgtgtccagaggccttcccatagaaaggaggatggcatgtaggctaggaaatcaccaaggaagcaagccctggtctctgtagagtctggggcctactgtctttggagagtgatctgaagttgagaagggagcagaaatggacatttacaagcttctgttgtttttcaggtatctccctcaggtctctgggccccctctctgtccctcctgtccacagtaccatgcctggaacaggtgagcttaaaatgagatttctgaagaacaccagaattcttttaaaaaatgggatattagaactgaaggtatctacctaagtcaggcttccctaaatgcatttcaaaggatattaaaatctgtgtgggaaaaaagggttctgtgatcaaataagtctggaaaatgctgaggaagcccagtttaacaagcgaattgttttgttttgttttgctttaactgcagcacttctaagcacttaggtgataaaattccaaaatgaactgtgtggaaggcccaggggaggcaaggcttcccaaagtaaactctagtcctcaaaaagcacctaattatttcaacgcactagacaggatgatcgcatgccaagggtggccaggacagtcccagtgtctgcttcatgtcctgacataattatcaatagccttccttccactttttttttttttttttttttttgagacagagtttcacccttgttgccaggctgcagtgcaatggcacgatctcagctcaccacaccctctgcctcccaggttcaagaattcttctgccacagcctcccgagtaactgggattacaggcgtgtgccaccacgctcgctgattttttgtatttttagtagagacagggtttctccatgttggtcaggctggtcttgactcctgacctcaagtgatctgcccgcctcggcctcccaaagtgctgggattacaggcggagccaccgcactcagccccttccacttttcaaagtgtcttagggtcttagtttggatgtaaaatatatgtcaccctatccatagaacacagtttgggaaacacaaacacaagagttatccaaatacaaatctgccatttcacagaggatgaaaataagtttcaggaaagtgaaacaatcagcacaggccacagagctgctgagttgatggctggggaccaagacagggctcaggtccctcactcccagttcattgttctttttgtttttgttttgttttgttttttgagacagctcttgctctgttgcccaggcaatgtggtgacacaatcatggctaactgcagcctcgacccccaggctcaagtgatcctcccacctcagcctcctgagtagctgagactacaggtgcattcatcacacctggctaatttttgtattttttgcagagactgggtttcgccatgttgcccggttgatcttgaattcctgggcttaatcggccctcctgcctcagcctcccaaaagtgttggctacaggcatgagccaccatgcccagctcagttcattactctagtttctagaaaaccagcaccttttctttgtggagactggagaactagagcagctggcaatctttcatcgtgcctcaagttctctttctcccctatgcacttgcctttctttcctcctctcttccttcttgtttttttctcctaccgcctcttggtctggggctgcatgtgcccagcctagggtgtgtcctaagtaggatgattttggcatctgtccttggatttggcaagtcttagacttgcagaaccagcacaccactctccagggcctgggctgcagagagcatttgtgacgacagcccctctgggttgggcagaagttgatgctaatgaggcaggaggtagtcaggtgggtgtggctagggagaggtgaggtccctttggggatacaccaggaaatttgtgtctgaggggctatgtcccgatgtccgggatccagcagcattatttcccccttgtttttgcctctccttatcctcagtaacgtatcctgttcccctgggaacaacagcaggccttcatctcctggctcaggactccacgccacagccccactgcatctcaaaataactccaaagcagcagtgaactccgcctccagttttactcttcagggtaaggtgaaggggacggtgcagagacatcccagcagggccaagggacattgagaagctgagcctatgccttgggaaagaaagcttgtcatagaaagggttggaaaagagaatggggtggcacagagaggacagagtgacagccagactggactttatccctagggagggagattttaaaaagaagcttcagtcagtgagccatcctggcaaggagctgatgtcaacaagtcaaaatttccatccttactttgagggtggaaatttccaaacactcatgtcagaaaagccaggtcctttgctgggcttcatgggaacccagttctcaggaggttctgatgtgagcagagcttaggcacaaagaaaaccctgggcttcaaacatggctgacacagggaaagggggagtggtgccaattcctgtctcccactcccagctgggatgcagtggggcaggcagcctccgggcttcagttcatgaagcaaagaatctactctaaaaagtattctcagagctgatgcctgtgaaagagagattctgccctgattcagaacaacacagagatgtgtaggttacagacctagttcgtcagaaaagatgaacccagctgtccaaatccaggcggttcagcaaggcagccattcttattggccaattgttgcatagcccgaaacgttggcgctcctcacctacccctactagagagagaaagaggaccatataatatacattaccagctttaaaaaattgtttcgaggttaattcatataccataaaattcaccgttttaaagtgtgcagttcagtggtttttagtatttcacaaggttgtgcaaccatcagcgttatctaattccaggatgtttttattactcctactgcaaaagcccctgtacctgctagcagtcactccccattcccatcttacgccatcacatattagctttaggattgacttctttcttccttccagatcttggtaccgatggaatcattcacctacctccactgagaccaaaaagtttctcctactccagctggccctgtattcccccggaaggaagggaatcatgccttctatatacagacagattgccttcagaagagtggaagaaatctccactatcaatgaacccagactcttgtcttcttcaagagcaagggcctccggagtccaaactgtgattgaaccaagtgcagactcctaatgctcttgaaatacacagcccctctaggagcttaccattttcaccttccttgcctatgcccttgccttctagttccaaatatttagccagcttcactgtggcaatagtctttcagagaaaagacttcttgctgttattctccactcatccgtgggcttctggggacagccatttggctggggtgccaaacaccagaagggggataatagttttgactctgaacttggccacaacccctgaactgatcccaaaatctgtgaaagatttgaatctgatatctccaccaaagccttgatgttttctctgtacagctaagtttctgatggaatcttcatctcaccccattttctttttaacctcgcccccttttctacaatcaatccattcattattgcgccctccaggtcccctcctttttgcagaaggtgtaaaagagcgcccttggtgggtgccctgggcatgttgcaacgcctgctggtgcccttctgtctgtccagtctgcctagggctcaggagtgcttgttctttcccttcctccctgtgtttctctttatctgtcccctctcctttctcctggcagcagaaaaggaagaacacaagagcaaacacacaacatgatggtggcaaagtacctgtatatagccctttcccattttttgcattatgttcttaatccttaatgtggaattttccagcaaaatgtttaactcaggtgtgatttttgaaaatgtcctgtaatattttatcttctttaaaaaaaagggggggaaataccaaagtgtgaaatactggctaccttccagagttcccacatgggctgggatttttttttctttttctttttttttttttttttgagacagtcttgctccagcccaggctggagtgcagtggcatgatcttggctcatgcatgctctgccacttgggttcaagcgattctcctgcctcagcctctcaagtagcgggttacaggcgcccaccaccaaaaattagcccagctaatttttgtatttttagtagagatgggtttcaccatgttggtcaggctggtcttgaactcctgacctcctgatccacccacctcgcgtcccgaagtgctgggattacaggtgtgagccaccgcgcctggcctgggctgggaattttgttgacttctttgggaacattatctctagagtctgcttttttgtgggccagtttgtgagatgtaacatgaagccattccagaaatggtaacttaaaaaaaaaaagactacatgtcaggaaactgttgagattcaaaggaatctcactgttcctaaataaatgtgtatagtgatttgaaaagtatcccactgttgataagaagaggtttagattcttgttctgtgcctttttgtgttgtggggggcatgtgagtgcatataatgaaatgggatgacagaaaatgtttcaaattggacattaagtgtattactccccaaactgatgctaaagatgacatatgttattacagggcctgaagaattcagagttgttactctctgtaacataactaccttgagggcagagtaggcagagatattgtaagtgggaggatggtgaatgtttaaggtgaagtcatttgaaacttaagggtggggactgaggctaatgtctcatgtctcagataccctgaacggcagttattcattatcacaacataaagcaataaatagttaaggcagagggtaatttaataatcacatattagcgggcttggtggtgtatgcctgtagtcccagctactgaagagcctgagatgggaggatctttaagcccaggaagtcaaggctgcagtgagcaatgatcatgccgctgcactccagcctgacaacagagtgagaccctgtctcaaatatacatatttgtctcatgtatatatatatataatatatatatatatatatatatatatatggcttcagaatgcattgtgacttttggttagaggttgaaaggcagcaaacctattcttgtgttttttcttagattaatacaaatttaaatgttaccgttggagcctgcagtgagccaagattgtgccactgcactccggcctgggcgacgagcgagactccgtctcaaaaaataaaataagtaataaatagttaccattactgagataacgctgacctgtgggaaagagaggcccttcaaaaatgtaatggctgatggggaaaaactaaattaggattaaacacttcttgcaaataataatatccacacaggaaacctaaatattataatgaagagttaaccgctccctgatgtttgaatggggctttaaaaattcctatttcactcatgaagtgggagaaggcctaatggtaatgtttactttctcaagaaaatatctagttaaaggggccaggtatgtagcaaagagacagcaagaggagccttccgcagtactttaagtactaaggggactgctccaccacccatgagcccatctgtgcatatccctgcacacatacactgcatgcatgcattcctccctgtatgccgatggatgctagagctgacccttttctacagagtcctggctaccttgacatcctactcaggtgagtgctgaaagctgatcctctgcattgccaaaacttggattttcatccatttgcccgtgattttttatgaaagaaataaacagaatgtagcctgttcagactccagtagctttccttgccaactaacttggacattgctgaacagatcaagcctgaaagtgagcaaggtcacctttcatgtctgcatgattctgtaaaatctgtattccagggaagtttaactgaagcttgattcgccgcctcagcatctaactagggacaaggaatctgagggcaaccaccagtcattgccaagggaggaaaaaaaaaagattgttgttgcacatttcaaattgtatttttttttttttttgacatggtgtctcactctgtcacccaggcggagtgcagtggcacgatctcggctcactgcaatctccgccccccagattcacgccatttcctgcctcagcctcctgagtagctgggactacaggcgcccgccaccacgcccagctaatttttctatttttcagtagagacgggatttcaccatgttagccaggatggtctcgatctctgaccgcgtgatccgcctgccttggcctccgaaagtgctgggattacaggcgtgagccccgcgcccaaccgaactgtatttcatactctgatgtttagttgactcaaaacgggtgggccagctctgccctcctaagacaaagtaagaacttttggtctgactcagagactgagtttttaaccctaggactcaaagcaggaaccctggccggagctcccaggttgccagggttcctttgtgctctgtgtggccccaccatagctcacctgctgactcttctgcctcttccttctgggggggaactccttgcagttgaggctttttttttttttttctgtatccctgtggctaacttgtgactagcacataacaggcagttatgttttttaaatataaaattccctttttttcctctaaatttttaatgcccttcactgagataggagttgtgaatacagcagaatacagtgcaacctgcaggaatttttaggtaagtggaggcagcatatcacagtggttaagggcattgtatgccagacccctattgacttcaggagggatagcaccagattcaagaggccagagaccagagccaacaaatgcgacatagggtttgttgaggggaacttacataagagggatccggtgcaacaggctggacaggagaaccaccactgcctgcagaaagcacgcagtttacatggcacctcatctaacaccctcccgctaacaacctccacctggcaaccttcatttaccccaaaacaagggcctcagccccctgtatggcccatgttccaagggctgggccaggggctcagatgtcctcatacataaggaataatctctgggttggccacgcttggaacactagacacacattcggtgtgtctgccacacagggtcattctcaggttatacttaagttaccgctgtcaggtgctctgccatacaggcatgatctccagagtcatattgcctgggtttgtaccctactctgcccctactaaccgtgtcatcttgggaaagccttgactgctccatgactcagtttctcaccttaaaatggagataacaataggtcccatcccatagaattgtttgtgaggattgagtgtgttatatatatatgtgtgtgtatgtgtatgcatatatatgtgtgtgtgtgtatacatatattgtatatgtgtatatatatgtgtgtgtgtgtgtgtatatatatatatatgtagtgcttgaacaatgcctggtacattaataagggcagtataggtgttatttgttattattgtgattatattctcattgctattaaattggtggagagcttcctgtcccctgctctccttaacagccagaatttctgggggatgctaccggtgacaaggatctgatttggtggaacagggattgtgccaaagatacatacatcaacaaaatttaatcctaggtcatgaagcttgaacctagaatccagtcaccctaggataaaggcccaatattttaggaagaactggctccttcccttttacctaccccctcagcctttaggctcctgaaggctttagtaccctacttttgtgggaaatgatgcagcaagaagaaagtccagattcagatactagaaaaaaaatactgcaacaaaacaaatggggaaagggtgagctctgcatactctccattcagtgaagtggagccttccatgttttattctccagactatcattacctgttatccggtctatcctaacacatgtgtaacaggcctttgcaattcatcttacactgattttaattgagtattgctagagctggggttctcaactttgttgcacattggaatcacccagggagcttttaaattgattgatatctacacagagattcgatttacttttttcggagtgtgccctgggtattaggattttaaatagctcccaagtgatctaccatgctatcaagattaagaactacgacccaaatgtgtatacgaatcactggggaattgttaaaatgcacattctagtttggtaggtccaggggtaggttctgagattctgagtcctaatgaactccaaggtgatgcagattttgctggtccatagaccacactttgagtagcagggcttggagagcatgataatatgattcccttgttcaataacatcatgagcttccacatataagctctctcagcctggcatcttaggctggcatcagaggcatttaaggactctaacacaatggttatcaaatgtgatcgtctgaatgactcctgggcaggttttaaaaaatacagaccctggaccccataccagacctaataaatcataatattcaaggtacagcctgcacagggatttgaaaacacttcccaagtggcatagttgatcaacacactttaggaactgtgatatgttccaagatagtttcccaggctcatttcacattaattcaacatacaaacatttattgtactgcctcatgctaggtactagggaaacaaagatgaaaccagtgccatccttacctttgagagttggtaagataaatgaccaaaactagaatatttactattccccaggcacggcctaacactcacacctctgctaacggtcttctcctttgagaatgtctaggttcctcagcacccggattgcctgtcctgatcaatcaagacagacaccgtctttaccccattcgagcctccattttatcgctcaaacttactctgcttggtattaaaatagaaccagagaagaaaaggatttaccaaagtgaaataaaacagttggtatttatgtagtgacttccatgtgccagtcattgttaaagcactttacacatgtaatattttaaaattctcaaaataaccatatgagataggtgtattactatccccatcctcaggatcgaggaaagggaggcaacagaaaagtaacttgcccaagaggtaccaagcaaggttcactttcaagccttatgctttactgtcaagttggttacaggctgactggaatactgtaacttctaattctcaggcctgagcactttcctgctcatcaatcctgtttcacgacttaaattcaagcacgagggcaagaacgatgtcttacatcccccacatgcctagtaagggtgcaagtacttagtaggtactcgataaattgattggatgagctgtccattgaggggaggggagaagtggataatgatttaaacaaacaacaacagctaaacaagacagcggcctccaggtctcacgtcaccgctagatccctcttgacccccccgccagagaagaggaccctcccgcgccctttcggagcgtcggtggcccggctccggctctgcgctccatctcccagccagcaggtgcccccagacccccggctcctcctccgccgccgtcacagcctcgcctccgcctctggctcctccgcttcctgttgccgcgatccgggccgggagctgcgggcgccgggcgcccgaggcttcccggtgcgctccgccaggtaaccgctcggcgcgaactgcccgccggggtgggcacggggcccgcgcggcccattggtggggaaggaggcggcagagggccgggctcgcctccgaaggggagcgggcctcctcctgcctcggacgcccgaggccttcctggccaggctgcggcgccagcgggatgcggggataacggtgcctggctccggctcttggtcgggcgtggccgagcgtcgcaggcaccgccgcgcggagatgcgatcgccgtccctgcgagccccggggcccgcgctcgccgccagccacgcctgctccaaggctcctcctcgccagtctgccctggaacgggagaaaccaggagaggagccttggacctctgagccgcgatggccttcaaatgcccttccgttctttggcaaaaaccaagagcaaaaagccgaaacccacacagggattcccaaggtcacagagttgtgtctgccatttacgaatgtctgttcttttatttaagtgttgtaaatgggctactgttttctctgttctgccaaggaattaggattcagagaagaagatctaaaa

SEQ ID NO: 2901 - DNA, 100000 bp, Homo sapiens
attcattgtttttacctgatcatagataatgaagaattgttccatgaaacttcatgttcaatcatgtgcatttatatgtactagttgcaatgtaaaatgtatttcttactgaggaccaggggaaaaaaagtttggaaaaattactgagaactttacttaagaacaatttgtatactcatgcatattctgcttagtttctgaattggttgagactcttggttaataaataacagaaaagcaacttgtactgttaaaacaaaaatgaggggagattattttgaaggctatagcgtactcccagaaccaaagccttttgagtgcaactgggcctcactagagagtgcagctcattaatggaaggtcgtaaggaagctcagccctcttctgtctcctcctatctctgcttccctggcggcctgttctttcttcctgtgcgggctgactttccgggtcctcagtttccacagtgaagccaggtctacatgcttcacgttacggtttttagcacccagaaagttttttcctctatctcatcttaatttcattactcagtccccacctcccaatgaggaaagaaaacctgcccgtttggtcagttcaagtcaggtctaccattggtccagtcaactgtgggctgtggagaagagggtagagcaatggggagccatgatgggatctggaattctactccaaaggaggaacaggggtagccgggcagatattccaaatggcccctggtgcatgctcttaactcttctttctagaaatagtgaattcttatatattgattcaaaggaatcaagattctgcatgtgccccaaatgacttgagtattaaatccaaagagacactttttcttaattaaaaaaaaacactgtggcttgcggcaattgaagaacctcttagaaatggcacatttctttatacaataatctgagctggaacagaaatgcagggaaagaaacaaaaatgaaaacaaacctgacaccaataaatatgtaattgaagtgatctgcaacaagaaggatcaagactattttataatcaaacaccaaagagagggaccttaggcgtaccttggaacataaaaatcttgctttgcaggatggctttattttctgcttaaatctaaccaaagagtttgcagtattgtgtggtttgggtgtggcggtagaagcctgggtgagtcaccatgatgaccaactgtggtttcttttttgctatagtgaagaaatgtggttgctcagtgtatcgtcccaatctacatgccttctggataggctacaagaaatacctataatggacaaaagacaggctgagggaggaaatgaagtctaggcctgggaaaatttagatgcaattttttgagtgggagggagtaggttaggatatatagaaaggaaaagataattgattaaaatcttcaatatgacaagaatatgataattcttataataaaaattgattcctatgaagacttggtctagatatattccagacagaaatagcacattaaaaaattaatctagctttgtaaatatttgaagcaagcagttggctgtacagatatttgggctgcaaaaatttctatatgaaaattaattccataagatggtgtttgtgagtgggagaaaaatgaaagttagtggaaatggcaagatttcaaaaatataacttgatttccagagatacacttgctagtctgaaaatgaattttgtaggccaggcacggtggctcacacctgtaatcctagcactttgggaggccgagcgagtggatcacatgaggtcaggagttcgagaccagcctggccaacatggcaaaacctatctctactaaaaatacaaaaattagatgaccgtggtggtgggcacctgtaatcccagcactcaggaggctgagaggcaggagaatcacttgaacccaggaggtggaggttgcggtgaccgagatcatgccactgcactccagcctggacaacagagcgagagtccatctgaaaaaaaaaatgtaattttgtgactcagttttctgtgttgcctccagatctgaggggccatgacgacttgcacctatcccaggacaggaacacgggagtactttgggtttagtaagttcattacatgcacacatcatcccaaatttggtttcttgttgcctaacaaatgttaaagttatttcaataaccagccactctatcagcacatacacaaaagaagcaaaccaaaaagaaaaaaaaaagaaatggaaaaatggaaaaagcacccattattgggaatgagtacatcagcgtgaattctgctgccagctcaggtatgtgggtctggattagagctttcctagggtactgctcagctgtgctcattttatggtctacagaatgtctggaatgctggttgaatggaaacagatctataaattcattgattggacaggaggttgcttcttactggggatccaacaaaaactgctttgccctgtccaaagaacattcaggggttttgaaatttttaactattaataataaatgcaatttataattgcaaccagcatttatttgcacaattatcatacatgaggcactgtgccaaatgcttaatacactgccttattccatcatcagaataaccctaggatgtaggtactcagctttacatccacaggtaacaggttagggaactgatattcaaagtgattaagtaatttgcttgagtatgcagtccataagtggcagagctgggatttaaacatagttgtgtggatctaaaactctatgctttacccactatgatgtattgccaaaatatggcaatctccagcaaatgcgatgtgtatctacctggatgtttctttggctctgttttttatttctttataggattctctttcagtatatatttatatgcaaatcgattcctaggtagaacagccagttggtggagcagtcaaacacacacaacatttatcaattaaattctctgtcttctatgggtgcactatgtggtgcccaaaataattacaatagcaacatcaaagatctctgatcacatatcacgtaacagatatatgaaaaaggttgaggtgttgcaagaattaccaaaatgtgggtagacatgaggtgaacaccatgctgttggaaaaatggtgctgacagacatgctcgaggcacggttgccacaagccttattttgtaaaaaacacagtatctgtgaaatgcaataaagcaaagagcaataaaatgaggatgcctgtatttacttgtctgtctcttctaattgtaaagtcctttagtgtaagaggtctcagtacctccccatagcaggcatctgttactgagtaaataaaggaataaatgattaccttgtgcagacagtaatgtggcaaaagccatttatttatttatatttagtttttgtttttctgagacagagtctcactctgtcgcccaggctggagtgcaatgggacaatcttggctcacgcaacctctgcctcccttgttcaggcgattcttgtgcctcggcctcctgagtagctgggttacaggtgcgcgccaccatgcccagctagttttttgtatttttagtagagacggggttcgtcgtgttgcccaggctggtctcgaactcctgagctcaggcactctgcccacctcagttcccaaagtgctaggattacaggcatgagccaccgcaccatctatatttaaaaggagctccccaaattagtaaatgctggtccatgatatcaaagttccaataattcttcactggctaaaggaaaagcaaaacatcagggtcttcagcttctttgaaattcttctgtactcatagtcttaatgcattgtttagcaattgttctgcttatgtgagttctgacttttaagctaagcctaaggttagggttattacctcttatagattttgatacctaatatatcatgtattagtgtactgctccacaaacaatgagctggtgaatagattgattacttactccattacatagacccccgctccagccaggtgagtgggttcctctttatctcgtcaggtgcccccaccccttctcttctgttcacacctcaccagctagccagcctgctcatgtctccttcctcctttccctccattgttgatacaacccctgtggaaccccaaactcccaaaacacctttgtacttactcaccactgttaggtctttcaatatccctacaccatcatgtgttacaaatgccatataacttcgctaaactgtcagtccctggaggacaggcaatgtatctttttaatctctatatctctcctctactagtcctttcacaatgttttacatagaatactctcaagaaatatataactggttaaactcaatttttaaatactctgttggaaaataacctcaaactctaatgccaccaagtcctggaaaccattccagagtttgaataaagtactccagggatctaaaaccttgattctggatatgtaggctccccagtaagaaaatcattctagttcctggggtggaggccaggaaggagagctgcctgtcacctcacccctacagcttttgtgtttgtttaaattactgtagtggtgggtcacaatcataagaagatcttgttttcagacttatggcatagtttccctcctttctgatgtaaccgatgccaacaatcatttgtttttcctgagtggacatagtcccaatatctaattgtttcatttttatgtataaattcctgcagtgctacctgtttgttgaaatactagataacagacagtaagtacgacactttaagaggaaatgcatttaaatcctcttctccccgcatccctccctcaaaattaagaatgctgctagcctatcctttgaagaagaagtcagaattccaaaatgaggaggtacaaaggaaaccagaattctgttctgccaggctccatatagcatgaaaatctctccttaaaatctgccttctggccggctgtagtggctcacgcctgtaatcctacactttgggaggcagcactgggcagatcacttgaggtcaggtgttgttcgagaccagtcgaccaacgtggtgaaaccccgtctctaccattaaaaaaaaaaaaaaaaaaaaaaagctggtgtgacaacgcgcctgtagtcccaagtacttaggagactgaggcaggagaatcgcttgacctgggaggcggagattgcagcgagcagagatcgcgccactgcactccagacagagcgaactgcctctccagaaaaaaaaaaaaaaaaaaaaaaaaggctctgccttctctctcttcactgtctaaaccccaacgctgcagaaagcggtgaccccaagtcccagaatgatgatgctctgcagggtaacaaacaggttttctgtcaggcctgattgtgaaccagcagcaactgcagctgacagtttctcacataagcacgtagggcttgttaaatttcacttccagccccaaaccggaagcgctgtttaagatgagcccaagaagaaagcaatctagcttcagaaacaaaactcccagactctagaaagactataagggtttaaatttgggactgttctccgttttgcattggacctatgttctcctccccataaaagtttattaaaattcgaaactgccaaaaaacaaagtaaatcatataaaacatacacaggcgcgtgcacgcacgcacacacacacagaccaatttgttttgtgatccgcttccttatctagactgtccaggcttgggccagatttgagttggtaactctcgcagctaaagcggagcagaatgtagaaagagtatctacttctccggattgttggaggagggtcgaagcgtagactggccacgcccgggtcccgctctctcgttgcacaactgcagctagatctgggcatcgaaggaggaacgctgcaacctccaaccccttctttctgaccaccgggaccagagcagtgctggggccggggcgggtcaccgggtgaggaccggggcggaggtgttaagttacagggcaggagcccgggtccctccgcgggcaggaaggggagggcccatcgggctaggggaaccccggcgcagacctggggtggggtcggaaaagctgtttcatcgcccctcccgggccctccgctccctccctccctccctccctccctctgtccctccctccctcctccctctctccctggcaggactccccgccaggcctccccgccactctccgcggcgcattcgggaggcagcggccgcagcggcctcgccatgtcccagcccggccagaagcccgccgccccccgcggccccggcgagcagccgccgcccgccgcacccatgaggtgagtggcgctccttcggcgtcgcggggctgggcgatggggtaccgggtcccggagctgtggccgccctccctggcgttgccaggctggcgggtctgcagtccccggcgcccccgcggggcagggagagggcaggggcttggccgctgccaggcaggtggcagcaggtggctgcaggtggctgcaggtggctcggttccccggccgggtccagtgcgctgggcgtggcgttggccgggtagagtggaggggggacgcgtcaagaaaagttggctggtaagacgtgggtgaatgaggatgaggatgaacgggaatgaggttcactcaggacccccgagtgagtggggtggtttcactggacagcgggattagtcttccgcgctaaggccgggccgcagggcgtggctgcctggagacgcagagcctctccctaaccagcctcgagccaaattgggcgggcgaggaggggcggggcctgcgccgggcccacccccagggttctgcccacctggcagccgccttgggatgtgcggagctcagtgccagccggtcccggccaagcggagtgtgagcccggcgcctccaacgcaacaccccgcgccctcccggctcccccgccgtgcggatcggagccagccggttgttgccatggcattcgccagctgtggtacaagacggtaaataggagcggttgtgcctgggcaggacccggaagggagtgtgtggaagggagtgtgtttgctttgcccttctgggcgtgcggatgaagcgttgtccggggttggcggggaaggggtgcggaccgggtgcgacctcctcgcagaccttcaggttaggctcgggagaggcaggggactcaccctcttgtggtatgtatgagcgcgcccgagcgtgcgcggccatgcacctctctcgccccgatgtcaagcactatgctctgctggcgctcacaagtgggaggaactggaattgttgctggaggaattctgtctaggaggtggattcctgaatgcactagacgcagctcgcaagagctttgatctagagttcttttttaacccctaagtaaagttcaaacttttagagggcgattgttggacgtacattcgccgacgcaaaggagaggcagctgcaattgaggcaaggagaaaatcccaaacatcaaggggcagaagcaactgagatctgagaccaaacccttggagagagcggtggaggggtggaggaaagaaagcgagaaagtgagagagggaggagagagagacagcgcgcacaaaagcgagcttctctgcactttattactttggatgaggacaagaacgttccatttgtttggtgcattgaatgtttgtcctgccaattaggtgtaataccagtcaagctggcacttctagtgttttggaaccaggaagcatgatttaacattagattctttccaaaaaaaaaaaaaaaaatcacacacaggagttttgttgacagtgagagccaaatgtttatgtctcattgatttatggtgagaattaaaaaattaggtatgtctttttctctctggcatgtggtattggaaaaagcaaagatgttggaatcagacattctttggagctagctccctgtataagaatcaagaaagaaactgttacttatcagacaatggacatttattgatctctattatgtgccaggcagaattatatcccacaagtagtgtttttttttagattatttttattctccgtttctatataaatagtatatatgtatagtgtgtatgtgtgtatatttacatgtgtgtgcatatatatatttacacatatatgtaaatatatgtgtgtgcatatatatgtaatatatgtgtgtgtgcatatatatgtgtgtgcatatatatgtgtaaatatatatatattgcacacacacacacacatacaatatactgtacagggtctctctcactatgttgcccagctagtctaaaactcctggtctcaagcaatcctcccacctcagcctcccaaaatgttggatacaggcatgagccactgcactgggcctacaggtgctttttaaagcctccatgtacacttggagaacaaagagtttttctcaaatggaaataagtcaaccttttcaacctgttttcactgtgtaaaatagaaattatatgcactacataagtattggtgaggactaattagatttaaagtcaaaatgtcatacacatatacttttaagaatttggaattccaatttcccttgagatcttcttcatgaatgttttccagtacatttcctgggcttttacatgtagcatttgattgagtggtaagaacaaaccacatcaatttgctttgagtcattattggcctaaggttcttatcaaatgtaccatgtaccttatctgcaaatatggatagcagtagttcagagttgacatcaaattctccttccagactcatgattctctcaaggaaactctgctgggttacttggatgaaatagtttgaatctatgcttttaaccctgttttgtttagtcacagtctgatgtttttgctaaacctctcttagaatcccattttggtactaccatgaaaactttttgctagtaggaacttctagaaccagctacatgcctgtgatcaagctttagctttgcccaaaccagtgctattcatagaaacataatgtgagccacgtctgcaatttcagatttccaaggagccactttaacaaaacatcacaacaaaaagcaggtgaaatttgtgctaattgatatattttacttaacctacatatcccacatattattatttcatcatgtaatcagtgtataagccattgagatattttaattcttttttatactaattcttcaaaatccaatgtatatttacattaacagcacatctcattcacacttgccacatttcaagagtgttcagtagccacaagcagctaggggctatagtatggacagtatagcgctagaccatggactcctaaactttctttttttcctttggtgatagtgggtggtcacagacaattttgagaatcaaatgggatttatggactgctttcccacaaaaaatacatacaaacatacacaaaatgcagtttccaatatagcttcagggagttcagagtttccaaaagaccacccataaatcccccaaaggtccatggagccagtttataacacacaacacacacatacacacacacacacacatatacatacacacatacaaacatatacaatccatatacatatatgtgcatatttatatataatacacacatgcatgtataatacatatgtaacatctagatttatgtgtgtatgtatctacagatataaatacagatgtctgtctgtatgacacatgcatgtataatacatatatagacagatttatatgcatatatatctacagatataacacagatatcggtatatacacagacatctcagaatacttcaggtaaatcctataattaaatatctttgtggaatcctttaagtactgaaaaggttataaatgatctaactttcaaatttaggcagaataaaatgaaataattaaaagacatgtctcagatgtgttcgtttaacagatgccacctataaagctagtcagtgaaacgttgcaatgtatatttccacattgaatgcctcaatcctattgactttatcttctgaaaaatgtggttgtagtaaacacacacacacacaacacaccacacaactctgcagagctaaatttgaagaacatctatgagctatgtaatgataagcatgaacgaaggttaatttggcccacaccagtcatcacattcctgaatcatcagttattctattagactatgttaattaaaggtgtttcttagcctaattagatccatagacctatgacagcatgatcaaggagcccagtcatttgggaggccccatcattgctgccagcctggaagaatgttgcaagccttccatggcaggacagatcacttgctcacagtgaattttagaataaggaaggcaaataacagggcctgcaaaaagggcatagactttagggtaatggaaacaagaggtcaaatacagcctttctctttcagctgacagtctttgaattagttcgcgccccatgtgtataagccttttaaaccaagagtagcatctgataatatctttctttaaatcagtttggcacttcccagaaggttaattatattctacaggtgccttttaaagaatgctatagcctctgggggtgggaacagtggggggtcatgtgagattccatgtggataggtgggtaattattctgactagattgtctcagcagatacaaaactactctaagtagtacatcatttttccccttgaggtatttttaagatgaaaatcatattaacagatactaaagttctgttctttgagtgtctcattttcctttcatgaaaacatacccagaaagctttacagccaccataaaggcgggggcagggggaagtatatcagatgtcttccagttaagaaaaatgcaagaacagttccaccaataaacactgttcatgtaagttatctcctcagatggaaaagtcagttaactcaggagaaaaaggtctaaagttatagtttcctaaaaatgtatgaaatttgttttggttgtaggaactcatagaacataagaataaatttggtaaagctcaaagatgttcacagttgtttattgccacctgctgtgtgtcagttttgtgcagagtgcggtggacacaaaaaaatcgtgcagtgtctgtgcctggcctcctcttgcatttctcatagataaaactacaagttcattctcatgaaactgctgtggcaacaaagcaactatttaaattctcatgataccccctttgacttaagaaaactcatccagccttacttcaggtgaatcccaggagctaatctatgacaggcaatagagccacctctgaaaattggacacaaagggcctgtacctttacagtgtcatcttgtcatgtcactgaaatcttaaaatgttagaaaaaacgaacacttggggttcagtgaaaacagagggtttcagaattacagctatgcagttaatccttaatatatattaagcattagtacacagaaaagagaagagtataatgaggctgggtgcggtggctcacgcctgtaatcccagcactttggaggctgaggcggatggatcacaaggtcaggagttcaagaccagcctggccaagatggtaaaccccatctctactaaaaatacaaaaaaattagctgggcgtggtggcaggcgcctgtattccagctactcaggaggctgaggcaggagaatggcgtgaacccgcgaggcggagcttcagtaagccgagattgcaccactgcactccagcccgggcgacagagcaagactccgtctaataaataaatgaataaataaataaataagtataatgacctcttcatataccaatcattgtgtcaataattgtcaacattgtcctaatcttgttttatctgttaaccgtcacagctacagcacagacacgcgtgcacacacacacacacacacacaccctttcaacatgttttaaagatgggaattgcaaatataagtcatccttgtaaccaaattgctgtagtttgttgggaaaagaattctttaacccccatgtagtttatctccttgagtgttatacgaagatgtgagaatatatataatacacagtcatgagatagacaaagtactaaacaaaaacttaatcagatgaactgataaggttcctttgtactttagggaaagtaaaatactaaattcttctgttctaatgttacagccttagaaaatgaaaccctcaaaccttaactcactggcttctaattcaccacagcagattgccagggaaaaagaagggagtgaaataattttaattgtgttcttaaaatgaacaggcaatgaaccaggtgcctcactaatgtcaactcttttcataaatttgccagcccctggatagataccattagccctattttacaaaaagaaactgaaaaattaaattatctgcccaggtcacggtcatatagccttacaaatctaggctgtttctgccctatcagagtttattgcgtcaactaacagacagaaatgactctgagtatttaaaacaaagggagtgtaacatagggattggttacccaggtaaaaaaaaaaaaggctgggaagccgtcaggggagggtgaggcaaccagagattagaaattgcaggaagctgctaccatccctagtctagagggacacagggagacaagggtcaccttgcagaagctggaaccacagccaacccatcctgcaggaggtgctacggaggagggggtggggcaaagggaataccacccacccaccacctctagtctcctggcaggcctgctgttggctaaacccaacttgaggccatccatcaagagaattgcagccagcaaattccactacaatttgaacacagcagaagtggaacaaggaatccacctgaaggcagacagtctaggatctgcacccagggagactgttctgaagcaaaaccagctttacagaagctttgtccatctgcttgtttgctgaataattttgctttagcaagtagaatacatatacaaatatttttaaggcatttttgtgggaaataccaatttgcacattgtctcttaatttttcaagctccttcttggcctctttctcttttgtctagtttactgatctgaaaagagcaaaattactttcagggaatgtttataggtttgtgggaacatggtcattcaatcaagaattctttgttatgtcctaccacacatctaggaaaaaaaggatataacttaccctgtgattaggaaggcaagtgtaagtttataaagtaatcagtaagcaagagagtgtacaataaagtgctaatttgtttatttactgagaaaatagagattaatgtgcaaatatgaaaatatgatactccattaataggcaaagctcagaatttgacaggaaacactggtgtagacatagggcactgtgctgcttcatgaccaatcagagtttacccaggaggagcccagagccaccccagtctgcctgaccctggaacctccccatgggtgccgactcagtgggatggtttgaggagcggaaacttccgcttccatcatggtgcccataaatcttcccccaaaaccagtggttctcaatcctggctgtatattgaatcatctggggaactttagaaaaatttatccatggcaaggccccattctattcaaacaaatctaaatccctgtgccctgacacaaatgtttctaaaagcttcccaggtgcttgtgaaggcactgaaggatgggacccactgctaacctgaagtctttgtgatcctcaggagccccggtagaagcctttctcagtgtgtgtgatggtagagagctgagttccatgagctcggagatccagagggtatcaagataaccttttattgctccatgatttttccacagctgtccctggcatgcaaatactatctcgatgaaattgtcgccacattgaagaaggaaaatgtttaagtttcaaataaatcacccaccaagacatatgatacaatatgttttagtatagtcacagggtgtcacaaccatcagcacaattttactttagaatgttttcctttcctcctaaaagaagcctatactttaaaaaataataataataaagcaaaggcatttcagaagcacactagcatttcaactcttttcacagctggacttaatgctggcaagggctgcttttctgtcttcttgcttctttatatgtgaagaagtttctttgatttttttttcttttttttgtgatggagttttgctcttactcaggctggagtgcaatggcacgatctcagctcgctgcaacctccacctcctgggtcaagtaattctcctgcctcagcctccggagtagctgggactacaggtgtgcaccaccagcccagctaatttttgtatttttagtagagacagggttttaccatattggccaggctggctcgaactcctgatctcctgatctgcccacctcggcctcccaaagtgttgggattacagcgtgagccactgtgcccggcctagtttctttgatttttatcttgttttgtgtgacatgtcccttggctgtctatgtatctgtgtgtatctgggtaacaacagggcaggtgcccaaatgggcagagttgaaccttgccctggcagaagcccttagctgggtgagagctcaggctctgaccttattgcacttagctcttattgatttttttcagatttatgggtttgctatggcagatttaaacgtatagaggctgtcacctagaatgaggacaaacgacagttgtagttgccaacttgtgataaagggggtgaaaacagtttggaaaattattccttcttgagttaagatagcaagcccttgatctgatttttttctctggctctgagcttctggagcacataccaccttcatctagcccccatctagtctcctgtcttctatggccttgtccttccagtgaaattctttacttggcatcctgtcctgctcttcctgtctttggcctcctctctagctgccaatacaggacatattgtgtgttcagttcatttataaaacaagttttagaataggaagttttcatgttttgtatttttcgtgccttttgttttgttctcatttcagatcacccgcatgctctaaagacttcttgatgaaaatcctaagatcctagttagcttttaactagatccaaagtagcctagtcttggcccatgtaatcctgagtggtatcaccatggagaacatcgctgttcagatcttcagtgctttattcatgaaccaaggcgacagtgggtactccctagagctgctatgggtagcaaaaagaccacataggagatgcctggcactgggcctagcacagagcagatgcttaggaggtgtaatttcttttctgtaattagttttgtggttcagttctctttccccagctgtcaatcctccctgttccctgctcatctcactctcctcaacccagcagttacacgtagtagtggtcagagagttttctctcttcgctctttagaaagacgcctgcagattcctgagctggatcgaattgacatatgtcattcccaagtatttcattccatcctctcagttatgtgaaaagtactcattatttcatgaatctctctcagtgaaaagatacaattgactttacatcattaacagactctgaatattgaataattttcaataaatgatcagggcaatggttaattgataaagttgtttttactggaaatacctgttaattgtcttagggtgataatagtattgggtatatagcaatccatttgggaaaatgttctcaaatttaaggagatgcatggtgaaaagtttagggttaaatttcaggatgtctgtgatttactttccattacaggtatataaagacatgtagtgccctctgttctctctctctgtctctctctctctctctctttctgtgtctgtatgtatgcctgtggtgtgtatgcaaatagggcaaaatatggcaacaatgttaatagttgttgaaatctgagcgggggaatatgggcattcattgtattattctttcaacttttctgtccgttggaaattttcataataaaaagctgggcttaaaataggaactgggccgggagcggtggctcacgcctgtatcccaacgctttgggaggctgagggtggatcaactgatgtcaggagttcaagaccagctgatcaacatgtcaaaaccccatctctactaaaagtacaaaaattaatcggatgtggtgtgcacacctgtaatcccagctacttgggaggctgaggcacaagaatagcttgagctcagaggtggaggttgcagtgggccaagatcgcaccactgctctccagcctgggtgacagagtagactcagtctcaaaaaaaaaaaaaaaaaaaaaaagaactggaaaaatgtaattcatgagttctaaaaaagttggccttttattataagtgatttttatttatgtcattatacttttggtattttaaaatggctttctattgtgagcaactttttcttttgaagtcagaaaataacatgcttatagtacataattttaaagttgttattttaagttgttattttaagggagaaaagctgtacatgcatttactgtggggtaataaattatgatatgtatttgccacatgagcagaagcagagtgagactctgtggagagcatggaaccttgtaccagacaagaacaagtcacctttaaagtttctcttttgtgaaatggaataattacacctcctgacaagtaaatgaggcaccaaaatagtaaacacccaataaaacagtggctattattattacttatgtaatctgaaaaatatgaattacagattatggatgtgatatcatggttctaaaattaccagttctggaagggacagatttggtcatctctgtctttctagaatgatttttttagagatgtttaaagaaaattttagacaaatttaacagagcttatttgagcaaaggatgatttatgaattgggcagtatgaaaatcaaaagtggttcagagagctcagtacactccagcagcatgagcagcaagctttatagctgaatgtggaagcaaagtgaagaaattacttgattggctacaactaggcatttccttatttaggtatggtctgatgagaggtttgtagttatataaccaataagctggttggtggttatgattggctgaggcaatttttgttttgttttaagtcatttacaagaaatgcctcaagttaaatttcagtgtgcttagtaaggtatccgaggacagagaccacctcatgctaaggcccccttatttactttaacagagataagtaatattttcccctcaagtctggcttttaaaatcttttgctcatcaattattctaatatttatcaattgccatatagccttgatatatagtggactttaaaatggttcatttttaaaagattcatttaattattcaatagattgccccaactatgtacaaacaaacccttgactaggatgtataggtaaaagaagacctgtagaggtttcaccaagctattgcaccctggctgcttttcagtggatgccaatcactaatccatgaagtgtttcttctgggtaagaattgtagagtcacgaacatgccttttggctagttgttcaacaaaacactatcgagaaaggatttcagccacaggtttggtattccttggccatttttatagcatatctgttgatatgattaaagaaaatattatctaattccatttagtgtgttctatggcaaacaacagattttagtctgctttgtgaccttttcccatttactagttatgtttcttgtaaacaccatcaaatcactattattcttagttttctcatttataaaacaacatgagttcttttttgtatcaagactgtatggaagtgccttgtatataataataacataaattatattattactattattattatcattcttcttaattcagataatttcactgacctatatattaggttatgattctgctttagggaacataatagcattttatattttgattcaattgaggtgattaggactgaatccaatgatgagcttttattttttcatatttggctcccttttccccttttttgaacatccacagtgtgacagaaatggaataattctttgtgccccctattcagaacatacaactattttttcatttctcaaaacatttcagtaaagttatggcttattttatttatcgccaaaacaaatgaatatgtaagctacttgaagcttttataccccacgtaaaaaatttgcattagggacagtttgatcactgggtataaagacagttatgaggaataagatctttgttctattgcacagtagggtgactacagttaacagtaatgtattatatacttcaaaaaactagaaaacaggattttgaatgtcctcaccacaagaaatgatgaatgtttgaggcgaagatttagtaattaacctgatttgatcattacccaatgtatattcaaaacatcaccttgaccccataaagatgtatgattgttatgtgttaattaaaaataaaataacacttttaaaattgtatttatcctcggtgtcctagtaagaaaaataattctctttatagacataatgaaacttaaggccataacacatagaagaagttgcaggtatggtctttgtccttcaggttttattttctgcattggtggatacgcggaagaactctagggaattcccttggaggacaattgagccatgctgaactgagccttaagtatggcttcagatgaaacatggttcttatctcatctcttgatgaatgagatgtctaccgtgctgaaaacttgagcttaaaattcgtgaggcattttcaggagacaagatgccgccttggcatcaccatcagctctgcatctagttaattacagacgaccttctagattccaaatgaatgtgtgtagcatcccttgatttttgagagccacctatttggtgtgaattaccagcattctcaggaggaagattaaagtggtcgttttttaaaaaaggtatgcatttagcctttggggattaaagttactgtcatctgtgtcatcttcctttattagcattattttttacttttttatagcatgtcagtgaaaaaaccagtgaatcgccttccaaccaggagaaaagaaaggatcagatgaggtaatttccacaatactgggctttcattttctttgcttttaaactgtgaagtttgccttgaaatattaaataacgatgtagcaaagagctttaccttgcttaatattgggaaattttgatttaaccaagatttggttcaagaatataaaagaaatcactaaaaataaataaaaaaaattgttcctgggaatagagcctgtatgaatacttccctttagtaatagaactttgttgcttagggtgttttccctataggaactggtgaatcaaattgttttgttggcgaatatgtcaagtgtagaagggaaaacagttgctgtagtaaaaggaaaatctttttttatgacaataaaccatgaaaggaggacagggacagccagattaacagtccttcagattcataaacaaaaggaagagataactatttttattggcacagattctgggaaaactagtaaaaccaaatctccccactttgagatgggttttctttgaggctgtttctcttttactgaatgacataccattctttgcactgtttagaatgacctacttctctatggagggtcatgtgaaagttctgcccttccaaaggatacaggatttgccttcctttacctgcttttgtgtgttaaatctcaatataactggatgatacatccatcttcatccagtagaaatgagtcatttctaacttgtaaacatcatatagccagattttaaaaggtacatggaaatttgaaagcatcaagtgatcattttatttttctctatattatcaacattaatcaggtgttttctgaaatttagttcttctttctgcttattttctgcagtttcaaaatagtcaatatgtaagaggctgttacggctagaacctgctatgcattctgtactaaagtttatgcctccatttttaccattgttttcatcaccagtacccatgaaaataatttagattgtttcttaccaagcagtttttagtgaattttttatagccatgaaaggcaaatgtttctttaaaaatacaaagtaaagtaaacatattaagatttcatcctgtttcctgattaaattaataaaagataaatttcattaaaaaaaaaaaacacaaatttttctttttcccaacatgaaagtctacctagtgtcaccaggcacggtggctcatgcctgtaatcccagcactttgggaggccgaggtgggtggatacgaggtcaggagttcaagaccagtctggccaacatagtgaaaccccttctctgctaaaatatgaaaaattatctgggcgtggtggtgtgcacctgtaatcccagctactctggaagcgaggcaggagaatcgcgtgaacctgggaggcagaggttgcagtgagccgagatcacgccctgcactccagctgggtgacaaaaaaaaaaaaagaaaagaaaagaaaagaaaatccaccagtgtcatttaactcatttatcaaccctaccctttaaatatatttccagataagttattatcaaattaatattgagcaaatattgaacacttcctgattgaaaaccattgtgttctttattctccagaccagtaaacaatgtttttggttgttattctctattaatgttaattaaggtatttgcctaaaaaggaagttttcttttccaatatggtcaagtggatgcaaagccaatataatatggtcattctggccaattataactgggaaacttaaatattacaccttggatgtaaggatgtacaggcattattggtatgtaacaactgacggtagatagttaagtatataatgctggattataatgtctctcatctccatatttataaaaggtttagaaaggaaaacactgtaagaagccatgttataagaggcagactttgatttaaaaaattgaaaggctgaacttctgtttaaagaaggaacagcgaatttttcttttctttattggcatagcaattctgacattgtttattacgtttctggtaaattcacattcatgacccctgcccttgtgccagagcctggactaccagtctttcagcttctgtcccaaccagcagaagtaaagaggggatagagactttgcctgtccccatggcttaaatcatggctttagacaaaataaacataacagaatttgtttggcaaagaatgatttgtgaattgggcagcattcaaaactggaagaggtttctagagctctttctctccttaaattctgcctgtatgtatttgttaaggtggccaagcatgggggtgggtgcttggtagtcagggtatatttccaaaatggtctgtctcaaagggcctcattctttatgtatgtgcaaataagtcattaatgagatattgtgtcctggagacagttcaaggaaactgtccactttaggcattatgttagccttgatgttcatgattataaaaccatgagcaatctgaattgttatctgccctgcctaccatccatagtttgttgccatctccttttcttctcaaaataccagagaaagacttcctgaaactgattatttctcccaaatattttcttacctactgcttgttgaacaaaacgtgagactaagaagcttagtttggtttttagtaatccattttcaaatggcatgtaccctccaatgttaaataacttactgtccccaagcatatgcaaatatactgttagccctctgaggacaaaccagggtctttgaaacaaaatcagtttgaaaatttgcttttatcttcttcacagtttttcttctctttttattattctgctacatttctattagagatgcagaaaagggcacagaggaggactttgggagggtataaccagaagaaaaaattgatgaggttaggtgagaaccaccgttatattgccatatataaaaatacatggagggccgggtgcgtggctcatgcctgtaatcccagcactttgggatgctgaggcgggcagatcacaaggtcagagatcgacaccatcctggctaaaatggtgaaactccatctctactaaaaataccagaaaaattagtctggcaaggtggcgcgcacccgtagtcccacctactcaggcagctgaggcagagaatcacttgaacccgggaggcagaggttgcagtgagccgagatcacgccactgcacccagcctgggtgacagagcaagattctgtctcaaaacaaacaaacaaacaaaaacacactggagatgaatgtagccatgtgaatttcagagttctttctcccttgctatttgtcaatatttttacttttttggaatattaccccaacacacaaccattaagtaatcctaagatacctcagcaattttatttttattttttgagatgaggtcttactctgtcacccaggctggagtgagtagtgtgatcatggctcaccgcagctttgacctcccccgctcaagtaatcttcccactcccaaagtgccaggattataagtgtgagccaccacgcccagctacctatagcaattgtatagaatgttgaagctaatacatttgtcatgctgcgtttgaaatacaaatacttgaggaagggtaaggtaagtgtctgagagaatttatttatgtttgcttgtttataccaattgttagaatttttcaattctttctcagatgtagaggaattacaggaccaaaagttgcatggactacaagccaaagataaaataactagagaggaggaaaaagaaaaatgaaaacacttaacatagcaactttaaatgcagtagaacaaataagtctttccaaacctgcaatcaaatctatttaaggatgaaactgacacatccggccacactgagagagtgtgaatcttttagcaacatattcagtaaagtcctggggaatggaatttaaagtataaaacgggcatgatctcagagagccattttaaaagcttcaaatttaacaatggatttatttttatgagtaaagaaaacacaaataaagcgaacggaaattctgccttaaaggaaaagatgtttttttacattttccttactctatggcattggtggcatgcttttcctcagtgtttacctctcctccttttagaatgcatgattcaatgttgaatgactcaaacattttttttttacttttttcttttaataaagttagactttttaatcacaaaagtaatacatacttgtgaaaaacaatattaccctgagtcttaccgttaaactactgctctaaacttgtgtgtatattcttaaattaacgcgataatgtcatgtattataattattatatatgccaattttagtactttttaatgattgtgtagctaaaatatattattggaaaaaaattagaaagtaccagagaatttaatgaaaataaacacccttggccagcgtggtggctcatgcctataattccagcactttgggaggctgaggtgggcggatcacaggtcaggagttcaagaccagcctggccgatatggtgaaaccccaactctactaaaaataaaaaattggccaggcgtggtcgtgggtgtgggcgcctatagtcccagctattcgggaggtgaggcaggagaattgcttgaacctgggaggcggaggttgcagggagccaagatcacacactgcactccagcctgggcaacagaacgagactctgtctcaaaaaaaaaaaaaaaaaaaaaaaagaagaagaagaaaagaaaaatggaaaataaacaccctcatctaggattctagcactagagaaatgggcactatgtacatcttggtgtattttcctgcatcttttttctttgttgcttattttgtttactgaaatgctgcatatcttgatttttaagcagaaatagcaaaggacaccattatagggcctagtctgaaaatgataaataatgtgctttgtgatagataaatctttccaattaaaaaaagacccatcagtgtgtgtggcatttaagtatatagaaaaccattatcaagcaccttggcattcagtatggcatttaatgttcattattttgtgctctgtttttgagggaggagaaatttacttcttattcaagaagtaatttgtgacagtgttcccacaagtgtttagctgtcattagcaagttctagaagagtactgcagcaaacattttaacattctttttgtcatgacaagagagttcatactagttgtggggagtcgattgtggctgcacaagctcagtctcagtgccaagaaaagctaagccgaaaagctgcaccgaggcagtcatgcctggctcccgggatatctagccccaagaggccagcacaggctcgcactgggtgcgacttgggagctagtctgacttgggaggctaaagtgactctgggaagttacaagattcttttcaactgtggttccccattttttcatttgaaattttcatttattgtttcattgaccagagtattttctagatatttttttcagggagggagcacaatgatgattttctgagtgtgtgaatgtaagcatttttctcgttggtgactcacaagaaagtccatcaatacaaaattgtacaacatccttggtcacagttttgttcctcaaaattctgtatctattgcttcgtggttttctggctttttgtcttcagagatgtctgaggcagcctacttttgacttactttttaggaagcctatttttctgccttggtgcaagatttttttcttttgttcttacaatttaaaaatactaccaggatgggcgggcgcggtggctcacgcctgtaatcccagcactttgggaggccgaggcgggcggatccgaggtcaggagatcgagaccatcccggctaaaacggtgaaaccccgtctctactaaaatacaaaaaattagccgggcgtagtggcgggcgcctgtagtcccagctacttgggaggctaggcaggagaatggcgtgaacccgggaggcggagcttgcagtgagccgagatcccgccatgcactccagcctgggcgacagagcgagactccgtctcaaaaaaaaaaaaaaaaaaaaaactaccaggatgtacttatatattaatatgtgtttttctttattaatttgtcttggaattctgttatttcattatttctttaattattactcttgtttcggtttcccttgtttcttccaaacctacatatgcaatagttcctctttatcagctgtttcgcttttcatgatttcagttcccacggtacaatacaatgagatattttgagagagagagaccccatccacataacttgtttacagtatattgctataattgttatattttattattagttattgttgttaatctcttatgtgcctattttagaaattaaactttattataggtatgtatgtataggaaaaaccataggaatacagggctcagtactatttgcagtttcaggcacccactggggaatcttagaatattccactgcagataagagagactactgtaattctgacattagacattcactaatcatctgctcacaattttcttttgctgacatttacccttgcactctaggagagtttctgaagtttgcccccacatattttatttctaaattctgctctttgaaacttctaatacaggtttaaatttggttttcgtttttggtttctttgtgtccccttcttatcctctcttacctctttgtctcctccattatcattccatctcaatctatagctctttactccatttcatgaaggtaatacctcttgtttcctatcaaggatgtacacttttgtctgaattttcttcttattctgtatcatttatgagatctgtctttttcagtcttcggggtaatgatgccctctgcctttctctgtggggttttgagaggcaaaatttctttctgattactcttttaaggagagcttggcctactccagagcttgtcagctgtgatgagcacattgtccttagccctgctcttcatctatgtccctctaactaaatctcctcagacctacagctgtttggcaggtgaatatgcacaatgctggtaaatccccactacctagtggactttcattcattacagaacatccactgtatgaaatgagagcagggaataactccattttttagcaaggattgctaatgcggctttttttacctccaccccaagaaggccactttgtacttaggacaactactcccccaggtgcagcatgctactgcccaccctgcgcacaacccatcctcccacaccctgcccactccactgaacgcaccagattttgcttagttggtttccaggatttggatttggaatctttgacttgggttagaaagagaggactaatggggaataaagataggttgcctcatgaagaggactcctaccaaagaggtttgatgctaggttttctagatggctacatttctgtgtggagtatgagcattcaggaaagaggggtctttcagggacataagcttgctctgtttcagatgcatgacacaagtggttcaccaatgtgcttttcaatatagttccattggcttcgattaggatggagattctgcctagatttttgcatttggtaggcttcctttagtgtttggttaagttctgctctcttctatgagaaaatgaaaaatagaaacttctagagacaatattttataccaggaattcttgaaattggctcatatgacagtgttcagcttcttgaatcaagctcctctattctagtttgcttggagtgaaaccatgaaatggctttccactttaaactctgttctgtgtatcattcagcccctcatgagtttaacagaggggcaggaggattactagcaggacatgattaatcatcacagggcatttgcatacctcttttgtggtatttctctgtgtggtcccggtacatttgtctttctctataagtctcataatgttggtcactgcttgttttcctatgagcaaaacttatttacatagatattagattattttcctatgtggaatgtgtcagataggttttcatgagcactgcatgaatttaagtcaaagctacaattaaaactcctggcattatgtagacattaaagcaatctatttatcctagatacaaattcagtttgaattctgagagaaatttagaaaatttacaaaatttaggacaaaactctgtgccattctgagaccacagtgagagcatcttctttctcatctgttgtgaaagtttgaagagccacactcacaactcagttaacctgctattgatctgtggtttctatagaacagcatatgatacattctgagtgtagggtttagggtccaatgcctggatttaattcccactctgctaattcctagctctgtgtctttaggcaagttactttgcctcactaagggcacatccttatctgtaaaatgaggatactaatagttcttacataagagtcaatgtgaagaacatcagaccatccatatgtagtgtctagaacagtgcctgggacatatgaggtgctctataatcttacctcctgttattgttattattattattggtgttactttattattattagctcagaaagagaacttgtttggcaataaaggtgagtctcgtattgatgtctacctatgggatgggcagggctcaaattctttggttgattatatattgcagcaccttcccattaaaaaatgaggaagtttgatagtttattaactttagtagcacttttgttgtaaaaccaactacatgcaaatgcagaaacatacgccaatagctagaactaaagacctctgcatcactatcttttttttttttttgagatagagtctcactttgttgcccaggctggagtgcagtggtgcaatcttggtcactgcaaactctgcctcctgggttcaagcgattctcctgccttagcctcccaagtagtgggactacaggtgtatgccaccacgcccaaataacttttttaaaaaatatttttagtaagacagggtttcgccatgttgcccaggctagtctcgaactcctgacctcaggtgatctgccaccttggactcccaaagtgctgggattacagacatgagccaccatgccagaccgtatcatcactattcaatgagctgttttatcagaagctaaggatgtactttttaaaaagaatagaaaataatgtgcctttaaattaagaatctgtgatatacaaaatgttgtatcattggatgggaatggtattaaaaaaacaactgaacactttgcctctatgagagaatatataaatattatatataaatatatcaacattatatcatacaataataatatacccttcattatcttatttagatttatgagctgaattacctaagatcttaggtcccaccaaattgtctctgaaaagttatattttattgcttgtggaatcagagtaaaatactaacaaaatattgacggaattgatggatgttcagttcacttcagcacagatcataagcactagaaacctcatggacagatggttaaatattattccagaaataacatgtttaaagttaactttttttattcttcagactttttagcttctcaaaaataatgggatgactggttcaaaagggacaataacctgaaatcataccatagcaagatatctgtcttatctaaggactgaatatgtatgattcttatcgtaatgtaatattatttttccacataacaaaatacataatggcttgtacattataaaaatagttcattgtgagagcaaaatctcatggcaaatttacatcatagtcttttattttcaagtatcatattacagaatgcttagtaaatgtgtagagcattgtattagtaccaaaacaaatttaaaatctctgtttctcatttttcaggatatggcatgagataatgcagtgattatcaactcttttgtgcctaagaatcacctggggatggtatgagaaattcagactcctaggctccatctccgagactgatttagatctaaggtgggcccaaggaatcagtatttttgccaatcactccagtgattcttctcttatgccagtggtcttttgagcacattttgagtaacactgaaataattttgtggagtgcatagcatggtgcgtagcacacataaacattgatttctttatttctttttctttcatttttttttctttttcaaatgacctctccttttcccccctgaccaactcacttgccatattgtgggaatacagtagagcacactaagagagctgcagtttcagagtcagtgaccttgtgggaggctttggttggagggatcagttactgatactatttcttcccacttctccaggaccttgtcctttagatcttttgattattccttttttttttcactctttatttcagactcctctttagactacatattagctcaatcttcatcataaactgttttaaagcaattctttgaaactgctcaagctccaattccatctctgcctctaaccctcactaccaaaattctggttaaaattattgaagaaaagagtgtagagagagaagagagagaaactaaaatcaaggttgataaatgcctacatgtagaaagtgggaaggataactcaagtcaaagaagcagcaacaaagaggtagaggaagctgggtgctccctgtcatcagtgtggggggtgcaggaagaagggagggtcagtagggctgaaatgctgatatttccagagggatgggggctgaggcaaggtctgattggagactgggatagtatcagttctcttccaagctgtttttgtggagtaatagaggtttccattgtactgtgattatgattgagagggtgctgagtatgtggagattctgcatgtagattcttcttccaatgtatgtagatttatgtaaagaacagcagataaagcaatgaaaatgaagtcagtgtttacttacacaaaaagagataagttctgtaaggaaaaaaatattctgttacttgttaaacaatagtaaggcagacttcattccagaccattgctataggtgtaggaccactgcaagggaattttgcagtaagaggggagaaattataggggtggctggtttttcaagagttgactccatagccaaccttaattttaacaatctaattccatgtacatcattccaaatattgcattctattatagttattcaaggccttggtagtatttagctccaaatatatgaagaaaagtggggatttttagctaggagcagggccagggatcgttggatggaaaattaaaggaaacatcagggataaggcggattctgggaaaagtgacctataggattcttgcttaggccagcgggtgatcagatctcacctggcggatggtggaggatgaggggacttgatcgatagcaagaatggaggattctgactaaagtagcctgtcagtattcttgctatgagtgggagtgcagagatgaacgtggaagtccaacaatgaggcctaattgaaaaagagctcagagggcctgattagaatttagtcaaggagagaatctttgtcagtgtgactgagacacttcacagttatagatgtcttggattgtttggtactgttctctgccagttgtttattgataaatgattcatttattaattaagaaacatcaaataagaaagatgttgtttggaaagaactaacaatgaattctaaaaatttgtttgtcttaatcattacgattctagacctcctagtttgttatcacattaaagttggtatttttgggctctctcttttgcacatcaagcctctcattcctaatgatctaattcaagcttaaggaccagaatttttggactttagtaccattctagaaatattcattctaaaatctgaaatctacaattttgaagaaaactatttataggaaactgagagcaaaacaatcttataataacatcccatttttggtttcacttagtacttaagataaaaattcttctctgaatataattttgtcactttttttcctgtgtactttcttaatacagcaagtaactcagtaaaatctgatacaatatacttatttcactagtgaaattgaaagctgaatgacggcgaatttaaaagataatgagggttcttactaccagcgccaataagaaaggttagacattgttaaacgtgatatggtgctatctgcctgcatgttaaccatatagttcaggggacaccagtggttaaaagtaggtaattccttgctgtggtacagtgttaaaaaattatggaaaaaatatttcttggctcagcagtgatcacacattgttgattttttctttctgaatgagtacagttaggatgtgtgtgtgttttgagaaaatgtttggtcttgactttatatataaattttcttgaataataaaaactcaccaacaattttgaaaatgttagaaatatgattaaacttttctttaattaaaacaaattagaaatgtggaacaagtgactgcgtcataaataagaaaagccttttgacccagaaatcccaattctaagaatgtattccaagtatataatcagaggtgtactgatgacttacttatatccaacgatatttatcatagctttatttataataacaacaaacaagaaggaaacacctgtatggaagttaagtaaaatcatagcgctgatatactgacgaagcatttttaatactgtgttttgaaaaacatttaatgacaggcaaaaatgcttatattaggaaaaatctttctaaatgtaagattacaattctattcatataacatacttataatatgtttcatgtgcatatttttgtatttgtataaaaataggaaaaaactgaaattagttgtcttgatgacaggattttaagtaattattatttcttcttcctactttttttaatcttaagtgtattattaaaccagaagaaaaagaacaataagcagcatagataataaaagagtaagataaggtgttttaccaatgaccagaaaagtacccatgcatgtatctgcttagaccttaaagagaaagtgctgtgtatttgagattttttactttggggcccctaagagatactttcagagcaagctgctgctgctgtgtgtgtgtatatgagtgtatgttttgtgtgcttgtgtgtaggggtggggcacacacacgtgtttgagtagaaaagcacctcttaaatacagacagaaaataagacaaagacaacttggagggcaagaatactgaaatatttttagttcatattctctttggaactgatgaaactgtgatcttttctctgaaagctacacacatgtacgaatacaaaaaatacctccaaaatgttacatacaatttaaagaggtttatatgcacacactatccccacccttgagggacaatcttatcaagtagatatatttaggaggcactatgttatagtattttcctagtggcttgctgatgtctgaaattctaccattaacaatttccttaatctttcattgccttttctgcatcttcttttaaactgtaggtatttctaggtaatatattcactattaatgccctgtgagaactagtttggcaggaaaggaagagaataccgtaagcattttttttctgtagatctgtaaaggtagtagagcaccagagatcatttgatgaaaatagctaacacataaataggattatatacacatgcaaatacatgtgtgcacacatgagcacacacatgcgccttatggcaccccattctcctgataaggaaattgaggcacagcttgattaaataacccatctaaggcacacagttatttaataatagaacccagaattgaaatcactttccagagtctgtgcttttactagtatccgatactcatcataaaattacttatattatgaagtctaccttatagatggggccaactccatagactttcttacttctattgtcatttttttgttattcacttttctactcttcatttccctctttcttccttgtgtgatgccctcttttcattcaagattatatagcagttcagtcattccaattcccatgatgtaggtatagctattttccctttgtaggtaggaatgaggctctgagggaagcagaggcagagccctagaatagtagcattgtcctgactcctgtcagtgcagcaacctcaggactaaaaagacttgagctggactaccttgaggggttccattgagatgacacacggaaactgagtaatcagaaaaaagaacaacaacaacaagcaactcctggagtgtgctcaccatagtgggtgttattaagggcctagaacatgggacatttcattagtatgtgaatttatttatttatctatttttttttgagatggggtcttgctctgttgccaggctggaatgcaatggtgtgatcttggctcactgcaacctccatctcccaggttcagggattctcctacctcagcctcccaagtagctggggttacagacatgcgccattacacccactaatttttatttttagtagagatggggtttcactatgttggccaggctggtctcgaaccctgacctcaggtgatccgcctgcctctgcctgccaaagtgctaggattacaggcataaccactgcacctggcctcagtatgtgaatttctatgtaatattatgagttaatggtaaggttattcattatgacttagtgttttttagagccagcatattgtatttactgctttgcactgcagtagcacacatttatacttcttttggtaataaaagcaatttgtacttatttggtcacacttaaactatggtgttaaaagaacatttgtaaataagagtcagagttttataattgcagtgttggagaatctgtctacacttttgaaagacaatctttttcttgacactgttttcaataaagcatgtattttcatgtagaaacacaagacttcttgccattttataggacaactataagttatggagtagattcttaacaaatatgtcaaaacttacatattttaatgagagttttatcttgaaaaatacatttcaagaagtctaagaaatgtgttgttatgcaattttatcatgtggaaatgccagagtgtacttacacaaacctagatggtagatacagctttatttataatagtttttcatatagaaaactaaatgtctcagcatcatgaccaaatattagtcatttccctacttgatctgcaatgccaatatcatgtgccatacatcaagtttctgtatatgctccttataatcttatgggaccactgttccatatacagaaaatgcagtctgttgttgagtgaacgcccttattcagcacatgactacatagatttcttattatatcacaatatcgcatactcaaaagctgatctggtccaacctaacaaagcttgaaagcaaatctcaaaaaaatcaaacttttccaagtaacttaacagtatcccattattagaatcatgagctagttctaaggaaaaattacatttttctatcccataaaaggttattattttttataattgtatacataataaaaccatagaaaattttcagcagccactaagtcttctcatgtgtaccaaccagacccactgggttgccctgcagaggtcagtctgttccattgctacctgggcaaggactttgggcctctcctttagagccaggattttcaacctgtgggtcacagtcctcaggatatgttgtaactcattaaccctcaaaatcaccttccgaggtatgagcagagttattcaccctgctcagaaaactgtgttgagaaatgttcagaaacttgcctaagatctcatagctggcatttggtggaacaggctcttgctatataaatcataagatagaaccattatcctagagaatgtggtgcctttcttacagagtcatgaagtctcagggtaaaacatgtggcttcactcagggagccttttctaagttttaagtgacagtgacacagcaactctttgcctggctcttggaacttcattgttatttgaaaattttaaagactcgagttctgattgactcagtaaaaaattttttctctgaactacatagatatacaaaaaagtatgcaactaattcttttcatgccttcttgcaacagatggtgaatatcatataaaaatgagcttgttttgagagtttctacttactgtgagtagatgaatttttcctcagggtggatccagccctatcactagttagtgagtatgcagatctagtgagctagagatctgttcagggcagggtagaatttctaaggactgatgctgatgttaaggagtatagtgtgaagagataccaacaaaactaagcacaaggtgacatgaagccagaggacgttgaaaccttgcacctggaggcaagggaggactcagggggtcaggtagtaacctgagaagactggaagcaaaccagatcctggaagaaactgatgatcccaaactcatgtgactatagggctttctgatcccacatcacttcagaataaatatttgatcctgcattttgtttcatctcatacatacatgcctgtacccagcatgctttggctgcactggcttctttctgctcctcctgctaccaagcccattcttacctcagggcccttgcacgtgctgccctgtctacctagaatgcccctttccctcatcccatatatacacgattggtttccacacagcagtcaggtgttagtcaatgtcacttcctcatccatcctgtctgaagcaaccctgagccaatcactctctgttacccatcccatctcacagtctgttcaggactcaccattctctgaagtcatcttgtttttttgtgacttacttaaaggctgagtctttctactggaatgtaagtgccacgagggcaggagcttttctgtttaattggtcattatatccccattgcctagaataggaccaggctcatagtttcccaatgaatgaatgaacaaatgaatatgtgaagtcagacacaaatgaagaaagggggcaaaacaacatgtaattaaactctgattaccaatctgaaagtaaggagtctgctctgtattgggtgcatttcaaggcttttgcattgtattttcagtgccagatgtcaacaaagggcttataaatacttgttagataaaaatttaatgaaagatgattttacatattccagtctcactcagctgaactacattggtcctttgtggactaagtaatccaggcagctctgagagcaagcagtctttaggggaacagatcatacccacaagaaagttgagggagcctccgttaagttaaaaacatttcgtttattagtaagtcattttcagcatataaattaagtttaaacagtcatttttttaacttaatagtttcatcacagccaaaatacaaatttttaaattctcattggcagtcctaattggcatattgtaagtagtggaatccatttatagactttaagtatgtgggcttgatgtagcgaatggaatctgtaattagcccaggattggaacatggccttcctcaattgtgctaagatcaaaagctaatagctggagtttgggacagctgtgtcacattgaaaacagactaacctccttcagtttcctcgctggaaaatgagaggttgagataggtaatgaagttgaatggataatgctactgctgtattcttgtctttatgtcttacgtccagtcttttacacagatccatttgtacattaaggttgtcagaagctatttgttattatttgtgataatttaaaaagactagcaatctggataaaatgtgggttatcccctccttttaccatctcacatatcacactgcatcactagcttcttagcagcctcttttgtttttatcacatttatctaggttttttctttccttggttgatggtagtaagtgtatgcttgggagagactatttattctacagatgtgcctgggagcctgaactcctgcaaatgcctgtgaggccccctagagtggttggcgagtgacacatagagattgtgctttgaggacagcaaactaagttttgattttggggcatgctaggcaaaatttaccctgaagggaaagaagacttcagttcaaacttccatggcatgcatttcaataaattagaaaatataaatttggctaaatatttcttctaaatattaaagaatgaaacaaattattctcaattatacatataaaatatttgttgcatagacatagaacactttaattgttatatgctagctaatttatgcattatcttgccttgtgtattcaatatttacagtacttattcacactttattgaccttggagcatatcaccattttacattataaagctttatactggccaggcacggtggctcacgcctgtaatcccagcactttgggaggctgaggcaggcaatcacgaggtcaggagatcgagaccattctggctaacacgctgaaaccctactaaatatcaaaaaattagctgggcgtggtggcatgtgcctgtaatcccaggtactcaggaggctgagcaggagaattgcttgaacccaggaggcggaggttgcagtgagccgagatcgcaccactcactccagcctgggtgacagagcgagactccatctcaaaaaaacaaacaaacaaacaaaaaaaaaactttatgtgcttgcttctttgaaatatagatattcataagaaagagaaagagtacaggatatgaaggtcttgttgaggaagcaactgtgtattttacttttcctttttccccatttattttctttttctcaattaaaatagttacataagaaaacacaaaaaagcccaagaggattttttaaaaattactcttcacaccatcagaaaataacctcatatgaccttaaagatcatactaaacatactattttataatttaacttttcttcgtataaaatatgaataatagtttttatttaatgaagtgtttttctaggacatgatttttaataaccagatgatatttctcctatggctctcccataacgtaaccccctattatgggatgcagtataggtaggtaagaattggagtctggagcagatatcctgccttttactaactgtcaccatggccaagtaatttttccttctgttcctcagtcccctcacccataaagtggagataacaatagtattaggttttattggtttatcttgttactcatggtatttaaaacacttagagtacttagaataacgtttgagaggctttattcttgaagcattttatcctattactatctataattctattattctataattacctggcacaccatagtacttaataaacattcattattatagatactgttttcacttttttaggttatagtactgtgatcagtatctttgtagaaaaatactttttctcttctttatttccctaagatacatttttacaagtagaatagcatctttgatacatatttctaaacaccctgcatagacattgtaacattgtatactctctatggcactgtaagggtgagtgaatttttggaagtacatgagaactgcctcagtgagttttgcagttctccaaaatcactgaaattgaacaattgagacttattcaacttactcttcatttcaatatttgtatcatcttcagcaaagtaacgaaaaattcaaagcatatgtttactttgggtgtgtttcaaatattagtctatttttgcttgagaaaatatttgtattgatatgtaagtttgcatttgactacattggtaggtgttttcccccattgaaactaatattttctattttcaagaaaaaagcagcaagcctcgcagcagtcaatcctccagaacctatgctggtggaacagcctcggccaccaaggtcagtatttcctgaacacgaaaagacccctactgtattctacagggatatgattagtgggtgggcctgtaggaatggcaaacagtgtccagatatcactgaaggttttttaacaaagtatcattctgtgctagaagagagaatataatttcttaataatgatgtgaatgatttaaaacctagaaaaccatttattgtataaatcttcttggcatataataagcgttaaataaatattaattttatgatgactatctgcagataatattaaacttttgaacatactgtgagtaaaaacgtatgctcccactttagaaaataattcatatcctcctcatgggcattaaccacaccaggcgtctgctagtgctttatgtaattatatcacgtaatcccctcacaatcttcttcttattccttatacctgaggaaaccagagctcaaggaggttaagtaaccttgacaagctcacaacgccgtaagatggagatagggcttgaacccaggtttcctgttaagaggtctttgacaatgctggtcttataaactccatctaagcaatttttggtaatataacccttcaaagttttgcaactataaaaatcactgaaacctcacctttcgaggcaagaaaatggccaggcacagtggctcagcctgtaatcgcagcactttgggaggctgaggcaggaggatcaccaggaggatcacttggcccaggagttcatgaccagcttgagcaacatagtaagaccctttctctcctaaaaaaaaaaaattaaaaattagccaggcttggtggtgcgtgcctatagtcccagctactcagatgctgaggttggaggatcacttaagtctgggaggtcgaggctgcagtgagctgtgacagtgcactgcactccagcctgggcaatagaacaagactctgtctcaaaaataaaaagaaagtcaattttataatgttagctagtaatttttgataaataaaattgttttgggagtccacggtggcagatcacgaggtcagaagttcaagaccagcctggccaagatggtgaaaccccatcttactaaaaatacaaaaattagctgggcatggtgtgtggtggtgcgcacctgtagtcccactactggggaggctgaggcaggagaatggcttgaacccgggaggcacaggttgcagtgaccgagatagcgccactgcactccagccttgtaacaaagtgagaccctgtctcaaaaaaagaaaaaaaaagttgttacattcaacccatttcaactttgtggtcttttagtatgtccaaattatctaaaacctcaacctatgtttcaggagtatctatacaactatttaacgtaagctttttttttctttaaaactggtggctatcttatggaagtcagactttctcatagatgtcattgctcaatgaagagttagtattttcgtgtcactcagagttctgactgctctccaagtcctgatggtgcccaaaccaataatcagctgagaagctctaacgctaaataccatgccacttaagacccgtgccttttaaagaccttttcaaagctctctgctaccagtcaataaaaataaaaaatcattgaaagaccatgaatcgtaaatacagggagttaattaacatttggaaccacataaattcaaaactgaggtctgctctttgttagccattctttactgctgctggagacacacagcattcactgatggccactgggtgagagagttgcttacacaaacaaatatgagttggatttcctctttgccactattatttgtccagtcccactgagcttcagtttcttcatcttaaaatgagggttggacttctcttgtcagggctgttgagagccttaaatgaaagaaaataatactaacacttaggcctggccctggcatttagcaggtgctgggaaaatggacctctctgtgattgatcatgttaatcttcatattctgttatttccaggtctccaaataaaagagatcttcaactaaaaaagattaacttttattgttatcaggacttgtatttagcatacacttaattatgccactaaaaatgatacacctcattagcaaaacacccacccagtgagatttaggagttatttgtaaatgttcccacacttgctattatctaaacttttgaaggtttagtacatgtggaaaaccacacccagttttttcttgaacgtaatcataagaatcagaccctttccagtttcttttttttaacgtagaagttaccctatttttctgagatgggatagttataaagatttgaacatctccccacaaaccctgttctgtcttaagagctgggaggggcagggcataatgggaagtggagatgatttagctatatgtttattgctttagtatttaacagcaaacatgaattctttttttggctttaaaaacaccatcctctcccatttccattcttatgtctgctgttctctttctcaccatgcttttctgactcactttcctttgccagtttcctaaatgtgagtctccagggtttgattcttcaccccttccgttctcatattttttacttttataaggtgtgaacaaacgtaattgcttatttcttcttttgatgccagattggaatggttgtaactcatgcattatcccttaaggaattacatacccatgcatcatttagaaaagctgggggtaatagataacttgaagccttttattacacagttatcatggcacacacaggcaaaataatattctccaacacattctgaaaaggcgtgacagagtggtagatagaattggaagtgagaactagtctagttttcttgattctggaaatagttaatttgaaattcaaaataagtgataattttacattattaagaaaactttaaagttttaaaaattaagtacttaatttgaagcatatgtgtagctatgtattagagaatggtttctatatattgtagaattgttttatgagaatgcttacaaatgaggaattgggccctcaaataatatcccttctgctatgcagttttaggtttcaaagtctaatgctcttaagtgatgtaaatttttctaattcaaaataattagtgtaaaatatttgttcttaaaatttaatttttggtaaatcagtagtgaagatgaggctgcggaaattatacgactcttactaaagcctatatgaaaatagttgtgatccataaccagtcatgcaattttattctggaagacttgtcagacaacttctatttcaccaacctgactgttcaggtgaggaaacgaggttcaaattgcattaggaatgtctctgtagaagaccatgctattaagaagatgtatggttaaagttgttagttccaattagaacccactctgactaagccaaaaaggaatttctaaggaacggggtagctggtagagaaatccaggagagtacagcagaagaaatctaaagcctacagcagtactaatgcacagtaacactatgaggctttctcctgctgccaccacagctcgctcctgtcacatgtaggactgggtgccagaactctgccactgacaatgcagaagactcaaatccctattataacatggatttcctggtgggcagcagcctgcacacgttgctcacttccagctcattcttgtttggcacatctgattggccagtgtaaatcacatgccttcaccctctccaagggaatctgggggtgtgagtcttctggatcctactttgggaaggcatggactgtaaggcaggaaattatcaatatgtggtgaggtttttcaaatatgtggcctcctgctgaagacagatatccatgacaaaggaaaacaggagaattacctaattgaataggaaaactacaatgacaagttattcagcaacattaggcctttcaaacagaagaaagcgcaaacaactttctcccagcctagacaggaggagatctatgaaggaataagcacctatcagagaaatactttgtgatttgggtcctgagtctgccataaatagctgtgctgactttggcaacacagctctctcccaggttcttacttttctcatctgtaataggagtgagggtttgggttaactcttcagtactgtggagggtatgctgacattcagtgccagcatcagcccacagtaccctcctaccagtgtggtttgtgagatgactgtgtgttagacaagaaagcgtttttattttaataattatcttatattttaatgtgctataaaaagtaaactagcacatcaactcctaatcccatggctttttcatttatagtgaggctgaatttaaggttaaagtaaatctacttcttttaaattaataaacataatatatctatggcaggttaaaaaatattatataagtaatgtacaaataataccagggcttgagaaataagatccagagcagtaattctcaccttttaatgtacataatgatcagtgtgggttttattaaaatgaagattctggtttaggaagtccaggatgaggctgagttctgcttttctaacaagcttccagtggatgtgctgctgctgctttggcaaccacatttgagtagccaggagactgaatagtgcagaatgtgggtagtttaggctacccataacctaacatcaactagagaatctgattaaaatgcagattctcaggtttgaagccaagaaattctgttcgccggggtgggggaagagcccaggatttcatatatttaataggcattcccaggagttcagatgcagatgatttgagaaccacactggcaggaaggacaccctcagggattgtgatgccacagcacagcagtggaactacattgtttgccttcactctaaggaaaggagccttttccacctgacttacagcagaagaatcttgcgaaaaaaatttttttttttttttgagacaggtctcactattgcccaggcaggagtgcagtggtgtgatctcagctcactgcaacctccacttccaggttcaagcgataatcctgcctgaagcctcccgagtagctgggattacaggcagcaccaccgcacacagctaatgtttgtatttttagtagagacagggtttcaccatgttgccaggctggtctggaactcctgagctcaggtgatccacttgcctcggcctcccaaagtgtgggattacaggcatgagccaccatgcctggccagaaaatttgttttataaccatgtgatactcatctgtactcatcaggagcacagaaatacattcagagataggcatcattgagctcctaactctggaagctgtggggcccagggcccatccctatggggtgtggcccaaattagcaccctgtgctgtttttgtcacaggagaaattaatgtcagtgaaacctagatgagctttagtctatttttaaaaaggaatgacaatactaatgatcaacaacaacaacaaaaagggattataagctatatatcaagaagaattctaagtccgggtgcatggctcatgcctgtaatccagcactttgggaggctgaggtgggtggatcacttcaggtcaggagttcgagaccagcctgccaacatggtgaaaccctgtctctactaaaaatacaaaaattagctaggtgtggtggtcatgcctgtaatcgcagctactcgggaagctgaggcaggagtattgcttgaacctgggagtggaggttgcagtgagctgagatcacgtgactgcactccagcctgggccacatagcgaaatcccacctcaaaaaaaaaaaaaaattataaggacagggtcttctgctctggaaatgtagaatcttaaagttggaagggctcttatttcactagatttttgacagaaataaaagacaaaaaaataaggtagctgtgaggagtaccttgaaaggtacatcagagggccctaactgcctggctgcctggtggggtacaaagctgtatggatgagttcacctttttcatgccactggcatcatttgtcatgactcgacacagcactgtccaacctgtcctgaggtctgtgttcctcaacagtgaccaacactacctccttcactcacaccccaagttcagggttcagagcctttaagtggttggtgtacggcttttcatttattttaaaattttttataattattttctctaactttatcattcaatatttattagttggccttctatatgaaagagtggcttaacccctctattattcattcatttatttacagcagtatagactcatgaatttatattgtattcaatagctcaaatctattctaattttgaagtttgtaatatactataatataaagtaatcgggtagaatcttactgttaaactactctttaaagaaatccattacacagttttaactgcatttgcaatccctggttgtagtcattactaatccactttatagtttcaaaagaggtcttcgggggagatatttgcgaagtgcacccaccgtcgttgccttattctggtagtcacagggtgacagccagggagcggtaacctgtaatcagccggcggtgcgcagcccacacagcacgtggtccgcacacaggctgcgttattgagtgagccagtctccagatgccaggcgcatgacgagtccacgagcgggacctccctccccacgcatcccgggctcccggggcggggccgccgggcagggggcggggagcatcctgcgtcgccttcccgggaccgccccgccccgtcgcactcagagagctggctggagctccaagcggaaaccgcgggagccgagcccagctaggaatgcagacctcctaaaaccaagccgaggactgcggggtccggtgtccacgcagagtgagtactgtcttccgcgctttgctccaggccgcgcgtgctcccgggtctagggcctgtgcccccggctacctgcctgcgtgtccggggcctggtccctgcagcggactccccaggctcgggacgtgcgcttttctactatcgcgaccctggcgataccgtgcgttctgagtttaactgtgtttcttggcgactctcctccttgtcggtaacactgttactgccccttccgccgggaaatgtatctggtgaccgacgcgtagggttacaaaacaagggatttgtgtggcccggtacaagtggcccgagacaatggcccgagacaagtggcccaaaagaaggaaagcagcagctatgtcagtttggtttggccctttatctctagggttggagatagatctcctcctccccagccgtgccgccaccctgtgtgacctccgttttagagcgtgagctcactctgacctttctgcgtacctgatacatgctggtgtggcgtggcaagtgttgtaacctgtttcggttccatttcctttacacaacctgagaggttgtagaataacatcactgagggttactttgtgtctatcttttaagaatacaaagtgtttcacagagatttaactttctcttctgtatggttagggacccggcattctccacttaccacaggcagggggaagttctttattcccattgtacagcttcagaaaatgaggcagagagttagacagcttccctaaggatcgggactttggggcctctctagttttctaggaaaccactatgcatcagaatgacagaaatgcttaatcagcagctctggaaagttcctgctgtttcaatgtttttcagaggaaaaacctctgcattgcagggaagctcaacaaggagtggcatctatgttcaaaaggggaaagtctatttcctaatcagcactagagtttatattaatatagattcttctttctgatgaatgtattcgacttttgtgcactgatttttcagtatctaaaaggaaattgagttgttgggaatatgctggggagggtgtgctgcttgggttctaggaggcagtatggattaaaatgaagtagtgaaatttagcaaaatcttgctgaacaaggaaaggccacaccgtagactgatggagaaggaataagccacctatagcaatgaggctgactagggatcccgttgtgtgcagcaaggactcctggtgtctattacgaatcagcatgctttgtagactgtgaacagtgtttatgaagcagcacattcaagtataaatattggctgtggttcagttcagatgcttgaaagaagagtccgaatgccagagagtagttgattatatagaattagtggggagtttggttccttgattattctctggcagaattgactaagtataacatctgtactgcaatgaaacataaaagctagtacgtaaagtaacagtttgaaagaatgaaaccagaaagaaaaagaaacattttcttttcatttgaataacttctgaaaatcagctgagtatttatgtttctattcatgtttataatcacagttaactttaagtgatcactacttcttaggtggaaacatttacttttctcaaaatatgaactgtcttaattagtcctattcaaataaaaactccataacccatatcttctatgttcatatatatctttgtatctcctctttcattataccttataattccctcatttggagatcatacgaatctgggatatctgttttagcattggtgtgtctaacctcatagaacatatcgcatagtttttctgatacatagaattagcaatctgcttactagaaaattaaggaggtcttcatgaacattgcatttaattttttctctatggacgctcttgacttaaaatgtcatcttaatgtttctcaaaaggcatagtcttggcattttgggtgacaattctgaatagatagagctctttgctcgcactgaatgtcagagcgtgaccgaaagcactttcatgcattaaatgaactttggttgggtactacatccaattttttaaaattgaataaaacatattaaaagggctagggacggtggctcatgcctgtaatctcagcactttagaaggccaaggagggggatcgcttgaggccaggagtttgagaccagcctgagcaacatagcaagaccctgtctcacaaaaaatttaaaaattagggcatggtggcgtgcacctatgtggccccagctacttggaggctaaggtggaaggatcagttgagcctgggaggttaaattgtagtgagctgtgattggctgctgcactccagcctgacacagcgatgagactctgtgtcaaaaaaatatatatataagaaaaaaaagaaaaaaaaagaattgagccataccattttgatggaaagccataaaaatattagtcaatgatttccaatttttaaggccactttacatctcctaagacttgatggctttggacaaatctgtttatttgaacattgcgatttgggcagaaactgtgtaatcaatcatacgttagcaaggtgacattgttggacccatgtgctatagtactctattgtctaccctaagaataataatggattattagaaggtgactgtaataggttctagtaaaagaatagatgagctaatctgtattagaacatagtattaatagttctaatattaatatttatattaatagttcaataatagttctaatgtggctataacacattaatagtaacagctacatttactgaaaacctatattctaagcacatacggagcccttatgtgctgtgatgataatgtagctatgacgtgaaactcctgttatgctcgttttacagattaagaaaataaaaactgccatactatattgttttcaggacatatttaacagcttgccatgaacacttttcaaagaatgagcttcagtgctgaaaagttatcacacactaaattcgcattttgctacagtgatttcctctctcagaatgaaacttttactataccatgagccccttaaagacagaatcccctatagcatctacttcattcttccacatagtaattgctcaatatttattggattggaaaaaagattagttttatcgtatatgaatagagccctaagatgctgttacattaatatagattattcctggttaggtagaatgataaaataatattcatttttattctctaggatttacaagtagagtttttgaagtttatatctctttgtgctttggctaaagattatagagtggataatcaaaaaatatatgagcaggaacccttttttctttctttattttttccctggagtttctgcaattggccagacgtgagctaggcatacagaggtatggcccatataacaaatataaagagcaatgtaaaaagtgttaatggcagtgctgtcacgatactgtaaaagcggagtgaaaggttaaaggaagagggttgggttaagcttgggagcctgtttttctgggaatatacagtagaaatatgatttctttaaagaaatctgcaaccaggaggcaaggctaaagcagaaaatgccaacagctgcagatcctaagactgagatgttattctggtggagcacagtcagttaaaggcaggactgcttataagtgtaaatacatccagcctcccagtcattggcttgcctgatgcattattttcttaatctcttctcccgtgctttcccctgagacactccagtttctgttgcacacctttgcatgtgctgtttgtggaactgagagttctggttaattctaggacattctgataagatgttcttgctactctcccttgtagacagactggatttccatcaggtgtcagtaacatctaagattttcattttgcctggggctctacgcagtttaactggagccgccacagctgattgggtgtgtgttgtcagcccccaggcaagctctgagggttacatttctgctgctcatatttctgtttctttcttcacactcaacccgaggtgcaaaagtgcaaagacaagttcatcaacaatcagaataacctgccctgaattctttctaatgattcattttctcaatctagtttctaatttcatatttggcagtaccacctggtaaatacatctccttagctagaggaggaaaacttcacacccagtttactaccttttgtcgttttccctggttcctgtcaaagttgttgcttggtctgttttgttgccattgttttcctacagatccctttacaacactctgttttttaaaaaactaacatttaacttatttgaggaagatattttatatgttagaaaaaatgattttgggtctgcttttattgaattgttaactttagttaaccttttttttttttgagacagagtctcgctctgtttcccgggcggagtgcagtggcacaatctcggctcactgcagcctccacctcctgggttcaagcaatttcctgccttagcttcctgaattgctgggactacaggcacgtgccaccacttctggctaattttgtatttttagtagagacggggttttgccatgttggtcaggatggtctcgatctctgacctcatgatccaatcgaccttcacagggaaggtctctaatgaactaaaccaactgatttcatggcccacgtttggagcctgagcaaggtcatggaccattgatatttcactcaaagtgccgtaacagattaaagcgcttagtatgcaagtattctccctgagctctataatggacgaggtcccccataccagtgacttaagagtcaaagacctagaccacacctcagggcctccgagttgccggggaaagtgtgagctatgagtgctgttcccaccaagaaatcaggagcttacctcctgcacatactgtttccttattaactatactaacagagtggccagggaaggtagcgggaatagaatcacttatacatttttcagttacatgtgctttttccttattgtgaatgtggaaattgtgtttatatccgatagggaaaatgaaacccttttatatgactccattactaggctaataatcatcagcgtccctgaatataaatattctcatgctaacaatatgtttaaacagtgcctcatatgcttttagacatgcgttattttatagcattttattttaaaagttgttcaggtttagagaggtgagtctgcatcagggaactgaaactggtaaccagcatttttattttcaggattcttccctttcatatgttccatctctttatttttctgtgctgcattgtgataatggcctcagatctatcttccagtcgcttaagtctctatgcagttatgtgtagtttaattttcacctatttttgatttggggcttttattttttcttttgtgtctttgatttttaaatttattaaaagtccccttcagatttttctattgttttagttacttttttctttgagacgggtcttgccctgtcactcaggctggagtgcagtggcacaatcacagctcactgcagcctgaccccctgggatcaggtgatcctcctacctcagcctcccaagtagctaggaccacagtgagagccaccatgcctggctcatttttgtatttttgatagagacagggtttcatcatgttcccaggctggtcttgaattcctgggctcaactgattcacctgcctcggcctccttctcacctctatttctttcttcactactcaacccgaggtgcaaaagaggataaacaagttctggattacaggtgtgagctgctgcgcccagcctgtctttaattcttgaagtaaaatttctctatatttgtaacaatgactctcccgcatgctattttacttcctgattaggttgggaaatgtggcttgaaattcaccttcaatgaagattgttttccatgagagtcctttttcccctagttgtagatctgcctctaccaagtggtttttagtacgttgctgcctgtggtcattcagattcaacagcgttaatatcttggcttggtgcttccactatacagaaataaatttggtcctgagtgcccaatggcacaagtttggaatttatttttctcatgcatatgcatttttacactatggctccagccagaaagaaagctgccttaccattattctggacaggtgggcagttgtcaggcttatgtttgtggatgatcagttctgagtagcttctggttttaagctagtaactcacacagggcctgtagccaggattcctttctcatttagagaattcaattcctagttcccaatgttatatctgtttctgatatccccgtgagtcattctgtctcagccttgctcaccagagacttagaattccctcccctttaggttacttgggaatttctcttctttaaagcttacctactattttattttttatgttaaattttattcagtattctcatgtctggaacaaaatggagtcttttattagaacacagactaattttgttagacctgaacaatgtgtttaaaatgtttgaagcctttaagttggggaatacatgtactagcttgtcacatgcttatcttatcatcatatggccttatgatattcatactggcctgatcttcgtaatgatctgatgatattcatatcatctacacatgttttcatttgctttttagactcctgttctacagaaatagacatatattatttctgaaaatttaattacttgaccatttgaaaattgcatcctgttttaaaaaatatccggcagctgagctgtatacttggtgtataatgtgtgcagcattaggggttccccaatattgttccagaatatctacctataaaatgatagcaatattgggatcgatgatgtctacaacaactactatttccttgtggtgcaagaaaggacgcgggctatagagaaagtcacaagtatcagtgttcctggggtttagggacataagactaaagaggacaagtattattgaggtacttcgggcaagcatgtatgcctttgtcccagtctttttagggaacatttaggttcttcagtaactaggctagcaatattagcatcaaaaatcttattttaagctggctggaaggtaattttgagagtcattttgcaaatttatcctaatatcttatgtgatcctttcttttaaccaaatgtagtgtgaagagacagagattgtcaccaggaatagagcactaatgtacagcaatagacggagaaaatggtggtcctttcaatgagccactacaaagccatcttgttttaaattacctaaagtgattctccatgtctgggaattttagaattacgtgagaggcttacagctttttaggcacagacctccttccctcttcttcttgccctttttcctttgtatgtttctaagtgtctatgtcccccttcctctcccactgttctaactactgcctataaataattctcttccaggacctttctacccgttatgtcaagaaccactgagctacagtgttaatgcttggccagttacatgcccagtggcttgacattacattcattgccagcaataattatgaacatttttagcctaaatatttaaatagttatgaattcctgcctattctacatatagtttcaatgattagaattaagatcctgttttcccccagcaatattataaaactaaatatcttccacatgatatcttacctaaccttgagtttttaatcaattagttaattatatttacttgggattttagccctaatggtccacatcacttaaaaaaaaaaaagtctgtcctctgctgaatattcagagtttaaaatggaggtttaatctctcttggctgttgagtttgagccttctgttggtttcaataatctttaattattgcagtattgtgtgctgaattattctcacagtgttattgtggcaggcctggatcttagcccagaaaattagaattgttttcttctccagcccttctgacaatcatattttttacctgttcacaggtttccaaagattaaatgtgatcaacactgatctccatattttcaataaaatctttgtgaaataccacttgatttccagttgaagtagtagtaaaccatattttccaatgtatgtgtaacttctccatatcctactatatataggtcaatgaactgaaaatttggtaccattcaacttgggaagacaaccaatataaaacaaagaaaaagttaactaagaacatctagctattgctgataatctgaaaaaaattctggaatgctctgggggcaggattcagttagcagcacgtatatagtttagagaaactctacaggatgtagattttgaaaataaatagaacaaataaatttaacatttattaatttattggacaactactgtgctaagtgatttacaaagatttcatttattccttgtaagagttgcatattttacaactaggtaaggaggtattgcagttttataaatgaggagactgagggccaagagagttcaaataacttaccctaggtcatacaaatagcaagattctatttgattctaaaattcttttcagcagactagtcttacaaatcctctgttcagtagtttgtatctaagtagtttaaataactgagaggggaatttgtttcaaacttaaacactggaaatcaatattgtgctcttttgttatatgcagtatcttaggactctgaaattctaatgggtgaggtttcccacttgtctgaaagagagtattgtacactgattggattaggagataatagtttagttggcagtttctttggacatttgatatgggcagtagaaaggaataaattagccattttggaatatggtgaaaattaatagtaaaattaaatagcactaactgaaaacacccttatcctataggaaataggacacccttaccctataggaaactttgcttagattgaaatataagcagcagtgctcatatatttacagcagtttcaaattcaaataatcctactttaaaatgtgttctatctattccactgaattgttatctgatgggaaggtgaatgtaatgcagtggaatgtatcattatctgaaacaggcatggagcagtttagaaatttctcaaggtcacacaatttagcagagctgagattcaaactcaagtggcctggctccaaagcattcttctaaccatgacacaactttttttcttttcttttcttttttgaaacaggctctggggtcttgctctgtcacttgggctggagtgcagtggtgcaatcacgggccactgcagctttatgtccaggctcaagtggtcttcccatctcagcctcctgagggcctgggaccacagtgtgtgctaccatacttggctaatttgattcttttgtagagatggggtctcactatgctcccaggctggtctctaactcctgggctcaatcaatcctcccacctgagcctcccaaagtctgggattataggcatgagccactgtgcccagcgaccatctctttaatatttgcaaagatgatacaacactgcctctttaatatttgcaaaattaaacttgctgtcagtatacatttggaatttgttcttcttaggtggtttccagaataacattttatttcactccccattttcatttggttatttgacaatcagcttggataagagaaccttgttacagttctcatgacgttggtttttaattaagaatattcttcagtgaaaggtgggctggctgccaggcccatctctcagcctcatgtttggctctgtcttaagatatcctcatatgttcctccctactttgtgttagaacattttgagtctctcatttctgtggagattgaggcttgcagttggttttgcagcgtaatgcacataaaagttctcatgtttttcttgctctctgttcagtttacacctaaggaatgatgcactatggaagtagaaaggctttctggatgattgttcagcagacctcagaatttctcttttttttttttttttgagatggaggcttgctctgtcacccagctggagtgcagtggtgaatcttggctcattgcaacctctgcctcctgagttcaagtgattctcttgtctcagcctctgagtagctgggactacaggcacgtgccaccatgcccagctaactttctgtatttttatagagacggagtttcactgtgttagccaggatggtcacgatctcctgacctggtgatcccccacctcagcctcccgaagtgctgggattgcaggtgtgagccaccgtgcctggccagatttctcattcttataccataatcatatcatcaataaccatatatgctttagatgagctctaatctgtcagggttgttacaggtatatgctcttgctaccaagattcctcttcatttgatggaacatggacctaaagcaaccatgcatttgaatccaaagaaaatgccacaatgtaaataatgttgcaggttctttcctttgaggaagataagcaagattaatgtgaaatgtgtaactctcaaattagtgctcaggctgggcatggtggctcacacctgtaatcccagcacttcgggaggctgaggtgggtggatcacctgaggtcaggagtttgagaccagcctgaccaatatgtgaaaccccatctctactaaaaatacaaaaattagctgggtgtggtggtgcacacctgtgtcccagctacttgggaggctgagaccggagaattgcttgaacccaggtggcggaggttcagtgagccaaggtcatgctactgcactccagctaggtgacagagcaatactctgtccaaaaaacaaaaaaaacacagtggtcagcacagaattactctgtcattctgaggccaagcaagaaactttcgaggctgttggcattcataaaataataaaaatcactgctgtctattgattaccatgtgccaggcaccaaatcatgcactttatatacataccctcatttaatcctcacgctagcttatgaagtaggtatctttttttatatacattaaatgaatttaaaaacctcactttggaaggattaagcagcctgcctgtagttgtgcaaccagaattaggcctcaggtctagggactccagagctcatgctcttaacctctgtgtttcccaattgaacatctgtccttaacacattatttaatgcccttcactaaagtatagcatataatattagaactgcagaactacggattctcaaggccaacagtttttacaaataaagaaaaggtgcgcaagaaagattaagactccaagtcacatggctagtcaagtacagtcttcctcatggctcctgtagtgcctgttacagaaattgtttgattcacaggcttatgtaaatcctcacctgtgaaaccttctctagggagggacaagaagcagaaagtaggctgcattttctggacctgacttccctgttttgcttttcttaggcagccagagattagacatatttggaattatttcatgcatcaagagaagcaacggaatccctagagacatgaatacaacttcaggaaagaaatctgcttttctattctttgagactgacctaggctgtgtggctagctcttctccttacttacaaaattattatcccataaaaagcactggaaaactagagtttggaaagcaatgaaaatgaagcagttgcctcgtagaatggaagctcaacttcatgccttaaatgtggatttttttttctaagttcttggggtggtcggtatcagagctcataatcagaccctcagagaatatggccagtatccttctagcttggattagatcacagatcagctgtgactattgtcacagttgctaggcaacgtttgtatgtttattcgaggcctacccacatgttgcatcagaggccaaagctcatgtgctctgcactcctcaaacaagtagagctctttatttttaactaaactgtttccttgtaatgtattttatgaatgacagcctactctgccaagctgtagttatcttcagtttctccctagtagtcccaattctcaaatttttgcattcaacttcatctaacctgttgcattctggactgaatatctctggtacttcctacccctaagtcttgtgcaagctgttttgctcacctagaatgcctgcctgatccacctctatctacacattttgtaaaatcaagatattttgttttaatatttgatatgagggcgtcaacttgttacagcaaaaagttcatggacattattgtcatatctgtgttcaaattcagctctgccccttcttaactgtgtaatcttagataagttatttaacttctctaagcatcattttctcattgataaaatgcagataatgtttacctatcaagatttatgaagatatattgaatgagatacatagagcacctgtcacagctcctggtatttggaagattctataagtcccacctccctgtagatgacactacaataagcatccaataaatagtccctgccttgtctatgagcctttcctaaccatcttccaaaccagcacctcagaaatagtctccctcttctgaccgctgtagcattgtattgtacctaagatcttatcacagtcaaacttgtcaaatactatgtttgagatacaagttggcactgtaactagatctgctagcacaacaccatattctgcccaaagagatggctgaacttcattcatagatgatccattgtttatctttcatcagaatcacacttcagttatcataaacactataccttgttagatgactctattgcaggtctctttaaaagcccattattatacttaataattaaagggattgtaagaatgtatgtcatggtgtgacagctggcaaacaacagacatctgaatattcatttcctgaagtgaataatccatcattacagaagaaaaatggaagcctgtattcaatagacctataaaaggtgtttaaagaatgtccatgtcttcttagaaaagccccttgtgagcagccttgttttgttgcggttgtcttacaggaagcactcagggttttgcgtatatgtgttttatttttaagttgtacaactcctggttgatgacatcataacgtaaatgacctaaagtttaaattgcgttattctaatcagttttctgacctctctgtcaacagaatttctgacgatcaaataataaaactcagacaatattggttttgtgcctaaaataatactcttgtgtttattcatgtacaaattcatgcatttatctcagatacttgtaagcaactactatgttaaggctccggggatggggatggggatgggtggcaactcaaacggcctggcccctgccttcatggagttcacatttggctgttttataaatgttgtgaggaaggattttttttcacccatgattgcctttatttcaatatttgagatgtgttattaaataaaatctgatcatggctcaggtcaaattatttgtttttctcttgtacatctagcagagctgttgtaaaagttaaaaattagttattgatttgtcagattttttaatttagaaaatgtttttatttgttttgtggtttgcctaaattgctctaacatttggtatctaatttgactctcacgtaaccctgtagggtgcatggtattgccatgataagaaactagatgctcagcaggcttattgacctcccatggagtcccggccacttagcagccatccaaatggaaacttaagtcttcgatttattaagtgtgttcttgattccagcttaaaaaaaacttaaagtattaaaactgtacttattctgtgtttaaatgagactaactgacagctagaaaatggaaacaaaaatgtgaacaactgtgatttttgagcccctctctgctactgtataggcactgtggggagtagaaatgcctctgcctcttgataaatttatagcttcatcgataagacataatgtacacttagaaagaactcagtaaccctccaacacagaatgcatggttcagtgttaaagtgagaaatatcaaccaagagttgagaagataataagagctaaagcagatgcaaatagtgtatcttgagctaaacttcaagggcagggaagatgggacttgggcagggaagaggcttctaggcagggggaatgcaagttgcaaggctcagaagtggaagggagtgtgatggtgatagtgataacaataactgcatttgcccagcacttatcacttgccaagcagttattggttcacatgcattaacttatcttaaaacggctatcaaaacaattcaaccagagaagaattgttactatttcaattttacaatgaggaaactgaggcagagaggttaagcaacttgctcaaggttgcatgtgcattaaatgcagctggattccaccatggtcttgagaccagaatccactctaacccttttaacctgtggttatgctgcctgatgtggtgctcgtgagatggtaaggacaccttcatggttagagggggactcaatatggggtcatgatgagagaggtcaaataatggagaatctaaaaatcaggcaaaggcattaaactttgtctaggacttattgatatttcatcagtgcggaaacatggtagaatttattttagaaagattagtcagccctagacagaaaggattgagagacaaataagggtaggatggcaactattagatggaaactattaaaagggggtttctatccaggtatgggtgaaggtgattagacctggagtagggtagcagtagaaatgagaaggatgtaatggtgataagactggaactggcactgaatcaacaggtgagtcaaggccaggtgatttcctgagagcagctcatggtattacccccattttacagatgaggaaatacggaggctccaagaggttaatttggctaataagcattggagcagggatttcagcctatatctatctttcttggcttcctctcttaaggtaaaataatgcagtctggtcatatagtagagttgctgataaggtttgaagaatgctcccaaaataagagatgcttaaagtcatggggagaaatcaacattcagagggagcaaaatatcagagaaaaggcagagactgactattaaagaacactggagggagggaggagggtaggattgaaaaactacctatcaggtactgtgcttatcacctgggcgatgaaataatctgccaccaaacccccatgacacgcagtttacctgtttaacaaacttacacatgtgcccctgacctaaaagttaaaaaaaaaaagaatacagagaagaatggagcaagtggaagaggcttcggaagaaaacaagttagaggtatagggagggaacccagggctcctaaagccacagcagcaacaaggagagaacagtcagtgaatgactcaaagtgaaactgccaatggattgtcaagtgagaaggagggaacatgcacgcagcccagtgttcttagtaaccctcaacaaacaaagacgattcaggtgtgtgaagggcaagtagtgttgcaggtgggaggatatgggagtgctgccatgatggggtggagaagggaaggaaggtctgtcatgaggagaaagaattctgacgcatccatgccccactctgtgccaagttccgagccaagccagctgcggtcaaggggagagatcacgggaggctgaatggctggaggggaggcagagaggattcctgtaatccagtgggaggtgctggcaagaggccaggaggacgtgaagggattctaatgtgtggtagacaaagaagtaagggctgagggaatgattgttccatcagctacatgtagtggcgcaatggatgagcccgcatctaggagcccccttcctctgcccctgcttctatagaagcccttaccttcccatcctggctacttgccaggacctgctggggagctcagaaccctccctactcccatccagtctcacaagcagttaagtgagcctcccacctcagccttccaagtagctgggactacaggcgcgtgccacacactcagctaatttttaaattttttgtagagacaaggtctcactacattgcccaggcggtctccaacttctggactcaagctgtcctcccatctcggcctcccgaggtgctgggattcaggtgtgagccattgcacccatctgtacattgctttttaaataataattgttgaatagcgggtgagtggagagtaatttctattaaggaacttttctctgcttcttgttactctgattgtgccttaattcaagtttataaatgattactaatatttgggatattaagataggtactgggtcatttgggaggggtagtattttgatagcagcactttatactctgatttacagtataattctttagaggtattttggtgtatatgagcactgatggttgtgctttaaaattggcgcccgttgatgttagcaggaccagccaagtggcaggcactgcagtagagggacctgggtagaagtcagatggccaagctcccaggcctggcgtacacagctcggagggtcctcgtgcaagagtgctcctttccagcctgagcgatccctccttatcctccaatcaccgcatgacaggcacattatcagaactgcctgtctcaactatcccctgaactgctatggttccctcatctaattctcatggaaccctgtgagtttcctttgtagcaaataattgttgggagtgattattttactaatgccatctttgactaggctatagctttcatacgggcagggacatgcctactggtttacctctgtgtccccagcacctgacacagtacctggcacagagcatattctggataacacctgggggagccaatgaactctggtaaaatcttggacatgagattccatttttctcactgtttaaagcctgtatattaaagcttgtattaaactttatcactaaggtgctttctcttgaagatctatggattaacccttcacaattttttattataaatgttatccacatcaatgtacgaaattcaaacaatgcaaaagagtatacaatgaaagtgtattcattcattcaccaggattacaaatattgaaagttgcttgtctttacagagagaataaaaattgaacaagctgtgccagaatcgaatggattaataatggggtgggcatattccctacttccagctcccatgagcagctttcatatttcagttttaaaatggttagtgccttagtgagggaagaaaactttctgcagtaatctgtgctgccaacaggggccaaggccctcagctaaattcccactacacccgcgccattgctgattttcagctgttctgtatagagattttactgttcatgggggccctcgaaagttttctcctttctggaatttgaggatcacttcaaggtattgtttaataaagtaaaaggcaggctggacaattcaaggcaatgtgattttatggatgatttaatacatttggattgtggaaaatatgtctacctaaagattttcagcttcagaagcactttcacatagagtgttggtttctgtgttggtgttgcatggttgaggggaatcattaaaggaatggaatgcagctagtggaatttcttgagtttgaatggaaatctgtataatcaattccaattatggaaggatgaattacataaatacagggacattaagcaccataatgttttaaaatattttcaaggaaaatatggatattcatatatttatccattaatttgatagagggaaaatctgtcttggtacacttacagttttcagtaccaaaaagaatatgagagaggcccttccatgccctgctacagtactggggcttcttgtatgtgtgcgtgtgtgtgtattttggtggaagggagtgtccagttgtgcctaagggttctcaggaatagttatgtttatatgattatttttgaaaaataagtatctaaagctttggatttctgtctgtaaattatgatagtttaactacaagcatcaatgtgtctgcattaactgaggtttgtggggaaggtgattttgttcatgggccatagactatagtggtttcatacaatcaccttgagtggtagtgtattgggggtgggggaaggtaagggagaagaggaatgggctcatgctgccctgtgactcagcctctgaagtggctctggaccaggcattgggacacagtgaggtccatcttacaggcttccttccctgggtgttgttggcagggtagcgctgtttactgacagtcagttacttaagaaggcagctcatgccagatggaatccctgggtctaaaacctaatggactttaagtgttaaggaggtttaaatgagtctgggtaggagtttcaaagattataattatctgtttaatattaaccagtgtaatacaagttaagtactagaatgtactccaaaccatacaagtatccacacacacatcccagtacttagatgactggatcacggggctgattgcaccactgcaagcatctcaaggaagggtgttccttgaatagttactattatcacctcttgccttctaaggaagagcctagatgagacataatgcagtagaattcccttgtaaccttgtctccaccttctctttcttacatgacactgaacggacagttcacatccaccaagtctatttacgggagttttgtccttctatcttatgtattaggaataacacactggaatttaatgagcatctgcaatttgccagacattttgccacactatctcaaatacgacccgcaaatagatgttactgtactttgtatgtaaatggacctggaagacaaagctcaaagtccagagcttgtaactgacagagctggggcttgaacaaaattttgttgagttgcaaaatcctgttttttctgaaaataacataaacagtaattataataatatttactgagcattcattagtgccagggagtaattctaataataaacttacaaggtagttgttaactactaaagaaaattgaggttgggaaactggagattataaaatttaagtatcttacccgagattgtttagtaatagcagacccaaattttgaacctatttgatctggttacaaaggctttcactactggacccacctcctactagatttttgtgctctaaactgggtaaaaccaaggtaaagggccaaggcagtatggttaagaggagctgaaggaccatgtagattgtaggttaaatagaatcgaacttctatttctttctttcctttctaggtgtcagcttcctctggtgcaaccagcaagtcttcagtatgaatcccacagaaaccaaggtatgaagaatgctaattgagtgagtgctaatttagttgattgtgctgcaaagcaaaacaaatgtagactaattgttgatgatgagttatatatctaggaagttttaattatggaagtaaacattttcttcctaatttatgggggtctttgaaactcagctttccttccaatatttaccttacacatcatctacatggttttaggttatctaaaaagtagagtcacctagagttgttttgttttgttttgttttgttttgagacagggtctgctctgtcacctaggctggagtatagtggtgtgattacactcactgcagccccaacctctggactcaagcgaccctcccatctcggcctcttgagtagctggggctacagaggcacacaccatgcccggctaattgtttttttgtttgtttgtttgtttgtttgtttttgtagagacgggtctcactgtgttgcccaagctggtctcaaattcctgggccgaagcagtccttccactgggcctcccaaagtgctgggattacaggaatgagccaccgtgcccgtggccagttttgttttgtttttgatcctagatttgattgagttttttaattgaagatattcctctaagtactttctctacattgaaatgagaatataaattattaattcttgctaaaatggtcttactatctgagcacttaaaaataaatataaaaatgaaagattatactaaatgaacataaaaatatctggttatttcggatgctttcccaagttgttttttctgaaatttgagtcttgtggggtacattttattgacaaacctttcttgagctctatttgggatttattcttaaaattattttttgaatttcagaattaaaaataaaagaatttcctctagtggtattgtccactttgttctgagagctggctgcagctgccttttaaaccctctccctaagttactctagctcaagctgtactcttgggaatatttcaggggagggaattaaagagggagcattttcaaaattctctcaataatgtttgtgtgccaatattctttaatacctttaagagctaccccaactccattattataaattgcccttgtttaaaattaccaacctacttttgttttctgtctttcatattactagctatccctgtagtttcctatcccaggtgatgtggcactataacttagtactatcaaagattatatggcctcatcttgaatcatcttcaaagaacattacaaatatctagaaatacacatccacatctaagttcttatgtcatttagcattcatttaaaattttaatctaaaattatagtttttaaatttagtatttaaatttacattgatttctaaattgctttcaaaatatacatatataatctataattaatgttagctgtctctatttaattatgttaagcttaatcttaaaaattaaaaatctttttttttccttgaggcagggtctcgctctgtcttccaggctggattagtggcatgatcacagcttgctgccaccttgacctcctggatgcaagtgatcctcctactcagtctcctgagtagctggaactctaggggcacaccaccatgcctggctaatatttcgtttttctgtagagacaggggtcttgctatgttactcaggctggtctcaaactcctgggtcaagcagtcctcccatctcagcctcccaaagtgctgggattacaggcatgagccactggtccagcctaaaattaaaaatcctaattttaaaaaatattccagaagcatctacaaaataaagttctcattaagaccaggcatagtggcccacacctataatcccagcattttgagagtcaaggtgggaggatcgcttgagcccaggagtttgggaccagcctgggcaacatagcgaatcccgtgtctacaaaaaattagccaggtgtggtggtttactcctgtagtctcagctaccgggaggctgaggcaggaggatggcttgagcccaggagatcaaggctgcagcaagctgtattgcaccactgcactccagcccaggtgacagagcaagaccctgtctcaaaaataaataataaataaataaataaataatctcattgaatttagagatcatgaaaaccaaagaaaagaataggaaagagagccagaaatataggatttcctttttattcttttggttctttttcatctgttgcctgattctaatcccctgtgcctcagctcaaggaccaatgtttatttcaagcgtgcctgttacctagaacaaatgtcagcaaactcttcacccttctctaagcattaatcatggaattctcggcagtcctgtgaaactggaggaaagtaggagagagaagagggggagagacaaaataagatgcacgtaatgaagtgtccccagtggctaactagggaccacttttggcctaagtctctttccctggaacctggttccatatcagctgtgatattggacaatctctttttctttggtttccttatctgtacagtttggaggaaggtgataatagtacctgcctcacaagctgtgtaaggaaacataatgtatattggacaattcctgtcctaagcaagtgtccagatggattgtctgttggccactactggggagagagtgcagtgcgatgactagaacacacaacccaggtccaccatggatgtctttagggagttatttaactgctctaaactcaatttctcattgtgaaatgggtataataatacttgtctcataggattattatgaagataaagtgggttgcacatgagaggtgattaatacacattagttattatggtcatcattattatattcagcacatcactacaaaaataaattcagcaattactgatttaaatatagattgcattataagctgttgtgtctgtgagcatacattcttaattgtagtgtaggttctcccatgcaaaatcttgatgccaaattgcaagctattaatagattcaaagcactatactaccagctggcttattttcttgttaatcatttaataaattatatttgcataaactgaaaggatagttccataaatagaactcattaatgagaatgtagtgtgaaaggatccaaaatttaaaatttctttaaaaacattcaatcataagctttgtttccttcccaaaatagtgtgttagcctagcaaggggccattattgaagaaagtatgtgtcttcattactgaagtagaagacatgataaattaagaggataatgactttagcctcttcaaataaaaataaataaataaaaaccactagtttgtgctgatacaccaagcagataaaaaggaaagaaacagcaggaagcatcggaccctagtttgtaatctcgactgaaaagttcatgaaatgtttaatcaagttttattcatgattgtatatcttgcctaattgagaatgcatgcatgtacttacttgtttttgcacaagtaatgtttagttggataaactgtaaaatatcatactaaagatgctaagttacaaccagttctgtagaagcatttctagactttaaattcgatctctgcatacaggactgtgatgtgcccagtaaaaatccatgcactaatatttacaattttggggggattatgttgacagaatttcataaaactttccgttacattgtgactatttgatcataactaaacattggatacataggaaaaaatgatattcatgtagctttacacagggaaaggaaaggaatgagaaattaattttattaatggaaaccttcgctgaaaaaaccttcactgaaaaaatgtaaacacaaactgaaatatctgcttaggaccttagatgtaagtgcctacagcttcttggagttatacacatatgcatcgagtagatgcaatagataatagaattgatataatcattttaaccctttttgtacatgttacttatttgactgacagtaaaataaaattatacctggggctgtgctcttatattaggccattccagtcagccaacaatggaaggaccacatcttcctaacaagaaaaaacacaaaaaacaggtgatgttgttcatgtactagggcatctctgtttactaacggttacatcacccgctcagcatgtgctaataacgcaattcacagtcttctgttaacactgagatcccatcatggactttctgtaggcttagcgcccatcagccacattctggcactaaaagtaattttcactgctttctgtgccctcaatttgtcaccatcccattgttttacactgtcagccaaaacccgtgatgaatatttcactgataaaacaccgtgttagtggcatggaaacacagtgcccttggctttgtgatgaaggtttttttttctgttgcccatttatgtgttaccatgtaaatagtaataaatctttacatatctttatatacctagcaaggagatataaattgctccctgaatagtaaagcagaatattaactagatacctaattgtttatctaaagagttgcaatttcaagcaaagtgtaacaaacttaactgtaatgtttataattacattaaaaatcatctcttttgagtttcctcagttgaagaaaatcgtgatagtctttgtaaactatgtctatctttcttttcttccttcctttttttctttcttttttctgaacttaggctgtaaaaacagaacctgagaagaagtcacagtcaaccaaggtaatagtttaagtctgttagttagttatttggattctttttaataataatgaataatcaactcctgccttggcacagctgtgaatggtaaagggggttgctggctaatttaattaattttagacccttttgaatggctgtgtacatgtagaatatataaaatataacattaagtccgtaattgttaaaaagaatatataatattttataaatgaaaactatttcagaagcattttgttaaatctagttttttgttatatgtatagtgattgctttaaaaaagaaaaaagcaagaggacagaagaaaaaaggcaaagagtagtaatgaatatccaattccaattccaatgagacatcagaataaggtgtctgctgaactcagcacctagatggcttagggatgagaatctttcctagaggctggctgggtttatcgtgacagtcttacctcagttggtggagctagttaacagttcacaggaggctagcttctgttactttcctgacccatgactgtccagaatgaatgccatttgcctctgcatggaggtgaaccccaggttgtgtacggcagcacaaatgtttctcttcaaaaggtgctgcattttattttgtcaagcacttaaagcaagtactaagacaagaccacaagtttcctgtggaaaagcacagatatttgagcccaggtacttcaggcacaggtgagggtgaaggtgaggcttgtctgattttgtggaaggcctcctggtggcccctggggatggtagaactagggtactccgagtgaagaattcagcagctaagtggaagttgtcttctattccactttaatacttttatctactgaatcgcaagaaaattgggtttctggtggtaagatcttctctataacaaagaaacaaaactctgtaaatcctatgaaaggagtttttttttttttttgctttgagacggagtctcgctctgtcgcccaggctggagtgcagtggcgccatcttggctcactcaagctccgcctcccgggttcacgccattctccttcctccgcctcccgagtagctgggatacaggcacccgccaccaagcctggctcatttttttgtatttttagtagagacggggttcactgtgttagccaggatggtcttgatctcctgaccttgtgatacgcccgcctcggcctccaaagtgctgggattacaggcgtgagccaccgcgcctggcctaaaatatattttctaggtgggattagctgtcaacaaactcagtagtcacatggctcatgtgttatctgtgtacattgtgaaaaacaaccagtaatttagagacatacgtgtatttgaaaatattattcagatgaatactgaatttttcattattctgataatcaccattctcagagactgctgacagggttacattgacctgataccacatgtctacttctgtgatcctaaagagtgggcctgagtgggcctagcgggcttttcctgaaaaaggcagaatgttttagttggaattttgttcttgttcttgttgaaagtattacaagttggattccagtgtaatcaagtttaatcttttgaaattgacagcgtctgtggttcatgagaaaaaatcccaagaaggaaagccaaaagaacacacagaggtaatgattatcatcaggacttaattataaggcaacctcttttggtgggatataattaaaatcttcattaattcaaaactaatccctacaatggatagttggatattagttttttcagctaaatggtgccatcctgtggcaatagcagtgtttacaatttatgtgattcttgctgaattttggggaaggatttgcactatttcaaattttgtacctaaagtgaaattgtcacatgtacatacactaattgaaatttacataatttagaaccacagacagcacaactgttatgaacaattttattctatagagaaaagtatcagtattatgtttaagactaccatcttgttaacaatgttttatatgtgtgtgggcacctgtgtgtgtactttcagccaaaaagcctacccaagcaggatcagatacaggaagtaacgatgctcacaataaaaaagcagtttccagatcagctgaacgcagccatcagagaaatcaacagaaccaaaggtaaatgaagcagattgataggaaaacctaacatcaactggataataagatacggttcccctgttcacactgaggtgtgtagttcaactatggggctgtgctgaatatattttgtattatagtgatttggtattattattttgttgtttttcaaatagacttgtaggaacttggatgcatggatggcttgagaagggcatcagatggtctaggggatgcgctgtccgtccttctcctactgcccagcaataaccagctgtgactcagggcagcaggctctgctgtctcccagacaggcagctttggattgaggctgcctcctgaccccccacacctgggctggggaacatatgtgccctgaattatctggttctttaaatggaatcctaaagcatttttagggtcgtgttgtagaagagctgaacttacagagccaaaaatagaaattgcttccatacttctgtagttaatagcagccaccttttagaagaattaacatcacaagaaatactttttcattgagagcacttggaagataataacgaggtctgcttcacagatattttatatcagagatcacagatttgtgatctaccacttaaatgccacatgtatatttgtttggcttacaatgttgttaaaaaattatttttaattaattgccagcaatcaaagtcgggcatttcacataacatcccaaattgtaacttctcttgaaaaatcagactatctagtagagtgagctcacgtggcaacaattgactagagccattacacctggtatgtgtgctccagttaccacaatccttacctagcctgattgacctacgcaagttacctgcgtgaacgttttagctcttgagtccagctttatgtggtgcttagcactgcaccatgtacaatagaagtgagcaacattcccttatggtgtccgtgagggtgaactggcagatgttagtgacatttgaaactatgatcttgataatagccatgcagagatacttagctctgtcaaccttttatcctcactgcttagactaaaccacaagacatgatttctgctggtggagagagtgttgctggtatcactcaatatctggcaagccgggtgacaaggtgagcacacacaagcagacggaaacgtgggccctgtgcttctcaagtttcttttatgagaaacgtatgctcaaataacctatcatctggcaaactgaacactgcttatatgtaaaattttgtgaagagcatgcatttaagggatagagaggaacaagataccaaaaataatttgtaaatttatatattcaataactgcttactgagtactgccatatataacgtactgatatcaataccaaggacattaaaatgtgagttgactcagatctcccttccaaatgtatagatatgaaataaagcaaatacaatttccaggagcatttgatcggctttttcagctttcaatgctgatgccagctgtcttgatactagtgtatcacaacttgacatcaacatgaatggatatgagaagttttcaaaggaaatatttcaagtcctctcagatgaagtagatgtgttgagctgggtgattgtgggcataacttccttagattttttgaaggctgcttccaatacttgcccaggaatataagatgagaagttatctaccttttctacccaagcaatatagaatttttttttttaccttatcctttaaggtttttttttttttttttgcattatttatttatttattttcattatactttaagttttagggtacatgtgcacattgtgcggttagttacatatgtatacatgtgccatgctggtgcgctgcacccactaactcgtcattagcattaggtatatctcccaatgctatccctcccccctctccccacccctccacagtccccgagtgtgatattccccttcctgtgtccatgtgatctcattgttcaattcccacgtagagtgagaatatgcggtgtttggtttttcgttcttgcgatagtttactgagaatgatgattccaatttcatccatgtccctacaaaggacatgaactcatcattttttatggctgcatgtattccatggtgtatatgtgccacattttcttaatccactctgtcattgttggacattgggttggttcgaagtctttgctattgtgaataatgccgcagtaaacatacttgtgcatggtctttatagcagcatgatttatagtccttttggtatatacccagtaatgggatggctagtcaaatggtatttctagttctagatccctgaggaatcgccacactgacttccacaaggttgaactagtttacagtcccaccaacagtgtaaaagtgttcctatttctccacatcctcccagcacctgttgtttcctgacttttgaatgattgccattctaactggtgtgagatggttctcattgtggttttgatttgcatttctctgatggccagtgatgatgagcattttttcagtgtcttttggctgcataaatgtcttcttttgagaagtgtctgttcatgtccttcgcccctttttgatggggttgtttgtttttttcttgtaaatttgtttgagttcattgtagattcggatattagccctttgtcagatgagtaggttgcgaaaattttctcccattttgtaggttcctgttcactctgatggtagtttcttttgctgtgcagaagctctttagtttaattagatccatttgtcaattttggcttttgttgccattgcttttggtgttttggacatgaagtcctgcccatgcctatgtcctgaatggtaatgcctaggttttcttctagggtttttatggtttaggtctaacgtctgatctttgacaaacctgagaaaaacaagcaatggggaaaggattcctatttaataaatggtgctgggaaaactggctagccatatgtagaaagctgaaactggatccttccttacaccttatacaaaaatcaattcaagatggattaaagacttaaacgttagactaaaagcaatatagaattagtaatcagtttggagagcatgtaatcaatttgaagccacagtaagcaagtgaaggaacaatgagaagatgggaatgaaaaatgtaaaagtaatatagattatctatacttttgcttctgtaaatgggacagatatcctgctacagctaaatggtaaaaaggtcatagggaaaatgagttttagggtaaaagtatggcacatctccctgaaacatcattttttccttctgggattttgggagaaaaggcacattattttatccaaattaatacaggctcctatggagcaaaggcaacatttacaaaaacttttaaatgaaaatatcaaacttaaattgttttttcttgcaatagatcacttgtatactaccttgagactcatagcctcactccagaagacacagcactctcttgcaccaatgaggaatgcttacatgaaatggtttgaaaatgatacatttaaggcagaagattagatacgttaaaatagatttttaaatgtaatcaatgtttcagtttggaaatggatagatttaaggcagaggattaggcccgctaaaatagatttttaatgtaatcaaaatttacagttttgagctaaatgtaaattaaccagtgttataagtgaaactaaacaataaaattaggagaggcttatgtggaagtctgccgtgcattgacttgtgctgaacttgcagcaagtcattttactttacgttgcctctgattcttctcccattaaataggattaatgacttgccttcttattttagtacatagcatgtttaaagtaccataaggcaggcaatcacctgaggtcaggagctcaagaccagcctgaccaacatggagaaaccccgtctctataaaaataaaaaattagctgggcatggtggcacaggcctgtaatcccagctactcaagagctgaggcaggagaattgcttgaacccgggaggcagaggttgcggtgagccaagatcgcccgttgcactccagcctgggcaacaagagtgaaacactgtctcaaaaaaataaaataaaaactaaataaggtaccatggttggttctgcaggatgcactagctataggctggcctgtcagggggtggggaaaagacaatgtacctggggctgtatttcaatcagatgaagaaaggccccacaaggtgttatttggtgaggaatgaagggattctatctaattcagggaatccacaaagctttggaagagtagatccaagttcagttaggcatggaaggatagctgggattgcagggttgaaaagtgtaagatgtgttctgggcacaaagtacattccaacgtgggtgaagcacaaggaagtgaatggtggggctgtaagaccagaaagacaggttgagcactgctgtggagaacctaaggtgaatttgtacatgtggtgattcagctgacagcgggtagcctttgagaacctagagaacagatggggtgatgcaattgaatccgagctgcagaaggattaagggactgcagtaggtggatgggatagagataggaaggtagaaggttggtcagggactgtttcagtagtctgatgagtcatattttagcctaaattagagctgtgatagaataagaaagtggggagttaccaagatgaattgcagagcaaaaatcttcaggttttaggaaatgattgacagaagtgggaaagacaaagtaaaatctaagataacctggtgcttctgagtctgattgcaggaggttggagccacacggtaagggaaaggaggcccctaaggtgctcattgtcaggtttgtgcaagtgagagttggcacctgagaatgagtgcctttttaaattgtgagctgggcaccttgcagtccgtccctaagttccctgggtaccattggcaggagtacagatagatgtcagaggaactgagaggaaagaggtgtctctaattttggacaagctgaatttaagtgtttgaagtgtccaaagaatatgtctagcaagacaattaaaatactgttttctaatagaaaagaatgaagtaggagaaagggagaggaagagaaagagtggatggaatagaaagatagtggggagagagggagggaagagagacattgagaaggaagaggaaggtgggggagagaacatgagtgaatatctgcagaggtagtggctgaatcatggaagtggtttcaattatccagactcaggctcacaccctatggcccccacagtgtttctagcattgcaattgtaacagtcacttatttagcacttacaatacatagcaagtacttacatagtgctgagcatgtgccaaacaatggttttcatacttcgatagattcacttatctaatatctccaaggagaagtgacttgctaaagcctcaagcagcctgcatgtctcaactgttatgcaaaccttggcagtcagagcctgtgctcttcctgtgcttgttccctgagtttggataccttcaaatgggaaatggtccccttttatcttaaacccaacacttcacccatttagtttctgccagtctctgaaagcatttgcctctggccatagagaatattttggataagaccaccagcacagggcagaaatgtgcagagtgtatacagtggggaccaagtaaaagagatgccagaggtaatggagaacaaagggcatagatgccacaataggatcgaatggtgccgaaaggtggcaatggggagggagagatgctccaagggtcaaatttcagaattacatctggataaaagcatggaaactgcagattgaaaagttgtttgcagtctttgatgagcaatggaagcaatgatgagcgatcaactcattttaaggaaagaggaggtgttgagagccgaagtgagggatatggaagtcttgatgtgtgggggcaaagagccagagagcaaagcagaagtggcagcctatagaaagaattcatggatgttgtaaaaactggctgtgggccctgagaagaacagcgaggaaagaaacagtcttggattcaaatcttcattctgtcccttactggtaacctgaggaaagtggcctaatctgagccttgctttgcccatcactaaatgagactatataattaaagcccttctgaaaaaggatataaaacacacagcacagtttctgctgtagacggatgttcagtgtatgatcaatgcttgttaatataatgaatttattttaaaatttgtatagtattgagttttattaaggtatgtgaggagttgttaatttctcaattctcaccagaaaaagaaaagaaatcattaaccccagctgtgccagttgaatctaaaccggataaaccatcggaaaggtatgaagacaacagtgtccttctacatgagacagttactcatatgctctgtattatcataatctgatttcttgtgggcaaataatatgaggggggtaatttaaaggaccatttaatgaattattgtttcaagctaatattgaaagtgtgggttggaagtatggttttcacctcatgtttgtaacacttgctattataaccccttttttaaaaaaaaacaaacaaactccgtttcatcccatggagtttacattccagtttctctcctgcaaatacactttatttaaccgaggtattactaaagaagtaaggtacttctttttttctgaaattcctaaaagaatcagttaagcctaacagccttcagattgtatttcacatatccatgatcaggagagtcctaaaatgtcatgggaatatggtagttgcaaaaaaaaaagacaatttaaataattatttttcatctaatcaaataatacaaggtcctttcctagattgttgttttctcctttcaatgcaggttatgttcataacgagtcatcaacataaaaaatagatagaagcactcttatttattattatatagtccatgtttacactgttataaagaacttccctgagactgggtaatttataaagaaaaaggtttaattgactcacatttctgtgtggctggggaggcctcaggaaacttacaatcatctggaaagggaatcagacactttcttcacaaggcagcaggagagagagcatgtgaaggagaacagtcaaacacttataaaaccatccaatctcatgagaactcactcactatcatgagacagcatgaaaatcgccccaatgatccagtcacctcccttcctcgacacgtggggattaaggtccctcccttgacacatggggattacaattggagttgagacttgggtggagacatggccaaaccatatcagttatactgatttaagcccatattggcagagtaaacttgtgagttttgtaagtttaatgtctcaggtaatttctgttttgtaaacctcttcaggcaagcaagtgacaacaacaaaaaaaaacatgaatgaaataatacagagtgatttccctcatgaaatagatctatttggaataggtactatatagagatttttaggggttctttgtttaaaactctggaaagtattgataagcaataaataccaagcatttcccttatcgcttagagcaacatggttaaattccctgtattttgttttgttttgttttgtttttccttttttaactgtcagtgcatcgactggcagctttaatgaacttgtacatttgttcatgtatgtaatgcctgtagacttgtgaaactgtgcttcttgcctgaatgtggcttttcatctttccaacctagaatttgtacttgagacttaaatagtaaagtctgttaaagaccagattttaactattttggggaactatttaagaacttttggtgtttggtggtttttctacacagaatggctttttttgtagttaaactaaggtgaaatatgtataacaaataacatttaaatatctgttctttcttttccagtcaggatggatgctgctttggatgacttaatagatactttaggaggacctgaagaaactgaagagaaaatacaacgtatactggaccagaagtttcagtatgtgatcatgatatctgtaaaaatcatactcagtgggtaggagagcaaataaggccatggtcatgaagtacaaaagaataccagtgaggccaggcgcagtggctcacatctgtaatcccagcactttgggaggccgaggcagcagatttcttgaagtcaggcattcaagaccagcctggccaacatggtgaaaccctgtcttactaaaaatacaaaaattagctgggcatggtggtacacgcctgtaatcccagctactgggaagctgaggcaggagaatcacttgaacccaggaggcagaggttgcagcgagctgagtcgcaccactgcactccagtttgggcgacagagcgagactccatctcaaaaaaaagagttctagtgttctgtcatttgcatagaaacaggatgatgtcagtatcaacatcaacacagcactaaaaattagtatcggggatggaaattgtcttttggcagctgcattataacattgagtagcaaacatttgttgttgtgctaagattgacactgggacacggtccactgggtcacaccttattttccatcctcaagatttaagtataatggactagaacttgttttgatttctcgaatttaccaccctcagtttatccctattcctaattcctaaaattatattttccttggtataaaaaaaagacatgccagccaggcatggtggctcacacctgtaatcccagcactttgggggccgaggcaggcggatcatctgaggtcaggagttcaagaccagcctagccaacatggtaaaccctgtctctactaaaaatacaaaaaaattagtcaggaatgttggcgcatggctgtatcccagctactcaggaggctgaggcaggagaactgcttgaacccgggaggcagtggttcagttagctgggatcatgccattgcactccagcctgggcaacatggatgagactccatccaaaaaaaaaaaaaaaaagacacgccataggctagacaaaaatatttgcaacagacatacaaagggtttgtttctagaatttataaagaataaaaaacagaaaaagacaacccaatagaaatcgagagaaaacttgactgaccaataagcaagtaaaatgaaactctccttagtaataggataatgatactaaaacacagaagaaacactgctttgcatttatcagattagcaaaacgtgaaagtctgacaattcctatagttttcctatagctggtgggtgttcatgatgaacatcccttcaaccaggaagtccacctgtagagagattgccaggagggagccttgcccatgttgcaaggagttataagaactggtgaaatgtttggaaacaattttgttcaatagaggacagataataaaattcagtgctttatagtggttaaaatggattattcatgtatcaacatggaacattacaaaaacataattttgaataaaaaatgcagaatgatatgtagaatatgatacctttatataacattggaaaatatgcaaagtaatgctggacgttgtttatggttacctacaatgtaaaaaatgttctaaaataactttaaattgatatgctaaagttcagaatggtggcttttctgattaacagggaaagggaattaggtttgagaatgctaaacaggagacatccacttatgattttgttttcttagaaatgacaaagctgatagagttgggtattgggttatacataactcattatcttattaactgctcttttgtattggttagaaaccttagataatgaaaactttgaaaacaaaatgtatttagaagtcaactttagtattttgaatattttctagcattaatatgagttaagccaattaaatatgggtatttgtgtaaacttagaaatgtagttgtataagtgttggcttcttaatgatttatcgttcatctcagtacttccataaattaataatggatagtgctttagtttcagaatatgcatatagcattgtcaggtaattaattatataatatcctatgtgtatgattttgttccaggatccaatgagttccacctacatagaggaattgggtaaagagaagtcacaattcctccaaaatatagggaactattggctgtaagttaaataatctttacttttatttcactgtttcctctttagaaaataatttcatgtcaatatttttacaggtttagaagttagaaaatataatggtgcttgtgaaattgtcattactatgaagctcgctcattggttggctggggctgctgttaagaaagtaccacagatcggggcataaacaagagatgattgtctcacagttctggaggctggaagtctagaatcaaggtgtcagcagtgctggtccttctgagggctgtgagggaaaggtatctttgaggcctattcttggcttatagatggcgtcttcttcccgtgtctctacacaccgtcttccttctgtgcttctatgcatatctctggtccaaatttcccctttttataaggacgcgcatcatattggagtagggcccaccctaatgcctcacctttacttgattctataaggaacctatctcaaaatcaggtctcgttttgaggtctggggttaagacttgaacatatagatctggggtgggaggcacaattcaacccacaacggcaatacattttgccgatcttaaggattaattctaccttctcaacatcatcaaattaattttgtttcagaaaaaggaagggatcacagggcctcctgcagactcttcggtgagtttactacatgtcttctgatctaaattaatagttttatatttttggctgggggaacagggctataattctatatttgaggattatgacttaactcatctccaaatcaaatggagtttctgtgtttcagagaaaggggttggtgggagggttgtctcagtgctcctgagtctcataagtaggtttttgagggaaaggagaaagaaggcgagaaagtattaggatagaatattatgcatgttctaataatagaatgagaatgtaactccttttgaaagggggaagtggaaaataatactcaagagtagccactctcttcaaaacatacactttgatctaagttgtttcattaacacacctctttggtagcaagggaattggaaaagtgcattcttcatttgctaggtttatgatccattctccacttgagtgcttcccgtaagttacccatcactgtgcctgtttctttagaaacccatgggccagatgatgctatagacgccttgtcatctgacttcacctgtgggtcgcctacagcgctggaaagaaaactgaaaaagaggtattgtttttagtgttgttaagggaaacttgttagaactattttgaactttaaaagaataactttttagttcaggctattacagttaaactttctcatctgtaagtctaatcttttgtattttgtttttcaggaatctacagaagttttaaagctcagtcagcagggacagtcagaagtgctgctccaccccaagagaagaaaagaaaggtgagaaggtatagtcacagtctacctgacagcagttgctttccagagcctgatctagctcttcaggaaactgccagtagcacataacccatgatgagaagccatgattttttccctctcggtctatgtggaatagtgaagccaatgagggttatgttgatcatctccaggcaagcctttgtgtttctgtaactgcttgtgaatgattttagcacagttgtctcagtcatcatctaagccatctcaccattatgatacacagaagggcagaaaccagagaaattgcactcttggaactaaaaccttcaagtttgattgtataaaggactttgagccctgaggatcactagagggacccaagtagctggtactgcccagcattctcaactatatttcactatgacataattctcacaatcgcaaaaggcaatcctgcagctctgtgctggctgggaacacatgtctcctctgcaacagtcaagataatgctcaggaacggtttctatcagagcagcttgtgcctctcccctcctgagtggacagtttatttttatctggcaggctggggaacagtggtgagtaccacacccctagagtgggagttcctacaacgatcagccattgtgccttcagagaagaaggcagcaggggcacttcaagcttccctgcttcctaagcttaggttgtcagaagcctttttagagatacattttagaaaaagaaaaatagtgtggtaacagtttactacttgcttcttttttttttgttttttagagtattttatagtaatattactatagctttatgtctagcttaccaaataagggggaagtgtgccccagagaacgctgttactgtagaaacgtgtcttagccccaatttccactattggtaagttctttttcctttctctcttttgcaaggtttcaaataaaattgcctttctgagcacttccccaatccatattcagtttataatctaaaatgtattttacaaagaagtaatggattgttcgggctccagagatgtcttttttcatgcacaggattttttacttttaacagatacaatgagtgatcaagcactcgaggctctgtcggcttcactgggcacccggcaagcgaacctgagctcgacctccgctcaattaaggaagtcgatgaggtactgaccttagagttatttacaaagcttgttagtctgcacattacaaaaccgaatgcactctgcatgtttagaatctcgcacaacttttattggagagtaaaagtgagcattcttcattgtgccttatttattctgagtggttagcaactaagggggatagttacatgactgacttgtgaaacagctagaatttaacatttgaaatgaacacgaatctcccttgctagagcttaaatgacccttgactaaaaaggtaacaaggaggcaatgcctggtgggaaatagtgaagtttggcaattggaaatttgattttcagaagggttctgggtgcttctgtttataagagaaggagatgtctatacacggatgggaagatccttcatttatcactatggggaaagatgttgaaaattttgtctcaaattaaatcaagcaacaattaccctaactagagctcctgcatatttatagaataatgctgatgatgtttatcccgccacactccaagatcttaacaagccttctgaaccaaaacaagcttacactggtgtaggaaagttttaatattaaattataatttttgtggaatttttcaactcagtctctggggtgaaagaggaaggaaaggagagagttgccggttcctgacaaggcagtgttgtgggagatggaaaggtagcctgggatccccaggagcccgccccacctccatcagctcaggtgggggtgctggcaggcattgctgtcacaatgccccatctctgctgtcacttcctgttcgagtcatcagggaaggggagtctccctgacttccagcaacaatccttgagtctgggactccctggcctaagatgggccagtttctatcttcgactttcttggagggctcaccggccacgtgtggcacgataagctttgtgacggtgaacgcagaggagcaagagaagcagttcgtatttccaggaccaagtaatgtattgggaagaagggaaacttgattacaacacaatgtgagaatacattacttagagtagccgacagaagcagtgtcatcttgaggaaagcggggtgttggagaatcctggggggagtcaggaggccaagctgagttgtggctttaccacctgagggcgaagggccacaagtatattgcacttctgccccaagcttcttacagacacttaaggagagacattaatgtgggaagggagggtataaacatgtcataaacctcaggatcaaaggagtcttaaagtgactaaaagcagataagcagatgttaagaaaaaaagtgacataaaataagttattaaacatgtgggtaactagtttgggaatgcatatgaatgtattaagttccctctagaaaattcagagtcgcagcaaactaaaattccagcaaaaagaactcctcttttccactcttatgcataatagttgtattagtctgttctcatgctgctaataaagacataccagagactgggtatgtataaaggaaagaagtttaattgactcacagttcctcatggctagggaggcctcatattacggtggaaagtgaatgaggagcaaagtcacgtcttacatggaggaaagtaaaagacatgtgcaggggaactcccctttataaaaccatcagatctagtgagaattattcactatatgagaacagtacaggagagctccgcccccatgattcaattacctcccactgggtccctccacgacacgtgggaattatgggagctacaattcaagatgagatttgggtggggacacaccaaagcatatcactagttttcctttttaatcatatacaaagtatgaatgtttctaaagggatctttcagtcctctagattattaacctgaattcttagtacccgacttagtgggtccttacatcctagatagtctgatgtgatgagaaggctcaggaaggtcactgtcagcctgtagagtgtccattgccaccccagcataccccagaatagagagctatctgtggaaaaccacaaatactccagagaggaaacccatgcctacttggtattcccatcatctaccataacataaataaaagttttttattctctaatgatagcccattataagtctcccacatttttaggtgtgctgcctagtctagtgccatttcaattcagtaggctcttttttttcgatgcctactgtaacaaaccagagcaggcatttcaagactataaagatcaaagaggaaaataaaagctctggcgcatgtgtaactttcactgtccacagcctgagattagtggggaggaccgtcttaatacggtgaccctggatgttcatgaaggccgctgtgccttgacctggggagtgctgctccatgcaggatttctccagatgccgaaatagagcgtgactggaaatgtttaaaagaaaaccatgcttcatcctttaatgagagcttctctataaaacagtgaaactaatcccaaagcatagaaagtgcctggtccattaaaagtgctcaataagtagtaattaatcaactaaccaatcagtggtttagttacatttaatgtttaaatgttttcatttgttttgttttttatatttcctgtaaacatgaccagctgactttctctattattgtgcgtatcctgtttaaatgttactaattaaattgtttaagaaccacactcttaggctaagatgcagatgggggccgtgggttgggttgaatatgccaagtgaacctcctaccttggttagtaaattaaatccacacctttatataggacaaattcttacatattatggaacttcacactacccaccagcaggttaaattgcaagtgtgtgtcctagcagtcagtgatctactatagaactatgcttttatttgtaatgcagctagtgttcatggttcagtaagctagagaagtcctggcattattgaagagagtccttttaaaaaggtaaaacaagttatccatggatcagccaagatttgtgatgggccgcttctcccatattgaactgggtttaatgtgaaaattagtcgtgtttcctctcccttccttagacagctgcccgttgagtaagacagatgaaggccattaaaataattgcaactaactgctgcactgtgctactgtcttcaaaggatcttttatttacttttctctggtgatcttcacaagtcagtgagcagataagggttattagtagccacattttacagctgaagaaactggaccaaataaaggctagtggcttcccaaggtcacagcagctgggagcagaacagggcagttgcccaggatccctgctgggctacttttgctcagtcacccactgctccctttctcacagctgcccaccatcgtttgtgctttgtagtttacaaggctcttccagatgcttttaccagatttggtcttctctaaacactcgagaagtacacagaggaagtgatatcatctcattatgtgcattatccaactatttttttttcccctccattttcatcaggcaaaagctaaagaagaaaaactagagaagtgggtgaggatgatgaaacaatcccatctgagtacagattaaaaccagccacggtaaattttagccacagtgcatgacaacagcatcttgcctttgcatcttgttttgttgtatctgtaccttgacattgtcaaaggacatgtctgtcccccattcagatattaactctgaaaaccctgacctttttttctctgctccctacagttagaccccttgagggatggtttgtccctgcctgcttcctaagtagtgaccatgtgttcatttaaattcccacagatttaaatgtttcgtttataacagttcttacaatagatcctaaaactcagaaggaacaatttggggataatttctttctaactgctatatggataaaagcaccataggtcttctgaggggtagatatgaatgtacggggtttaccagtatcctaagtgaaggtggttttgttgctgttgtttttgattatggtgagatggtagactaactcctgtcattacatttgtcatttacttttgaaatcatgcatataacacatgttggaaaatagttacaattctaagttatgaaacctcatatccaaaaaaactaaccgtgttataggaatgatatccacctcttcactctaggttggagaattggggttttttaaagcttcgattaacatagctacatctttattgccaaagaacttttttttcctattactcacccaacagattaaaaacatttttaataacttaaagtaaatgtgcattctgcttggtaaatctcgatttttatagctcaactcctttttttatactttataaaaagtaaatctgaaaccaaactcatgtaaatctaagaaaaaaattagctgacatttcatatcctggaattcccagaacaaacttgatgggacatgaaagcaaaattttctatttcatttccaatgaattttaattcatttacaggataaagatggaaaaccactattgccagagcctgaagaaaaacccaaggtaggaaatacatttttttctgatacttaaagaacaatagacatgtaaagtatgaattaaataattttgacagtctggaattcactgtgcagacttgcatgctaacctagtacagaggaaggggaacttctgatggtaacacttggctgatacctgtagctcctttccatatattttaagatgatcttcctcataaatcattactagactataaatttctaggtaaaatttattgcaactagaaactgatgtcaagagggcccttaagtcagattaagctagcacttagagttccacctgatcaaattctctaatgattctattttgccttaagttggtagtaacctgtcacataaatcagcaacatttattaatcgcttgctatgcacctggcactgcaccaaatgctttttgatattatctttgtgagtcctcaatgaatgaggacggtactgttattattcccattttacgtgaggaaattgagacacagagggcctatgtaaatagcccaaggtcaaggggctataaatagcaagccaagcccaggacttagaactcaggctgtctggtctgagtcccagcgtctgatcacatgcccttctatcatgttactgttgttagtgacaatctccacatgccctaaactataccactctcctgaaagaacaaggggtagcagaactttgctgccaaaatcctgcataatatagaaacggagtatatcatccgtgttttgacttattcagaagagaagtcatgaggaaaaggaaaataataatcacatttaaaaaaattatacagatcttcattgtagagaacaggcattttatttgaacaaaattcttctgaaactgaaacatcaagggaatgtttgaccaaataaccattaatactttggtcctgaggtgtttagtatttcttaattgtttcatgaaaattttacttaacgttgataaatgaaaaaatatgccctttataaattagctttgggtgttaagtatgcctcatatgtgttaatcaggaaaaaaattgctccatgaaaactttttttttacaaaataaaaagagtccccttgtaatatacagcacttcttatattacagcctcggagtgaatcagactcattgatgaactttcagaagattttgaccggtctgaatgtaaagagaaaccatctagccaactgaaaagacagaagtatgtttctaaacatataaatctctagttttgaggtttggatcttaaaaaaaaattgtgagacagactgttttagcatcaagcagtctgttagaaagccaatatgccatcgttttttccatgtcatttttgtcttcctttttggatgtgctttctgcccaacctaaccctgatattcttgcaattgaagtcctgcaatgactccttcggaaagctcggaacccatgccttccttcttatcccagcttctgtaactgacctgattggaactgtcacacccctcccctctgggttgcagtggcctttctgcagtctccttcatgtccgccggactcttctttctcaagcatgtctgtagttatgtcattcctctgcttctatccccaggagtttccatccctacaaaaaaaagttcctattaccatattcttgacccagttttctttcctaccaactgtgtccctgtgtcagtaaacagaacaataagtatgtgtgcatccctggcttttctccttggttcctctgtcttgattgacctttctttctaatgctagatcaactaaagtcttaccatcttttcaaggctctgctgaaatatggctttatctgctgcttttccctccctaagcttatccatccaacctttattaagcagaacacaacatggcagaggatctgtagttcttttttatatatcactattaaagcctttgttacaaagaagagtttagctgttttagtccctcttaactctaacatttatgccaagtttaaatgggtagtaagttccttgaacgaagagatcattcctattaatgaccatctgctgagcaccttgcatataggataggcttccataaaagtctgatttaaaacaatttgtttaaaggtttgcttctgttttttttgtttgtttgttttgtttgttttttcttgagatagggtctcactctctctcccagctgggagtgtagtggcacagtctggctcactccagcctcaatcttccaggcccaagcaattctctcgcctcagcctcctgatagctgagactacaggtgcatgccaccatgcctggctaatttttgtattttctgcagagtggggtttggccatgttgcccaggctgattcaaactcctggactccagtgatccaccctcttggcctcccaaagtgctgggatcacaggcatgagccaccacacccagccttgaaacttattcttgtgataaaataagatgggacagtggttctcaaactttagcatgcatcaggatatctggagagtttttttttaaacacaggctgctagactctacccccaaagtttcttagtcatggggcaggggtctaagaatccgcatttctaggttcccttatggtgctgaggctgttgttcagggattacacttccaaaacttgtggcttattactactaccttccattcctacatgctgtatataaagtgctcttaggtttatataaatacaatattttacataatgctatattcataataggcatatttgttatacataatgacaaataaataatagaaataatagcaataatgctcaaatgtattgagctaactgtgttcccaggtactatgcatagcactttgcctgcatgtcttatataggcctcttaccaacccttcagatgtggatactgtcattgttctcatttacacatgtggaaactcagtttcacgagtttcagtaacctgcctaaggtgagaagtaaaacaagttgaaaaaaatggcagctgaagagttttagcatgctttgacttatttactatttacaatccttaggtattcaagagaatcatgttcacaccatataatgtagcggagtgtcttgtggtctaccattactcagtcttattaaccaaatatttctaaacttattgagagtacttggtctttcctcaggaatctaaggccgctgctccagctcctgtgtcggaggctgtgtgtcgacctccatgtgtagtatacagtcagcaccccctgagccggctaccttggtgagtgactcctgggcatttgagcagtggcttgagaaagttttctgcctcctcctgtcactctctgctggtattaccatcattttatcttatcctgacaaattaaaaataaaatctgatatcattatatatctgttgtttctttgggcttcaggggtgtcgtagaaattcagactaagatttaaattttaattaaattactcccaactgtatttttctctactcttctgaaattctagttcctcagtattgtggataatcctgccttttcacttctctgcatcttttaagcctatatggatttccccgaaagcccaaagttacttttttactgactttcctggtagaataacatgcagtaaaatattatgattcctccccactcttcccactgcaggaggtgaaactgactcaatttctttcttttccttcttcttttcgtgcttctctctcactttctaattttcacatgaagtatgatattaagaaggtgaatctttgtttccttttgattttagtgttttttttccattagttaatgatgaatttgactcagggaataacatctgatggaattatatttcaattgtatttcattactcagaattagcacatcttccctctgaacacctacctttcatcatctgctgtgccattgcttagatgttttgcaatgtcttctcattaaattttcacaaggacactatgaagtctgtcctatcatcttcctgtaatagataagggaaatgaggctttgagttgaccttgatccacttgaatttcagagcctcagttgagatgaaagatatggcccctgctctcagctgtcttcaagacagtgtggatatgagccctccccagttttttggggtttcagggtactcttcaggtacttttacagcatgtgtgctaggccacagtggtaaagaaccggagaggaggagggactctaggagactctggtgaagaaagcaggcaaagaggctgtgattggagtcaaaacaacaatagccacattccccagtagaactcttgtaaccaaaacctgcacctgcaccacctgcctcatctgcaagtgtgactgcccgggctttagagggctcaattccttttcaactttaccctgactgtaagctgagcattggattgttagaaagcagacaaaccagaacaaaacaaaaagctcttgtttccctttccccgtcctcctttccagggccttaaccccaccaactctggccatggttgccaggttactgtcactgaggcagttggcatttctgggattgtgacaccctcgaacgccagaagaatagctgtagagtgtaataaaggtcagaggactcaagaaaggcatgaagattagaggtaaaggaagacagaccagaggaaggagatgaatgcgttccctaggtggttcttgtgtgataaaagaaaatttattaaggaaacccagagacctgagttgtagttgtgaatttgataaatcaaatactacagaaatagaagttttagtccttactcctgtttccagattcctttgttttaagtctgcttcttctcctaggttttctttaactgtttcagtaatttcttaagcaagagttggcaaagggcacaggtttggggaagcagtggtttccaaagattctgtagcatagagatgagaaaacagaattgtagtgtgagcaggtgtcttaaatcatgtagcaactcacattgttgcataagacttgggtaccagtgcaactcttgatatccttgattagagtgttgcaactttaatacttaatacttaatttaggtataatcccaaacaggttagaaacctcagggatttttttttttttttttttttttttttggtagctcttgggaataaaacccatgcagtattcaccactaggtggtgctaaatcacttttctttggtgatctttccttttgcagtgcagtttacagaaaaacagcttttcttacttgaaatcatggctaaaatataaaacagaaatacagtttactctaaaattttaataggtgctcattgtgaggtcagagattttaataataagattaactctgagattgtttgacccaaggccttttacatttttgtttgaccaagaccaacagtggaaattcattgatattgcaaccccatccccatacactggaagcaacagtttaaagaatagatttatcccttctatgtatgatgcattttatacacacacacacacacacacacacacacctcttacatttttttttttttgaggcagagtctcgttctgtcatccaggttggactgcatggcatgatctcggctcactgcaacctcaacctcctgaggtcaagcaatcctcccacctagcctcttgaggagatgggactacaggcatgcaccatcatgcctggctaatttttaaaactttttgtaaagatgggatctcactgtgttgccccggctggtctcaaactcctgagctcaacaatcttcctgccttggcctcccaaaatgctgtgatggattacaggtgtgagccacttgcctggtcctgttctcttcattaaaaaagaaaagtcctggccatgaaccattaagttgttcttatgacctactaatgtacagacgattccctttattttcccttgacaccattcatctctgtgttcaccagtgtgattttaaataccagcatggccagagttcattacatttggggagtacatttcattttgaacaatcggaccacaggtagacagttctcactgtgccattcagttagttggtcacaggcagagtcatcagaaccagccctgaaactcctttggtcagtagaaccctgtggagaaaacaggcttccgagcctcctcttctgagacaagccaggctgtcccacggaaatggagaggaatggcctcttgtgggctctctgaaaatctttcctgtgccgtctatgaatgatctccataaagaccacgtctttcttttttcctggtatgcaacttatctgtgatcacctcagtccattgtctttcttatttctaaaccaactctgggtcaggtctcgtaagttcacattatcaacatataatttgcacacaatgtttaatataagaaatttgctcgaatgttaacgttttgttttttaaacatagattctaattcagttgataactcgagttattaaaagaagcatgtgccttttatctgaaataatgatatgcctttctgaattgatagcatatgttttaagggagtgattaaccacctacttaatatatccactaatgcactttcagaagggcacaggccagatgatgctgtagaagccttggctgatagcctggggaaaaaggaagcagatccagagatggaaaacctgtgatggataaagtcaaggtaatggcaactgagatgcttctggaaataaatatcattgatcaccttctccccctgcaaataagttagtcatttgttttgtttttttatttcctgtaaaacatgaccggctggctttttctattattgtgcatatcctgtttaatagctaaacctgaataagctgcagtgttgaacccccacagtggatggtcgacatgcacagccggaggcctctgagtctcatctttgcccacctgcattgacattgctgggacttgggaagaaggggcagctgcctgctgctcctcacagctgtcttgcatcccagcaggctttctgctgtgcctgagtctgccagatgaagttgctgtaggagcactaagcatacggtcatatgtactcctaacctaatgatagatttgtttacctcaaatctagtcactcaggcatgaattttatgagagaaaaaaacatgctaacaatgaaaatggtataatttttctcaggagaaggccaaaaagaagaccgtgaaaagcttggtgaaaaagaagaaacaattcctcctgattatagattaaagaggtcaaggtaaacaggctggagtctttttctattttattttaattcatactgaatcatacacagaacaaaggtacttgggaacagaactggaatataaagatcttgtttcttcaatttcaaacaccaaatagtattagtctactactaatagtgttagaacaccagatacaaactaaaatattcctaagtagacttgatcctcaagtgaaagaaatctaatgtctaagctactaatgttttcctttctaacccacagcttgttacaataccagaaatattaaaaaaccttggtagataggagaactaaaatgaggaataggccgggcatggtggctcatgcctataatccagaagtttagaaggccaaggcaggagcatctcttgagcccaggagttcaagactagcctggcaacataatgagaccctgtctctacaaaaaaatcaaaaaaattaggcatggtggcattgcctgtagtcccaggtacttgcgaggctgaagtgggaggatcacttgagcccaggaggagaggctgcagtgagccatgatcgtaccactgcactccagccagggtgacagagcgagacctaactcaaaaagaagtaaaaaatgaaaaaaaataaaataaggaacaattactttataaagaaaaatttgcaactttcagatataagttggaaaaataagagaacctatttaacattagtatagtgttaagttgccccatttcttctattttgaaagtacagattgtacacaacaaggggaagaccccattatgagtcctgtggtttaagtgcagtcacttaaatgaggcggattgtggacagttgaacaatgtcagtcatctttgtagcaggccaggatttgaaagagtattcactaaacttcattaacaattctagaaaatcaaattcatgcttctcactcatccatgtgcctagcccatttatttagcagacacgggaactagactgaactatccgtgattgaaagtttttattctggaaacctttatatttgcttcctgagttttacaattcagttgcagccatagctttctattaatttgggctcatttgtacattgctttgcaaagttcctagagagcatgctagggccacatgttctgtctccactgagtgcccattcagtagaggctggtcaagtgcaggtaactctcttcatgataggtgattggttggtgatttgctctctccctttactgaatttagagtagtgtttaaggaagcagttgattcacagtccctgatcactttattctgtagtcattcatcctcctctgacttacctcacacgttattagttacctattaataacattttcaggcatagcttcatctcatttaaatcctatgttggtattcaccagctatgttcccatcaggtctctcagtgagatttggctccccgagggcaggccacaacctccccttccagacgcagaatgcgcagtgatggaaaatcgatttcagtttgagtagggagcaaaagtgctcccagagtcccggcatcacttaggaaattttctgcctttacagctaagagatggtggagaacaagcccagttcagctttcccctgtacctgaagaatggtcagaaggcaaaagtcagtcatgagggaaaaggtgatccaagttgaatatccctcatctgacatgcctggggaccagaactgtttcagattcagacttttctggattttggaatatttgcctcgtatctgttgagcagccctagtctgaaatccaaaatgcccccgtgagcatttcctttgagttgtcaggtcagcactcaaaaagttcaaattttggagcatttaaattgttttcagattttcagattagggatactcaacttgtcctctaaaccattgcacttcacattttcaatgaaacaaaaaccaaccttaaccagtttccaggtgaaatattcatatatatgtatatctttgtatttacttatttttgtgtaggtggaaaatgggatttactattagtatatagatctccttttactaaagagccccgcatgctttctcattttgtcgtgttactcaaatgtggcacttggagtcataaacagcttgacctaatctaaccataagttgcagagcgtttcactgacaggttaaactccctgagggcaaggcctttggcgattttctgttgtattgccaatgcttacttaggtcagggcttggcatgtagtccttgatatgagttagatgtgtggcttacaaggttaaccagcattttccagacaacctctacaagcccacccccatgtaggtaaagggcttatcccacactgtcctgcaaaccccagtcacagaccacataccacactatgctgactttcacgttttcctgctgtgatagtctctaggcttcgaggtcacaagccatacctcatccagtgtgcagcccccgtgactcaggaatgcctggtgttgtgagctgtttgttgccatgaactaattagagcgtattctctggtgagagaatccttgtgacatgatggatctaatttaaaatgtacaacagcaagtataacctgtagaccctttgaatgtttacaaggtttcatactttggataaaatgtaaaatgatttcatgccatgtgtttcccccccggataggataaagatggaaagccactcctgccaaaagagtctaaggaacagctccagtaagcaaaccagttttctctgaagatatcttttccttttggccctgattgcaatgtgtttgttgatacatttcctggttcttgcagcccatgagtgaagacttccttctggatctttgtctgaggacttctctggtccacaaaatgcttcatctcttgtaagtccaaaactctggttttatttctttagttttttttttttttttcctttgagatggagtcttgct

SEQ ID NO: 2902 - DNA, 94035 bp, Homo sapiens
aaccatcacggccgggcgcagtggctcacacctgtaatcccagcactttgggaagccaagcgagcagatcacaaagtcaaaatatcgagaccatcctgaccaacatggtgaaaccccattctactaaaaatacaaaaattagctgctcatggtagtgtgcacctgtagttccaactattgtgagactgaggcaggagaatcgcttgaacccgggaggcagaggttgcaatgagtcggatcatgtcactgcactccagcctggagacagagtcagactccatcttaaaacaaacaacaaacaaacaattagccatcacagggtgacatcaggaagtatggggagagtctcttcatgacagaaatattagtactagaagtgactcctaaacagagtccagagaccagaagggacaaacagcgagcactttgctctgcctctcaaggcttctgtaggggttggagttcattgtcttgatctcttcaggcccctccctcagagagaaacatccgtaacacacctaacctagacctagaatacaactgtggtgcggtatgaaggggaagagtctgtccttttctccacatcactaagtttacatttttctgttttcctaacttaacagaggccagacacccaaggggagggtggagatgtagagagaaatcacgtatgcttcaaatatatgaaatacagtgtttttctaagttcggttatctcttcttagttggaatttgtgtaagtggacagatgaagggtagaggggggagaagaaagagaaattgtgggggaggagaagctcagactcaacactgtctccacccaccctctgtcagattgcacttcaaccctaaccctaacctcagtctcccaccactgagcccctcccaagctctcctgggtccactgctcttcctcttgctaatgctgctaaggtctattgttgaaacagtaattccctgttaaatattacctacattcaatatctttccttctagcctattgacaatccttgaaccactgactcacacttgctttatataaatatatatattttggttacatcatagactttgcagtcaccaaatttctgcttcacctattgtgttcagctctctcatcctaaaattgcgataatgatagttcttatgcaataggttagttaggaagagtaaatgaaacggataaggaaaattcctagtacagggcctggcaagaaatgagctcccaatagttgtttgtattatcattctcttttatctgacatagtttccccatgagatcacaatgctgattatttcaaactgaactggtaaacagaatacaaagatgaagcagtagggtcccttcttttggccactccaaggataattggagtgatactatgatatgcttccgttcgttttcatccatgtcaacatgaaagacagagttgatctcagcctgagctagaggtaaactatctatgtggtgagagtacaacaatgatataatgacaatccaggtagcctcttggcttaatgtggcccatggacagttttgtgtggtgaagggtttttggtttttgttttgttttcaatgaagcagcatgccttagacagggccagtgctctctccagccactgtctgtggtcttgtaaccatcatatcacacttcacacatagttacctgtccatccacctcattgtccttgaagttgtgacctaccactaacatcatggggagatatagtaaagatttcaaagcagtgaatcgttcaatgttcctcactttaaaaacataacaaacagcatagttaaaaacaagtcctatttaggaaatgaggtaagagggaaaacctaatcatttgctcatcctaaagaagcattcttaaatttgaatatatgtgttttttattattattattatttttaaattatactttaagctctggggtacatatgtgcaaatgcaggtttgttacctaagtatacatgtgccttgttggtttgctgcacccatcaactctcatttgcattaggtatttctcctaatgctatccctcccctagccccccatcccctgacggccccagtgtgtgatgttcccttccctgtgtccatgtgttctcattgttcagctcccattatgagtgagaacatgctgtgtttggttttctcttcttgtgttactttgctaagaatgtggtttccagtttcatccatgtccctgcaaaggacatgaactcatcattttttatggcttgtagtattccatgatgtatatgtgccacattttctttatccagtctatcattgataggatttgggttggttccaagactttgctatcatgaacagggctgcaataaacatacatgtgatgtgtttttatagtagaatgatttttaatcctttgggtatatatgcagtaatggggttctgggttaaatggtatttctagttctagatccttgaagaatcaccacactatcttccacatgattgaactaatttacactcccaccaacagtgtaaaagcgttcctatttctccatgtctctccagcatctgttgtttcctggctttttaatgattgccattctaactggcacgagagatacctcattgtggttttgatttgcatttctctaatgacagtgatgatgagcttttttcatatgttttttgcctgcataaatgtcttcttttgagaagtgtctgttcatatcctttgccagtttttgttggggtttttttttcttgtaaatttgtttaagttctttgtagattctgatattagccctttgtcagatggataaattgcaaaatttttctcccaatctgtaggttgctgttcactctgatgatagtttattttgctgtgcagaagctctttagtttaattgtatccatttgtcaattttggcttttgttgccattgcttttgttgttttagtcatgaagtctttgccatgcctatgtcctgaatggtattgcctaggttttcttctagggtttttatggtattagtcttacatttaagtctttaatccatcttgagttgatttttgtgtaaggtgtaagaaaggatccaggttcagctttcttatgtgtattattttaagggatcgtgtgtgttctgagtccaggaaatccatggtaaaagtaatgggagcctttggatagtgtgagttagaatttaacctactcccattgagggtctccctttaggttttcctaggagtcccccagagtgtctcacaaggcttagacatagatcctatatgacacactatagcatatgtcactttctactttcctgcctggtgcccttaagcaaaggtcatgtcaaacaaagctggatgaaatagcctccttccggtcctccataagcttccttttccagtatatgtgctgccgaagcgagcaccataagcttcctttctaaatgtaaggcctctgtcagttgacatcagcatctctttgggacatccatacctagcagatgctgaaaccactccaagatacaccagtgccacttccctgccagacacattactctgcccccacatttcctctggatactccagcctgtgtgtttgggcctgaatgtgcttaatcatccaggtaccaaagctgtgctatcttcctcacagaaatggagtaatcaccacctccacagccacttttgtgtcactggctggcacataggcatcaccagagcattttctaagctcactgctttacagagtgaagggagtccttctaggttttctcaaaacacctctgctccctacacctagctgtttgtgtgtgatgtcagacctaagagatagacaccatgtagcgctaagagtgagtgaacctcagatacctgaagtttagttgggtcaagtttatttgcctgattctccttcccgcagggtgagtttttccttcagaggctactctttgatttaattagagttgtactgtcttgtcccatcagggccgtaagtgcacagatgtacaacagagtactcagaaacataatgcacatatgtgtaacagaatactcagaataaatcaaatttaaatcctcttataggctgaaagtcttttaaaataagctgtactttctggtgcctcaaagatgagctagctgatcatttcctttgggtagattcctttagtctgagaagaaccacctggatgtattgcatgtaaagcgatactccagttcagggagagcatataatgagactaaattgagccaggcctggatccagtctatggatggatagagttcccatacccctctgtgaaactcagtgccctaaagagattgagattacaagatacaaattctggaaaagtacttgctacacaggagcttgtgcggtgaaatcttcaggtcccagttcttccactttgtgtttcagttttaaaaacacatccaaaggactgcagtaacctctattaaggtgagatggcaagaaaagactaaagagctgctctgaaattatcaccaagcaatagtccaggaaagctggagggaaatggatccatactagctttgtagaagcacccaggatgtgggttgtgagagtggcgactggctctgggatgttcagagtggtactgcatctcctcttacccacttctagggtgccaccacatgctttggaggaagtggctgctttgagtgaccggcaatggctaacactcagcactgtacacttggcagccgggctaattttggtgtaagcttactgctgggggagggtatgtcctgcttcccacaggaattctgtgtcttgtaaggtttcaacacactagtgagtagaacttggattagattgtcttggttttggcagtcatctgcacttcagcaaaaatgaagtgaaatagggcattctgcccccaatagctccatcagcacatgatgacagcttctgtgaaagctgccaagattgctcagcttcagaacgatgcagggtagctctcaatagctttacactcagtaacatgaaaaggtaaggttttatgcagcactttcataacagccaaaagctacagacaacccaaatgtccatcagcagattaatggataaaatgtggtatgtaaatgatgagaacttatgaacacaaagaagggaatagcaaacactgggtttactttagggtggagggtgggaggaaggagaggagcagaaaagataactatgtggtttgggcttaatacctggttgatgaaataatttgtacaacaaacccctgtgacactagtttcctataacaaaccttcacatgtacctgaacctaaaataaacgtttaaaaaatgtcatattacatacaatggaatattatttggccttaaaaaggaataaaattctgatacatgctatacatgaacaaaccaaaaggacattatgccatgtgaactatcacaaaagaacaaatactgtttattccacttatgtaaggtacctagagtagtcaaattcataaggacagaaagtagagtgtggttacctggaactaggggcagaacggaatagggaattattgtttaatgggtaagaggattctgtttgtgatgatgaagttcttgaaataggcagtggtgatgattggaaacaatagaaggtacttaatgccattgaatataggtaaaatctgtattttaccacaataaaaaatttaaagaagtaaggtgttggaggttggattggtggataactgcatttgttgctactctgacatatgggatctagaaatctatgtaacttgaatatcaaagcaaatctgatcttatttttcttacgagttagtgatgtcaggagaattctgtattacaaaaatctgatgtacaagaataaaacagaaatgagcatcctttaatttgagagatttcttcaagcctttaaattatttatttagatggatccccatccatgtacctttgctcaactgtcctcagaccaggtaaggttcaaatccaaatataactatacctaggaaatgactgtgaaccatgtcctccaaattgttctgcagcggtactgtgtggaatttttaggcttcttatttccatactcagttccccttccacacaagcccgttgcccaatcctcatattgtactgggaatatgaactgtgtggggattttgttacatgcgtcttctgattcaataggacttagactgcatttctcacaaactccaagggagctgctggtctgagaaacaccttttgagcagcaaggccccggtcatgatcccttttgtgtcggtgtgtgggtctttttctttcactggaatgcatgccaccttgaaggccaaaacttggatcacaactgtgtatctcttccagcctccagcatgatgacgtatgcagacataggagccccaatactggtgcaatgattagtgtcaaattacaaaaatgtaaacagcaaatatagaaagggaagaaaatattaattagaaaataaaaatggaaaaactgtgaatagtgtgtgatatccagatgaatagactttcctaagtaaaacaaatgagctttataatacttcaatgctcacatgccttgattaaaaagtttaatactcaggaaaatatgtaggaaaaagtacagatgattttttattaggctgacaagtggcatctttgaaaggaattttatctttcaaatttcaaaaaggttgtctcattgcacacatgaaaatcaaaccaattcttgcctgtctaaattaatttccaggattctgtgtgtggggcaccatataataattccacaatatttagcacagtgctttgtcctaagcaactatgaacaactcctcagcactgttgttcttctttggaataagtctacataaaggcctcaggaaataaatacaatattagagtgtaagaaaatcagttaatgaaaaataatatgagtgaaactgatccttgttgatgtataaaataaattttatgctacatagttataagttgccgatgagaaatatcttgaaataggttgtgaattttaagtttgcgcaagttttttttttcagaatcaaaatgtatttcattctgtgatcttcctgtgatgctaattcttctggggcacaattttttcttgtattattcagtgggcagattaatttctcaatacgtgctaatctaaattgagatgcttaaatcttcacctgcactgatctcttccattttctgtggcacaaaaatgaagtataatattcatttttctacatcagacaggtctttctgatatacctttcttcacgtcaccagtaacaaaaatagaagccctcattcatccctgtggttaccatatggagaatgtcagtccaacccatctacttaaagcagatctgatgaccagagagcctccctccctgatttttattatgtcttgatctctgtaaattggaggccataaatttgatagcagcattacagctctgaattgaatgtataatttaatttataaactcatgttctccatttcaagaattgtaaaaacaaagtgtgtgctgattttctaacatgaattagttttttggttagtttgagaattgcatggcttgagcctttaatacatacgaattcttaaacacttgttcctttaatctgctagtctcatctctctctcactatttatttgaaaggctttgaagtttcttattacaaattacagaaacattgattaaccccatagatttatttaagtgcttttgttattagatatttcagaggactcacggagcagaagggcaaaaattctgtaattaatcaggattgcctggctctgttgtacagtgtcagtgaattggttcccagtaggagagttaatagaaaaacattcaattttaaatggcctggatgcatcaaagggattaaggggtaatacgtttaatccctgtaactcaaacaagagaaaattttcctgagcaatgaactgcataatgtgtttgtggggcagcaaatgatattgtggaacatcagctaaacagccaactttgtagcccagccatttcgcatggcatatccgagtgacaacccaggagatttagcagcttttaaatgctagcatttgagtgaaactaaaagggtgctattttggaaagtcctagtctcaggaattcccaagctatcagagatcctactgcaaggctttaggttaaaactccaaggcaggaatggcaattaggtggtacacaggccacacatcccccaatacagggctcataacagacattcctcttcccttatagcaccctttcccacaaataatgtatcaaatttaatctatttgccatccctgttccaggtattttgtaaaaagaaaataatataaattatttaatctccatgatcaaatttctcagtttccaaacatctggtgaggatgtcaaataacatatagatacaacttaacatgtatatattgttaataacctgtattattttgttttggatggcttctgagtattatctcttaattcaactttttcttttgagaaattgtaaatacacatgcaatggtaagaaataggccaggcgcggtggctcagcactttggaggctgaggtgggaggatcccttgaagccaggagttcaagatcaccctggaaccctcccctccaccatctctactgaaaaaatcaaacaaacaaacaaaaaaaaaaaaaaaggaagagaagtaataaagagttcagaaacatcccatgtattcatttcccagtgtcccacgatgttatattttgcagcactagagcacattttacaaccaagctattgacattgatagagtcaagaatataacatttccatcactacgaggatctcttatgttgccagttatagccacagccattcctacctggccgcctcttctccttaacccctggcaaagactaatctgttctccatttcataattttgtcatttcaagcatgttgcaaaaatggaaccatgcaatatgtaactttctcgactggactttttcactcagcgttaattcactggagattcatccatatttttctgcatgaaaatatacttgtttgttttttattgctgagtagtattctatggtatagatgcactgaatttgtttcatcattcacctgttgaagggtatttgggttttttccaggtttaggctattagaataaagccactataaaaatttggatacaggattttggtgtgaacataactctgtttcctggcgtaaaaaatgtgcccaggagtacaatctctaggccacatggtaattgcatgtttatttttaaagaaactgccaaaatgttttgtagagcagccatagcagtttaaatccccaaagctgatctgtccagtttctctgtatccttgccaacatttggtggtgtcactattttttatgtaagccattctgataggtgtgcagtgatagctcattgtggtttttatttgtatttcctactggttattgatattgaacattttttcatgtgcttatctgccatctacatatcctctcaataaaatgtcttttcgtgtcttttgcccatcttataatgatattttttgttgctggttttcagagttttttttaagttaacgtatcttttagatactagttccttgtcagatatagatgtgcaattattttttcccagtctgtagcatgtcttttcagtctcttaacagagtctatgtgaagcaaaaatgtgtaattttgatgaagttcaatttaccaatttccttttatgtgttttggtttcaagtctaagaattatttgctcagaactagatcctgaaaattttctcctatttttttctaaacattttatagttttatgctttatagtgaagactgtgattcaattttattaatttttattaaggtatcagacttaagtctaagttgatctcctcctcttccttcttcccttccacctcctccttctccacttcgctgactccttgtcttcttgttgtctatggatgccaattgcctgataccatttatcaataaggctacctttcctcttttgaagtgtttttgtacttcattaaatagaagctagaaatatttgtataggtctatttctaggttctgttttaagatctgtatgtctagccctacacaaatacaataggattgactactgtggctgttaagtctgaaatcaggtagactggttcctcccactttgtcttatttttcaaagttattttagctggttagtgccaatgcctttccacataaattctagaattcttttgtccatatctataaaaaattactggaattttgaaaggaatgatattaaccatctatcagttttggagagaattgcctcttgactatgttcagttttctgatctatgagcatggtgtatttctccatgtattgaaacttctttaatttcttttattattgttgtttagttttcagcatatcaatactgtacatgtttgttagatttatacctatttcttttttttgagcaattgtaaatggtattgtgcttttatttaggtgtctatatgtcctttgccagtatatggacatacaattgatttttatatgtttccttgtatcctgtgacctcactggactcacttattagttcttgtagtctttttgtgaatccttaagattttcaatatagatcaagatgttatgttcaaataaatacagtgttatttctccttcttcacatgtatgacttttatttctttttcttatcttattgcattgactggaactccagtgttatgttgaaataagcgtagtgagagtatacatccttttcttgatagtaggggaaagcattcagtcttttactattaagtatagtattagctattgattttttgtagatgcttgaagctgatgaaacttcccctctattctaatttttctgagactttttattataaatggtatggacttttgtcaagttggtacaattatgcaatgtttttttcttagcctcttatgatgattacagtgattgatttttaaatattgagctagactttcatccctggaataaatgccattggtcaaagtatgtaattctttttatatgttactgactttttttgctaatattttgtaagtatttttgcacatatattcataagcaatattgctctttttttaaactgcgtattatcttgtatggtttttggtatcaagataacactaacctcataacatgaactgggaagtgttctttattttctattttctagaagaggttgtgtaaaattggttttaattcttgtacataagttggtagaattctccagtaaaaacatctgggcctagagattttggggggaaatttttgattataagttcagtttcttttatcctttaactagtacatttatatttaaaataattattgtatgttataacttaactgtgtcattttggttttatttttcgtttgttctgtttttcattatgttttctttttcctacctttctgtgggttacttgagcactctttataattttattttatttgtttatagtgtttttgaatgtatctcttggtataacttaaaaaactcttcttttactctagctatttcattatatatatattatatatatattatattaaatatatatatttaaatattatatatattaaatatatatatatattatatttatatatatataatatatatatatcataacattacaatctactgatactgtcattttaccagttcgggtgaagtatagaaatttacctccttttaaatccctttatcctcccccatttataatataattgtcttaactattatattttctctacattcatttatgttccaaggttctttcttttagtgtttcctttctgttaggcaaacatttaactataattttatggtagatctgatgataacaaactctcaggttttttaatctgaaaatgtcttgagttccccttcatgcctgaaagatatttttgctggttatggatgctagattgatgatgattttctttcagcactttttatatgttgtgccacctttgcggcctctgtggtttctcatgaaaaattcattgtcattttaattattttctccatagataagtgttgtttttctcagactgtttcaagattttttctttatctttggttttcaaaagttaattattgcgtgtattagagtaaattttttggctttattctgtttatggcttgctaagcttgtgaatttgtaggtttatgcctcttgtcgaattgagaacttttcagccattattattcaagttcttttcagcaccactttctttctcctctccctccataattccagtgacacaaagtagatattatgttgtagttccacaagctcctgagactgtttattttatcagtgtagtttttttttatatttcatagtgggtaatttctattgctttatcttcctatccactggttcttgtttattttctctgtcctctccattctgatttttaagtccatctgcttaaatttttattcagttatttctttttatttcttttacatttgatttttctttatctcttctatttctttcctaggctttctaatttatcatttgtttgaaacacatttgtaattgattattggagtatttcataaaagccactttaaaatctttgtcaggaaattctaacatctctgtcttcttggtgtggagtctactgattgtcttttttaatttgagaacttcttggttatttgtagagtgaggatttttttattgaagtctggacattttcagaattccattataagactctcagtcttacgcataaatcttctgttttagctgttttttcttttttttttttttttatcagacactgctcaacagagagatcatgcttcattatcgtcaggtagagtagaagttcaggctttcctttctcctctattgatactggggtcctcattattgccagagggagatggaagttgccaatcccatggtgttggtggccttgttagcactggacaatggtgaaaggactgactcccctcttatcctcctctgacaccatcccagtggagaaaggaccaattcattactactaggtgggagtgcagtccaggctttacgcttggtctccatggactgtgtgggcttgggagctcattacctgttgggggatgaaagcccagcttcatatttaaccctctctgactccaccctggtggagatttcgggtgccttggtatggcatcaggagtgtggaagtctaggctctcacttggcctctcggcacaggtagagtggtgctacgattttttttctctgatgaatggctggagtagaacagcattgtgtaagaaagttttctttctttctaagctaactcttttggtcctctggctagaggagcaaactttttttttttcctcctgcacccattgattggcatttcatggtggttgatatttcagcttctagtctgggatatatgtgaaacaaaaagaaaatccagtggtctcaccacgtgctattttttgggtcttcatttccatagccagtcttcctccttctttccactcttcaagtttcaaagtcttattatgcttgttttctattgactacccatggtttttagttgtactagtgaaaggaagagggaagagtgtatctactccatcttcccaggaacagcagtccaggtcacctttttattcaataggaaattttagaaaatatcctgcggtattttattataagcgagtaatcattatgcatagaatctgagaatgttgttttcaaaaatgcccagaggcccaaatacatttggacataacttagatattaaaatgttattaggaaagctactgctatgttataaacagagatctctagctctcccctacaatagaagacataccatcttctcttacgtgttggcattctgtgaacctgctcactagttttgagacaagccctagatgactaccagattttttttttggtttgttttttagctgaggtccattgtgtgtttaagcaccctgaatgccctcttgctcatgggaactgagggttataataaaactacttacataaagttgctcatgacttactagttacacttccagtaatatttgcattttaagtgaggggtactacaaaaagagcaatgtcaaagaatggacctcatacaatatgttttccatcatcagtatgggatattttctgagaagaagaacatattaccagaatttttaaaattatgagaaatcgcagttaccttgtaattcaatttaagtcaagtcctagtggtggtgtagaattttttttcaaagatgttactgttagtaatatctttactttctgtgtatgttcatgaagactttctatgtgaaaaatatgtgtgtgttgtgtgagcatattgcattctgcttgattcaaacaattcagcctagagcacaagaagagaattggttgttcaggggatcatagcgaccctggctgtttccaacttgaaagagtttctttgttcatggaagcccagcacagcaaataagagtgtggctctaggtttagtgaagccaggtcaaattcctgctctgtcttttacaggtaatattgcttcagtaactttctaaacctaaattcttcatctgttaattagacattataatattatctatctcatgtatgataattcatgtaatcactcagtatattaacacatacatggcacagacttagtaaatgttaggtatttagattagtctttgaattactaagatgatgttcccctcgcaaggacagatacgttgctctgtgatacagcatctgtgttgtattgcctccctggaaaaatgctctgtaaggataaatggctgaaaccttcaatgacatgagagaagcttgtgatcttgcttgtggaccaagtccatctgctgtgtacctatcacctcttaacttctccaaaggttgaattagcgtacaccatctttatgttttgaaaatcttgggctatcatgaaatatgtcttgcttctctctcttgtaatcacaccacattgttttaaattattacaaaatgagagatgtgtggtgatgcacaaatctaaatatattgggagagtagtttatagcagtggaaggggttcctgaattgtaataatttttcttgagcggtaattttgtaatgataggctaatttgtcaaaatgctagtcatgtttatgttatttgaaataaagcaggattattgctttagccacaccccgtacttacaggaaaagatgtacttaatttttaatgtcctcattgccaaatacttgatatcagataaacttagtcatggcctcagcaactgggttaatctaggctacaaaggcagtaatattgtgtttcattaatatctagaatttaataaatcaaatgaatattctgagcatgtgcaggaccctacaatgcctatgagtgaggatagctcacagtgtccttcctggacagagtgaggtcacagtgaggagtgcagcaagaccatctatgaggaccctcccactaccccctgccaaccccacttagcctggcttgagtctctagaattattagttgtccaacaactccacagttaagcattttgcaacctcaggtagctgactcatcacaggactaaataacaagtagtatttagaagacactaaatgtatgttcagttgatttaatgaagttaagtggaagagaaactaatgtcatttccttctgaaggaaggagaagggggggcattcccattttttgaagacctaccatgtgacaagaagaagggtgttggcacatggatgtgttatggcaaagaacagcatcatataaggagtttgtgcttgtcatcaccccagcctgggccacttccttggagaattactatgactctagcaatgtgattctttaagcctatgagaagagaagcaaaagggagagttatggaaggaggaaactggccttcattgagaaccgctatgtggccaggaccctgctcaatagttcatatagattcacatcgtattttgtcagccccttcaagtcaagctgtgaagtgcagtggtaccctgttagtacccccagcccaagagatatcgacgtctgatagaatagtattatttttccaaggaacttccattttgatagtgaccaagggtgatataaaggtttgaggccacaaactctaactgaacaatatctatctatctattgtctgtctgtctatctatctatctatctatctatctatctatctatctatctatccattatctatctacttacctactgaggagagggagggagacagagagagatagacagagggatagagatagaagagggagagtgagaactcagaggattggagtgtcctcactgtatgaggttaactctgactacccacattgttgatcttactatcttgccctgagaataatatttgacagaaaatgttatggagaaaaacctgtagtgtagtatactgaatcaaagtagatgctggtatatgtacttaacattatctttctttatcactctgtccacttttttccttttcttttctcattcccagttgtttttatgaggcttatgctggcacagtctgtcagagtacttcccttacctgctccaaagtaaaacatcaatttggcctttgtttttcccatttgcacccatgccaagctgttattggatggtagtcagcccacttacgtgagtatacactgtatgagtatctagttagtatctagtatagtaaatgtagattacatttacagaagtatgtttcagtttcaacttttataaggctattagcatttaattgcctaagttggttatttatatgatgatactaccagactcaagagaagacctcgattaagattccaggcctgaaaactttcaaaaatattctcctgacctggggactctccctgtagcagggatttagcccctcagggactgcctgtgccattgcacattacggagggagggtaggtggactgattctgattctgaggcctggtgcatttttttatacccatcctcctagaattacttctgaagtcaagccttgtcagtttgggtaggttcccttcctatcaccctttttatattgtgccaatcttcttcagaggatgagagtaccttgtcgattgtgttttattcttcttggtctcctcagcacctagtataggcttgatccaagtaggatccagtaaaaggaatgaataaatgaaagagaggagaaattacatggattttttttgaattttgactcactcaatttattgttaatgaatgaattatctaacatttcaatgtacatgaataaacatgtttatattagaatgacaccaattcactctttaatataaagcttcaattattttaatctataaaaccataaaaaccctagaagaaaacctaggcaataccattcaggacaaggcatgggcaaggacttcacatctaaaacaacaaaagcaatggcaacaaaagccaaaatgagaaatgggatctaattaaactaaagagctttgacacagcaaaataaactaccatcaagtgaacaggcaacctacagaatgggagaaaatttttacaatctactcatctgacaaaggctaatatccagaatctacaaagaactcaaacaaatttacaagaaaaaaacaaccccataaaaagtgggcaaaggatatgaacagacacttcttaaaagaagacatttatgcagccaaagacatatgaaaaaatgctcatcatcactggccatcagagaaatgcaaatcaaaaccacatgagatatcatctcacacaagttagaatggcgatcattaaaaactcaggaaacaacagtgctggagaggatgtggagaaataggaatacttttacactgttggtgggactgtaaactgttcaaccattgtggaagacagtgttgcgattcctcagggatctagaactagaaatacttttgacccagccatcccgttactgagtatatacccaaaggaatataaatcatgctgctaaaagacacatgcacacgtatgtttattgtggcactactcacaatagcaaagacttggaacaacccaaatgtccaacaatgattgactggattaagaaaatgtggcacatatacaccatgaatactatgcagccataaaaattgatgagttcatgtcctttgtagggacatggatgaactggaaaccatcattctcagcaaactatcacaaagacaaaaaaccaaacaccgcatgtttcactcataggtgggaattgaacaatgagaacacttggacacaggaaggggaacatcaccaccggggccttttgtggggtgtttgatgttccccttcctgttcccctggggagggggggggatagcattaggagatatacctaatgtaaatgacaagttaataggtgcagcacaccacacggcacatgtatacatatgtaacaaacctgcacgttgtgcacatgtaccctagaactaaagtataataaaaaaaattacatggatttttaaagaataaaaaacaagacaatctttacaatctctgcttagacacatccagataagggttctcgatagctccataagtcaactcttcattttataattgttataatgttcctcatttggagcaaatatggatactccataattggaccattttcctccttgtttacccatttgatagactagagatgtggacgcctcttatatgttatagacatgaagctcccaattcggtttaccttcttttgcaagctagacatcaaccttcctcgtaggatgtgattttcagaccctttatcgttccttgtcccgcttttctgatttatacattctctacttaaaatgtagtacccgaccctgaatacagttcttagacatggcctgacagtgacctgggtattcttattgtctacatttgtctgccatcctgctacctactgcacttcaaggaactcattttagccaaatgaacttccttccttcttcgattatgcttctactctaatcccttcgtaacttttctactgtgagaaactagttagaagaaaacttgagcacaccattcacctatgaaagacaggttcaagaggtttcagcaggtagccagttcctccttgtatttctctcagggctccatcctattggtcttctctgcctaaagtcaatgatgcttcctaaaaaaaataatctcctaaccccaaatgcatagctcataatagtgccatccctttgataaatgaaataagagatgaagaaagcattggtcatctttttatgcttttggatcagatgcttatctccttgtcccatcccactatgtcttatgctgtcctgaccctgacagtggggggaaggggggggggaagaaaaaaaaagaaaacaggtaagattgctttactctgcccaatctttttagatttccttattcctccccacctggagccatgtgatgttttctattcccgagatgagattgcaagaggagtggaatcaggcaccatacatggtagtctagagatcatgcctggcattcactgagcatttaatgcctattaacatagtacaagattatgttggtttttggcctactttttacaacgtaggttcttactgagctgtggccatgaaaaacctcctttctatgcttgtgcaattgccatttgaggcacaaattcaggttaaaattttatctttttgcctaacataccttgtaataattaaaaagtcttggatttttctctggcaataatatggatctaatttgtaaacaagttttaattttttatttaatatgagttgatgaaatgtgtgtacagtcagccttctatactgtgggttctgcatccatggagtcaatcaaccatagatctaaaatatttaaaaaatatgtgtctgtactgaaaatgtacagacttttttccttgtcatcattccctaaacaatataggtaactatttacatggcatttacactgtattaggttttttttttcataatctagacatgcttaaacagaagaatgtgcataggttatatgcaaatatgatacctttttatatcagagattgagcattagaggttttggtattgggagagaggtcttgaaaccaaaatcctgtgaatttgaggaataactgtacttaaaaactccaacccattttcttctatttgtttatactttgtaacaatttctagtgttattgctttgtgatcacattgtatacagtgtaacttattttttaatgttttgttttctttgtgtgtaggataatatttttgtaagttgtacatgagtgcttaaaaaaaagatgtactttttttgctacagagtttgctatatttatctatttacacttattatgagcttattcagatctgtatctttagtttcttgttttcttatttgaattatcaacgacgagtggtaaattctgttattccaataacattatgtttctgctgagttctccttgaattttaagtttttgatttatgtattttgatcttgactgttcaactcatggttttgtaaccatttatatttcctgtagattgttttctcattaattgatacacggtgtgtttcttggtcttctactgcttctattgttatttttgtcttgaattctgatatttcttactccagtattccaaagttatttgcccttaactgatgctttatttttttaactatcctctcaccttaaatagatttattttgatggctgtcttccataaagttggatttaatttttttagtcaacttgaagttatatttctaatacaaatgtttaaacaatttacattttctgtcataattaaagtacatttgtttatttctgccaccattttaggttacctgttttatacaggtcttgctgtttcttttctttgaaaaggtggataagtttggctaaatgaaaaatgtctttataatgtcaaaaatcaaacatttaaaaaaataaaaagtgatcaactggggaaaatatttacaatatatgtactggcgaagagtcacactcttaatctgttaggagctctttcaaataatttgaaattatagataaagccaattgaattatggggaaagtttacgaacagacaaccctttaacaaggaaaaacaaagttcgataaatattttaaaatactcaaactcacaggtcagaaaggaagcataaatcaaataatgaatcgttagcattttgaacttatcacagtggtagccttctttttgataatatctgagtttgtggatttgagttaaatgaacagtttcctaagcaaaatggatacatagaaggaaatgtatcaaaagccatgattatatgcacattctgttttctccagaaaattcacaaattatcataaaaaacaaaattattttagaaatatacacaaacgtgtacaatgatgctaatcatgatatttaaaatgataaaatattaatgacaaaagtaaaatttggttaaattataataattcatacgatgcaaccatgtttcagaggaacattgagcagccataaaatatttggtgtgatgacatgttaaaaatgtttgtgtataatacaaaaccaatttgtggtagtgcctgcattgtatatacatatatacacatgcactttgaaattgaaaaaaaaaatgagacaggctggaagatataaacccattgttatcgttggaatttggggtgattttcattttttcttataattttaagatttttcaaattctcaagaaagaatatatattctttgtagtcataaacgaaagaaacatttctaaaaattgagcagggtcatggcaaagcactagtaactgactattagactgaacataacaactttcagtgtggtgcttacacagccatgagccaccctgactccacaaatctgctcacaggataatcaagagagagtttgtggaattcctctcagaatcaacttcattttattaccaggaaccaactgaggccattttagcttaagactggttgtcggtattcataaattctttttaaataacaatctcttttaatatatggggtctccaacataataataatagccaaattcatttaaacctctactatgtgctttatatacattatctcatgtaattctcacaacatctcctgtcttttggtcttgtgctctttccactgtatccatgtaatcaactacaagatgttttgaatgtttatgttatgcctcttagaaaacatcaaaatatcttgtggggatatgaattcatttcctatcaaatgagatctttacccaggttttgccacagaagccatccaggccttatttacatggctgatgcaagttcagaaacagccttatggtcaccatgggcaagggcactgtggcaagagaagtggcacttttggtgggatatcaggtggggctatcagcctttcctgccaaggctaggaaactgtgccccaaatgagtaatttcttttctatcccaagatttcttctccagtcacattaagagggttaacagtcctagttttcatgataaaccctccttgtaatgattaagtcttcagtcctctagctgctgcttggacaataactttgaggaactgagggaccagggatagtaaaagagttattggcaggcccaaactgaatcctttctctacccttactcctgtctggtcttggcataatacatgtttctgggcctaactttttttccttcaataaaatggaacctgcttcaaaggttgttgtgaggatgaaatgagatgccatctgtcaagtgtgagtattggcatggactctgctttctgcctgctgttgtttgctattgttagccagaccactcaggcattgtcatactggctctgtcccctaggcacttttatcgctccacatccagtcttgtgagatactcccctctctaatggcctgtgtccaaattcccaagatacaagtagccagtgatatattgtaaatattgagtatttagtcttcaaaacaaaaacgaatacatacagtgatatgatacataagacctgagagagtcaagcagtcaatgacttgttgttatgttaacagcattattagttgttcaccaccttaaggagcaaagatcagagaactggagagtgaaaataaagatatgaatattttaattagggatgggagggagttccagtcacacattcatgaatttatttacagctattcactgagaaaccactttaagctaagcacaatagggaaatagggccgggtcagtggctcatgcctgtaatcccagcactttgggaggccaaggtgggtggatcacctgagtcaggagttcgagaccagcctggccaacatggtgaaaccccgtctctactaaaaatataaattagccaggcatggtggtgcatacctgtaatcccagctacttgggaggctgaggcaaagaattgcttgaacccaggagacggaggttgcaatgagtcaagatcatgttattgcacccagcctaggtgacaagagtgcaagtcggtctcaaaaaaaaaaaaaaaaaagaaatgggaactctgtgtccttaaggattgtacaatctaatagagaatcatggtgaggaggccacacggtaattataattcaaggcaatctgcggtgctgcaggaggagatgagctagaagtgctgtgtatttcagggcttgggccagctgaaggtgccaggcatctgcaagacatcagggtgcccaggggaaagtagggtggaggcaataaagatcgtgtctgccaactccacgattttgccttcactggctttactgctcacatatgcaaatctgagcctcaggatctggatataaactcatcagctcttctgcagcatgccactactgctaacagggccaacagtgtctgcagagtggataaaatatacagtgtgatcttgaaacacaaaagtagaactacaatggtgaagctgcatatacagttcacagtgcacatacctgcaggccccactgatcccttgctagtagatcttgagaaattattttatttctttatgatttgcttgcctctttgctttcatggggataatacacatttaaagtttgttgcggggattaaatgagatacttcagtttgttcctagctcatattaacctactattgttaatttccttcctatgttttcaccaacctcacgtgtgccttctcttaattgaatgaaagttccttggtgttcaatgtggtcaaaggcaattccaatctctttcatttctgctgtttattattttgaaaccacaagattgtctagggcagaccagcatgtttccatgaccacatttgggcagttgataaactttgattagtaatttggtgtcatgatttttttagatttaaaaaattcaaaggggttatttttaacaagcaaatagggtttaggttgttttaaattttctccctttcattaaaaataataccacttagatacaatttaatttttttctgaaaatctcaagccaatttaactttatttattaagtgataacaaagaagtgttttgaataatgaaatgttaaatgtttaatcttcaaaaagaataaacaaagacatgagagaaaaaggtgggagttccaagttgccaaaaccagagagctccactttttaaaaaatagaaagtggctattccgattatttgtcagagtgaatgccaaaaaggaatcatcaatttatctgttttctaaaaataattttttagttatattgtttaggacatattttatgtttatttatgaaaattataatgatcaggtgatgttttatgtgtggatttgagtttttcattacttttcaatgtttttttttttcaaattatggtgactgaaaggagataaaatttatttttcttaatcattgtactaatgatactttttgctttgtaattttggttcttgggatttagggattcctaaatacgctaaggtagagatgagcattgcacatctagattttagaggtttatctaatgttgaagataaacaggaatgttggcattgggtgaagtaatcatgacatcatttattgggctctctttccttggaaatattaacttctcttcctaagggagaggcattcttgggttaacatgggaagtaggaaaagacctttgactacttgtgttaaaatgtagtagtcagaaaagtattggcacaaaatcaagtgaaatattaagcttaaatattttgtcatcctatttgtaaatggagtgagactgttacatggatgagactatattacagttctttctacttcctaagtacttcttactttctacttcctctacttagattgaaatcgttgaagtagtgcatatttgcaaagaccctactggataaaagagtttgtgcttctgttttcaaagaaaggcaaggttgtagagtgatggttgtcctcacgaaatttggaatgtgtcatgcttcttgccttgaggataatttactcaaaattcttgttggcttggcaaaaatcatctcaaatttaaaataacagtctgagtttatagcagatgattttaaattttattctgtaaagtcaaactatgtcatggaacaaaccgattgaataatggtttggaggctttattagccacggtagtgtttagtaaatagttgttaactggtctgtgctggtggcagtcaatggaatttggagtaagatatcaggacatcaggcagtggaagagcaaaattgaaaacatctctttttataggccagaagtgctgaacatctcccgctttctcctgttacaacctctttcgacaagtctgctgagctgtaaaccagtacctctctgataaaaggcttacattctgagagtttcctacagattttgtattgtagtcatcccctgtctgctttttttatggcatagatttttagctgctgtggaaaatgttagaaatacaacagtgacaacatgaatttcaaatgctgtggagtctggctctaaatgagtttgggatatacaaaactatttcctggttctattccatttccattctcttgattttactgaaatagagccactgattgagagactggctggagtatttaaaagcttgatagtccagagcaaatttctgttccttgtgttaggatgtttgagaatataagtgggatgtgggatatggtaccttgacaatgttaataaatattttcatatgaagctaaggagagatgtgtttcagctactgaaaatatgttaaactctgcatgtctgtattactgaatgcttactatgtgcaaggaagccatgattctgccctcatgaagctttcatttcgcagcatcttcattgtagctgtaagacagttgcattctcagtccttccacaaagcttagagtgggtattggagctctaagtgccaatagcaggactaaaacatacagaatgagaaagaaaatggagagaatgagaataatagaagcagggaaaagtggattaaaaaaatacgtgcttgtgagtagaggtggggatgggaagaaggcaccagtgattgtgttagaagtcactcagtgtccagccaacctacccctgaagtatgtgttgtccattgttaaaacattttacacaccattcaaaggtaagaaactgcccccacctaacctgtcaaggagctgatattaaagtcagactagtcgcattgctacgagaaagcggaatttctgattgccagtgcagactatattttcccctttatggtttattataaaaacattcatgctgacctgtaagttgataagtgccaattggaccaacttacttgagaggaaagttatttatgattgcaatttggctgtaaggcttcttcggattgctgctatcctgtatcaagaattaaaattagcagcaccaaaaattgcattttctcactgtgtaaaaagattatttagtagcttcaatggatcacaatagatacttgtcctcaggcacatccaaatagctgtggctgagcttttccctaatcatacactgtctttgctgcataattatcctctcattaagcacatttcttgacaaattttcccttttcttcaaaaagcctcttcagtctgtctgggttatgtattgacctatttattttgtgtgtgggtggtttttgtgactctccaggccccgaaatttaatggctgagtctaaatttttagctctgagtgaaatggaaatcttaccaaaatgcatatgcacctgtttcatttccaaagtcttcctgaatttgcatatcttggttgtttagctcagaagatcagatggtgctaatgaggcctgggttatggctttgatgttaggtgccagttagtacacatgtcctgcagaccaggctgaactctgaacccagaggtatctgcacatgcatagccatggtactggagggccagaaggagaaatgaaggtgaatctgataaatctgtcatcatcaaaagaactcagctgtaagctttcttgatgaggtgtctcttctggtagccacttctttgcatatgaaagcaagtgcataaatatgcggtggatgcatctgcaattttcaaagtgagaacttgacaggtttgggctagtcccaaaaagcagactaggcaaagtaccatggtgccagttcatggggtggagtttccataagagttaggctgccactgctgctaatttcctgcctcttcagccatggaaaaaaacccagaatctgcagttttcttcacaaacattgtataaatgactctgtgtgctcaggggtagtaacaccccataaactatgctgaaggtcttctctggtcttggagaaaccaattgtttagccaacctcatggattgaacacacaccatggccagttaccacatggaaagaaaataaacaaatggggacattcttgccttttaggagttagggaaaaggacttcaaaatgtatgaaaaagatacaagtgaacaacggaaacatgaaaaatatacttatctaaatataattggacacaagtagccaagtggcttcgtcaagggacgcttcatgcgtgaagtgattcataaacagagtttgaaagtagagcaagatgtacccaatcaggacaggaggaaggatattccaaaatagaggattaaacatgtttacctggtggattgacaacagcagcacaaagggcaagctgtggaacatgatgagaaatgtattctactagtgtattgtctatcatatcttaaaaaccagacaaacaaaaaatctctcctccaacttatatcctgttgtagctagtgctctaacctactcctgaggactgtgtacaaatatcccagttctctccttctggatgcacagtagcattgtacttctctgtcttgtgtggccatgtgacttgtctgaccagtgaaataagagtgaaatggcaggtcgtgcttccaggtgaaagcctagaaggtttttttttttttttttttttttgccaaggcgaagtacagcagttctctcttcttgttacacaattgcagatgcgtgtgctgagatggagccttcactggcctgggcctctgtgtgactacataagcagagttctgatgacctgaattggacatgtagcacaatgaaaaacaggcctttttgtggtcagccactacaatctgagagttgttccttcagcctaacttagtctatcctggtgatacaaatgttgttgtcacatttttctacatacctttcattcactcctcaactccctcactccaatttctgtccctaccacgctaattaaactattgtggaaaggtcgcagttgcctacacaatgatggtttctggctttatcttccagagtgcctttgctgcatttaacactgtgaccactttgttcttaagactcctttttcccttggcttccatgacatcactgtttggttcacgttctagattgttgatcttgtgttttacatataaaatccaaataacctcatttacttccctgttttttaactaatatgtgtgtgactaacatgctgatgaataagtgtgtacttctaatccagtacaggctgtatgtataacatagaatcataaagccaaaggtcattcaaaagaacatgtccacaattaagattatctctgttctcaggcctgattattctttaaagtaataaatcattaactgggaatcttatttgatttctcctttccctcagtgatagctccccaaagagtgtgtgatcagaaactacaatgctgtttataaatcctatctgcccatatgtccatattttctttcttccttttttttttttttttttttgggatagagccttgctctgtcggccagctgcctcctgtgttcaagcgattctcctgcttcagcctcctgagtagctgggactgcagcatgcaccatcatgtccagctaattttttgtatttttattagagacgaggtttcaccatttagccaggatggtctcgatctactgacctcatgatctgcccaccttggcctctcaagggttgggattacaggcgtgagccattgcgccccaccctgcccgtatctttctttccacactttatccctatagaattcaagtactcattgttgattttccagcttcctataataccctcgtattggtcttcctatatcaatccattctgcatgggacttttggaaaaatctttctatatacagaaattgtcatgtttctgtcctcttaaaacctttcatgtaaatgtattacatttggttaaaatccaaactctttgtagggcttttaataagctgtcccatacataccagtctggctcattattgccatgcatgccttacaccccagccaagctgctcttgtttcagggtttttttttttcttaactcttattttagttcaggtacgcatgtgcaggtttgtcatataggtaattgtgtgtcacaggggtttgatgttcaaatcatttcatcacacaggcgataagcacagtccaaataggtagtttttgattctccctccctccacactcacgcaggccctggtgtctgtgtttccttctttatgcccatgtgtactcaatgtttggctcccacttataagtgagaacaacagtatttggttttctgttcctgtgttagctcacttaagataatggcctccagctccaccatgttgttgcaaaaaacacgatcttgttcttttttatggctgtgtggtattccatggatatgagtaccacattttctttattcagtttaccgttgataactgattccatgtctttgatttaggttgattacacatctttcctattgtggataatgctgtgatgaacatatagcattgtctttatggtagaacagtttatattttcttgggtatatattcagcaataggattgttagttgaatggtaattttgttttaagttctttgagaaatagccagactgctttccacaatactgcactaatttacattctcactagcagcacgtaagtgttcccttttctccacaaccaaccagcatctgttattttttgactttttagaaatagccattctgactggtgtgagatggatctcattgagattttgatttgcatttccctaatgattaacgatgtggaacttttttttttcatatggtctttagccacatgtatgtcttcttttgaaaagtatcctttgctcacttttaatggggttgttttttgcttgataatttaagttccttatagagtctaaattttagaccttgtcagatgcatagttgcaaatattttctcccattctgtaggtcgtctgtttactctgtgatagtttctttggctgtgcagaagctgtttagtttaattaggttctatttgtcgattttgtttttgttgcaattgtttttggcatcttcttcataaaatctttgccaggtcctatgctagaatggtattttctaggctatcttccagggtttttatagttttaggttttaacttagtctctaatccatcgtcagttggtttttgtatatagtgtaaggaaagggttcagtttcatcttctgcatatggctagccatttatctcagcacaatttattgaatagggaggcctttcctattgcttgttttcgttgactttatcaagtatcagatggttgtaggtgtgcagcattattctgggctctattttgttccattgttctatgtgtctttgtacttgtttttgcacaagtccatgctgttttggttactgtagtcttgtagtatagtttgaagtcaggtaatgtgatgttccaactttgttctttgtgcttaggattcctttggctatttgggctctcttttggttctcatggcatttagaatagtttttttctagttatgtgaaaaatgatcttggtaatttaataaaatagcattttatttgtaaattgcttcacctccacacctttgtacattctgtcccctgacataaacttccttcacctggctaatgtccactttttacttaaaaatcaacctaatcatacctctttcagagagccttccaaactcttcagcactgagttttaagggtcttgtctccaggtcccatagcacttataacactgattggtagaaggccacttatagatcagtttctcctcaaaactgtgtgttgctcaacactaagcccatctttcatctctatattttccacacctacaaatgtctgacatgcattaggtatgcaataaatgtttgatgaatgaattcacagctgagggtctagaaagtcatgatcatgatttttacttttaattaaagaatctggggaaccgtttagacatttaagaaggtgatgatacccaaatgatacttgcagagggtagttagaacaaagagagaagacatcttaaatttctcagagatggtaagaatgaggagctaacgaattaaagatttgatttcccagaattctatttttaacaattctcactgtaacttactaggtttaaaatagtacaaagtgttggaggcagagttattaaatagtttgtaaattcgacaggagagaagcaacatatttgaaaagttaatcatttaaacttcacattttaatcttaacaaagtcttccaaatgtttttaaaaatattagtgtcaccttaattttgacatttatgagaagatctaataacttagcctatatctaaaaagcccttggttttctttctgactctttttactgagaagtcaatcacttctctcattctgtcaactaacctgaactgttgtcttttgcttctaacttttcttcttttttctttttttgcctcgctgtaatgtccagaggttctggaaatgaagaaaagggatttgtgaggggttggctctactagtactatacaagagggtgagcaataagcctcccatactttctgtgctcttgaatcctgtgtcctcacaattcttccagggctggcagcttgctatctccagtgaaagctaggcataatttcaaatgtcacattgcagagaaatcactctcctgtcatcaggaaaagaaagagacacaggagaggagagatgccttcttatatctggaatctgcactgtcagccatttggaacttgcctcctaggctctgtctggccttggcttgcagaagcagggttgctgtgtagcacaaggaggtgcaaaaacaaacatgggcgcaaaaccaaatactgactgcaagaaatgttctgaaagttttaaagtgaaatactacttccagctgtcacttttataaggattaagttgagctcaaggggctgcagaaactaaataagaaagggaattatccttaaagtactgatgcaagttgcaaaagatgcctgggtattctacagagagattacttttatctctttgtctactcttcgatttactccttcgccttctcacttgtctttctgtatatactgaagatgtgctattgctactgctaaggtggatggcagagcttcatattcttgctttctacagtcaagggcatcctgcccactggtctccctttctttttaggaaatgttgcctctttggtgactcctccttagcctcatggtctgcatagaacactgttgaaatgaacattgtcaccaatgatcagagtataacacagcagtaggcacatagtaagtgcgtactaagactttttgttgattggctgtgtttagacacatgcattcccaccatcgttttctaacctttgataccatgatgcatagttcttcattacattgttctgcccaagttataccccatgtccttttactgctcaacacctataaactccttagataacccgtcatcatccatgctcatgatgaccatttttggccacatggatacaacttctcagcccctggggttctttccattgctcagttttgcccatttcaatgccaatgacagctcagaagtatgaaacagaaacatagaaggtgatgtggcactttttgcacactcccctctttcatcctatatctagctttcattttaacagggcagtacagcctgaaactcatgtagctgtgttattggctttcaggtgagtgagttggggagggttattttcaaacatttttatagtataagaacccaagtctttctccctattttctagcttgtaaaataagaccacatttgaaatctagtgtctctcaaaccgactgcctttattagatttgattattcctgactgcaggaactcttgaagcacaggcttcactcattactgctctcagaaaacatttccacatgtggaattgggagccatgcactagggggaaaatagactaatctgtcataaaccacgaagccctcctaaaactgtataaacactggcagaagtatttctcaaagtcatgccagaaggaaggacacatttttgtgaagtttgtgaacctttattcaaattcaaagcctcattcagtcttaggaattcacactgagtagtatgtctcatcccatgccaggtgacatgagagtaatattctgcaaaattcaatatttttgctaatggtgctgttacttagctattgaaaatattttctaataaaggaaaatgtcaaggcacatcaaaagtaatattttatgtcatttgtcattaaaatcttaagctggataataaattcacaacctttttcgccgtaactttctcattctgatttagtcaatcatattgtacaagggacaaatgttatccttgtcctttttttgtagataaaaatgcagcaggtgttaattttaaggatcttcacatttcatttcaaatttgccttgtcagtattaagtttattttaaaaaatctttcaggaagaaactattaaagggcatttgatgtcagaatatataagaaggaaaagtgcggttatatttttatcacagaaaactacataaataacttcacactcatgattcacagatgtcctcaataaagagtttgtaattgtgaaaaaaaaaagaaatgtgtgaaggtgcttttatcatttccattttacagttggaagatcgaggcacagagaaatgcaagtaatcaagaattatggacaaaaattatgggtcaaagggacaggtctctattttgagaacatagcattcctgtattttgatatttttattgactttatataaagtacttatgaaaaaaaattaatggctcttacccatttggatattcttcctttttaacttaattattttggcttgcaaaatttgttgaaaaattccaacacagtaattctctaacatgttccctggacccctgtgggtccctgagaagtttccagtctgtctttgagattaaaatattttcataacaatactaagacattatttgcatttttccctttgttacatttgcactatagggcaaaagctatggtgaatgaaactcccattgccttagcacaaatcaaggcagtggtccaaattatacaagtagtcagttgtagtctttgccaccaaatactcacagaaaaaataacttctgtccaccaccataagcttgaaagcttcctaatactttaagacttttctatgagttgtgacctcacagatctatgtgatttttggatattgtataattacaaatgtcaatgacttataaaatgatcttataaaaatcatacatggataaaagattcacttaaaaatacaagaagaccaatggattttagtgtaatagagtacaaaaagtttgttggtaatgtttcagatgctcattgcaactaatctttaagaaattactacttgttgagtttgggtagaatgaatatcttaattctctaaaaagattattagaatagttttcccttttctttctacatatctgtgtgagctagatgttctttacatagtgtacttcaactagaacaacacatcctaacagatgaaatcagatgtagatatgagaacccagttctcttctgttaatccagacaataaagagatgtgcaacatatgacataatgtcaccctttttactaaatcttgttttggtgacattagttttataaaatgtttaattttcaccacagtaaacatcaacagacaaaatacacataacaaaaggttgtagagtctgagtaatttttaagggtatgaaaaggtccagaactgaaatgtctacaaattctgctcttagagaaacaaagccccaccataagagagatgattttatctgctccctgacctgtcagagagaagacatttgtgtgggatgtcaatgaaatgaaggtaataacaaggcaaacagggtggatcaggaccaggcagaaaaatggattacattgtctatgttttattttagttagtaaggaaacttttcctaaagtgatttttaaagtaatagtactagcttgttctctcctaaagacattttgtttttataaaattacagcctggaaaacacactatgtgtttagtctagtaggtagcctgagttgtttgttaaataccagatctcagatttgtggctgttcctcaaaataactacacaacaccagcaattaaatttatgtatcattttgattatttatactttggaaatcaaaggagataaataatggtgtgcaggtgagtacttcaatcagcacttcatcgacagccccttagattccctccattatgaagctggacacaccacataatcttcccattaaacgtctagagggagccatctccacgctggctttcatcccaacaacttcccatttctggagtggctgttcctaaaccacaaacatgccctttgaactatgtaaggcagggatgtttagtctaaccgtttttacatttctccttccttttccgtaggatattgttgatctatcagaattaggtttctttagccctgcctctccaagttctacaatattggacacaaatgtaatattgcacgacttaagcaagcagttgatggccttgctagggaagattacagaataggtgggttctcttccttcccaggtgccactgctccagctgcttcaacttttctgcatgtgactaatatgccttaatttggtcttgctgaatgaaggtgctggggaacttctgacttgcctcagcccatggcttcagtgacagggaactaactgtatgttaggtgggagagtgagctaaatcacttctaaatctcttctcacatttaacatttggtggctcttagatttactttgcccattaaatgaaaacagccacatggttggggggagcatctacagcagcggggtgtgtatatgactataattgtctcagcctccttgtctggaagaaatactgaagtggggcaagcaagctcagcttccacccatgacatgccacctcataatattaaaccagactgctgcctgtcatacctaaaaatgaaatatacattttattttgaagcagccgctatgagaacagtcaggcacggtggagacctccgtgtaattggtttcaactaatggcgatgatctagtgagacttggaagctgtgaatcaaacaagaaataatttaggttcctgaaaggagttagattacaacttaaaaaaatagtggctttaatttgtctacagaatttgtcatcaatagcagtaaaaatccccttgatttattgaaaatcaatgtttatttattgctgtttaaatattgtttgtatgttgaatctcactggaaattcattcaattaggaatggctgaggctgcctggggctctgtattgagaagggtctgaggctcgtctggatctgagggagagaacgtcatggttggctaatgattggattcaattctcacaaagtttgtgcggattattatcattattcctcttttattcatgagctgagtgcagagaggtaaataactttccagaaatacatggtgcaactgtgattcaaatactaagttcctctgaggactattagtcactgtaataccatggacatttctcaggtaccttcaattttctcatttttaaaagctttggactgcatttctttcttgacaatctttcagcctaaatgtactttggtcttgaacagttcaattaaacacctcatatcctggcaatcttgccctcctttcaacccctggatatttattatcatttggccattcgatgctattctgggaaccacaatgcttgtatgctttttgtgtttagatcctgtttctgcaagtacatgggacatgctttaaaaggaaggatgcgccaggcgcagtggctcacgcctgtggtcccagcactttgggaggctgaggcaggtggatatgaggtttggagttcaagaccagtctggccaaggtggtgaaaccctgtctctactaaaatacaaaaattagcctcgtgtggtggcaggctcctgtaatcccagctacttgggaggctaggcagagaattgcttgaacccaggaggcagaggttgcagtgaggctgagatcatgccatgcactccagcctgagtgagagagtgagactccatctcaaaaaaaaaaaaaaaggaaagtgaatcagtgatccccttcccgccccacgcccaccccaccccccccgtgacactcccggagtgatgagcatagtattttgcatatggtcaatgtttaaaaatattagttggttggttgtatgacccaggccaccaagctatgagatattgtaatagactgaacctagtatttgccacgaatgaggggcaaccagatgctggtttctgagtcagtattgcctgaggtatgtttgactggtgatcaggaatggcaagtgccctctaccccacagctgatgctctctaaccttctggcattaagaatgcctgtttatcttcttgccttcatcaacagcagctgtttatttagcagccgacttaagacatttcgtatatatactcaatgaaggctttctttccctattatttttctgggagggtaaaatactgtcttgtttttccagttctcctcctaagtgtgatgatttagatgtcctgctgttaactggcagcttttccatttccttctagcatggagtgccccagacttctcacagaagccactaatgagcttcttgcctttcaagcccctgattcactaataacagaattcagcaatgtctgaagttcgggaccttatcttttcttcctttagaaaacaaacaagcaagaaaatatgttacttgctgaagccactgactcaatcctgtctgtttaaggttttaaaacgagaatttattcaagaatctcagcttctgctttgcaaatgagttgaaagcttaaggattgaccccaactttcaaagtaagtataccttgtcaagtttttttccatctcttgctgcctaattcagtctttttcaatgatacttcatgcttctaagtatgtttctgccttcttcctaataatattgaccgagttcccaagtgtgttgggaacaattctagggactgtgtggatggaaccagaaatgaaaatgttcccgccctatcccttctgcttgacttctggctctaaatgatgcattcattctatccgcctgttggccccacacgcaactttctgtcattcacactatgccaaagatcatcaatgcccttttgtcctgcgtccctcggagccttgcaaagcacagagcacagagaactgtcagcagcacaaatgccacttctgccaaacctgctcttactgtgtcctctgagaaccagcagcctttgcagctgtcttcccagagtgggtttatgaatataaggcctgccgctttcctctccagttctgtctgcctcagtactagttagaatgactaaaccagacagagtcaaagcccatgtctcccagtgggtaactcagtccactggtctcttcacattcagattcttcatcttacacctccaaggacaacatggtatagttttgctttccttttgatgtcttgtctgtctttcttttttcttttctttttttccttttttttctgcccttctgtgtcagggctccaaatgtgtgttcctgtacctcaaaaatacatagagatgattgcaaagaaaaataaataacttcttctttctccaaacatgcgtaagtcatcattcccgtgttcataaacacatgctgatctgcctcagcattcttgccagacatggatgatgttttactttcccttctgaaaaaaatcgaaatttcatctcttgtgaaattatcttgggcttctcttcagactcaagtccaatgttgtgaagtcatacagattagagagctctgttcccagaatctgtgaggtaaccatgagcttttccagccctctggatgcctcctcatcttgtcaactacgagaagttagaagtggtagctttcatatcattacattaattatacaaggtagaggcatatgcacactttctttaaaaagcagaaaatagagattttaattatacaagatagaggcatatgcacactttctttaaaaagcagaaaatagagattataattctttcatgtttgtgaggtacttatcactactccattttcagttataactttttctgtcttctaaatattttattcctgtatgttggaaacttggaagttaaattcacccagaatccactgatggagattcattcttatctgagacttcacacagtaacttgtttctttttgttagtttgttcaggaattgtttccttgcctttgtttttctaagaattatagaaagttctttccattatgctgaatacaatagtcttcaaaacttcacagccacaacatacagcttacttatatcttaggtatcacttaatatgctgtgaagagatgagagcttcctaaggccttcctgctctatgaactttggtgaatttaccaacaggacctctgctgtcccaatcccatcactaacctgccttcagctgcgttctcaactcattcttcaatacctattagagcttactacctttcagacctattctagggacaaacagagaactaagacacggctccgccccagttaaacttaagttctggggggaggtaagtggtgggaatggggagaggtgacagtgctcacttagttatgatataatgtgatgaattctctaagaggaaagaaatcaatttttgagacacctcctcccccatgaaaaaattcctaacttggctaagggatatcttctagaaaaaaaaatttttttttgagctggttttgaagactgggtaacagtgctccataccctggaaggagaagacatttcagatagggaaggtaacagcattcaaacccttagtggccataaatggctaggctggtttaaagaaagtaagacatttgatatggctggagtataagatgtatgatggggactctaaaatatttacctagtttcttattaccatttaaatcattatagattatctactttatgaaggtagaggcactgcttgaagactggtaagaatgtatctaccgtgcctgcactgttttttgcttagtagcaacattctcaaaacagttaagaagctcagttaactgatttccttttctcaagcactgactctggttaatcttctccccaagctctttatcttggtgtgataacttgaggtcttcctcttattcgtcagttaaatggctgagcaatcagacttgcaggtctcccacattgccgtattgataccagcttctggcctcattatcaggaatcactagctctagtttccagacacagttggtggtatgtcagtttttaatatcaatttagagatttatattatctgacttccaaaaagaaaaggtacttgaaaaactgactattggtactgacatgtatagataccatgagtcatatattctcttttttaaatttgaaaattatacttttaaaagtctttaattttcattcaatgagaggttggagcctggagagaagtctcatggggcttataaaggttgaacctctctacctggctcctctacctgctcaggtataggatgtatctggagtctatttgggagtgggacactaacaactgctataaaaattcatattccctactctggcaatgggacactaaagattcagtatggccatgttgtttgttgtttatgccctgcctgacatttcaaaaccatgtgagaagttgctagggtagaggaattacagtcagaaagaagaataggtgaaaaaaacagaaagaaggtaaggaagaggaaataggaggattgaagagaagcaggcagggggggtgaggaccttgttgttctcactgagtagatctagacacaggtgccacgttatttatactaatattagccaggagaagacaggtctgaaggtagaaagccagggaggagtggcgtgaattcttttctgctgaaagtggtgtgcagtggtgggctcttgtgcaaatttcccttggattgtagccttctcttttatgaacttctcactcctgttatttccagttccggaccttctatcagagactactggaatttccagctctctaggcactaatttcaggggctgaaacagcacccctctgcagcgcctaccacaaccactgctgccctgctgggctgtggggttgtgccagccgggcactcttgcccaggaaatagaaggtggcatttaagtagcacttaggactatcctaccaatcctaaagactcggagtcaggccaattctaaattaagctttcttgggcaaatgataaggactcaagaaacctcagagtggaaacaaaaaaatatatgaaaattcgttagctccaacatatttctactatccttcagttttgacagatattaacatgattcaatgtttctatatttattttttgttttagatattttcagggttcaagttttaaaatatatctcaatcgaaatcagtactatttaaaatacccaaatgatgatattatagaattgaaaaagatctttttttaaaaaaatttataagaaaactgaagctcaggagaagcaggtggcttgatcaaagtctcaagctggcatagagggacaaaaaagcaaactttctgatgtcaggtaaagtgtgctttcctcataaaaccacatcaaattcattttctgaaatacgtaacaaaaagatggagcaatggattatttttgtttcatagtattctttaaagtcccttataaagtgattctggagtggctactgcattttttttttatgttgttcatctaaaggctgaattgcttggtgtcttggtgtctccagtgatctcacccagaatcagtgccatgaaagtaagctggtagaaatctatggctaagagctctgtcttgacctcagagcaattactttccctgaacaaaatgcacactgagggatgcagtgcctactgttctggaagagggcaacatttgtcttaggattcttacccagattttcaaatgcattctgaaactcggcactaggtcattaggctgaagctctgtactgaagccaagtgcgtttaaaccaccagactgaaagcttatgcaccatgggctgtagccatgttctcaaattgactcaactgtggtttgagatgtgtctgtatggggtactggaaagaatgctggtttggttgggcacactaaattttggttccagctctgcctctaatcaggtggtcacagtaaatccgtcagctccctgcaattcagttactcatctgtgaagtatctctgtcttgcctatatagatgagttattccatccagcaaatgagttaacagaaatgaagaatatttgtaaatgtaatggttaaagaaatgcagattactattatgttgatactaatatttggatagtattgaaacggtaagctattgtttgaccgtgtgtggtcaaatgtctcctaacaggcctcgtatgctcaaaacaaagctaaggattaaagccaaagtctgtatgacacacattatgctgtagaggaagatttctggtttgttctgtgcctttcaaattaaatatactcagttctgtgcattgacgtaacgaccagggaagatgtgtcgataaactgtgggctgtgcaatgctattcacattctgtgtatactattacaaaaagtcttttccttttggaccctttccctgtaccagaccttcatttctagcaagttccttacattacttttgaaaattaaagctaaagaaataagtttttcctctggttttttttacagtaattttgttccttcatctagatgtttctgtcaaatattacaaataattcaatcattaatttaacagatatttatttaaatctgctgggcaccaccactgctctaggatagatctgtgaacaaaacagacagtcttccagcattatcatgtttcatatttttatgtatttctaggtatctcaatttatattataggatcttctatgtgttcaagactaacagtgccaacctctgatggtcagtattctgaaatgtttgtttacttttgtttctttcctagatcctgatctgtctagctctactctgccactcttcttcccttaaaatcagcttttgacctttttccaggtcaagctattacataattcatctttggatgaaggaagtttaagatgggcagcccaatataattatttatttatgaggattcgtaaatgttcattctgtctaactaatctccgccccaggacatgctcaaggccttaatcttcccaggtcactttgcattgctggatagtttataggatttgttaacttagtcaattgcacattcaggttccctaaaattagttgggccctgccgagcagagcaaaatccatgttcctctttgttgacaacacactagtctctccaacttcactacttaaaactttcagtccttaggatgtgcacttctcatatcaattcaaccccgaatttgtccttggttagtgatctctctttcaaccacttctcactccctgtttcccatctgctcttttgcaaaccttttgctacacggaatccagaggaatgtttctgaacccgaagtccgttgtggcaagctctctctgataataaagagttgaaaatccttaactcagtgtgatggtaatattaagtgtcaacttgattggactgaagaatgcaaagtattgtttttgggtatgtctccagggtgttgctagaggagattaacatttgagtcagtggactgggagaggcagaccccccttaatctgggtgggcgccatcccctcagctgccagtgtggctagaaaaaacaggcaaaggtggaattagcagacttgctgagtcttctaggcttcacctttttcccatgctggatcttcctgcccttgaacattaaactccaagttatttggcttttggcctcttgaatttacatagtggttttgccagggcctctcaagccttcagccacatactgaaggctacactgtcggttctctacttttgaagttttgggactcagactcatccactactggcttccttgcccctcacttgcagacggcctgtcatgggactttaccttgtgatcatgtgagtcaattctccttataaactccctttcatatatatatatctttcctgttacttctgtccttctagagaaccctacacagattatggtactgagagtggttctagaggagcagaattttaaggatgaatttcttagttggttttggggtttctggagttggttgcttaatatgattagaccccaaaatgctaggactctatctctaatagtatggagaacactgagagtccttggtgtgaactgtttagaggttatgcaaaataaatgcatctgatactgctgatttactgctcatgagggacaaggagttagtgtctctatacataatacatttgaccatatgtggagaaccaaggaatataatgaagtggttggttgtgcctaagtttgctggacaaagtgatggaagaaaaagatgagcccagggtcctaacttcttgctccagacacacatactaagccacaagtcttcaaagattgccctgatgagactctaatctcctgtagacaaagagctgaaatttcagaaaatcagacacaagctctatcatgtgagtggctgagctgcaatgaaagggatacacttagtctcaccaggtgtctatgttaaagtgaggacactgattggaaaagaatggaaccctgcaatttggaatggggatggtgggaggaccctgatgaagctggggatactgagcttgtaaactctgatgaccttttttgccagaggatgcagcctccccaccctcagtggtggcagcatcccctcccctgcctaggcgcccttagcatttccacctttgtctgaggagattaaccatgcactgcctgaggcaacatgatgacatcccatgaggcagttgccaggcaagacaatgctgattctcctcaggacccaccccaatacccctgtttgcttctagacctataactagactcaagtcccagcaagcccttaaggtaaggttcagagtatgacccacaaggaggtgtgctacactccaaaagaactattttgttttctaacttatataagcagaaatctggagaacagacatggaaatggatattaaggggtgggataatggtggaaagaacagaaagttggattaggctgaatttattgacagtgaatagtccgacgagatctgatggctttataaagggaaacccctttcgcttggttctcatttttcttgcctgccaccatgtaaaacaagccttctgccttccaccatgattttgaggcctcccagctatgtggtactatgaacctattcaacctctttttctttgtcaattacccagtctcgtatgtctttatcagcagcgtgaaaattgactaatacatccagttaaagtagggccttaggaggtcaggtagttaatggagttttagctcagatctaacttacagtgggtcctgtgggccctaaactcatcctgtggtcatttccctagtaccagaatgcataattggcatagcattttagaaatccccacattggatccctgactgttagggtgagggctactatggtgggaaagccaaatggaagccattagggctgcctctacctagaaaaatagtaaatcaaaaccagtatatatccctggagggattgtggagattagtgcaaccaacgaggacgtgaaagacgcagggtggtgattctcactatatccctgttcaattctcctatttggcctatgcagaagacagatgatcttggagaataacagtggattatcttaaacttaaccaaatggtgactccaattgcactgctgtaccagatgtggtttcattgctgaaacatattaacacatctcctggcacttggatgtagccatttgccattgatttggcaaatacctttttctccactcctgtccataaggccaccagaagcaatttgccttcagctggcaaggccagcaatataccttcactgtcctacccaggggtatatcaactctccagctttttatcataatctcattcacagagatcctgattgttgtcccttccacagtatatcacaccggtctattaaattgataacattatgctgattggtccagtgagcaagaagtagcaaacacacttgacttattgatgagacttttgagtgtcatacatgggaaattaactaaaattcatggaccttctacctcagtacaatttctaggggtccgtagttgtggggctggttgagatattctttctgaggtgaaggataagttgctgcatttgcccctcctacaaccaagaaagaagcacaatgcctagtgggcctatttggattttggaggaacacattcctcatttaggtttgttattccagcccatttatcgagtaacctgaaaggcttcagttttgagtggggtccagaacaagagaaggctctgccacaggttctggctgctatgaagctgctctgccacttggaccatattacccagcagatccaatgggacttgagatgtcatggcagatagggatattgtttggagcctttggcacgcccccataggtcactgcaaaggctcttggattttggagcaaggctctgccatcttctacagataactactctgcttttgagaacagctcttggcctgttactgggttttggtagaaactgaacatttgactatgagtcatcagtcaccatgtgacctgaaccgcctatcatgaactgggtgctttctgacccatctagcctaaagtggggcatgcacacttcagcagccttccatcatgaaatggaagttatttatactgattgggtttgagtagctcctgaagacacaagtaagttacatgaggaagtggctcaaattccatggtctccactcctgccaccctgccctctctcccccagcctgcactgatggcctcttgggagtttcctaagatcagttgacagaggaagaggagactagggcctggtttacagaggccattcatgatatgcaggcaccacccgaaagtggacagctacagcactacagccccttctaggacattcctgaagaacaagtggccaagggaaatcttcccagtgggcagaacttcagcagtgactttgcttggaaagagaaatggccagatgtgtgattatatactaattcatggctgtagccaatggtttcactggctggtcagggacttggaagaaacatgattggaaaatggtgacaaagaaatttggggaagggggatgtggatggacctctctgagtggtcaaaaacgaagatatttgtatcccatgtgaatgctaaccagaggatgaccttaacagagaaggacttaataatcaagtgaataggatgattcatcctgtgaacactgctcagcctttttccccagcacccgtgtcattgcctaatgggcccatggacaaagtggccatcgtggcagggatggagttgcacatgggcttagcaacatggacttccactcaccaaggctgacctggctatggccgtgctgagtgtttaatttgccagcagtagagaccaacactgagcccttgatatggcacctttttcgggatgatcagccagctacttggtggcaggttgattatactggacctcttccatatggaaagggcagcagtctgtcctcagtggaataaacatttactccccatgtgagtttgctatcctgcactcaatgcttctgcgaagactaccatctgtggactcacaaaatgccttaccaccatcatggtattccacacagcattgcctctgacaaagccattcactttacagctaagaagtacagcaatgggctcatgctcatggaattaactggtcttactatgtttcccatctcctgaagcagctggattgatagatgggtggaatggccttttgaagtcacaattacaacccaagtaggtgacagggcttttcagggcttttcagaaggctatgtatgctctaaattagatccaatatatggtactctttttcccatagccaggattcatgggttcaggaatgaagggtggaagttgaagtggcaccactcaccatcacccccagtgactcactagcaaaatttttgtttctgttacccgacattctgctggcctagaggtcttaactccagagggaggaatgctgcaccaggagacacaacaatgattccactaaactggaagttaagattgccacctttgcagactattcacaatagcaaagtcttggaaccaacccaaatgtccaacaatgatagactgaataagaaaatgtggcacatatacaccatggaatactatgcagccataaaaaaggatgagtcatgtcctttgtagggacatggatgaagctggaaaccatcattctcagcaaactgtcacaggacaaaaaaccaaacaccacatgttctcactcacaggtgggaattgaacaatgagaaacatggacacaggaaggggaacatcacacatcagagactgttgtggggtggggggagggggagggatagcactgggagttatacctaatgctaaatgatgagttgatgggtgcagcacccaacatggcacatgtatacatatgtaacaaacctgcacattgtgcacatgtaccctaaacttaaagtataataataataataataaataaataaataaaaattatttaggaaaaaaaaaaaaagattgccacctggccatgttgggttcctcctacttctaaattaacaggctaagagggagttagagtgttggttggggtgattgaccttagactatcaagatgaaagtctaccctccacaatggaggtaaggaagagtatgtgtggaatgcaggagatcttttcgggcatctttagtattaccatgccctgtgattaagtcagtgggaaactacaacaacccagtcatgcaggactacaaacggcccagactcttcaggaatgaaggtttggttcactccaccaggtgaaaaccatgcctgctgaggtgctagctgaaggcaaagggaatacaggatgggtagtagaagagatagtcgtcaataccagctatgaccacgtgaccagttgcagaaacgaggactgtaatgtcatgaatatttcctccttattttgttaagaaaatgtttgtgtatatatatatacttgactaagaaaatatcttcattttatttcctttctttttcctttatcatgcaacataagattattgactccatatcagcattaagtgttgttaactttatgtagtaacatttaggttaagattagtgcacttctggttgtacaaaagatagctgtattatgttaggcataattatgacctattattgtctttatttggagatctatatgggttcaagttgacaaggggtggatttgtgtggttagtattaaatgtcaacttgattgggttgaaggattgattgaattgaagtattgttctgggtatgtctgccagggtgttgctagaggagattaacatttgggtcagcggactggagaggaagacctacccttcatctgggtgggcaccatttcctcagctgccagtgcagctataaaaaacaggcagaaggtagaattagcagacattctgagtttctggccttcatctttccctgtgctagatgcttcctgaccttgaatatcagactccaggttctttggtttttggaccttgaacttacaccagtgttttttccagggactctcaggccttcagtcacagactgaagctacagtgtcagcttccctacttttgaggttttgggactccagactgatccactactggttccttgcccctcaacttgcaaactgcctatcgtgggactttaccttgtgatcgtgtgatcaattctctttaataaagtccctttcatatatacatgtaacctattagttctgtccctcagagaaccctaactaatacgctcagttcacaaggccttccacaatctgacctctactctgtcctgtctctccactctgtcttctgatcacctcctttcatgccttgggtctttgaactattttcctgttcctggattacctttgttctctcttccatcaacacctcactcaactcatccaatttatcctccaagtcggccttgggcgtcacttacttcagaaaaaagcaatagcacacacaacgttaacaactttccagcctttctgtgggctttcataggggacccccccatcatacattctattctaactatctggttgtctgtttcacagtcttaaggtttctgaagttaagaccctatctattttgttccctattatatttttagtatccacttcagtggctggcactagtagatattcaatagttatttatgaaatgaatggatgcaatttagtttcttagcaccccttttttttcaagattgacaataggctttaaatcaatgacacagccgatgcttattttctccacctctacccaataattttaacacggttgattcttcctttaaaatctctttttctcattgatgtagatgaaactgctctttattggttttctctttgttaccaatctgtcttctgtatgaattcttttcatcttttatgtcctcaatatgggcacactctttgttgtgattacacaaccttctatgtttagatgactcccaaatttcttgttcaacccataatagtaacttaattcaagccctttctcactgaatatttctgttgggacctttttctcctggaacttaatagtctgaatctgtgcttatcttttctttcctccaaacagctttctgtcaacatggacccactatcctcaattatctcgtgtctgaactttaccatcaaagctcagaccccatgattcctttctgccttccttgaatatctcatatctacatgccctagacatttctatatttacatctttttctgccttcctagaatacactttgcttactgttctgctcatctgagttctacatttcctcaaggttcatctaatactatcttttattataaacatttctaagttacaccaatcttagagagagttacaggaatgtctctcaaaagatagtacatatcatctttactatattgttttaatttagcatacattgcaaaaaatatatgttatgtatttgtttcccttttcgttctatatccaattcagaactcaatactgggaaagtagattagagtgatattataaaaggtctcgctgagcatggtggctcacacctgtaatctcagcactttgggaagcccaggcgggtggatatgggatcaggagatcgagaccatctggctaacatggtgaaacccatctctaataaaaaacaaaaaaaaaattagcggggcatggtggtgggcccctgtattcccagctactcgggagctgaggaaggagaatggcgtgaacctgggaggcagaggttgcagtgagccaagatcacacactgtactccagcttgggcgacagagtgagactccttctcaaaaaaaaaaaaaaaaaacctcgagttctaggataacatgtttgtatttggatcaaaactgttttaaaaatctgaattagtggcaatgagtccatggagatgtgtgtgtgtgtgtgtgtgtgtgtgtgtgtgtgtggtgtgtgtgtgtgtgtgtgtgaaggacagggagcctgggtagaaaaggaaaatggataccagaggccagttagaagactttatagtggccttatagtactcaaccaaaaagtgaaagtgagacagtggacaaagaagaagacatacaagtgaatgatcttatagaagtaggattaatggttttgacagctgagattttaagagtaagtgacagagaatcatcatgagtcatttattattgaacaaattttcactgagcttccagtgtgaagcgcactctagatggtgccaacaacaggtaggcatactcccaaccctcatggagctcacattctagtgggtgacatcaagattcaacctgtatgactggaagatagtgagccattgatatggagagtaaatatagaaatacaagtttcagaaatgttgatatacttagttttatacataattattgtggctcactctctgccgacactgttttaatcactttgcatgtattaactcatttaatgttcattaaaatcctatgagtagttcttatcattatccccaccaaatagatgaggtaccagtacatagaaaggctaataactgggctaagttcaatacagtgttgagtgaaagagcagggatcaaataaaggcagctggttcatgagtccacaggattattactaaagcataattagcttttatatattttgagataacagatgaacaattttagaaggtaattggaagacaaaatagaggtttagaaagagttgagactgtatatacataaacacttgggaatcatctacgtacaagtaatacgttacctaattcacaagatcctgcacaatctgacctctgctaatgtccttcttaacactctgttctaacatatcctttcatgccttggggtctttgaatatattttctcttcttggattaccttttttatcttccatcaacacctcactaaaataactcaattttttccttcaagtctgttttgggatcactttcttcagaaaacaacaatagcagcacacaacattaacaactttccagccttttgtgggctcacataggtatgtaccttaccccattgtaaactcacctaacatacattctatctaattatctggttacttatccacttaaatctgtggaactaaaggacattgctcagagcaaatttatattttagctgtaccttgcaatatatcagtgacacatcctaaaactttcacggatttgtgtcattacaggtttctgaatattctcttttccctctgactcctctttttcttttcttctcctccactccctctcaactggtttctcaggactaccttttaatatacctatctttgcattccacatcttctccctgagtgatctcatattaacccatggtttctgttacacttatttggtaaaacatctttttttttttttgagacagcgtctgtctctgtcaccaggcagagtgcagtagcatgatcttagctcactgcaacctccacctcccaggttcaagcaatttcctgctcagcctcccgagtagctgggactacaggcgcatgccaccatgcccagctaattttgtgtttttagtagagacggggttcaccatgttggtcaggatggtcttgatctcttacctcattatctgcctgccttggcctcccaaagtgctgggattacaggcgtgagttaccgaccaggccagtaacaaatcttaatgttcagtgcagtcgtctttcctgagctcctgaccccatactcactagcttcctggacatattcagttagatagtcaattcacctgaaatccaattgaccagctggagtttatcctatttatctccaaacttgctcttcttatatgccttatctcatgaatggaaccattattcactgcagcatccaggttagaaaacttggagccatcttgacccatctctttcatttatccttccatccctcccctccaataggtcatcaactatgttttaaattttctgctggattcataacaggagatccagcatgctttcattcagttctcatcactttaagatggatttatgcaattaccacctaattatctttttttttttttttttttttttttttttgagacggagtctcgctctgtcgcccaggctggagtgcagtggcgcgatctcggtcactgcaagctccgcctcccgggttcaccccattctcctgcctcagcctcccgagagtgctgggactacaggcgcccgctaccacgcccggctaatattttgtatttttagtagagaggggtttcaccgtgttagccaggatggtctcgatctcctgacctcgtgatccgcccgcccggcctcccaaagtgctgggattacaggcgtgagccaccgcgcccggccctaattatctttccacactgttttcagggtagtcattattaaatttaaaggaatttaaacccctgcttaatttcttcagtggctccccatagctttcagaataatttttaaatcctcagcagagcttcttgtctgccttctaaccttatctactgcccctgattgtcataaacacttcactttctaggattttccaggcacatcatgttgcttcactcctgccttggcactttctagtccctctgcgaggaggcccctccccttcttcacttggctgaaacccagagattttatgaaattttaccccatcaacccagaagcctccatgtcctttccttactctgagtctgatttggatggccccctctgttcctatccagttccatatgttcctctatgagagcatgcatctgccattctgtgttcctgataaattagtctttgttccccctaggctgtaaattccctgagaacaggaatcactttactgacctttatagtcctagcatatattacagcctggtacagaatgtgagcccaaaagttggttaaaagtatgatgaattaagaaacaggaaatattccttaaaaatatacattccccattgtgggaccctgtagcatgagaattataatatttccaaaacaatggaaaacatatagaactatggagaaataaataaacaaatggattagaattatttattagtactgtgggacagagagatgatcctataatggaatgcttttatcacgtaagaatcaaatccaaactgtagttacctgagagagtggtacacatctgttgtgtttatactgatctctctagcccttagacatgttaggcatgaaaagatatttattgaactttctcgaatgagcacagtagtgggcatcaaattagatgtcctgctaatgttgacagaagttaaaatggacttctaaaaatgtttttattgatttcttggaggtctttctgtattatctattaatgccttatatgcattttgccacttctccccaccccccaggttttgctgtgttttaaactagatttatgagatttttgccttcagagttatttttattttatatatatattttagagatggagtgttgctctgttgctcagctgaagtacagtggcacaattacagctcatgtaacatcgaaccacttgactcaagtgacctcctgcctcagcctcctgagtagctaggaccacaggcacacaccactatatctggctattttttaaaaatgttctgcagagacagggtctcactatgtggcccaggctggtcttaactcctgacctcaatcaatcctcttgccttaatctcctaaagtgctgggttaaagatgtggccattgtgcctgacaagactttttatttttatgtagttaaacttttcatttttttccttattgtttctgggtttcaggctatgcttagaaaggctttctgagcctcagaattgaaaaatattcctttgcattttatggttgttatctatgttaagatttttaatccatctggaattatatttgtatataatatatcttgatttaatgattattgtgcattctttgttgtatatcatttatactggttggattttaaaagacaatgaatgtgcattgaaatcatcttattcatacatcataccaggctaggtgagtcattcaactggagacctgcattcatcatctgtctattaaatctggtgagaaatttcttattggtcgtttcatagtcttggctgccctgatcccttctcactcagcaatcactaggatattcttaaaacactataatgaaatttctatgccacctgaatttgtgtctattttgttcactgctatgtccccagtgtctaaacccatgcctggcacacgtaggcacttaataaatatattttgatggaaacgtaagtagactcatgctacttccctgttaaaaccttttaaagtcttccgatatctaacataataaaatttcaaccacaaggttgttgttacctggcctctgcctacgtttcacacttgatgtgattctgccccctccctggttatcctgatcccctgctttggccctatatcacagcagccatctctctactgtacaaacatatgaattgatccccctcaaggcctttgtagacctcctgctcttccccactttgagaacctctcgtccactagacagcagtgtgaatatgactgcctcacagaaatagttcctgactctgtattgagagtatatgtgtctcaagttgtgcttttaaaaatctcatgattttgcaacttaaatcttttataattctgtttactttgctttttattttctttcttccagaccaaaatgtagctctgtgagagtctgcattttgtctgttttctctaatgtgacttcagtctccaacatatgcctgaggtttagtaggtacccaagaaatatttgttaaaaattttttaaaaactttttattttgctgtacttataattattttttattataggaaaaggataaaaattcagaaccagaaaaaaaaaaaagatgcagaaagtcgaatgtgagtgttgcaggctcccaaatgcacagggtgttcttaaggatgtgttacccttctggtattcatatgtagaaaaacacagagtattgcaactccagaagcttgaccaagcatcagtgtccagagtattgactgaggcttcattacgaggcagtattgattgagttattgcacacatggttgagctcaatctccaccctctccctcttagagcctctccctccttagaggctgtttcatgtggctcaaattccaaacctttaaccctgggttggtctttctggcactgccagcccccaccttgagtcatctcattagcataaacttcagttatgttgacaggggagagatttccgtcatttgaataattctaagcatttacagttacttcccaaaggtcaatcagtcctctctttggataaagttaattctttgctaaacagattgtgttcatttcaaaaattatacttttgtaataaatatttctaattgcatatattattaattttttaaattattattttactgaagctctgggatacatgtgcagaacgtacaggttgttgcataggtatatacatgctatggtggtttgccgcactcatcaacctgtcatctacttaggtatttctcctaatgctatccttcccctagctcctcaccctgcaacaggccccaggtgtgatgttcccctccctgtgtccatgtgttctcattgttcagctcccacttatgagtagaacatgcagtgtttggtttcctgctcctgtgttagtttgctgataataatggtttccgcttcatccatgtccctgcaaaggacatgaactcatccttttttatggctgcatagtatccatggtatatatgtgccacattttcttaatccagtctatctttgatgggcatttgggcggttccaagtctttgctattgtgaatagtgctgcaataaacatacatgtgcatgtgtcttatagtagaatgatttataatcctttgggtatatacccagtaataggattgctgggtgaatgctatttctggttctagatccttgaggaatcgccacactgtctttcacaatgttgaataatttacactcccaccaacagtgtaaaagcattcctatttctccacatcctctccagctctgttgtttcctgtctttttaatgtttgccattttaactggtgtgagatggtatctcatgtggttttgacttgcatttctctaatgaccagtgatgatgagctttttttcttatgttggtagctgcataaatgtcttctttgagaagtgtctgttcatatccttcatccacttttttgagttttttttttcttgtaaatttatttaagttccttgtagattctggatattagcccttgtcagatggatagattgcaaaaattttatcctattctgtaggttgcctgttcactctatgatagtttattttgctgtgcagaagctctttagtttacttgtatcccatttgtcaatttggcttttgttgccattgcttttgttgttttagtcatgaagtctttgcccatgcctattcctgaatggtattgcctaggttttcttctagggtttttattgttttaggtcttatattaagtgtttaatccatctttagttactttttgtataaggtgtaaggaaggggtccagtttagttttctgctcatgggtagccagttttcccaacaccatttattaaatatggaatgcttccccattgcttgtatttgtcaggtttgtcaaagatcagattgttgtagatgtgtggcatatttctgaggcctctgttctgttccattggtctatatatctgttttggcaccattaccagctgttttgattactgtagccttatagtatagtttgaagtcaggtagtgtgatccctccgctttgttctttttgcttaggattgtcttggctatccaggtttttttcaaattccatataaatttaaggcagttttcttctaattctgtgaggaaagtcaatggtagcttgatggggaagcattgaatctataaattaccttgagcaatatggccattttcacaatattgatttttctatccatgagcatggaatgtttttccatttgtttgtgtcctctcttattgccttgagcatgatttgtagttctccttgaagaggtccttcacatcccttgtaagttgtattcctaggtttttattctctttgtagcaattgtgaatgtgagttcactcataatttgactgtttattatggcataggaatgcttgtgatttttgcacattgattttgtatcctgagactttgctgaattgctcatcagcttaaggagattttgggctgagacgatggggtttttgaaatatataatatgtcatctgcaaagagacaattcaacttcctctctttccatttgaataccacttattttttctcttgcctgattgccctggccagaacttcccatactatgttgaataggagtggtggagaggacattcttgtcttgtgccagttttcaaaggaaatgctaccaggttttgcccatcagtatgatattggttgtgggtttgtcataaatagctcttattattttgagatacattcatcaatatctagtttattgagagttttcagcatgaaggggtgttgaattttattgaaggcttttcttcatctattgagataatcatgtggtttgtgtcattggttctgtttatgtgatgattacgtttattgatttgcatatgttgaaccagccttgcatcccagggatgaagctgattgattgtgatggataagctttttgatgtgctgctggatttggtttgccagtattttatgtggatttttgcatcgatgttcatcagggatattggcctgaaattttctgtttttgttggtctcagtcaggttttggtatcaggatgatgctggcctcataaaatgagttagggagcatccctccttttctatagtttggaatagtttcagaaggaatggtaccagctcctctttgtactttggtagaattcggctgtgaatccatctggtcctggactttttttggttggtaggcattaattactgcctcaatttcagaacatttggggattcgacttcttcctggtttagcctggaagggtgtatgtgtccaggaatttatccatttcttctagattttctagtttatttgctagaggtgtttgtagtattctctgatggtagtttgtatttctctgggatcagtggtgattcccctttatcattttttattgtgtccctttgattcttctctcttttcttttttattagcttgctagtgatctatctattttgttaatcttttcaaaaaaacagctcttggattcattattgtttgaagggtttttgtgtctctatctccttcagttctgctctgatcttagttattgttgtcttttgctagctttttgtttgctcttgcttctctagtttttttaattgtgatgtagggtgttgattttaaatctttcccactttctcctgtgggcatatggtgctataaatttcctctaaacactgctttagctgtgtcccagagattctggtacattgtgtttttgttctcttggtttcaaataacttctttatttcttccttaatttcattatttacccagtagtcattaggagcaggttgttcagtttccacgcagttgtgcagttttgagtgaatttcttaatcttagttctaatttggttgcactgtggtctgagagactgttatgatttccattattttccattgctgaggagtgttttacttccaattatgtggtcaattttagaataagtgcgatgtggtttgagaagaatgtatattctattgatttggggtggagagttctatagatgtctattaggccacttgctccagatctgagttcaagtcttgaatatccttgttaatttcctgtctcattatctgtctaatattgacagtgaagtgttaaagtctcccacaattgttgtgtggaagtctattctctttgtaggtctctaaggacttgctttatgaatctgggtgctcctgtattgggtcatgtatatttaggacaattagctcttcttgttgcattgatccttttaccattatgtaagcccttcttcatcttttttgatctttgtcggtttaaagtctgttttatcagagactaggttgcaacccctgtttttttttcttgttgttgtttgtttgttttgctttccatttgcttgtaaatattcttccatccctttattttgagcctatgtgtgtctttgcacatgagatgggttcctgaatacagcacaccagtgggtcttgactctttacacagtttgtcagtctgtgtctttaattgggccatttagcccatttacatttaaggttaatattgttatgtgtgaatttgacctatcattatgatgctaagtggttattttgcccattagttgatgcagtttcttcatgggtcaatggcctttgcaatttggtacatttttgcagtgactggtaccagtttttcctttcatgtttagtgcttccttcaggagctcttgtaaggcaggcctggtggtaatgaaatccctagcatttgcttgtctgtaaaggattttatttttccttcacttatgaaacttaatttggcggatatgaaattctgggttgaaaattgttttcttttagaatgttgaatattggccccaatctcttctggcttgtagggtttctgcagagtggtcagctgttagtctgatgggcttccctggtgggtaacccgatctttctctctggctgcccttaacattttttccttcatttcaacttggtcagtctgatgattatgtgtcttggggttgctcttctctaggattatctttgtgggttctctgtgtttcctaaatttgaatgttggcctgtcttgctatgttgggaagttctccggataatatcctgaagagtgttttccaacttggttccactctcctcatcactttcaggtcaccaatcaaacataggtttggtcttttcacatagtcccatatttcttggaggctttgtcattcattttcattctttttttctttaatcttgtcttcatgctttattttgctaagttgtcttcaatctctgatatcctttcttccgcttgatcaatttgattattgatacttgtatagcttcacgaagttctcatgctgtgtttttcagcttcatcaggtcatttatgttcttctcaaactggttattttagttagcaatttgtctaaccttttttcaagttcttagcttccttgattgggttagaacatgttcccttagcttggaggagtttgttattacccccttctgaagatacttctgtcaatttgtcaaactcattctccacccagttttgtttccttgctggcaagggttgtgatcctttggaggaaaagaggcattctggtcttcggaattttcaggctttttgcctggtttttcctcatctttgtgaatttatctacctttggtctttgatgccagtgaccttggatggagtttttgtgtggacatcctttttgttgatgttgatgctattcctttctgtttttagctttccttctaacagtcaggcccctctgcagcaggtctgctggagttagctggagtccactccagaccctgtttgcctgggtatcactagtggaggctgcagaacagcaaagatgctgcctgttccttcctctggaagcttcatttcagaggggcacctgccagatgccagccgagctctcctgtatgacgtgtctgttgacccctgctgggaggtgtctccgggtcgggagcacgggggtcggggacccatttgaggaggcagtctgtcccttagcagagctccagttcttgctgggagatccactgctctctttagagccagcaggcaggaatgtttaagtctgctgagctgcacccacagtcaccccttcccccacgtgctctgtcccagggagatgggagttttactataagccccttaatggggctgctgcctttctttcagagataccctgcccagggaggagaatctagaaaggcattctggctacagcagctttgtggtgctgcagtggaccccagccatatgaacttcctcgtggttttgtttacactatgagaggaaaactgcctactcaagcctcgtaatggcagtcgttcctccctccaccaggctcgagcatcccaggtcaacttcagactgtgtgctggcagcgagaatttcaagccagtggatcttagattgcagggctccctaggggtggatccactgagctagaccacttagttccctggcttcagccacctttccaggggagtgacggttctgtctcgctggcattccaggcgccagtgaggtatgaaaaaaatctcctgcagcagcttggtgtctgcccaaatggccgcccagttttgtgcttgaaacctagggccctggtatgtaggcaaccgagggaatctcctggtctgcgggttgcgaagaccatggaaaagcttagttctgggccagaatgcacagttcctcaaggcacagttcctcgcggcttcccttgactagggtgggagttccctgaccccttgcacttcctgggtgagggatgccccaccctgtttaggtcgccatctgtgggctgtacccattgtttaaccagtcccaatgagaagagctgggtacccagttggaaatgcagaaatcacctgccttctgcattgatcttgctgggagctgcgtatcgagttgtttctatttggctatcttgacagctacccaaacttatttttataacaattatttgtcaatgctgaattacctagtaattagcttgacaatttttaagaaagtaatccattggccaaaagaaactcatgatataactaatgtcttcgattttaattactcttgaatataaaacaataataacaaaacagcttatgcttaacaggtttggttatctgctcattttattcaaatgcttaattatcaatagatgaatttatataaagatacataattgaaaaagaaatgaagacatattcttcatcaacacacaattatatagaagttatacagaaacagacgggtaaagtttatcacaaaccgggtgttaaacgcattacataattaagaacgggaagttagagaaaatggtgatctctttggaagaacagaataaaggacaaaaaacccattataatggaaagctgaaaaaaaaagaaacataaattaggactgagattgtaaatagacttgatgctaccatcctacagtccacttaagcatcacttgagtatgtagtcatgctaagaacagtgtcagggatattaaggtaaaaggaggtccagttaaagctgtaaagtgaaaacatctggacaatcaagaagaagaaacagttaacaacaaaaaccctcaacaaaatagcatataaatactaaattggacattttttaaaagataaataacataccagaagagagatgaagaaactttcaaaaacaaaataaaggatagaagaatattaaaaagaatagaaagtttaaaaaatacataaaggcagagcaagaatctggtataaactcatgcaaaattatggctgtcctagaaactgaaaataatgtgttaaaagaagacaaccaaatcatataaaatcataatgattggctggtaacaatgttttctttccgctactctgtggtatgtgtcagctttcaataactttaaagtgcttttttctttacccagttgaaaatcatcaggtaaatctagaaaaattagaataaataactctcttctttttccgaaaagtctttggctttatttaggatattttacctctgccattagaaggtgaaaatacaataactagtccaaatggaaagtattaatgggaagctgaaaattgtttcagtcaatcaacaatccatacttactaattgagcacttagtatgagatctgtgtttgggatgatagagatacaagtatgagaatcttttatttataattgagggtttaagaaataatcacattattcagtcataaaaagtcatattatatctacattaaatgcatttgttgatctctatctagttattaataagatgcaaagataagtaaggcagccttaccactatcagcaaaacaaaggtggttccatatttgaacagctgatgcagtttattgtttgaattagagatctgcttctctgtagctgaaatttatagatacacttcagtttctttatctataaaatggagataatgcctactctatgaatatagaaaatatactgctcagtaaatatccatgtgcttcctcacatttcccacctctttgcagttacatttagacatacaagtaattctggtcagtgggctgttaataaaagtgagtgtgccacttctagtccaaagaatttgaaagctgcggtgcaatgtgtagctgttttgtttgcagtgatgtgaaatctgaggatgactaccctggaaatttacctgacccacactggatagaataaacttttgtgtgtcagaaataaacttttgagttgtcaattgtgttgaatttcatttgtcatagatttgtggggccagtgttgaccaatgtacagggttactttgaagatcaatgagatgatgcatgtaaacttcttagtatagtgtcttgcacagagtaagcaatcaataatgaaagccatcattatttacagactttcctaaatagaattagttattaaaagcttttttgtccaggcaaggtggcacatgcctgtaagccaagttctttgggagactcaggtgggagatctcttaaggctgggagttggagcagcctaggcaacatagtgagatccttgtttctacaataagaaaaagtattagctcagagtggtgacatatacttgtagtccttgctatttgggggctgaggtggaaggatcactttatctcaggaatctggaattacagtgatcacatcactcacttcagccttggcaacagagcaagaccctgtctcaaaacgaaacaaaggaaaaacaaaacaaaagttcttcttctttttttttttttttggttataaaataagtcagtatgggaaaaaaactctagaatatgttggcagaaaatttccaaagctacttcatgcttttactttctcaacttttttttcaaattgaatacacttaatctttttgataggagtggctactcattgaattgtactttttgtaaacaaagtatatgtttttggtcagagatctctaaggtttttattttggataattcattgctccaaaccaatggtgaaaactagtgatctttcaaacatgggaacccctataattttcttctggcattgcaacaatttgatgttcatctttctcttttctggctaacctatatacacttaagtacaggatcacattaagaaaatgctcagaccacatgtaaacacctgtggctagacaattcctgaaccctatgcaatgtccaattttcaaaggatgtaagctctgtgttgttttctctaccatgtatttttccacaaaagtcctacttactactttatcagaaccgatgtatttgggcataagtctagacatgctgtgattttaaagaagtagatcattcctgcctaccctatacttttgccctctggagaggggatttggacatctcctgggccctggacccagctctctgggtgtgtctagatagaactcccaaattaaaaagattcggggaaaaatttggaaggatatgaaggaattacaataagtttgaatcatctgcagatgaaaataagagaccatagtaagtcatgaagaaaagggcaaggagagttgaattaggtttattcaattgagatcagtttttattttttattaagtaaagctgccactttaaaggaaataaaaaatgtgatgtatttgataaatcagatgactccgtaacattcaagtgtgagttggtggaaaaacaaacaagagtgtctgttcttttagtcagtggatttataaactaaatcaggaagctgtttccccagcttttctcccattccctttccctcagtagtgaagatatgactcatcaggattgatttacagctgactaaaacaaccaggagaaggcatgatgagtggtgagaggtgggggtaaacactgtcatttaaatactgcagaaacatctccgtctatggttcctatgcaggagatttctccaagcatgtttcagagcttagaggtgggcataagaggccacgtgggatattctgtcagatgggcaaggcctcagttgagggccacagcatgtcatctggatgggttctggccacagccataaggccagaaatctgaatgaagaaaatgacagttgctcttatggaaggatgcgagccaaggctgggaggggaattaatgcagtggatgatggcatcacgacacaggctggcagaaggctgaaacaaacaagagaagctttaacaaagataaatacaaaagatgcagacagagtggagaaagaaaataataaagtaaaataaaaattctgattgtaggttagattattaataaaattcatattatcaaactgtgcatgaacttctaaaaatgggttgaagtagttcaacatagacacaaaaccttagaaagtctagaaaatgaatctaaatgactcatatttttaaaaaactagaataatatgctacttttcactagtcagatgtacaaagataaaccaagtttgatagtaggtgttggctctgggatgggcaaagaaacattcgtaaatcctatttctgttgttgtaagccttgatagagcaatttggaaattggtaccaaaatttaaaataaatatgccctttaaaccagcaatttctagctataatttcatatgttcaaagacacacacataaagatacaccaattacaatcttttgcagcctttttcgttattgcacaaactggacactactaatagtgccaaaagggactgaataaattgttttatgtaatgtaatggaaaactttgtagtacattaaaaaacatctatatatgctaatagaatatgatagaatatgagataatctccacatgttgttaatgacaaagcagtttgccatttaacatatatatagtctacatatagttttctctaatactaaggaaagataaaggaaattgagtcttcaggaggtaaacagaaatgcattgttgggaaagaaagggtgttccaagcatccagaacagagtgtgcaattaatgtaagtgtaaactagtagaatttccaggaaatagtgactagtccacttaagatacataccaaagcacctagttgctattttatattgttttctcccttgaattctggtgcatgtgccagagtaaatgtgtacaattccaaaaaataaaacaattcctggttacctagagtaactactaacattgttagaaatgatcagacaaacatattgatagggcctgaacacatagagaactccttagctttcagtagtaaattcatccactcctcccaagagtagagatatgaaagcttttagttagagcacgaaatcactttaactatctcctatagtaacaagggaatcaacgccaaccttttaagtaaacaggtcctatgctgtttaaatatttgcaccaattgacaatggaggcaaatatttacctacattcggtaaatatggcaatttaagtttccttctatgaaattttgagctaattctggggacttttttgttgtgtgtgtaacttgtagttttacactattatactgtatttatcctaatttgtaattcaaatttataatatatttgcttggatgaggtttgttttagaatcatagtctcaactcataactggttaagctagaaatggtaccagagttaatactgggtatcataccatgaactaagtgtaaagttggcaaatacattttgtgtcctgttcataaaggatcctatcttaatggtctttcctcctgagtcatcttttcatagatttcttgctgaatccaactccctggaagtcccagggagaccagagacactttggtgaaaatcgttcctaaatagaataaaatatgtcctgtagaaaagttttcatacgttttcagtgactgtttctctaattcattcttaatattctttagccataaataaaaataataatatgatgaatctcatttccttttttttgtctttttaagattcttgactcttggctgttttcctctacttagcatcttgaagccctttcccacctatgttagcgcttactggtgaatatgtcacctaatttttgttctagcttagaccagaactcaacggtttctggtggcattattcatcattattttaataaccttttctttttctgcaattgctttgaggtcttggatactctctccttttcagtataatcagttgtgaaatacaaatgtcggctaggttttctctaactgagattggacttcaaaactctataatcctgtaatgcttgttccctatgtcagctgctgatatttttggttacttggaagttggtcttcacaatcagactccctgcctgtttggcattagctgcctgttcgtcctgcactccatgagcctcctctcacaaggaatctctttgatctcaaagacagctctgtaaggtgcagagaaaaacaaataccaggtatttccctctatggtgctcatgacaatatgagttgttcaagagaataagaaagcttaaaacaactcatagtactatccttgaagcacctttcacaagtgccaaattaatttctgtcatacaaacatgttatttaaaaaaagaaatttcccaaacataaaaggaatagaataaatgaatttcaaaatggctttgattatccattttcataaatataccagcagcctgggaggaaaatttctgcttgtaccactaacctaaattctccagaggtttgagggaatgatttttatagcgtcctttctttattaagcagtcatattaaattattgcagcatacatgtaatttaccaattctgacctgctttgaaatatgctttttcttagaaataagtaatgaatcatgcgtggataacataaattaaattaatttgatagtgaacattaggaagcaagaaatcagtaataaaatagaccctagtgccttccaagtaaaaagtaaagacatctaatattggagcctagcaaagcatgaatatgcattaaatttaaaacctgggataaataagaatcataagacttgagttaagaatgttgctttttaagtgaggtacttctgtaataagatagttgattagaaaatattgaagatactaagccagagcatgtatacatagtctatatttcgaagagatgactctgaaattgccataactccatttgcatacagcaaccctcccgtatctgcagaggctatgttccaagaacacagtggatgcctgaaaccatggataatgccaaaccatacacatacaatactattttttaatctggtaattgagatggtgacgaagtgagtaacaggcaggtagcatgtacagtgtcctatgctggaccaagggatgatttgcatcccatgcaagataaaggaggatggcacaagattcatcatgctactcagaacagcacacaataaaaaacttataaattgtttctttctgaaatttttatttaatatttttgaaccatggttgactgcaagtaactgaaacttcagaaagaaagttgcagatggagggggctactgtatgtgttagatacttcacttgaatgtgatatatggaatgatggattgcatctatttaataaaactaaaacaaatcttggcctccaaaggacaaagtgttttgctttcaaactgtggagaaattgtttgagtatttctacctcttatttctgtgagattaagaatacagcctttggaattataaatattttgcatactttctcaataacttcggaaaactacttgagaaaactctccaaacatcatttcttcatttctaagccagggacaaaatacctatatcatagaattgttggaataataagataaaaaataaaataaaaaatatgttgtgtatggtaaggtctgacaccgttattgttatttatttttctggatgtcatgggtttctgtacctgatgaacatgtatgactgttctataggtgtctgtggggttgaaaggaggtcggtaccaggaagtggatggaacaattctgcaccttcctgcttctgtgtgagcactggcctatgatttgaagctgctgaaatttgaggttgatctagcattttgattgggaaaggggcagtgttgagaaaaaggaataaagtttttgcagggatgacagagatgttactcagcactccaaaacatggtctcaccccaagcctgacatggcctcagaatctttcccaacagagcacacaataattggagttggcccaagtgatgaaatttgttttctgtctgttaagatgatcagtgcactcaaagtgtgttgttggaccagcagcatcaacgtgatctgggtatttgttagaggttaagttctcaggcctacccacagacctactgaatcagaattttggggtgtgggacccagggtctgcatttatcaagccttctaggtgattctgatggatgcccacttagatgtttggccattaataaaatagggattgctcacatggaaaaccagtgaaatccacagaatctaatgctatggaggagttattacattccaggcaatgtctgcttttcatatgcctaatcctcccaaaatcctttgattattgaataatcaaataatcagataaatagatgagaaacatgagataagagaaggaaagaagggagggaaggagggagagaggtaggaaggagagaaagaaaggaataaaactacatttcagaattgttatataacattcatgcagctactaggaggtagggttagagtcaattcttaattcccagtttaacttcaaatttcaaagccaaacatgtttccccttcattctgccacactaagcaatataggtaataaacaaatgtttctatggtgccaacacaattaaagaattgtttgggccagaaaaaagtcactggaaaaattagacctgagttcacttctttttcacagagtaatgtaatttctcacaaaatcattatgaaccaagaagtcatccaattctaaaatcttggaataactttatccaccatgaaatccagagaggctgtgggaagaaaatatatgtcaatgcagatttggctcttagagctagaagagaaagttttggtcagaacactggattgataataaaaattcccagtcacttttaaaatttttagcagattatgtgttatgtttctgaaatggcttgccagataaagtttcaggaagaggtctgaataaaatgttctagcaatgtttctttttcttccatgttttctttttgaatacttctcctttttggccagaaagcattttcttgtgcctgacaaaataagcaaaatgcaaactagacaaagaatagtgtaccttaaaaaatactgtatgaatgtatttattttggctgatgaagatatttccctaagatccgaagctccatagaagctacttttattagaacctcagtgtttgatcaggtacgtaaaagatgaagcctttgcacaagaaagcagaacatgaagatcacatggacttgtctggattgggtgattctggccacttgttgctgatgacatcatcattgataatcattggtctcaaatgctggcgtgcctgggaggctggtgtcttgccaaatggtgcatattccctgtgcaggatatgaaggccgttttggttttcacttcttgcagtcatttgatatacatgcaattatttcagcatacaaaggaaaactaaatgtcagatgtcaggtcaaagataaatagattggttcccaactgactgtatgctatatatgtgaccttagtcctagggttttttttatctgaaccaagttactgggaaaggaaccatgaattttctttgcttaatactagtttgtcagaatctattgatggatttcttgtggcatattgaacttcatccaatattatgtgtagaagttttcttttcttcttttcttccccttctagttgtggctattcagcaggttatcacatttctgtagattgttttaaagctccatacttttcattctctgctgaaagttggtcaaagtatgagaaacagaaaaaaaagtatatacttttatagccagggtcccaaagtctcaaactttgatgctaattgtttctatgagttttctacagtgagtgagagaattcctcagtttatagtattatctcttgtcagtggttgtcttttgtagagcttaacaaatattttcgggcagtctgtgtgtgttactgcacctgcacatgctgaagctgctacagatatgtgcgtagtgtttgtgaacaatcaccagcattataggggcaattctaacagttcagatagagaggcagttcctaagaccagtggcatggcatgccatggcagttgcctcccagctgggagaggccgggggtttgtgccatctccaaatgtaacccaactctgtcttcaacacagagattcatcacatggatttgagctgtccaaaacacttgataaaaattcagttgaatccaataaatatttactgagcattgtattttgccttcaggataataaaatgcgatagtatgtctgcccttagttttgtgaattgtagtggaggcaaagcaaagtaaaacctatttaatggtcccagaatgacagcctttcatcaggattcatgatgataaactgataacagtaactaggaatgaaaatcacgtattgtgaaattgctgtgtgctagatatgtgcttgactccttatgcatattatttcctttaatccccccaagccctctacatattacttttatatattaaaattgaagaaactgaagctcatagaagttaatcatgcaaacatacccgaccacttggtgtagcttaaacctgaccacaggtctgcactctttccttttctattctgatatttccagtctccaaactggcaattctggtactggcattttgataaagagagctaccggagcaaggcttatctaggttgatttttactgaaggacagaaaggcacaatcaaagccttgggaaagagatagtcatcaggcaaatgacatcattatatcataataataactaccacacaacaggcacattttataaggcaaatatctagatatctaccattttaagcatttttttttgaattgactttttaaaaatcccacaacagccctattaggcggatagtgttattatctaatattacagttgaggaaactgaggcactcagctgctaaattacccaaagtcacccaactatgtggtgacagatctagaagataccattcttttgaattaattccggatgttggtttcagacaaatggccaaataaaatgcaggaattagctttaaaaaaattaaactgcctctggaagttgctttgccatgacaggaggaaggaagacaaaaagtcatatatcactcctaaattctctgcctgaatgcaattcacatcacttttcctcacttatcattggccaaagcaagtcataggtcatgcccatcttcaagggggtggggagtgctatcctaccatgtacccagaagagtactggaaatagtgaaaacactgttaataagtcccacaggggtgatatttgaagagtgttcagacacagtcaacagctgaggcttgataaagttccatgagcctgggaaactacagatattttatactactaaatagtgagtcagggagtatcaggcatctttggcaatggtagactgagtcaggttttaaaggcccttgtacccactcttacaaacttagactttattctgtaagcttagggaagctttgaggactgtaagaaggagaatgctcatcagatttggttttaccccagtggctttggtgcagtgaatgagtttggagaagtcaagactacaaataagaaactcaattgaatgtaattaaacttatgagactaaaactacatgagagatatagaagtaaagcagagagattaataaatatctaggagatacaatgcacagaatatgttatttaattgaacatgcagatgagagcacagagaaaactagcaaagctctcagaattaaggtttgtagatgtttattttaaaatgatgtagggaatatgggaagggcaggattgagcataaaataaattttatatgtgcctatggatctcatattattggaagcatccaacagatatttgtatatgtgagttgaaactggagggaaggtcgtggatgaagatttagtttcaaaaatcaataggacatggaaagtattaaaatcctgaaagtggatgacagtccaaagagaaccttcaccatgaaaaaagcagtgaagaagaatggaactaggaaactcaacgtttaagagagaggcaaactgggagtagctcagaaagagatagagaaggactggacagaggtaaatataaagagttgagaaagagacctcacaaagctaaatacatcaatcagatcaagaacaataaataaaatctcaaagtgccctttgacttgagtataattgagtcagtgaatgcactttgatagaacatgtcaattaattggttgaacagaaagcaaatttctgtgagctaaggagtgattgggtagtgccagaatgaagatgggaatataggttattttgtcaaaaagtttaaaaagaggaagcagcaaactagtttattaaggggacataaggtcaagagatttcataaaattagagattcttggtcatgtttataagctcgcagaaagaaatggtaatgctgggaatatgagaaatggaagacgtaaaataaataaatgcatccttatttcctaaatagtcaacaattatagttttgactactatgcatttgctatagagactaatttttcaagaaaaataaatatattatgaaacaacaaaatccttataaaaaggctgaattattcagggaactgagcaggagtttctgagactgagggttttaatcatggccggtgattattttactacacaatgtagggcaaattattttgattttcactggctaggaggatgcaaagttaacttcactaagctgaacttacctctctcatttttcatatatgtaatgtagggtggtctagttcctgaataactaggatggataattagctaggatgtttgtaacaaaatattttgcaaataaaaaatgctgcacaacaatttttcaaaaatatgtcattttcaataaatttcaaactgcttcatggtgtaccctatttagtgcctaaaagcctagtattaaaaaattaataatggtagaatttcagagagtgaggaagcataggtgttacttgtaaaagactcacctttgaatttattccaaacaccccaggttagcagataccaccagccctgtgaaaacttgaaataacacctttgtagccatctggttcagacttgttttctgatatctcaatcagcaattatctaagtggggcagcttttttgcttttgctcagtttgcaaccaggtaagcacttgcatactgaggtcatgatacaagatgcgatgtcgaagaacattatttttgctgttcttctcactttagttcactttctcatttaacagctattgagcgttatttatctctgcatggttgcagcctggcaagcttactctcaaagctgtggtgatatagcctcctcttcttgctactctacctaatctgaaacaagaagaatttcaaaattgtagttcttatttcataggaaatgcatttcaactgactattggtggtgactttgagtactgggttgaagaaaatgatgaggcaaagggcaagccaatgagaaagaatacagtgtctgttgtgggtgtagaaaaaggagagacagcagaccaccgggtatttaccatccccactgtttaaccacactttgggatgtggcatctatcttggaagcactgatcctgtagcccaatgatcaccaattttctgtcatagttcaagttctggagctttattttcatgttgtgccctgtttctgagtcaatcctactaactgttagttagtggctgggtcttgagaagagacaagcatctatcatataaaaggccatgtgctaattattcaagagaagaagagatgaaaaaaactaaggtatccgttcatatgcatgaattattttaattacttttttctttggtttagttgttgttgtaacttttcaattcactttctgtggtaggttttgtggagctgactagctgtcaaacaattattttcagttgtttggcagagagaaaaaggggaatttataaaaaccacaggcttcatctttaccaaaggaaaaataatctctacattgaatcagtatccttattatgacataaaaaagtctaataagcttaaaaatattacgtgaatgcttagaagacctatttgttgtattaataatgcttggccattaaaactttgatacccatgcatatgaataatatcatctgattgaaatagggtttaaaaagaagttccgcactgcaggaacaatataacaagtcaatatttaaactatctcagttgtcccaaaatgatttgtttgttggttgtttgtttgttttgtaatgtatcttttagctgattttaaaaatccagactctaacaaggatcccacaccttgcattagttgtactgtctttcttaagttccaagcagtttccccctatgttttgcctttgattaacctgccatttttgaagagttaaggcttgtcttagagatttctctaaatctgtctgattgtatcccatgactagatttaggttaaatatcttcggcaaaaaactgcacaagtgctgttgtgtacatttgattacatcacatcaggggcctctgtgcttttgtgtgatgtttggttacctggttaagatggtgtctgtcaagttttttttttttttattttgaagttatgcttttcctttataattaataagtaatcaatcaatgggatgacatttgatactatgtgaatatcatgttctccaatacactttcacccagtagttttagcatgcatgatgacctttgtctgaactacattagagactgcaaaatagtcatttcctaattttatttcccttttacatttattttctggcattcttgtgtaaacaaaagactccttcctccagtacactacaggctcaagaattttaaaaaattcaatgtgttacgatccattatgttcatttttaaattcccaaattatctcatatttggcctttcatgcttgccgctttgttcttttgatttatttatcattctctgggcacttccttagctttctgacacagaatgttcagggttcacctgtacactatctgtctgtaatctggaattagccatttctccaggaaacattgtttgcttcagtagtgagtagtgagtagtatttcaaaaccaagatcttgatattaatatgttcaatgctcaaggtgacattgtttctgggtcccttcaggaggcagagaatatatacatttttgaatcatgaattggtgctgatgactccatttcagatccaatacctctggatttctccttacctccccattccatatttacacactgcttctcccacagtgtgaaacctgaatcctgacaacccaatgtatttgctcatttgctttatattataatatacaaaatagttttaataatcaacaacttactaagtcatgttcttctttctatcttgagaaaatatctcactaaaggtgtacataagtaaaatgtgttcatgagttatttgaatcattcttttctttcctatgaggttgtgtattttaatatacagttgggtcaatttgtttctgtttgagttatattttagcacgtgtttccatccttgctgatacaattttatttttgaatacgtaaaatatttatacatcccccaaacctcaaaactattaaaaatttgtactttgagaagccttatatgcctcccaacttgtgttccaccgatttcctctcctctgaccccaaagagtgaaccatttatatttatttctggtatgtcttccttttttttgacaaaataaacaattatatatttatgtaagatagatatatacaatggcaacatactcttttgtatcttgctttttttctctccatattcactctcagaagtctcattttttttttgtatagctctagtgcaaaagggtactccattgtgtggctatggtagacttgttaaattagcctcctgtagatagacatggataatttccattttttaaaaaatgattttaaaaaattcattgccacagtgagtaacctttttacctagaattgttttctttttgatttatagcactgtaacccattggaagcaaattcctaaaagtgggatttctgggtggaaggcattttgatagatattatcaaatttttctccatgagtattgtcagattttttttgtatactactagcaatgtatgagaaaatctttttccataattttttcaacagagtgtgttacaagcttctgaattttaggaataaattctcaaaaaatgttttcaaactaattctgatgttagtcaggtcgagaaccactagcctagacagttagggattctaagaggatacaaaacgaagccgtgattatggtaacaagcaacacagaagtaacttaaaaggaagaaggaagaaacagtcattcaatttttattttttttcccaggcttgatattccccagaagtaaagattaacacacatgatacaacccatgtttaccttaaaacgaattacacctgtttggtatcattttacaaccttacttatcgacaatgtccagtttgggttgatgtctgtttagacactaagtgggaatactttcaaggtacctggcatcttagatgatgcacaagttaacactcacccaaacattatatttaactgagctgatagaatcgaggtaccatattttatagattctaagatactgtttttttaacatctttaaattagtttgcatcttacaactgacgatgtgccatcattgaattgcgttctttttttttttttttttttttgagacagagtctcgctctgttgaccagcttggttgcagtggcacgatcttggctccctgcaacctccgcctcctgggttcaagtgattcttcgctgcagccccccaagtagctggaactacaggcatgcaccaccatgcctggccaattttgtatttttggtagagacggggtttcaccatattggccaggctggtctccaactcctgactcatgatccacccgcctcagccacccaaagtgctaggattacaggtgtgagccaccgcttcagcaaattgacagctttttaaaatctcttcaaggtgcataatataacagggcatctttaatcaatggtgtatcagatttgatgagatatggtatgccttttttttctgtattcgttcctaggcctgcataacaaagtaccacaaagtgggtggcttaaaacaatggaaatttatttctcacaattctggagtctaaaaattcaaaatcaaggtgtcagcaggtccatactctccctctaatctgtaggatagaatcctcctttgtgtctttcttgcttttggtggttcacagcatccttggcactccttgacttgaagctgcagcacttcaatctctgcctccatcaccacaggccttctccctcaggtgtctgtcttctcctctccctataaggacaccagttatattggtgaaagacccaccctactatagtatgatagctgattatatctgcaaagactctatttccaattagacccttctgagcgagatactgggaattaggactttgacgtatctttttggggaccacaacccaatttatatatcatcttatacctttttatttttttcaattacttctcattgtctgctctgactggatttaaatctttattaacagcacgttttttgtatagttttttttcattagtccactcttgtattgctataaagaaataccagagattgggtaatttataaagaaagaggtttaattggcccatgattccacaggctgtacaggatgcatggcagcatctgctctggggaggcctcagggagctcttacttatggcagaaggcaaagctggagcaggtgtctttatggtgggagcaggaggaagaaagaaatgggggaggtgctacatccttttaaacaacagatctcatggtaactcactccctattacaagaacagcaccaagaagacagtgctaaacattcatgacgattccatccccatgatccactcactctcaccaggccccaaatacaatatgaggattacaatttgacatgagatttgggtggggacacagatccaaaccataccaattccctttcatttctcatttctctctctcactcttcatctcttcttgtttttctggaaggtgacgttccttcctgttcattttttttttttttttaacggagtctcgctctgtcaccaggcggagtgcagtggtgcaatctcggttcactgcaacctccgcctcccgggttcaagcgatttcctgccccagcctcctccacagctgggactacaggcgcccgccaccacgcccggctaattttgtatttttagtagagacagggtttcaccgtgttggccaggatggtctccatctccgacctcatgatccaccctcctcagcctctcaaagtgcttggattacagctgtgagccacgcgcccagccccttcctgttcatttttaggcagcttccatggctgctgttgatcatgccgaagctgctttgaaggcagagaactagcagtgatatcaagatttgtaagaattcaagtaatagagaaaggcatttcagatgatccgggaagttgatgtgggagaacgaggtggggagccttgtcctaccagagaaaagacttattctagagctgcagccataaaataatggtggtgaagatagataaatacaacaatatgaaatataatagaggatctagaattataacacacataagggaaacctgagatatggcagagataacactgaagtttctaatacttgtaatatgagattttgaaataaaaggataattaactgaaaggatccaagtggctttctaggctaattatagcatgctttccttagtgatcctgagtacccatatggtaagaatgtgggcagagaataattgatggtggttacttttcaatatctctgccctaaatcctgtgactggtggtgagtacagcggtcctagttcctagtgcctgtattcttttgcatccctagtccaaccttcagtgttctctcttgactctcaagctggtctctgccagctggttatggggctttttgggctgcctctcttgccctagtgtccagttatttataaaaatagagttgatggccaggcgcagtggctcaccctgtaatcccagcactttgggaggccgaggcgggtggatcacgaggtcaggagatcgaaccatcctggctaacacgatgaaaccccgtctctactaaaaatacaaaaaattagcccgcgtggtggcgggcgcctgtagtcccagctactcgggaggctgaggcaggagaatggcataacccgggaggaggagtttgcagtgagctgagattggtgccattgcactccagcctggggacagagtgagactccatctcaaaataaataaataaataaataaaataaaaagagttgatttctttactcctaaaatgttccctgtcacagctatgaatactattacactactttcagcagacactgagctcttaacgtacttacagagctacctgccctctatggtcagttaaaggccccttcatggtcctggaagggagcccacccctgcttacaagatcagtagcctgcctggcatatctctctggactagctgatcaactgtggctgtcagctgcactgcctcctcccctcccatggtcacaggctttcctggccgctcagtggacacttgttccatgccaggctgctcccaatcccttaccatctgtggtgatacgaagtctccctccttgctggttcacgacccttgacaagtaaggcagattctgaaatcatttcatgatttcaaatagcaagatagagtttcctgaagacctcaactagaaaggtcctaagaagaaccagactaccttttaattctactttagacttcccttgaaatatctggctgttggaaatgagagccaagcaggtggaagaaagcccacagaaatttagaattaatatttttcaccaggaatttttgtttgacagattttcccccagttttttgtggcaactacatatatcataaaatttaccatgttaatcacttttaagttcaggggattatatacattcataatgttgtacaagcgtcactgccatctatctccagaattgttttatattgtaaaactctatacttattacacagtatagatgacagattttcaaagaatgtttgcaatagttgtttttgttgctgctttttgaaggtaccatcacatcagtcgctgaaatatttggaatatgattagcaagctattggaaaaatacttatgatgctatctagaaaaacaaatatcacttacagtattgttaactgaaaattttatttgaatttaaatttatcttctcactcacagctcaaaaggaatttcaattcaatgtctaacttgagtgcaaactaattgtttctcagttgactcaactatgttttgtgatatgaaatctaatgttttggggagttcataccggataaggagataaaaatattcttttgtacatggaattctttaagtatgggactccctcccatggtcagtgggcataaaaatagaagtaagacattgttcctgcttatggagctcagttagtgggtgagtccacacattgagatacgctgagagtagaactgcaaggacagaactaaatgagagctcaaaggaagcaaagctgccagagtgtgaaaagaggagcgttcctggagaggtgccaactgagccaagcatgagtaggagttggccaggtaagcctgagaaggttgtggagagagtctgagaagacattccaggtggagagatggagcaaagacacagctagacaacagattgtgtagtggagatgctggttaagttaaagttcagggcgtggaagagaaagggaggaaccagattggaaaccaagcaagacaatgaggactttatccttcttgttgaggggcctgacaaagttctttgaagcaagaaactatacaaaagtctattgaggccttatcatgtagcatcccttcccaatcaggagagtgaccatcaacttcctgtgggtagcgcaaaggcagattttaagaggtcaagataacctatggggaagctgatttaaaggctgttttatgttgcataccactagaaataaaccaaatatacaaaaaagagttcagacaagctctgatcactacagagataggacggccacactttagtctacttttggagtctggctcctgatagttaaacctaaccaattcctgagttgctaaactttagtttgcattttttgatttcttcttacagaaatgtctcaatgttaagttataccttcacgtttgtgagcaaggaagttaaatgtaaaatattcaaataccaaaagaaaattcaattgtgggtatgaaaaggatgtcttgggcagatatccactcaggggagcattttttgacaaatgcaaatacaattgtttgaagagatgataaaagatactttattgcaattatgctaaagaaggtgtcagaaagaaaacatgacctgaaacctgttcaatattttgcaggtactttcacttctacatgtacatcagtaaggatagacttacaggaatgatgaaatcaatctggtttgagttgaaaatgtagtttggttagaatcaattttaaaaaaatctccttgtcccgtatggttcaaataatgaggaagctaaaaagctttaagttgtccacaaagaaaggtcaataagaaatatgaatccctgtttgcaagcaaaagaaaattcaactgtggcgacttacaaactaaaggaaatgtattgactaatgtgtttgaaaaatatagagatcaggctaatttaacttggatattcatgatgtaagagctgtgggaggtacaaagaggagctggtgcattccttctgaaactattccaaacaatagaaaaagagggacttctccctatctcatttatgaggccagcatcatcctaatagcaaaacctggcagtgacacaacaaaaaatttcaggcaatatccctgatgaacatcgatgcaaaaatcctcagtgaaatactggcaagccgaatcagcagcacatcaaaaagcttatccaccacaatcaagtcggcttcattcctgggatgcaagctggttcaacatatgcaaatcaataaacgtaatctgtcacataaacagaaccaacgacaaaaccacatgattatctcaatagatgcagaagaggccttcaataaaattcaacacctctcatgccaaaaacctcaatcaactaggtattgatggaatgtatctcaaaataatagctattacgacaaacccacagctaatatcatactggatgggcaaaacctggaagcattcacttgaaaatcggcacaagacaagaatgtcctctctcaccactcctattcaatatagtgttggagatctggccagggcaatcaggcaagagaaagaaataaatggtattcaaataggaagagggaagtcaaattgtctctgtttgcagatgacatgattggatatttagaaaaccccatcgcttagcccaaaatctccttaagctgataagcaacttcagcaaagtctcaggatacaaaagtataataataaaaataagagctgtggataatttcttcattttgttgccctttagacacgggcctattcttagtctggcttcccttatggtaaatgctagaatctctcaggaccataataagctcccttgttcacttggggaaggaagaaagaattttttgaacagtcatagatcaatgttctgaacttcactcccatcaggctattgccagacacatgcctgcccttgaatcattgcttttaccaggggatagtcaggatgctgactggtttggactaggttctgcactgatcacaaaccaataactctggcaaggggaatagaattacttcaattggctcagattgatcagatccagtagaacaaaaccctgtgcactaataggtctgcgtcactcaaaaaggcattttattttctagttcacaaagaggtacctatgaattagcagcagccatgaccttggagtttgggatcaatctcattggtttttgtatttcttttattttcactttcagatccagaattcacccgctgtttctccatgagtctgacctgcatcaactgcctcccttattctgggattccagtttggagctcaaggacaagtccattctgggctggctgtatccaacttctttagtccaactaatccccactggaagccaggctctttccaacagctgtcacccatgcctctttctatgtttttatctgtctctaggttctggtaactacttccttcccttgccccttctggcctagggtgtaccaatccctcctccaaatccaactgtcactagcctcaaagtacttgtagcttcctcacttactttcaccttaataaatggtccccctactatctctcttcaaagcacccaatttgatgtgccatctgtttcttgccaggatcctggttggtacatcaaccaagctgcactgatggggagcactgtgctgaactttaggaatgaagccacagggccctcactgcccccatagtcacttggtcatcttctgcctccctgaaagactaaattcagtcagttcagatacatacacatcagacatgtcagggaaaactccattttgtaaggatctctgcttaaaatgccaaaggtttaaagttggcaaacacttgagaaaagcacagttctctgtcttactcttactctaaacttgagataaatgcatttttaaaattgtgcatgttagagtgctaacgtgtacaagatcatttcggtgagacaccacaaacaatattttatgaggccaaaataagaaagaaggaaatgaaatactcaggaatctcaggaagagctcatcgaacactttgcctttatctcagaccattttatcacagccctgttaatcaggattggatatacctccatgagggagtcttaaacggagggaaaagatgccacaactaaaaaaaagaatgcaatagaagtttgtcttaatgcctgttctgtgagcacaactttcgtaagccaaaattttaaccttatgaacaatcagttctgtgctgcccttgcagagaaccataaattaaagataagcaatggttcagactttccagggccttgactcagagtaactctgaaatcccaaccaaatatgtatttggttaagcaatttggcacatttttctttttgaggcattaaactataattacaagtcacttttatttcattccaaataaatgtcccaaagtagatagaactagaggtttcctttttttaaaaaaaggaaacaggaaaacaacaaaaaaaccaaaaagaacaaaagcaaaacaaaacttagtcaagctaacaaattgcatgtatgtgtgttttataatttgatcaatataaaaaattgagtgtgctagtgcctcaggaggactcgaggactcaaatactcaataggttatctggaggaatttctcattggagaaaaaaattaagttcttttgaacaacccacataatcaagatagtaataatttaacctcaagtttttccttattaaaaattccctttgctattctgctccagtgtttgtaatagatggttcaacaagactgtgttttgttagttggaaaagtaagctgatatgaggggtggggagaggaagggcagaaattattaacaatcagcaagtaaagaaaaacagcctgcaaattgtaatgaaaggaagaaagacaggaaaggaaaggtagggctggtggagagtgactgttctgcctgcttactgcacaggcaagaacaaactcacgataaatactccaggtcctcaagaaaaaggtttctgtgctgaatatggtagtctacctgaaattgggatgatgaattagaaaacctctctcatcgcttcaagtttgtgatttattcattcagtgccatttattgtataactatataatttctaaagggggatactacaagaaaaagatgtgatttcttctttcagagatccccaaatatagaaagctattctatactgcttagataaacaaagattatcttctttttctacattctatataatgttccttaactcaagctctcttctccccatctctaccttacccctctgggtagcaaggaaaaataaaataatgtcattcaatggtttctttgcctcctctgatttaaacagtctattttgatttcgatttctctttgaggtaaatattccgggaattctaaatttaagtccttattatagcgactcttcctttcaattcttacttctttccaacgtggtgtctgtcctagtgatcctcttgatctgggaggaggaggagtcacctgttctcctgtggtctttcactggtttccacagtgggtgctggtccaatccttgggtgcaacttggtcagctccagtgtgctttgtggggtcatgttctgagctgaagtcagcagcaagggaactcatggtctacttctttgacacacattcttttagtctatatttgtggttcatggaactcctagaggcaaacatggtgcctgaccacaatggatttgattttttgtttactctggtatcaatcataattttcttgtagcatttgaaaggagaatcatatatttctaaaaaccctatacatcaaataatatgttttcagtaaatgttggtttttactgtgccacctattttttatcataattaactattgaacgatgaactatcttacattactttttaaacagaaaaaatcaatacgatgttttttcacttcaaacttgctaagtcatacacataggtttcctattacacatgtgaaatgaacactgctttagtaacagtatcaataaagcagaaaggtaaaacaaatcctctactaattcatgaaattgaacagttatttaagctttggtttgttacaacatgagttacttgattgattttagcattatgcttcatatatgtgttatgttttaattttgtatttattcagtatcaacgtagaacagtacaaagaaattatactacaaaaacagtgcaaagaaattatcagaaaacccaactattttttctcagcttgcttatgccttttatcatataattgcattaaatatttatgaatgtatttccataaagatgcagtataagctgtatacactttcgagtccttttttcttagtattaaacattattttccatgttgtaattttaatatgtatgattttaataatatttcatcaactagagatttccctatgagctggtcatttcatagtttttcaagattatacataatactgaaatagccatttttataaacaggtagagtttattcccctcttgactgatttttttagcacttatattcctcagaagagctactgagtagtagagaatgaaagttgcatagttttgacctgtgtccctgggctgtctccaaaagactgtgtgttcaacaatgctttgcaggctcctgttttcacatggtgacctctgctgcaatagttcaagtttcatgggcaattttttctcctggtgtgactgagtctcctcttctgaggtcttccatttcaattctaagatataaaatatgatttttctgcaactagtagactatagaattttctttctttacctttctttctttcatttcaccttaagcaactcttgttttcaacagcagagcagattaatttttacaaaaaaaacccattttaatttaaaaaaaaatggagtaataagtaaaacttactgaacatttactatgttctgggcattttatatgtattaactattgaatcttaacaactgtatattattctcactgtacacatgagaatatagagataaaaagtcaaataatttgccctctgtcccacagctagagcgtgacagagcagagatcccaaccaaaagtctgatattagagtcccacactaaatcatggtgcttttctggaaatgacagcagaattgatgtctgctaagtagcagttacatggaagacgtgtctttttttcttgggaatttgatttagattagaaattggccagaaaataaatagtcctcctttaataaatctctcctgtgtcatctccctatcatcccccagtgcacatatatgagggcagaatgggaaggaatataaataaaagacaaacatcttcataaaattttcattcaatgaaagtcaccaaataaaatttgatacaagttttctgtcaacaatttgtgggccaaactctaatcatattcttcagtggagctaaaatcaacatgggattggtaaaataataatttcttatacagcatcctttccctgaagccacaaagacgttttcaaataggaaaacccaataaaattataaattatttacttaaacatttttcttttagtttattgcggtaaaatgtttaacatgagatctactctcaagaaattttaagtgtaatttactttttgaaaatttgttcattaatgacatgttctatttcaggttgtatttagaatcttgttgatctagtagagttaagcacattggcagattaatatctaattattttttaatattagatttgaacaactttcttttgtatttgtaagtattaagtactctcgccgggcgcagtggctcacgcctgtaatcccagcactttgggaggctgaggtgggaggacccctaaggtcaggagttcgagatgaacctggccaacacggtgaaaccccatctctactaaaatacaaaaattagccaagtgtggtggcgggcacctgtaatcccagctacttgggaggcgaggcacaagaatcgcttgaacccaggaggcagaggttgcagtgagccaagaccgcaccttgcactccagcctgggcaacaagagcaaacttcgtctcaaaaaaaaaaaaaaaaaaaaagtattcttatgctacaaaggtagaaacaaaacacaaagaaaataagactttaaaaaaacagtagcttaaagagaaaaatcatccactataaaaattacacttgaatttttagcttttaaatgcatttcttatttatgttactttcagctcaatactaggaggtgcctttaaacagaatttgtctgtctcatcttgtagataaatgcactgaggcaaaataaatccaagtcatgaggttaaatgaatccatcttttctgtgcactttcaagaacttaattcagttagaaagataacgaatgtctcatctatacttcatagcctatacctcaacccaactgatgataagatatataaaacatgtcttaggaaaattttaggcccagcacagatactctgttaaatagttactgtttgggctgtctgaatgtgcaatttggcagctgtagccaatttgctgaagaatcatatcttgccacctctccttttctcattcaggtggtaaaatgatagcctactcctatgaatctaccatttagtttgctagtatctaattaacgaagatgtgaactgttctttctctcacttcaggatgagctgactggctcatggctcctgcattcaggtgagttctcaatcgaggttggctgcctgactgagtcagcacacatctagtggaactgactttcactggggcctcttaagaagatgagttgagaagatggtaggggatcagcagaggaaaatgcttctggggttctattgggtgaggagctattgccaagctgtgattaatcaaacacacttttttttttttttggtttcttgttttaaatttttgtttcctttccaatctagttaggctaaatgtttgtagactcagcccaatacccttcacgaagtttctactgcaatattctggcaaaattagactttctttttgctaagttgagccagtaaactatttaaccaactataatttttaccataactctgttgattattttgtttgagcttggctccttgatccacataataatgtaagactttggtcttgaaggctcagtggaggtgacagtggggtaggcattctagctgaagggttttgaaagaaagacaacttccgaaatgatacacactagatatagatattgactagaataaacatctaattaagattatccagttcttttggtctttgttttacttaatatagctgaatacgcatatctaagttttcgacaccaatttctttgttattgtttaatggatttaaagagcaagacttttttctgtctttgcaggttcacatgagacaccttattaaaccgtatttcattgttcaacacatgtcctcatcatttttcatcagtgagagatactgcctccttctacttatggtttctgttctgtagcataagtcctgtagattcttagtatttaactaaaggtaatttaaaataaaatattgtgaataatgttagtaataatagtaattgttgtggttgttagtgttaccttggagttgtgtgaacttagaaataattcaagtggctgtccagtctcagatgtattttattccccttcataaacttctgttcagcaatgcaatggattagttcagtgccttatggagattttggtggaggaaattgcaattgctgtgaaagtctgctcaagggctatctcctctctgaagtctccctgctgtctccaggaggcattagaacttctgtgttccagtaggactctgcttatac

SEQ ID NO: 2903 - DNA, 34680 bp, Homo sapiens
ccagttgcttctacaatttttatcaaatttttgcatctaacaatcaaattcagatctttttctttaaaatcgaatctactttcactcctgctacaatacaaaccccttctctcttcctgagggctgttctctgctgcctgccgtcttccttttctgttgtttcctttgcattaccttcacctttctgtaccctttctcaactctgaatctcagctctctcatactttcctctccaggtctcttaggacatattctcagctagctgtaggatttccttccactcctattctaagatctctcccatgtgttaacgaatgactgtcggaaacagcttcccggcctcactctaggggagttacatttcactgtaggggaggcctctttcagatctcattgaacagaaacagcctaaataaaagatctgcttgattcaaagccaaattagtgattttcctcaatcgacaagtcatcttaaagtctaacatttgaaatttcagatgttttagagtgaaaattgtaatttttaggtgaaatggtatattctccctattctcattacctaacagcacacaagttcattactcaaacctctactcaaagattctcctatgaccatggggaaaatagaaatttaggccgggcactgtggtcatgcttgtaattgtttgggaggccaaggtgggaggatcacttgagcccaggagttcggaacagcctgggcaacgtagttagactccatctctacaaaatattttaaaaattagctggcatattggcacacacttgtagtctgagctactcgggaggtagaggctgcagtgagccagattgcaccactgcactccagcctgggtgacaaagcaagtgatcctgtctcaaaaagaaaagaaaaaaaaaaagtccaggcgcggtggctcaggcctgtaatcccaggactttgggaaccgaggcgggcggatcacctgaggttggtcgaggtcgagaccagcctgaccaatatggaaaaccctgtctctactaaaaatacaaaattagctgggtgtggtggtgcatgcctgtaatccagctacttgggaggctgaggcaggagaattgcttgaacccgggaggcagaggttgcgtgagtcgagatcgtgctattgtactccagcttgggcaacaagagtgaaactctgtctcaaaaaaaaaaaaagacatggcttttccaacttaactttgacctttgtagtaatggactcaaattaaaaatatatcccaggagactgtatggcagttatgaacattccattgatcatcaagtgaagacagcttgtctttcatggacagaacgagagcaaaagagggtaacagcaaggcaagtgggtttcaatttagacagagactaatgaatagtcaagagcacaggttctgtagtgacacacctgggttcaagctatgattccactagtgaccaccattgagttaattagctcaacacctctaggtaacttaccaatccccctctaagtctcagttttctcctcagtaaaagaggagtataatagtacttatctcacagaattgattaaatgagatacagagtgcctggcaccagtaaactctcaataactgttgattttaataattattaacatttctgttttccctttatctaacatttttgaaaatatatcacctgtggctgggcacagtggctcatgcctgtaatcccgcactttgggaggccgaggcaggtagatgatctgaggtcaggagttcaagaccagcctgccaacatggtgaaacctgtttctactaaaaatacaaaaagttaaccgggtgtggtggcacctcctgtagtcccagctactctggaggctgaggcaggagaattgcttgaacccaggagcgggggtttcagtgagccgagattgtgccactgcactccagcctgggcaacaagagcaaactccatctcaaaaaaaaaaaaaaaaagaaaatatatcacctgtgcatttgagaatatggacgtcctagtacattctcatcaagagttaatatttaatattttcctagtgatctcatgctttatttatttatttatttattttttgagacagaatcccactttgtcacccaggctgggggcagtggtggaatctcggctcactgcaacctctgcctcccaggttcaagcgattctctgcctcaccctacagagtagctgggattacaggtgcacaccaccacacctggctaagtactgggattacaggtgcaccccactacacccggctaaattttgtattttagtagagacggtttcaccatgttgatcaagctggtctcgaactcctgacctcaaatgatccacctgccttgccttccaaagtgctcagattacaggcatgagccaccacgcccagttaggcttgtgttatttttagaagtttaaatgaaaagcatataaaaagaaacacatgttgggcacagtagcatcaccagctattggggaggctgaggcaagaggatcccttgagtccaagagtttgagaccaccgaggcaacatagtgaggtcctgtctctaaaaagagaaaaaagaaacacagaaagtcttaacccttgagaaagtaaacactagcacctcattttcaggtaaaaggcaaatctattgctaagctagggtgctgctagggtgaaaacaacactgaaggcattaggcctttctgctgagactagatcctaccaacaatgccctggacgttgagaaccaacaattttatggacgaggccgactgatggccagtgtcaaaatgtgtgtgtgagtgtgtgtgtgtatgttgaacagcttgtaagacagctggcttgggggttcaggtctgtcgcctattagctatgtaaatttgtagtagtactctctgaacctgtttcttgtaaaatggtgacgccactaatctaacttggctacaacaaattatctaatatccaggccatatttaattttcccaagtatcctgttagtgtccaggtagcattttttcttctgacccagatcatactttgcatgtagttgtcatgtccctagattttattatttttgagacgaagtcttgctctgtcacccaggctggagtgcagtggcaccattcggctcactgcaatctccgccttccgggttcaagtgattaatgtgcctcagcctccgggtagctgggactacaggcatgcaccactacacccagctaatttgtgtatttttaggagaacaggggtttcactatgttgcccaggctggtttccaactcctgagctcaagggatctgcgtgccgcttcggtctcccaaagtactggaattacagacatgagccactgcgcccggccaaaaaaatttatttttaagtggcacgatctcagctcactgcaacttctgcctcccaggttaagggattctcctgcctcaacgtcccaagtagctgggattacaggcgtgcgccaccaagccagccaatttttgtatttttagtagagacggggtttcaccatgttggccaggctggtctgaactcctgacctcaggtgatttgcctgcctcatcctcccaaagtgctgggattacagcgtgagccaccacacccggccttattattttattattattattttttgagatggagtctgctctgtcctccagcctggagtgcagtggcgcaatcttggctcactgcaacctctgcctctgggttcaagcaattctcctacctcagcctcccaagtagctgggactacaggtgcgcatacgatgcccagctaactttttgtatttttagcagagacggggtttcaccatgttggtcgtctggtctcgaactcctgacctcgtgatccgcctgcctggacgacagagaaagactcttctcgaaaaataaaaaataaaaaaaaaaaataataataataatacctaaattgatgcactaaagtgttcagaacagttacttcctgcacaataagtgttcacaaattgctacttactaagaagggaaattcttgtgagatgtgagtttcagaatctgtgttttagctagaaaagaaatcacttatttgatcataaatgatttttggcccggcatggtggctcacgcctgtaatcccgcactttgggaggctgaggctggtggatcacgaggtcaagagatccagaccatcctgacaacacggtgaaaccccgtctctactaaaaatacaaaaaattagccagacttggtggcggcgcctgtagtcccagctactcgggaggctggggcaggagaatggcgtgaacctgggaggggagcttgcagtgagccgagatcgggccactgcactccagcctgggcgacagagcgagatccagctcaaaaataaatataaataaataaatgatttttttggtcagtgtttactaaattctacaattatgccagctactgcagtaagaatcaaacagttcctggatggaaaaacaatttaagatatgatcactgacctcaaacagtttactggagtgaaattactaaaatatgtgatcaaggtagagttacgtgccgctaactggagtacacatgaaattcatgttgatgggagcgagagaaggaagtaagcagtctgtgctgaaagagaatggataaaaattgaccagtcaggaaggggagacgcataattcaggccaaaaaaaaaaaaaaaagccacttgagtaaaggaatatacaagattgataagacgagcgtagagggaactaagaacaaatatgtgcccaggcgcgtggctcacgcctgtaatcccagcactttgggaggccaaggcgggaggataacttgaggtaagagctcaaaaccagcctggccaacatggtgaaaccccgtcactacttaaaaaaaaaaatagccgggcgtggtggcatatatccgtaatcccagctactcgggaggctgaggcaggaaatcgcttgagcctcggaggtgggggttgcagtgagccgagatcacatcactgaaaaaaaaaaaaaaaggcagggtgggcacatcacctcaagtcaggagttcaggaccagcctggccacatggcgaaaccctgtctctaccaaaaacaaaaaaaattagctgggtgcagtggcgcagcctgtagtcccagcttcttgggaggctgaggcaggagaatcgcttgggcggggtggggtgggggtgggggtgggggcggaggggcggagtttacagtgagcgaagatcataccactgactccagcctgggtgacagagcgagactctgtctaaataaataaataaataacaaatagtgggtgggaccagattatgggtggcttaaaatccaggtataccagctgtcttcctggaataaagaggagccactttagttttgagaatgtggtctgagccaggtagataaactgggagtcgggctgaagtgtaagacttcagaaagatgttccatacgtgaatgttcatttaaacgtggggtgttaagcaacacacgtgacccagagacatttcacctggaaaccggagtagggccacgcaccaagtccctgatgtttaattgcagtctagaatgttactgactagttcactcaattaacaaagtgtccggaggtcgctcactggattgttatgctggtgactgggccttgtttactgagaaaaaaagatgggaaagggtgacaggacggtgagaaagtgaaagggagagagggggaaaggggtctgccaaggtccaggcgaggttgggggtcgggggtccggcggccctcaggccccccccgcccccaactccggggttggcgcctcgggcgcggcgcgtgtgcttgcggcggggcgccccgcggccgcggacggccaatccgggagggcgtccggggaggggcggggctgccggctcgggctccgcgagtcctcctttttgcacacacacgaatacaaagagccatagaccttcgggtatcctttttccattttttttcctccttaatcttgtgtgtgttttcaaatttttaaaaatagagatctgtagcagtgttggggtgaggaaactgttgctaaggggaattgctctttcccccatttctttttctgtctctcttcctctttctttttcctggtcaaggtttaaatataccaagaagttgagaagcaggatggccgtgtacaaccgtttccggccaaattatagtttttttttcttttttttaaatcacattttaagaactggtagatttttgtggttagggactttaaaaatttagccgcttgggaagtacagaattttttaagcgggctgaagggtaatgtaaatttctgccacaggcaacatcgaaggaagcagagagatttgaggctccctctaaagccgtttgcgtgctttttacacacccacccccccagaaccaaaaccaagtggctggatgtggcacttgtccaaggccaataagttaatattgggatattataatggagacattctttccctagggaagggggaaagaccttaattacagtgtgtctttcacacacattttcatagaacatttgtgtgtgtgtgtgtgtgtttcttgaaacaaatttgtaaagttataacttgggttatttgtgtatatgtacaatatgtgtgtatatgtgccatatcagattttattttcaaagtgataaatatatctggttttatgtgtgcaaagtatcccctaggatgtgaattttttccgttgtcttcccaaatgtgatcaaaatattttgtgtgcaaagcagagcttagaagaaacctatgcttagcatacttaggcactttctatgtgcatttactatatttttctgctcctaaggatcagaataatgaataattaaataattgccaaggagtatatagtccatgtggcaaagagagtaggcaatttattgaatctgtggttcaaagccttcagtgactgttttgcctaagggttttgctttttattgtctcacgttcttaagtgtacagctgtgtatattttggccttttgtgtggtttggttggtgtgttcagaagggaagttctttcttggctttttgacaaaatgtcgtttattggttggaatattcgaaaagctccacagctggcaaagtatcaggaaaaaaaccagtcaagtgtaattctcaaaaactgttcatggtgatggtgatggggagccaagaggagcaaaggcaaataatagaagggataagaaatgccttttggttatcatgttgcatttttaaatggaaagcttctcatttctaagagtcacagaaaaaagtatatgaattagagaaaaacggctcgcagagcagaacctcctgttataggagccctattttcacttcattctgttacagatcactatctcctcattagaagttgtatggaaaatatctgtatccaaatttgtattcgcgattggagtgaaagcataggaggtatatgaggtgctgagggagaaactggaatgtcacaatgcagtgacaaccaggagacaaaaaaaaaaatctactgtagaatttaaatttcattacacaaaacttctgtataataatgcatttctattacacagctagcatcctactctatttcagcagtatttgactcctaaatactgactgcaataaagttacttgtacaaatttataacaaagtggccctgtttgggctttctgggtttcttacttgtgctgagtgtatttttattctctacaattcaagtcagaccagtgcttaataaatactggctcgactgtggattattccacaattcagacctgcatttctttgaaatctagtcacattttagtgatctttgtgatcacaacatgatgggagttttttttttttttttttttttttttgaaacggagtttcgctcttgttgccaggctgcagtggcaatggtgcgatcttggctcactgcaaccttcgcctcctgggttcagcgattctcctgtctcggcctcccgagtagctgggattacaggcatgtgccaccatgccggctgatttttgtatttttagtagagacggggtttcaccatgttggtcaggctggtctcaactcctgactttaggtgatccgcccgcctctgcctctcaaagtgctgggattacaggctgagccaccgcgcccggccagttacgggaatttttaatggagttttaccctttttagctttttccacatcactacaggtcatcacatatactttttaccttactttttagcgtctcaaaaatagggagagctctccctgaacagtgcagagcccgtatccctgatttcctaggctattgatttctacatccaggaacgtagggtcatatccactgttcttgctttttcttcctaagaaggagagaattcctcgcacatatatatcgttggcttggccttccaaagcaaagcaaaataaactctgttgattttgcctgggaatcctcggggcccctagtattggaaacttctttgactgtgaggagctgctaatttgcaggtgacatgtgaaagaaatgtaaccgaggccagcataactaaaagtcggccaccacccaacgtgtgacgccgatttgtggccactgtgcttatatcgtgtacacacaggtttgtgagcagcagagaacaaaagcaagtaaacaaaaacaagctaagatggcgtctgacggccttgaaaaagcctcacagtcttgtccctccctgaggaggccctcccctacctgactttttgagtgactgttgtttgcagccaatagtgtccgtgaccctgtccccagccatcgtctaaccgccaatcaccgggagccagaaggcaaacggggcggtgtcccccgcgtgcgcgcggtagccgggtacacgggcaggcgccgcggatagttctgtctccccgcgcccgcctccgcctctgcctagctgagtcagcccgtgcggtagcgccaggcacacgggtagaacatctgtagggctgcaaagctgcacctccgcgtcagttctcacggcgagcgcgccttcagcccaagttctcaaagctctcggggctacgtagtctaccctccccggtgaccggcgagatccctagccgctcctccggccgctctgctctccgcatccctcgcgggaatgacccctttacccgggactcccagagcgcactgtatggtagggcacagtggcgagtcacccgtcccctgaggcctcttgagcagtcgccgatctctgcttcccgcgtcgctgcgatcgccttcccgtagctgaatcacactgacccatcggaaacggttctgccctccctggggtccacttgtcatccttgactaatatttaatcaactaacatttaccaagttctcgctggcacgagtctaggagctactttttcatttttcagtttctccataaatgcagtgggtcctttaggcaacctgaaatcggaaatattaatcttaccaatgtaatcttagcaaatgtaaataaaaaggctgtgctatactgggctaaaaattctcatcctgctatagaaatatacgtggaattttcaattacgtggaatcctttaaagaccgcattcggccttctgggtctacagctctcttttttcccctaaaaataaggtcttggattttttgcagaccattagtcgagtcactcttttaaaagtgggaaaatagtattttgtggtatttacttagctgctcttgtgtgataaggagctcattctgataaaaataggttttgagagaaccttttgacaggtgagccattttgcaccttgaatggaggagtaggactgaccaacacagcaggagctttaagtggccgttttccttatttattcttaaaatgaagattatgatatgaattgccatgctttcagtaatcacatttaaggaagctattgctagcatgaccctgaatgagtcaagcacccattataaaaacatatatcatctggtgataccatatcatacacatctattaaatagtgagaaaacttttatttttcatagtttgaggtgaactcagtcatgcagaaaattcaaactcagaatggggagaaagcaagcaagggactgccaagagtatgatatatttagtcctaacaaaaatgtgacttgggaggaaagggatgttaaaattatggacagtcttaccctgaactgtctgtctaaaggagatgaattgtctttttttttatctaaatatttatgaaaaataccaaaagtactggaaagtacatttttaaggccgtttcacatttatttaaattagaccaatactgaaatgaaccccaaatgcttatatttttgcaaacctaagtgtgacatctactgtcatgttgtgttggcaacgcatcccaagattgagatctttttctcttttttagacctagtcagttgttttcaggactttctacttaaacatgtgccatcatttgaaatttaaaatgttaaataaatacacttcttctctaatatactggtgctcctctttttatttatttattttttagagactgggtcttgctatgctgccgaggttggctcaaactcctgggctcaagcgatcctcctcctcccaaagtgctgggattacaggcatggccaccatgcccagccatggtatttcctctcaactgcctcatttctgtcattctggtggggtggtggtaccatcctgttactcttaggcttataaccttgcagttgtctttaaccaatatctctataccccatctctataactctgtcaattctccttatcttactatataagcgccttgctctgacctctgacatgtaccctgttaagtcctgtaattttttttttttcctctagatgtcttactaccctatcagttaatcctatacattgctcaaggctcaactggaagctttcttctgtaagaactctttctcagtatgatttcattttgttaatgtttccattattttgactaacgcctcagaaatttttcagtctataccatattattaggacttgtgtgtatttcacttgttatttatttgtttgtttatttatttttgagacggagtttcactcttgttgcccagctggagtgcagtggtgcgatcttggctcattgcaacctccacctcccgggttcaagtgatctcctgcctcagcctcccgagtagctgggattacaggcatgtgccaccacacccagctattttgtatttttagtagagacagggtttctccatgttggtcaggctggtctcgaactctgacctcaggtgatctacccgcctcagcctcccaaagtgctgagattataggtttgagcactgcacctggcctcaatttgttttttagatagtccatgtttagaacatcccatattcttagacattcccatctgaaatacactttaagtgccttataggtagagactttgtcttccttcatttgagtagtgtgcaatgcattttggtgagtcatcctttaacatggacttacatataaaaacttttgggcctgggcacagtggctcacacctgtaatctcagcactttgggaggcaaggtgggcggatcacttgaggtcagcattcattagtcaggtgtggtggtgcatacctgaatcccagctcttcgggaggctgaggcagaagaatcgcttgaacctgggaggcagaagtgcagtgagccgaaatcgtgccactgcactccagcctgggcgacagagtgagactctgtacaaatatatatatatatattttggccgggaacgatggctcacgcctgtaatctcagcacttgggaggctgaggagggcggatcacaaggtcaggagttcaagagcagcctggccaataggtgaaaccctatctctactacaaatacaaaaattacctgggagtggtggcacatgccttagtcccagcgactctggaggctaaggcaggagaattgcttgaacctgggaggtggaggtgcagtgagccaagatcgtgcctccacactctagcctgggcgacagagcgagactctgttcaaaaaaaaaaaaaaaaaaaaaaaaaaaaatatatatatatatatatatatatatataatatatatatatgaatatattagcctaaaaatatctcaccccactcaccagctcacctttttttttctgagccggagtctcgccctgtctcccaggctggtgtgcaatggtgtgatctggctcactgcaacctctgcctcctgggttcaagccatcctcctgtctcagcctcctgagagctgggattacaggcacgcgccagcatgcgcggctacttttttttgttttgttttttgatctttagtagagacagggtttcaccatgttggccaggctggtctcgaactgacctcagtgacccgcccacctcagcctcccaaagtgctgggattataggcgtaagccacgtgcctgcccagctcaccttctttaatgggggtatatgcagctaatgaaattaatgttttgttttggtcatttatccagcacttaagtagttacctggttagtaaatataatgtgaaatactcgttattacctgctgatcccaatatctttccatatcttagagtttaggtgagagactatagcagaggctgggaaatgaagtcagcaatagtgtccatggaaaccaaaaaagaattctttgatgcccattgtgctagaccacactgtacctagtttttataggcagattaattcaggaaaaacctatttgttgccctgaatgtgatgttttaaaatggacatagtatggtaacatacaaatagaaaaacagaagagcaattgaggaacaaattgaactcacaataggaaaatacatttacattaaaaactagcataaaatattatccttagtctgagaccaggtcatgatagcaagtaattacaaatactaaattacctttctaatttgcgtcatagaaggttttgtatctataaatcatcctcatagacttgaggaatgtgttgtttgttagaaattcaatattaaatttgggggaaatttccccaaattctatttcaagccattgcattttattcaaaattagggaatcaggatcaaggtggtggctcgcacctgtgatcccagctactcaggaggctgaggcaggaggatgcttgaggccaggagttgaagaccaacctgggcaacatagcaagaccccgcctcttaaaaaaaaaagattaaggaatcagggtgggtgtccaggttgggaacacaaaatgttacaggaaaaccataatatcatccagccgttactagtggagcactgaccatgtgccagcactctatagtgccttacatatattatgtataatcttcacaaaaaccactcaaagtagatagtgatgagaaacttggtctcagaaaagtgaaataatttactaatgttcacacagctcataaatggtcagccagaggagaacctcatttttttttttttttttttgagatggagtctcgttccatccccagtctggagtgcagtggcgtgatctcggctcactgcaacctctgactcctgggttcagcaattcttctccctcagcctcctgagtagctgggattacagacaagtatcaccatgctggcaatttttttgtatttttagtagagatagggtttcaccatgttggccaggctggtcagaactcctaacgtcaagttatccacccacctcagcctccgaaagtattgggattacagtgtgagctaccacgcccggccacccttttttttttttttttgagacggaatctcgctcttcgcccaggctggagtgcagtggtgcgatctcggctcactgcaagctccgcctcccgggtcacgccattctcctgcctcagcctccagagtagctgggactacagtcgcccgccaccagcccggctaatttgtttgtatttttagtagagacggggtttcactgtgttagccaggatgtctccatctcctgacctcgtgattcgccggcctcggcctcccaaagtgctgggattacggcgtgagccaccgcccagcccttttttttttttttttttttttttttttaacctgcagacagtgctgttttggaaagatgaccaaggaaggacgaccaaggaaagactatttaaagagaaggagctgggcgcagtggctcacacctgtaatcccaacactttgggaagctgaggcggtggatcacctgaggtcaggagttcaagaccagcctggccaacagcgcgaaaccctgtcctactaaaaatataaaaattagccatatgtggtggcacgtgtctgtgatcccagctactgggaggctgaggcaggagaatcacttgaacctgggaggcagagcttgcagtgagccgagtcttgccattgcactctggcctgggcaacagagcgagactccgtctcaaaaaaatgataataaaaataaaagagaggggaagagcttgaggcaggctcaacactggtaggggtaaaagctcttgcaagaaagagtaagtgcgtgaggcaagagagtttggtaccagaaaggagttagcaactcagccagtgtcccagccggatgcatcttaattactgattttacaaatactgaaccagctggcaagcatttgaatactattatttattatcaccaaaacattcttttgcccacacatctatgtttaagagcaaactccctgcatgatgtaggttaaataaagaattaaaaagaaaagctctgcaggagcagtgtaggcccttatttaggaaggaaaagaatacataagtgatcatctataaattgacatagaagtgcttagtgctttcctttaacctttagttttaatttgtttaacctttagtttcaggtttagctgtgcctcccagtgactataatgacaaggaagcttaaatgtatttgagttaagcttttgcgagaagtaagtatctggcacagaaaaagccattcttcgatataaagggtggaaagagcaaattaaagactattctttaataaccacatgtaataaaatgcattgtcagatttatgttttagtacctcagaggcattgatattgcctctttcgaaatgagattgcctattcaaaaagaaaaaagaaaaccctcaatatatagaaaattctctaacctcctactcttttttttttttttttttttttgaggtggagtctcgccctgttgccggctggagtgcagtggcaccatctcggctcactgcaacctttgcctcccgggttcaagtattctcctgcctcaacctcccgagtagctggggttacagatgcccgccactacgcccggtaatttttgtatttttagtagagacagggtttcaccatgttagtcaggctggtctcaaatcctgacctcaggtgatcggcccacctcagccttccacagtgctgggattacaagcgtggccaccatgcccggctcctcctctccttttaattgtgatgttttaatttacagggtaaggagaaatgcatctctcagagaaattgtaaacatacttaaggttttgacatggcacatcaaaggattttttttctatcatcaagtattatttagaaaattacaatatttattaagttccgggagtgttctcagtggtacaaatcaacttctttacccctttttttctctcctggagtatttagttgcttaactacagtaatttaaaagaaaggcagtttggtttattactgacattcggtttctcctttaatgggggctggtcatgcaggcaaagtgacagcatagctgttcaaacttcctgttgaattttggatccacccttaaggagcttgagaaatgaagataaggggcccccgggtgatttctctgggctcctggctggaagattcaggacagctagtttccattacagagctcatggcccaggtacacgactatgtgggaaagggggctgtgcagccctgggttacccagctcaattccctgatcttttcatttcatttccctgccctcatccccaaagcattaatgtataatataacagtgagaagttggtgacatgctgagggctgcagtgatggatgtattcctatttaggagtgttactctgaatgcatttgtatgaaaattacagagagggtagaatcatattgtcatgattgttaatgtcaacaaaaagtggtatcagttaaaaaaaaatacaacactcattgaaagtagcaataactggattctgctgttattcctctgaccttgaaaaagacataaacttctccacatgtctcttctctggacctggagtaatatgtttcctagtgctgttgagagatgaggtaacttatgtgaagtgttctgaacaccttaaggaacaatgtcaaagcaatgaatgcagtaccattattacagtaaagatggtgaggaggaggaggagacagatctacatttcttccttaatcttctaatctttccagatgccggaaggtccttctgaatcccttccctgtccttaggttgcactagtcgggggttccatgctggggggcagaaggaatgctctctacctctgaaaccgttcatcaggaaggccttgatttgtgatgtgctaggagagcacaggatctcaaatagaaggcacctgtctcccttctgcaggccgaggagaggccgccatggactgtgtcttcttcatggcttgtttactcttctttcacagaccctacagcttggggcctgggctccctgaccatcctcattgagaaaggaaagtgagtccagagaagttgatgcttcctacctgtggagcggcccagcagtgtaagcgtggttgttactgccccatccgccatgtccttcagtgcaccattctcttctcccctcccagtggcagcgaggccagatgctgctgctgcgcctgtagagtgagactaatggaggcaacacaggctcccagggtgggaatcctcctcccagcaccccatcacagtgactggacatggcttggctgttcagagctcagagcagctcctgcatgttactaccagcgggtcgataaggcagtgggtttggctgaagctgctctgggtcttgccagggcaacaatgagttgttaaaacgtctccaggaggaagtgggtgacctgaggcaagggaaaggtccatccctgatgaagatggggaaagccgggcacatagttccccacctgaggagcctggcctctcaaggaaagtcccggggaagcctttaaggctctgtctgccgtggaagaggagttgacagcgtgggcagcggcgtgcaggtggtgattgaggagctgcggcagctgggagcagctcagtggggcctgggcctttgggcttcccagcaactcagagggacatgcggctcccaggtgcacgctggctgccagcgaggcggcccccctgctcaatcctgtgagtatggcagcaggggctattcctcctaggtgcttttcctggcttttcactctttttcctttctgttctttttttccatctttaaaccttttgtttgtatttgtgataaagcaaaacagtaccacgtttcctttccttcagggatagtcagctctattttcttcctgaaccatcagcttctttggcagaagtcattttttgctgtgtgtagtgatggggtgcccttccctctctctcagtagctccgcaggcaccttctcttccacagctgtctcggctgctccatggactctgcctctcctggcgagatgcctgccgtgcacagacggctcattcatattttatcgcaggccctctgcttgccaagggaattcagtacaaagagagatgggaatgtacaggggagagaggcagaggtggagagagaggaaaaagtgagaggacaaagataaagataatagaagacaagtatagggagggaaagaacaagtagaaatgaagggctgagggaggagaaaaagtgaaaaaagggagcacagaagaaggtgaatctatgtggaaagagaatctacaccacgggagagagactatgaggtaaggcgaggggaggtagaggaaaggaaataaaatgggaaatgagaaaaagaaatggccaactgattttaacagtaagagaataacatatagggagaaagagggaagaaaagaaggaagcaagcaacatattttgtgagcaggaaaagacatagatgtacattgtgctatttcagtttctttactcttaagggccatatgagcaggaaaatcctggctgagtagagtaagaactgcagaatgtccacatggaagtatgaaaaggagatggagcaactatagagatcttagagataggaaaatacagatgtggtgccacttgagagacggttggagttctgtcagctctccaccttattctcctctgtcctctctttttctcctccccccacaacaagacatagacacccagtaaagagtaaggagcagaacacatggagtagatgggagggatgaaactcccagcccatctgctggatctagaaatgaatacataaacccctctctccccctccagtgtaacacagcaactggtcattgtctcctgaaggcacagccatatgggtaatggccactgctgctcaccccagtctgtggctgtcaggactctccgtggttccagctcaagggaggacctggaaggtgggaggcagaaaggaccaggctaggcattgccctgagctgtgggttctttgaggcaggaaaggcttccaagccacaggatggaattagatttcacagcgcagaaagcagctcacaggtctataaatctcagctcctcccccgcatctttctgtgtgtgtgtgtgtgtgtgtgtgtgtgcgtgtgcgtgtgttccccactttcagtattttgttttcttgactgcagaaatcccccctcctttcttcctcctctctcccttgctcccttcttcctttcccggctctgtatgtccttgagtgagggcacagcagtcaggtagatgtcaggggctatgacagtcgaatgtggccggggcaggatcaaggtggggcatggactgactctgggaatggaggataggtgaggggagctgttgctgccagtctcctagggatttctgactttatgtcttcctcctttgctcatttgtcttttatgtctcctcttattgctgttactgttttattttcttactccttctcttgcttggtttctttcttgtcatacttcttcacccagtcctttcagacaaaacacttatctagctccatttcttatatccaaagctatccataaatgactattcaccaacagtgtcagaaacatgctttctccttgtgagcgccctatggtaacaacccaacatgagaggccctgtacacacaagaaatatttgcccaacctcataggagtcccagagaaacaagccattgaccattaaagactgtgctagagttcccctctttccactttctgttcactattcttagccaaagaatgatggttaaccaggttcccctagcctggctggctaataggctattattttttatgttcttagctggtggatgattacgtgcctctgagggtgcagtacagcgagttctggtccctgcttatgccaagcaactctcaccaccacacaactggcaatccagcgggcaaccccagagacaggaccagaaaatggaaccaagtgccaccaccccgccctgaggacatgctcaatgccgctgctgcgctggacagtgccttgaagagtcaggccctgggagcactggggagctgagacactctctagggctgaccgtttcccatgcaggaccagaggaagtgggcagaagaactccaggcgcaagcgggatcttgtactcctgtgagtgagctcagtttctataaatttttcttcagtctggagagataagtgaagagtatgggtgggttgattttaggcctcccatattgaatgaatgctgtactgaatcctaccaggtgggagggataaggagagaggttattctgtaacactagggataggaagtcccctgctaacatcaagcttttaggcttttccagataatgtgatatcttcctttatatcacatctcctgtgttcttttttttttttttttttttttttgagtcagagtctcactctgtcacccaggcgcagtgcaatggcatgatctcagctcactgcaacctccacctcccaggttcaagcgatttcctgcctcagcctcctgagtagctgggattacaggcacgtgccaccacccccagctaattttgaattttcagtagagaccaggttttgccatgttggtcaggctggtctcgaactccgagctcaggttatccacccgcctcggcctcccaaagtactgggattacaggcgtgagccccatgcccagccttcctagtgttctaataatcctgatgagaagatctttaagggattgacagattggtcaccaaagggtaactctggaaattgcctgcaaattaagctagtgtgcagataagtgacaaggggcaccttgggtggaaaagcaagtgaagctgtcctgaggtggtctcagcttcagagatgcagagagtcactagaccttcagctcagttatagaggtttggagattcagtcattccaagagctcttagccaggaagggactggcctgaaccaggtctgcctgaacattcttggcgtggctgggagcccaaagaacatcctgctgagctgggagtccccatcctggagctgaccaaacctagagaagttctagggcagtagttctcaacctggggtgattttacctcaggagacatttggaaacatctggagacgtttgtgattattacaactggtgggtggccggggcaggggaaggagaatgctactgacatctagtgggtgttctgctaaacatcctgcatgcacacgacagcccccataacaaagaattatccagctcaaaatgccaatagtgaagagttgagaaaccttctttaaagtgaccacagtctttgggatcaactctgtacccaaaaactcttttttttttttttctttcttgagacagggtctcactcccattgcccaggctggagtgagtggtgtgatcatggctcactgcagcttcgacttcccaggctcaagtgatctcccacccagcctcccgagtagctgggattacaggcatgcaccaccatgcctggcttattttttgttttttgtattttagttgcccaggctggtctcacaaaagcttttttctgacaactgtgggatattgtttttagtctcgctctgtcacccaggctggagtgcagtggcgtgatttcagctactgcaagcctcccaggttcaagcgattctcctgcctcaccctcccgagtagttgggatacagacttgcaccaccacgcctggctaattttgtattttagtagagatggggtttcacctgttggccacgctggtcttgaactcctgagatcaggcaattcacccacctcggcctcccaagtgttgggattacaggcgtgagccaccatgcctggctggagatattctttagccataaatgttcatattgactataatgagtttatagttacaatttgcataaaagcaggattttcatcacttccattccacttgtgcctgctgcctccagagagaggtacagcattgaggcctgcttcttccttcccttaggagagtgtggtggaactgaagacctgcaggaaggacagtatctcactcaccatcatgctctctctattctgtgcttgagaaggatctggaggactagtcaggagttctgctgcccatcatggaggaaggtttaaaatgttcttgtggcagactgtgggttagagggggagggacagttattccaatctttagctctgggacagaatcaaagaggcatcttccaatctgctgaggctcttgaggattgctgctagggatcctgtgaaccaaaaggatcaaccagaattcttaattccttggaatgctgcagatcccagccactccttggggaaatattttagcttattcaggaggtaggtgagccaacagcctttacagtcctcacacttattgtctgagtattttccctttccatgtcaagcctgttttgatttttatcagctgatctcttccaaccacttgagttggaagctttgtaactcccttttttctttcccctttttttgttttttgttttttgaaactctcccaaatactttctgaaacattcgcccactcctttgtgattccttagtgtggactactaagaggtaaaataactatgttgaatatgcagctagtataataatggtctttttacagagtggagaccctagccataaagagttgacaatactttcctaagttggtaggtgaatcagccatagaggtagaaggataaattggggatttctgaatatggagctgaaagtccttggatcaggatattaatctgtcagtttgggactgggtaacttccactgactgaggagcttgggatgaaaatacaatcagaaacaactaaacttaattgaaggacatgttaaaacctgcattagggccgggtgcggtggctcacgcctgtaatcccagcactctgggaggccaggcgggcagatcacctgaggtcaggagtttgagactagcctggccaacatggtgaaacccgtctctactaaagatacaaaaattagctgggcgtggtggcgtgcgcctgtaatcccagcacttgagaggctgaggtaggagaatcacttgaacctgggaggcggaggttgcagtgagtgagaccacaccactgcactctagcctggacaacagagcaagactctgtctcttaataataaataaagctgggcgtggtggctcatgcctgtaatcccagcactttgggaagccgagggggtggatcacgaggtcaggagttcaagaccagcctggccaacatggtgaaaccccatcctaccaaaaatacaaaaattagctgggaatggtggtgcattcctgtaatcccagctaacagggaggctgagccaggagaattgcttgaaccaggaccctggaggcagaggttgcagtggccgagatcacgccactgcaccccagcctgggctacagagtaagactccatctcaaaaaataaaaaataaaaataaataaataaataaataaataaatattttaggtgctattatgggaaaactgggaacagattttgaagcatctaaggcaaaactttttctttctttttttttttttttgaaacagagtctcactttattgcccaggctggagtgcagtggcacgatctcagctactgcaacctccgcctcctgggttcaagcaattcctctgtctcagcctcctgagtagctggactacagtcgcacgccaccacgcctggctaatttttgtatttttagtagagatgaggttcaccatgttggtcaggctggtctcgagctcctgacctcaggtgatccacccgccttgcctcccaaagtactgggattacaggcatgagccaccacgcccagccggcaaaactttttatgagtagaaatgttcaacaatagaataagctgactcagaatggagaactcatcattagtgggtataaacaaagtggaaagacagcctgtttaatgatgtgaaagggagattgggtaaataatatagcctccacggtcttttccgattcacgtttctgttattttagatttctgttttcagaccatggtgtatatactccagagatttgtggtaacacatgaagaaatacataaagcacagacaaacccggggcttttgcctgggtcatcagttttactagcagattccagaagaggccaggcacggtggctcatgcctgtaatcccagcactttgggaggctgaggcaggtggtcacgaggtcaagagatcaagaccatcctggccaacatggtgaaaccccatctctactaaaatacaaaaattagctggatgtggtggtggtgcacctgtagtcccagctactcgggagctgaggcaggagaattgcttgaacccgggaggtggaggttgcagtgagccgagatcccgcattgcactccagcctggcaacagagtgagactctgtctcaaaaagaaaaaagaaaaatgcagaagacatttttatattaaacaggcccggtgcggtggctcacacctgtaatcccagacactttgggaggctgaggtgggtagatcacaaggttaggagttcgagaccagcctgacaacatggtgaaaccccatctctactaaaaatacaaaaattagctggatgtggtggtggtcacctgtagtcccagctactcaggaggctgaggcaggagaatcgcttgaacccgggaggggaggatgcagtgagctgagatggcaccacctgccttggcctcccaaagtactgggattcaggcatgagccaccgcgcccggctggcaaaactttttaatgagtgcactccagcctggtgacagagtgaaactctgtctcagaaagaaaaaaaaaaagaaaagaaatacaaatacatttgaagaaaaaatttaaatgtgcaagagtaggggccgggcgcagtggcttacacctgtatcccagcactttgggaggccgaggcgggcagatcatgaggtcaggagattgtgaccatctggctaacacggtgaaaccccgtctctactaaaaatacaaaaaattagccggacgtggtgcaggcacctgtagtcccagctactcaggaagctgagggaggagaatggcgtgaacccggaggcagagcttgcagtgagccaagatcgtgccactgcactccagcctgggcgacataagagactccgtctcaaaaaaaaaaaaaagaaaaggaaagaaaaaaaagtgcaagagaagggacttcaggaaatgttcacttggctgggcgtggtggctcatgcctgtaatcccaccacttggaaggtcaaggcgggcagatcacctgagatcaggagtttaagaccagcctggccaactggtgaaaccccgtctctacaaaaatacaaaaattagccaggcatgatggcaggtgccctactctgagctactcgagaggctgaggcgggagaatcgcttgaacccgggaggcagaggtgcagtgagccgagatcgcgccactgcactctagcctgggcgacagagcaagactccattcaaaaaaaaaaaaagaaagaaaagtaaaaaagaaatgttcactcgcagtactcctggttatacttgctttctcgttgctatcaggggtatgttcatggaaatgtttgagaccctctgtccagtgatcacactactcaggagcagaagtaaggccagggatgatcctggaatcctgaacacatgaaatgaaaagtcagggaagaccacactagaaatagtaacttggataggctctggcttagaaaggattcaggcagagagccccttagggacaatacctttttaccctagggacagaggagagttttcataacatccactcttggcttgattgtgttttctttttttcctccagaaactggtccacaatgtgcataaccacatcaccaatgacaagagattcaatgggtctaaaggtatggtctccttgaggaaaaagaattagaaggtactttgctaaggacagggaagagagggggatgctccaatacagcaatgagactaaggctttgatctcaccataccttcttggctgtggagggatttgccacaaagttgattagtgctgggtatctctgtttgtctggctttacaaagccgacaactttattcattctcttctctttgtggcagcatcaagtcctcttgaatatttcagtagtgaagtttcttctggaaaagctcaagcaagagctggtgaccagtcccacaattacactgataaggagctaaaaggtgagaaaaactggtttaactcctatgccatctttctccccctctcctcccactcctctttcttggtcagaggagaagaggaataatagaatgattaggtggttttgaaaatagtggatttgaaacattttttggctattctcaccttcatatattcatagaattatctcaaattgcctgtttatttccctctcagtctgaaacgaaatgagagaaggaaagggctagaacagcatcatgcattctgtttatgcaggtcttgcacctaggtgttacgaggaggaggaatctaaggtgttatgaggaggtgttatgttcagaagccagcctgccccttggtccctaaatattatttcccaggctttctctttccttgctctcttttttatttgtagctaaccctgaagtattatgaaagcttctgctgaaaaagtacttgtagagcaggtaacgtggctcatccctgtaatcctagcactttgggaagccagggcaggaggatttttcagtccaggagttcgagactagcatgggcaacatggcgaaacccaatctttaccaaaacaaacaaaaataacaaaaattaactgggtggggtggcatgcatgacgtagtcccagcacttgggaggctgaggtgggaggattgcttgagcctgcgaggtggaggttgcattgagcaagatcgtgtcactgaactccactgtgggcaaaccttgtttcaacgaaaaataaaaaaaacttgtaatcttccatcagagtggcaataggggtagattgttgttgtttttaaattttttttaaatagagactgagtctcactatgttgcccaggctggtctcaaactcctgggctcagcaatcctcctgcctcagcaggaggcctcccagaatgttgggattacaggtgtgagccacacgcccaagaaggggtaggttttatttggtggagggagcggggagacacagaagcgatggagttgtctttttccagtgggagatatttgggaggagttagtgttggagatggaggtggcaaagaaagctaaaccaattagccggccatggtgatgtgcacctgtagtcccagctgccaggaggctgaggctggacgatcacttaagcccaggagttggaggctgcagtgagcatgatgaccatgccactgccctcaagcctgggtgacagagcgagaccctgtctcataacaaatcataataaaataaataaataaaaagaatcctaaccaaagaggagtgaagatgctaatgctatgccaagaaagcccagcatctaggccaggcacggctgctcacgcctgtaatcccagtctttgggaggccaaggcaggtggatcacctgaggtcagtagtttgagaccagcctgacaacatggagaaaccccatctctactaaaaagagctggatgtggtggcacatgcctgtaacccagctactcgggaggctgaggcaggagaatcgcttgaacccaggaggcggaggttgtgtaagccgagattgtgccattgcactccagcctgggcaacaagagtgaaactacatctcaaaaaaaaaaaaaaagccctcatctaagtagtgatcgccaacctcccattcaatagtgtagggcagaaaaacgggctggggaccactactcagaggaccctccttcttgctcccttcctccctccccgccaggagcctgtgtggcctacttccttactaagaggcgtgagtaccgcactccctgaacccctttaaaggcctgaaggaaaaagaggagaagaaacttcgaagtcgccatatcgggtaggtttctaggcctttctttcaagatactaaactctaaaccctttcctaatgggaagggccagaggacatggcatatgagaatagggttgagagccaggaatgtaggaaatagagaagaacagtgagccaatgctaagatctgacttggggactgggttcacttaggccagattttacacagccttccccaccaaaccttttccccaaatctaatccatagaatgttaccttcctaatctatctcctgggttcctgccttagctttttgccaaccgatccagtatctgaggcattttggacctgaggaccaacgtctgtggaatgatgtgacagaggaactgatgcagatgaagaggacagtcttaacgagccaggtgtgtgggtggcccgccctccccgtttcgggcccagcgcctcacagagctctgctaccacctggatgctaactctaagcatggcaccaagccaaccgtgtgtatgggcctccctcagacagactgccttctgctgaagcccagctcttccaccagaactttacaatcctaatttccaagaagaggaagatgagggaggggatgagatgcacctggctccccatcttttgaccaaccccacaaaacctgctgtcctgacttgaaccattcattgaaatcaaggtggaaaaggatgaataaaatctacagccaagaataactctgcttccgccatgccccatgtctcagaaataggtggccatggggcttcacaaaataatgagtgctctgtgcagtctgagaaagcaaatttgcctcttttcttaacacagtctctactgggaagcagaacactggtgggataaaaacttatctagaaggggagaaactccctccactgtgacagtaagccagaatatgcttattcctcagcataaacagtatctcggagaagcctgggagagaaaatgaggaggatgggtccaagaaacatgaggccttcttgacatatgccctgtcttgagttgtttctgcccctgcccagttccacccaaagctctgaggaagcagcccaggttgaccttttgcttccctgtgactacttgtcttgctctgcagtggaaaccgaacatgaccaggcaggttaataccgccacctggtgggcagtttcagtcatgagcttgagtcttctgaccagggaacacaagttctatcactattggggaattgggttcctgatataatagctattgtttttgaattacatgaggaaaattttactattcctatcttacagatgaggaaattaaggcttaagagttcccgtgtctcaccggcagcctctctctcactatgtgaccaagcaaaatacacgctttgtagctgtttcttggtcctgtcagccaagctgtattttgaggaaggggtgtgcatttggatggattgaaaagcaaaaatggctttacatttattcagtcttataacaaacattatcgctttactaggtgtcaggtactgtgctatggatacattgttgataaggttggatgcgttcagagatttttttagtttagtcaggaagccaggcagtggagtaggcaatgaaatgactgtgataagggtgaccatggtggagtgtagtgcactatggcaatatacagcaggggtactaacctactcttgcagtctggaaaggcttcttctgagagggtgtaatgtctaaactgggaagagttaaccagaaggaaaggggaggctaagagagtgttccaaacagggaactgcagtacaaaagtccaggggcaagagagagtacagacaaggtccagttctactgcagacttttgggaagggataatgctagaggagaggctggagagtgagacagacctcataatacagagtcagacttcaacccaagggcagtgagaaatcattgaaagtttgttttagcagggaaataaacgacaggttttgcctacaggcagtccccaactcaacgatggttcgacttaggatttttaactttacgatggtgcgaaatgattcagtatgctcctcaccttatgatgcagttatatcgataaacccattttaagctgaaaatatggtgaagttgaagaagcacttctgccttacgaattttcaatttataatggatgggtttattcagacataactccattgtaagtcgtaaagctctgtactgaaaaaaatcacttgacctcagggtataagatggattgcagggagcaagcctggccaggagacttttgcattggtttcggagaggaaagacggtgacttgacatatatagggtgatgaggggaggacagatttggaagatgtttaggaagcagaattaatagaacttgggattgataggacttggttggatttgaggttaagggagaaggaggacatagggttgacgccagatttctagtttaagcagctaacaggattgtgccatttactcagagaatgttagagggccagtttcatgaggcagagaagatgagatcagtttaggatattgggtgcttctgagacgccattggagatgctagtagttagttgagtttttaattccaagaaagactgggctggaatatggattagggagtcacctgcatatacagattataattaaagtcttgggaacgaagaggcctttggagatcccagctccagtttagactgtggagaggccacctgaggtcatgagcatattggagcatgccctattagcatatgcgtcttctacttcttccccttcactcatctctcttccagttatcccttgaaaacacaggctgttcatcccagttgtgcccattgctaccacaactcttgcatgggcctcctttaatggcctcccaacatttcataagatttcctctcgcacctcaccccaaaggatcaaagcttccaaatattagtagttgtgtggatattttggatgtattggaaggaagaatcaaagttctccttcctcatctggacacaggaaaggagggaacacttatggttaattctgaagatgttgctcacagcaggttctagatgcaatccgatagctccctctgttcctagtgctttcagtcctccctgcttccactctggtaggaaactctcctcagatcagagaaaagccgtggccttgaccagggaaacagaggctgattctcaggggagatgagtcagggagacaatgcaactaggacgaagaagccaaatagtttggcacaaattaatttccaaaagatattaacctcgtttctttccacattccctaaggctacactaagattataaaagtgttcaaaatgttgagatgaaaataatatgcatgacttgtttgcatataattttcatatcatttactatctaaatacaaaggagtcattttccttctccattctacttcctccacccttgcccctgatgttttagtctgggcaaaagtagttggctggtttttaaaaaatttttttagacggaatctccctctatcgcccaggcctgagtgcaatggcacaatctcggctctctgaacctccgcctcctgggttcacgcgattcttctgcctcagcctcccaagtagctgggacacaggtgcacgccaccacaccggctaatttttgtattcttagtagagacggggtttcacatactggccaggctggttgcaaactcctgacctcgtgatcccgccgcctctgccttccaagtgctgggattacaggcgtgagccaccgctcccggccgttggctggtatttaattaggatgtttagcttcatctagggtttctttaaaaaaaattattatttatttttgagaattttttgagacggagtcttgctctgtcgcccaggctggagtgcagtggccgtgatattggctcctgcaacctctgtctcccgggttcaagcgattctcccgcctcagcctctcgagtggctggactataggcgtgcgccaccacgcctggctaatttttgtatttttagtagagatagggctcaccatgttggccaggctggtctgaactcttgacttcaagtgatccgcccgcctcagctcccaaagtggtgggattacaggcgtgagccaccgcgcccggctgcttcagccagggttcttttccttattcttgatccttttaaaatagtcaatatcagcctcttttccatcctgatattttcatttgcaatttcctctacacggcatttcttttcttcctcttaatacttactcttatcaccagtcttctgtggaccaaaaccaaagggagaaggtgttcgctagccctaaaacaggccttcgatctccacagtcacctgaaatgagaaaaatctcatttcccaacaccaggggtgtctatccctctaactgtcctacccttaaggtagagattagtcccaaaccttttcctactccttttcactgcttctacatacacactatatctctttccctccctctcaaagtagaattagtcccattttcctgactccttttcactgcttttacaaatcacaaaacttttgggtcagaaggtggtgcctttttattgcagtttatctgtttgtctctcattctctctggacaacttgtcctttcctttgtctgcgcacccttcggtctctgcatcgtccacactcctctttgtcctcagctctccctttctttcgctacctcttccctcttccacctctctctgtgggcttgtcgcctttcagggctatctttacgtacacgtctctgaacctctttatgcatttgtctttttctctctgtcttcctctttatggctctctccttgtctcaccatttctgtaccagtcttctccatctctcccacagtccccacgctgggaacaaagtcacggtgctagcgcagaacagcctcctgtcgtccggtcccgggacgcgacacattccaccatgcccctccgcgcattccactgcagacaaagagtccccgtcccctacccccacactctttcctattccaattcttcatgttgtaggggcagctgccccaactgcccctgcccgcctctcacgtccagtccgcgggttccacatccagggcagttagcgccttccgctgcacgcacaccagctatccctgcgcggaacccccggcgctctcgcacacaccgcgctccgcccccctaggaaagtagatccggccagcagacaaaagtttgggagagaagttcggtctgtggctagcgtgagagctaggggggcggggccggggagagtggggcagtcgggcgagtcgacgcgtgaacagatagacctgcggactgacagccgcggccagagaccctgctagccccgctcagccccagatgcgcggggggacgcgcccctcccgctgggggatgctgtgggattcctggcgcagggcatccaggccgcccgctagcccctgtgcctcccctgtgcccctggggaaccagagtccggctgcagggaaagagaacggccgccgagacgccgcagggtgccaggcggggagggggcgagaggccccaggcccgaggcatggagcggttaggagagaaagccagtcgcctgctggagaagttcggccgcagaaaggtgaatctagccggtctgggtctgacgggacccccgggccgggcaaggggcgcctaaggggttggggggacctaggaagtcagggccccgaggagctactgggggacctggggatgaccgttggagccggcccgggagcaaggttccctggacgctgagcgaaatcagcgcggctctttgaggcgccgcgctacgaaggctcttttcccgcggggccgccgcccacccgggccttcctctacctcagtcgttgccccccgattttcggctggagcccacggccccggccctcagccccgctctagcttcgccagtagctcggccagcgacgcgagcaagccgtccagcccccgggcagcctgctgctggacggggcgggggctggcggagctggaggtagccggccctgcagaatcgcaccagcggcatcagcatgggctacgaccagcgccacgggagccccttgccagcgggccgtgcctgtttggcccacccctggccggagcaccggcaggctattctcccggagggtcccgtccgcctacccggagctccacgccgccctggaccgattgtacgctcagcggccgcggggttcggctgccaggaaagccgccactcgtatcccccggccctgggcagccctgggctctagccggggccggagtgggagcggcggggcccttggagagacggggggcgcaaccggacgacactctgtgaccggctacggggactgcgccgtgggcgcccggtaccaggacgactaacagctttgcttcgcctgacggtgggcaccggtgggcgagaagccggagcccgcgggaaccctcggggattgagccgtcgggtctggaggagccaccaggtcctttcgttccggagccgcccgggcccggatgcgggagccagaggccagggaggactacttcggtgagtgagaaagtggttagggacgggaagggacccgtcacggtattcggttctccactgccccgacggccaaagtgccggtgccccggggtccgaggtgaagacgcgggactaggaaagaagcaagaggatggatgggggcggccccagagcactgtccccttcctgctagttttcagatgaaccaggctccttatttctgctaaattcaacccccctggtatctcgtgagtccgtttctcaagctttgaacctcggttttttgcggcaggaggcctcgtagggaagggaccaagtggggcagtaaggcgcatcccccccaacttgctcccccctttcacggcggtgcccc

SEQ ID NO: 2904 - DNA, 51086 bp, Homo sapiens
taaattattaagcaagctttgtattgcaaattgttctgaggacaatttctttctcaagttgcaatgtgtgtactctgcacactttttctcatgtccttgagcataattttcatttaattttgtctttctgatgaaccaatatttgtagaatttctataaccgaaagcaacattcctgaggagggccgaactaatagctgcagggagtacaaaatcacggtaatttatcgctttcctttgtacaatcatgcatgggagtgtttccattagaaatgtatcgtgctttcaggcccgtgactttacaaagcctacattatgcagccttagtacaaataaagaaaagctgcattagcaatcaaaaataggcacttatctttttcttttctgcatggaggaaaaaaaaaatcaggtccagtaaagcaaaagtgttcaaccagcttcagtcttcctgcccttgcacagttgtttggacatggttggctgttgagatctatcctcagagagttctctaaagtagcgtgttgttttttattatttatttatttatttatttatttattttttgagacggagtcgtgctctgttgcccagctacagttcaatggcgctatctaggctctgcaacctccgcctcccgggttcaagctatttcatgtctcagcctcgagactagctgggattataggcgcccaccactgcacccggctaattttgtatttttagtagaggcgtgtttttgtcatgttggtcaggttggtcttgaactccgacctcaggtgatccgcccgcctcagcctcccaaagtgctgggattacaggtgtgagccccataaagtagcgtcttcaacccaggcctggatgtgcccttgctgtgacattcccattattacttgtttttgtctgttttctccctgaggaggtgagttcttccagcactctgcagactgccaattagcagagcttggcatgataggcacccggtaggcatcactgaatgagtcaataatgggcacaccaccatgtccttcccctttccaagtcgtgttccttctgagatggatgattgtgtgctttggagggtttcctccacatggtggtcttcttacaggatttctagtcagcctgtagctcagagttaggacaccggggattgaggcccaaggagtccttcaaaacccaaggcccacataaaaatattttcaagtttactgtcaggaagaggaggcctgtgaaaaccagaaaactcaagatcaagctgattccaagcacagtgcagggcttctgtgcaatagtggaatatggaatcaacacaaataaagcttttcttttctctcttttttttgagatggagtttcgctttgttgcccagcctggagtgcagcggtgtgatcttggctcactgcaacctccatctcctggttcaagtgattctcctgcctcagcctcccaagtagctgggattatagacatgtgccacacactcggctaattttgttatttttagtagatatgggggttccaccatgttggccaggtggtcttgaactcctgacctaaggtgattcacccaccttggcctcccaaagtgctgggatacaggcatgagccaccacgttctgtttttcttgttgttgttttgttttgtttgtttgttggagatcgagtcttgctctgttgcccaggctggagtgcagtagcgcgattttggctcatgcaacttccgcctcccaggttccagtgattctgctgcctcagcctcctgagtagctggactacaggcacttgccactgtgcctggctaatttggtatttgggatagagatggtgtttactatgttgcccaggctgatgttgaactcctaacctcaagtgatccacccacctcagcctccaaagtgctgagattacagtcatgagccactgcgcccagccgaaagagctttattttagcatgggtcagtagagcttattagcagtttggggaaacaagaatatttccaattttaagagacgagacaatcatacaaatgatgtgagcactattacatagaaagcagagaagtgttttgagttggtttgtgtttaaaaatctcaacccactgcttaaacgttgttttaattattactgctaacaccacacgtgctgctgttcctagtgcaccagcagagaatgggctgtgctcctctgcctgcctgcctacctgctgaagctgcctcaggcagagctcatgtgataaagacagggatgttgctctgtacccaggccactttaaatgaagaacaaatcattatcaagtacgaagacagatgacttgaaatctgaattatctagtgcagactattcacaaataaggatgtctgtgtctctcaggtgtgagcattggatatattttgcaaacaagcaaaggccaaccaacaaatatttcatcactttccccgcattccagttccttgcacgcttcctcagggcctgtttggtctccagaccccaaggccggttgggccaaaggaaagtggtctgtatgctgtgctaagccatatgaggaacccctggtcccaggtctgttaacacttggatttgacagatttgaacattttgttgctagttgtttaatttgggatcatgacaagagttgaagtagaagaaaacaaaagcaatgcgagatctacctctgtagactggtttaacccagggcaagattacatcttatatacatttataggaacaagagcagatttttttttaaatcaggaaatatttgagccaatattgggattattttctgtttaattaaaattccccaccaatagcataacttgaaattggagggctaaaatgcaaatttgaaaacctttaccaaggctctgcaaactacaccctcaggtcaaatcagcaacctgcctgtttttgtaaataatactttcttagaagacagccacaccggctgtacttactatagtctacagctgctctcacactgtaacagcagagttaagtaattgcagcagacctataaggcccacgaagtcccaaatatttactatctgactcttaacaggaaaactttgaagccatgctttcaatactgacaaataaacaaatctctaccctttcgcaatgcagggcaggctcgctgaacagcatgcatgcctcgagagccttgggtttttttttttttttttttgaacagagtctcgctctgtcaccaggctggagtgcggtggctcaatctcggctcactgcaactctgcctcccggattcaagcgattctcctgcctcaacctcccaagtagctggaactacggcacgcactaccatgcccagctaatttttgtatttttagtagaggcagggttttgccagttggccagaatggtctcgatctcctgacctcgtgatctgccctccgcggcctcccaaatgctgggattacaggcgtgagccaccgcacccgggagagccttggttctttgttttcctgcctcacaatgccttgaagagcattttaaacaaaacagacccatgggatcagagtctctggcaatgggtccacattggcttttgttaaagctccagcatgggcaaccagggtggagaacaccgctgtaggaaaaacacaaataaatggcagctgctatattttctccatccctcctgctttgcactttgcccttttccccttcagcacggcatacagagccactgagttaccaaaaccattgcagaccgaatggtgaactcacaaagtcaggtgatgtatcttagtggctgtcaacactgcacattagaattacctggggagttaaggcaagctaccaatgtcctcttcatcctcccccttcttcattcaggcctaacgccattaggggaccacagtgacaaggaggtgggggaagttgtggtgggccacgggagtgtgaggaagacagctgcagactcagggaaagctggattgggagttagagcctgagcagggtaggcaggacgtccatacaggagaaggcgtggcaggtagatgggagattacttacctgcaggcggttaatcaaatgagtaaataacctaagggtatggaagccaggtttctcacaattagagaagagggaagaacctaggatcaactctgtgagctggattggaaatggatgttatcagagtaaactcatgtgtacttaggtgtatatgtatcacatgcgcgcgcgcgcgcgcacacacacacacactccctaactctgttcactgagagacctgggagcagagatgttccacaagcaatgagcatacttatcaccaaaaccttggcttcaaataccattttccactaagaggaacccagattctctggagaaacatcggattccagggtgagatgggaaaatacaagatgaacctgtgacaccaggtgcggtgggtcacacctgtaacccaacactttgggaggccgaagcaggcagatcacttgaggcctagagttcacaaccagctggccaatatggtgaaacactgtctttactaaaaatacaaaaattagccaggtgtggtgtgggcactgttaatcccaactacttgggaggctgaggcaaggcaatcgcttgaacctggaggcagaggttgcagtgagccgagatcgcgccattgcactccagcctgggccacagaagagattctgtctcaaaaaaaaaaaaaaaaaacaaaaaatgagcctgaaactcttggttgttcagccctcaaaggatgatgaggacatatcaaaaggatgcagaagccagctcgacgggttcccactggccaaatcagggacaagctgagcatcagaattaatcacaataataaagggtgtaaggatacaatgggaattcacaagtttacatcaatcaaaattttaaaatgcataaaggaaagtttacaatttacatagtttcaaagtacccacttacaaaatgcttattaattataagggagggaaaatagtaacttggctgtggagaagcctagcagacacccctttaatcaatgatcaaagtgaacgttgttggtatgggagaagttgaaatcacatgccttctgataggagcactgggcagaacacaaattgagagacagccttcaaactcaagtatcaaggtcacaaagtgaaggaaagttgacaaactgttcctaaactgaaagagacaaaagagacttgagaactgatccaaggcttgattctggtctagatccccttgctatggaggacatgataggaactccagtcaatctcaagaatggggtctgcaggttggatggtggcaacatgaccgtgcaagcatctgagtgttgcaagtgctttggaaaacggcagcatgcttgaatgtgcacagatcaccaggggtcttcttaagacgcagactctgactcattgagcctgggtggggcctgaggctcatggacctatccaatcagctccagctgtgcccattctgctggcccagggatcgtacttggagagcaagactctagtgaacctatgaagagtatttgctatttacctcccaaacacgcacctccccttcttttgattctaaactctaattttcctttgggaacatcctctcctgccctctggcacctgttttgggtcagatagtccccaacactcaggcaagaagtgtgcaacctgggccctgcctccccatcctctggccactgtgaaaggttcaaggctggttctgaaacccaggcaggccagtgtattcatctgctctcacactgctatgaagaaatacccaagactgggtaattataaagaaaagaggtttaactgactcacagttcagcacggctggggcagcctcaggaaattgcagtcgtggtggaaggctcctcttcacagggtagcgggagagagaatgagagccgacgaagagggaagccccttataaaaccgtcggatctcatcagaactcactcactctcagggaacagcatcagagaaaccacccctatgattcaattatctccatctggtcccgcccttgcacttggggattattacaattcaaggtgagatttgggtgaggacgcagagccaaaccattcagttagtgaaatgcaactctaagaagcctggctgagttaacagcctctacagacccctttgtcttctggagccttcctaaactcctaaggcttacagcggctcaggccttgccttcgccctctaactccaaaggcctcaaaggcttttctgatccccatatgactccaccacaaatatccatgtgcccttaggaaaatgaatttttgcttcagttttcacacctataaaatgggtaccacttacctcaagggattgtccacctaaagtgttttcacaggacctgctacagagtgatgctcaatacatttttaattgttcacgttggcttttggagcccatgaccccacacaaaagaagggatggcatcttgctggtacatcttaggtcactttctgtattgatggtggctcccacggagtgtggggcccctggaagatgaagccaaatctgctagctactgttattgttcctccaggttccaacaattcctgcacagtctagctacccaattcattcctagtttgctccatcctatatcgagttgcctatataaatgcatatcaaaaggaaataaattagcaacgttgaggtgccaccgagtgcaggttttctcccagtcatcgcagtctcctgccagtgagcagaatccctttcgactgtctttattctactgccatcctgtggctggtctgtgccactgcagcacctgggccggatgtagctgagcatctgtagggtcattgtcctcactgtccccaggaagggctcctgaggagggagtgcagttgaagggtctgctcaggtcccccaccagcgggcagactctggcgtgaatcaccagtcttgacttggtttctgtttgatgaaccttaaggacacgtatacaggaccatgaagccaccgctgaggccaatgacgatgaggtagatggcgtagagaggtacgagtccagctccatggcactgaggatctggagacacagacatgcagtgggctcatgggaggatggaaagccggacgtccaataatttagaacccgaggccttccccgcttacttttctcctgagaccgcgatggtgaggttcccgagaggcattttataagttcttctgctgaatgaatcttcatcagcccttcaaaacaccaccgcaggaaggacactttggaaatccacgcggcactggagacagacagccgcgttactcacaggtgtccctcatattctcatggtttcccatattcgcatggtctcccccatattcacagagtctccccatattcccatggtctgccctatttgcatgatctccccatattcccacagtctcccatatattcagtctccccatattccatgggctccccatattcgcacgatctccccatattcccacgatctcctttatattgattggtctcccccatattcacacagtctgctcatattcccacagtctccccatattcccacgtctcctttatattgacacggcctcccccatatccagtttcctcatattcccatggtctcccatattcccatggtcttctttatattgacatggtcttccccatattcacacagtctctcatattcccacggtctccccatattcccacagtctcccccatattcacagtttcctcaattcccagtctccccatattaccagagtctccccatactcccagtctcccccatattcaacagtttcttcatattcccatggtctccctatattctcatggtctccccatatccccacgtctcctttatattgacacggtctcctgcatattcacatgatctccccatattcccacatctccccatattcccatggtctccccatattcgcacaatctccccatattccgacgatccctttatattgacatggtctcccccatattcacacagtctcttcatattcccacggtctcccctattcccacagtctcctttatattgacactctctctcccatattcccacagtctcccatattcccacggctcctttatattgacatggtctcccccatattcacactttcctcaattcccacagtctccccatattctcacggtctccccatattctcacagtctcctgcatatcatgtgatctccccatattcccatagtctccccatattcccatggtctccctatattctgcagtcttcccatattctcaccgtctccccatattcccacggtctcctcctattctcaggtctccccgtattcccatgatctcctttatatcgacacagtctcccccgtattcagtcccccatattcccatggtctccccacagtcacacagtctctcttacctgcacaagggcactcccactctctgagacagggccatggtggctctggcccaagttctctgatgagcaaggagggagagagaccagagaccaagaggcaaaagggcagaggggttgctggggacatggactgggccgagggagctgagaggccacggggtcacccacacatttgatccatagcaattctcagagggatgtgatgaggcatccctgcacgtgctcagcttcatggactgtgtgggctgagagactcagcggccccacaccagagacaatggagcctgtgccctgatcctatggaggtggatggtatggggaggggaaggaggcaatgagccctgcctgggtgcatcaggaaagccctgcagaagagatgccccatggaaggcgggcatgacattcccagagacaatagctgggcaggtcagaggtgagagggtggggtgtgctgggggcttcagaaagctggggaggccgcagggatgagcagccctgggaagatttgaacaaaggggggcatgggtttgcaccttggaaagctcctctgcgtggctgagtcgagagggatgtggaggggcccaggttacagagaccaggctatgcagtggcccaggctcaaacaatggtggccagggatggagacacagccaagcagacattcagagaaacaggaggcagaatcgacctggctcacaggtggatgtggagagggagggagaagtcaagggcgacttctggatatcagctgtgggataggaggaggtgcatctggaatctcaatggaatcattcctttggcctccagggcagtgggcaaaggcctctgcttccagaagggcagcctcgagttggatctaagtgataagtgtccatctccagatgaaagcaggcttcatcagtcacatgagtcctaacaaagctggcccaggccccgggggcaggccttacctgtccacggctgctcaagtttatcatgaagcccccggcgaggtagaaggagttgtagagggcattgtgaagaaggaggccatgtggaaggtggggagcagggccgcggcggccagggccataatctgcaacagaagaccaccagccacaccagcaggaagtgcagcaggaagggctggaggcctgcctcaggttggccagccagtaggtgggcatcccgtagatgatgatgtaggcacagtgcccggaagctccccgaggatctgcaaagaacagcccttgcaaggatatgaagccagcacctcactgccattattataaacgtttaaaagtagcagtgcccccagatagcaaccttccctctggtgatgatgaggctgtggcaggagggtgtgctgggacccaggagcatgagctcagtctggcctcccccttgcagataccaaatgctccctctagggcagttcagcctgtttccccagggcagcaatgggcacctgctgtcctaagacctggtttcaagtccctactccccctgacagatcaagtagctgtgtggccttggagagccacgtagcctctctgaacctctgcttccggaaacacctgcctggcctgctggggggccacagtgaggctctgaaaaggtaaaatacatgaggacttcttttttttagattccttctggccagaaaactatcattcctggtccatagcctggtgttttggtaaatgtttaaaataaaagttcaagtctctgaaactcccctagaaatgtggcatctggtggcatcggtgacttcacatgacccacggccccatggttcagaaaagcttccttgtagcaacgttttctccacacttacccccaccctggtgggtggggggggcactgctctcaaccctgcccagtcaccttggcaaagaaatatggaccagtggtgtacagccctcttccagttcatagtaaagcattgccctctctgagtaacctaaaaagtaagggaaaggaaagagaatgaagaagtagaataaatctacagtgcttctgttttggagactctcttaatcaattcaaagtagttatcatattgcccaagtctctcatttttttttttaaataggcacataaagccatcctaatttagatgtttgatgaggctcttcaggttttgcaagtctgtagctgtgttctgctgtcaaatataaatcctgctaggataggaacagctaagactcggtaatttctttcatttgtatgctaatattaacatgcaaactttaaaaacattattgtcttatatatacaatcacaagaaatcaaacccgctccccaggagctcagaggaacacagcttggaggtgctgaggtcctgcctgcccatgccagtgggccacactcacatttggagatgacatccagatgacgttgaaagggatgagagcaccgatcatgaacaagagggcggctgtatccatgaagagagctggatgctcccatggccaaaatagaggaagccgatggtcattgacatcagacagcctccgccccatggatgaggagggtgggcaggtctcggaagtcgttggaaatctgacgattaaaaaccaaaaggaagagatgctgaggcaacagcatacaccagccccgtgaccctggaatgtcacagtctccataagcctcatttttctcctatgcaaaatggggatggtaataccgcctcatagagtggctctgaggattaaatcagaaaactgatgacagcatctgtcccacataggtactcaataaatgattgttacttttatcatgaatgtatcagcttggcaatgttaccaaagaaatgatcctgaggaaaaaatcaattacttccataaagatgtacggacaggctggcgtggtggctcacgcttgtaatcccagcattttgggaggctgaggcaggtggatcgctgaggccaggcgatcgagaccagcctggccaacgtggagaaactccatctctactaaaaaacacaaaaaattagtcaggagtggtggcacacacctgtaatcccagctacttgggaggcgaggcaggagaatcacttgaacctgggaggcggaggttgcagtgagccaagattgccctgtgcactccagcctgggtgacagagagagactctgtgttaaaaaaaaaaaaaaaaatgtcgctcaatgatgtctgctgcctcattgcttgtagtagcaaaagcctgaagataatctggcatcaagatggacttaatgggtgggtgattatggctagactaactggaatgccgaggaaacccaatcagacgggaggtagaggtgctgccctaactgaaaagaaaccagctacagaccgcatgcagagtatgatcccgctacgtttacaaatgtgtgtatgcatggaaacatcaggaagacacacgccacacagtgccgtctggctttctttgagggctggtatgaccacgacttccttttaaccagagattctctcctattgtctccatttttctcaatgaccctatgctattttacgatcttccagccggtgaggatatcttaattttgcttaaagaataaaagcaatagggtgttctgtgtcgcactgaaggttagtgctggtcccaacaatgctgtttcctttttttgaatggggtcttgctctgctgcctaggctggagtgaaggtgcaatcacggctcactgcagctccacctccaggaatcaagcaatcctcccacctcagcctaccaggtaggcccacgccacataactggctactttttataattttttgtagagatgggctttcaccttgttgcccaggcggtctcgaactcctgaacttaagtgatccacgcaccacagcctcccagagtgctgggatacaggcataagccaccaacgccctgctggatgctgtttttttcaaatgactctacctctactttctcctttaaattcactttaatagaaagggcttaatgtgatatacaaagacttggcaggggggcgggttcagtaataaaatgacagataattaccggatcagcgtcgtaaactgtgcaccgccccaggcatcttcgtaggactcgggaggcagttggtgtctagtggggtcacctgctgggaggcagaagatgtggccaggtcatgggggcagccaccttctgcagggagcttcctctcagagtcgcctgccaccttacctttccacacaggtgtcctcgtcaagatccttgtctctgctttccatagaaagtcatctaagtcacgcactttttctagaaacagggctgcagtgactgagccttctccctggtggccaattcctgctctctgctgcgcctgtcaatgctgtcaggtccactgcaagcaggggatgtggagtcacaggtggcctgttccctggcacctgtcacaggtgaagagcttggtgcacgcccagctcacaatgctgatcacccctcgtggggcctgggacattctccccaccctcagccatgaagcaaggggcagagcagagagaggcagaggaccccaagggctggtccttcaccctgccaggcctgaccacatctgcagaagcctcaggtaagagcagtggatcaaaaaatgggaaagagtagaggccccgcccaagtcccactacccggctcattttgaggacatcttaggacagagcaagagccttcagagccaagggccacatgcagtcatgctctggctccaactccagctgtccaggaagctttaatgaggactcagtgccctccatggggagaagttgggctggtcgggggaggctgagtagttaggctcccagatagtagcgttccatccagagagtgagaattctatccagatagcgagagttcaatccagatgggagagttctatccagatagacagtgacagttctatccagagggtgagaattctatccagaagtgagagttctatccagagagtgagcattctatccagatagtgagagttctatccagaagtgagagttctatccagagagtgagaattctatccagatagtgagagttctatccagaggtgagaattctatccagaaagtgagagttctatccagagggtgagaattctatccagaagtgagagttcaacccagatggggagagttctatccagatagatagtgacagttctatcagagggtgagaattctatccagatagtgagagtttgatccagatggtgagaattctatcagacagatagtgagagttctatctagagtaagaattctatccagatagatagtgagagtctatccagagagtgagagttctattcccacacagtgagagttttattcagatggtgagattctatccagatggtgaaagttctatcgagttattaagagttctatccagagagttagattctatccagacagacagtgagagatctaatgagacagagagtgagagttctatccagaagacagtgagagttctatccagagaatgagaattctatctagatagtgagattctatccgatggtgaaaattctatccagacagaaaatgagagttctatccaaagagtgaggattcttccagacagatagtgagagttcgatccagagagtcagaattctacccatatagtgagagtctatgcagatggtgagaattctatccacacagatagtgagagttctatccagagagtggaattccatccagatagtgagagttctattacgacggagcgaattctacccagacagatgtgagagttctatccaaagggtgagaattctatccagatagagagtgagagttctatccgagagtgagaatactacccagatagtgagaattctatccagatagtaaaaattctatccgatagatagtgagagttatatccacagcctgagaattccatcaacatacacagtgagaatctatccagagagtgaattctttccatatagatagtgagagttctatccagagttagaatctatccagatagtgagaattctatccagattgtgagaattctacccagatagtgctagtctatccagagagtgaggattatatccagacagtgagaattctatccagattgtgagagtctatccagagggtgagaattctatcgagacaggtagtgagagttccatccagacagtggaattctatccagagactgagagttctatccagatggtgagaagtctatgcagacaaatgagttctatcaagagtaagaattctatccagatactgagagttctatccagagggtgagattctatccagatagattgtcacagttctatccacagagtgagaattccaacgtgatcgcagtgagaattccatccagatggtgaaaattcaatccagatagcgagagttctatccaggagtgagaattctgtctacatagatagtgagagttccatccagacagatagtgagggtttagccagatggtgagaattctatccagatagtgagagttctctccagatggtaagaatttatccagacagatagtgacacttctatccagatggtgagaattctatccagacagataagagacttctatccagagagggagaattctatccagatagatagagaaatttctatccacgggtgacagttctatccaaaaagatagtgagagttctatccagagagtaagaattctatcagatactgagagttctatccagatggtgagaattctatccagacagatagtgagagtttatccagatggtgagaattctatccagacagatactgagagtttcatccaaagagtgagattctatccagatagatagtgagagttctatccagagagtgagaaatctattcagatagcagtaagagttctatccagatgttgagaattctatccagatagtgagagttctatccaggggtaagaattctatccagaaagatagtgagagttctttccagagagcgagaatactatcagatagatagtgagagttccatccacatggtgagaattctatccagatagtgagagttaacccagagggtaagaattatgtccagattgatagtgagaattctacccacagtgagaatctatccagacagatagtgagagatctatccagagagtgagaattctatccagatagatgtgagagatcaatccagagaatgagaattctatccagatagtgagagttgtatccggatgtgaaaattctatctagacaggcattgagacttctatccagagactgagaagtctatccgatagacagtgagagttctatcgagatggtgagtattctatccagatagtgacagttcttccacagagtgagaattctatccagactgtgagagctctatccagaggaggagaattcttctgaaagattgtgagagttctatctagagtgagaattctacccagatagtgagagttcatccagagggtgacaattctatccagatacattgtcagagttctatccacagagtgagattctatcctgatcgatagtgggaattatatccagatgctgagaattctatccagatagcagagtagtatccagagagtgagaattctatccagaaaggtagtgagagtgctatccagaagagagtcagagttctatccagacgatgattattctatccagatagtgagagttctctcagctggtcagaattctatccagacagatagtgaatattctatgcagatggtgagaattcatccagacagataatgagacttctatccagagacagaattctatccagatagatagtgcaattctatccagagggtgacagttctatcgagaaagatagtgagagttctatccagagataagaattctatacagatactgagagttctatccagatagtgagaattctaccagacagtagtgagagttttatccagatggtgagaattctatccagacagacagtgagagttttatcagagagtgagaattctatccagatagctagtgagaggtctatccagagggtgagaatttattgagatagatagtgacagttccatccagagggtgagaattctatccacattgatacgagagttctatccatagaatgagaattcgatccaggcagacagtgagagatctatccaggaatgaaaattatatcgagatagatagtgagagctctatccagagagtgagaattctatcagattgatagtgagagttctatccagagagtgagcattctatccagatagtgagagtttatccagatggtgagaattctatccaaacggatagtgagagttttatccagcgagtcagattctatccagagagatagtgagagttctatccagagggtgagaattctattgagaaagtagtgagaattctatctagagagtgagaattctatccagatagtgacagttctatccagtggtgagaattccttccagatagtgacagttctatccagagggtgagaattctatccagttgatacggagagttctatccacagagtgagaattctatccagacagatagtgagagtttatacagagactgagaattctatccagacagtgagagttctatgcagagattgagaatttatccagacagtgagagctctatccagatggtgagaattctatctggacagatagtgaggttccatgcagatggtgacaattctatccagatagtgacagttctatccagagggtgagattctatctagatagtgagagttctatccagatggtgagaattctatccagatagagaggagagttctatctagagtgagaattttatccagatagtgagagttctctccagagggtggaattcttttttttttttaattatactttaagttttagggtacatgtgcacaatgtgcagttagttacatatgcatacgtgtgacatgctggtgcgctgcacccgctaactcgtcatcagcattaggtatatctcccagtgctatccctcccccctccccccaccccacaacagtcccagagtgtgacgttccccttcctgtttccatgtcttctcattgttcaattcccacctatagtgagaacatgcggtgtttggttttttgttcttgcgatagtttactgagaatgatgattccaatttcatccatgttcctataaaggacatgaactcaccattttttatggctgcatatattccatggtgtatatgtgccacattttcttaatccagtctatcattgttggacatttggttggttccaagtctttgctattgtgaataatgccgcaataaacatacgtgtgcatgttctttatagcagcatgatttatagtcctttgggtatatacccagtaatgggatggctggtcaaatagtatttctagttctagatccctgaggaatcaccacattgacttccacaatggtgaactagtttacaatcccaccaacagtgtaaaagtgttcctatttctccacatcctctcagcacctgttgtttcctgacttcttaatgattgccattctaactggtgtgagatggtactcattgtggttttgatttgcatttctctgatggccagtggtggtgagcattttttcattgttttttggctgcataaatgtcttcttttgagaagtgtctattcatgtccttcgcccatttttgatggggttgtttgtttttttcttgtaaatttgtttgacttcattgtagattctgatattagccctttgtcagatgagtaggttgcgaaaattttttcctattttgtgggttgctgttcactctgatggtagtttcttttgctgtgcagaagctctttagtttaattagatccatttgtcaattttggcttttgttgccattgcttttggtgttttagacatgaagtccttcccgtgcctatgtcctgaatggtaatgcctaggttttcttctagggcttttatggttttggtctaatgtttaactctttaatccatcttgaattgatttttgtataaggtgtaaggaaggatccagtttcagctttctacatatggctagccagttttcccagcaccatttattaaaagggaatcctttccccattgcttgtttttctcaggtttgtcaaagatcagatagttgtaatatgcggcgttatttctgagggctctgttctgttctattgatctatatttctgttttgtaccagtaccatgatgttttggttactgtagcctaagagggtgagaattctatccagatgatagtcagagttctatccacagagtgagcattctatcgagacagatagtgagaattcttccagagagtgagaattctatccagatagatagtgagagatctatgtagacagatagtgaagttctatccagatggtgagaattctatccagactgatagtgagacttctatccagagttaagaattctatccagatagacagtgagagttctatccacatagatattgagagttcttccagacagtgagaattctatccagagagagagtgagagttctatcagtagggagaatttatccagatagtgagagttctatctagagggtgagaattctatccagatagtgagagtttatctagagggtgagaattctatccagatagatagtcagagttctatccatagagtgagattctatccagacagatagtgagagtgctatgcagagactgagaattctatccagatacgagagctctatccagatggtaagaattctatccagacagatagtgagagttccatgcagtgtgagaattctatccagatagtaagagttctatccagagggtgagaattctatccagaagatagtgacagttctatgcagagactgagaattctatccagatagtgagagctctaagagatgatgagaattgtacctagacagatagtgagagttccatgcagatggtgagaattcatctagatagtgagagctctatccagatgttgagaattctacatagacagatagtgagattccatgcagatgctgagaattctatccagacagtgagcgttctatccagagggtgagattctatccagacagatagtgggagttctatccagagagtgagaattctatccagatagtagagttgtatccagagggtgagaattctatccagatacatagtcagagttctatccacaagtgagaattctatctagatagatagtgagagttatatacagagagttacaattctatcagatagtgagagttgtatccagagagtgagaattccgtccagatagacagtgagagttcatccagatagtgagtattctatctagatagatagtgagagttttatacagagagtgagattctatccagatagtgacagttccatgcagacggtgagaattctatccagatagtgagattctacctagagggtgggaattctatccagatagatagtgagagttctatgcagagattagaattccatccagatagtgagagctctatccacatagtgagaattctacctagacagaagtgagagttccatgcagatggtgagaattctatccagatagttagagttctatacagaggagagaattctacccagacagatggtgagagatctatccagagggtgagaattctatcagatagatagagttctatccagagagtgagaattctattcagatactgacagttctattagatggtgagaattctatccagatagtgagtgctatccagagagtgagaattatatccaataggtagtgagggttccatccagagagtgaaaattctatccagacagatagtgagaatctatccatatggtgagaattctatcaaaatagatagtgagagttctacccacagagtgaaattctatccagatagtgaaagttctatccagatcgtgggaattctatatatagagagatgagagttctatccagagagtgagtattttatccacacagtaagaattctatccagatgtgggaattctatccagatagatagtgagagttctacccagagagtgagaattctatccaacagatagtgagaattctatgcagatggtgacaaatctatccagatagtgagagttctaccagagagtgagaattatatccagattgacagtaagagttctacctacagagtgagaatctatccagattgtgagagatgtttccggacggtgaaaattctacctagacaaatagagtctatccagagagtgagaattctacctagacagatagtgagagttctatccagagagtgaaattctatccagacaggtagtgagagtcctatccacagagtgagaattccatccagataatagtaagagttctatccagacagatagtgagagttctatccaaatggtgagtattctaccagacagatagtgagagttctatccagatggtgagaattctatcaagatagacagtgaagttctatccagatggtgagaattttatcctgacagatagtgagaattctatccagagaatagaattctatccagatagatagtgagagttctatccagagggtgagaattctatccaatagtgacagttctttccagatactaagagttctatccggaaagatagtgagagttttaccagagagtaggaattctatccagttagtgagagtactattcagatgggaattctctctgatgaatagcgagagttctatctagagagtgagaattctatgcagatagtgagagttcttccagatagtgagaattctatccagatagatagtgagagttctatccagattgtgagaatctatctaggtatatagtgagaattctatcccgatggtgagaattctatccagatagtggtgctatccagagagtgagaattatatccagataggtagtgagagttatatccagagaggaaaattctatccagatagtgagagttatatccagagagtgagaattctatccagatagtagtgagagttctatccatatggtgagaaccctatcaagatagatagtaagagttctaccacagagtgagaattctatccagatggtgagaaatctatccagatagtgagagttctatcagacagtgagaattctatccagattgatagtaagagttctatccagagagtgagaatctatccagattgtaagagttgtttccagatggtgaaaattctacctagacagagagtgaggttctatccagagagtgagaattctatccagacagttagtaagagtgctaaccagattacagaattctacacagagagatagtgagagttctaccaagagacttagaattctacccagtcgtgagagttctatccagatggtgagaattctatccagatagatagtgagagttctatcagagagtgagaattctattctatccagttagatagtgagaattctatccagatagtgaaatactatccatatagtgagagttgtttccaggtagtaagagttctatccagaaacatatgagagttttattcagagtaagaattctatccagttagtgagagttctatctagatggtagaattctatccagacagatagcgagaattctatccagagagtgagaattctattcagaagtgagagttctatacagttggtgataattctctccatatagatagtgagagttctatcagagagtgaaaattctatccagatacacagtaagacttctatccagattgtgagaattcatccagatagatagtgagagttctaccaagagagtgagaatactacccagatagtgagattctatccagatgctgagaattctatccagacagatagtgagagttctatccaaagagtagaattctatcaagatagatagtgagaattctacccagatggtgagaaatctagccagaactgagagttctttccaggtagtaagagttctatccagaaagatagtgagatttttaccagagagtaagaattctatccagttagtgagagttctatctagatggtgagaattctatcagacagatagcgagagttctatccagagagtaagaattctattcacatagtgctagttcatccagagagtgagaattatatcgaggtagatagtgagagttctatccagagagtgatattctatccagatagatagtgagatttcaatgcagatggtgagaattctatccagatagaagtgagagttctacccagagagtgagaattctatcccggtagtgagagttctatgcagaggtgaaatttctatccggatagtgagaattatgtccactatccggatagtgagacataggtccactatctggggagtgagaattctatccagattgtgagagttctatccagagggtgtagttctatccagaaagatagtgagagttctatccagagagtaagaattctatccagatatgagagttctatccagatggtgagaattctaccagacagacagggagagttttatccaatgctgagaattctatccagacagatagagttttatccagagagtgagaattctatccaatagatagtgagagttctatccagatggtgagaattctatccgcattgatagtgagagtctatccacagaatgggaatacgatccagacagatagtgagagatctatccagagaatgaaattctatccaaatagatagtgagacttctatccagatagatagtgagaattctacccaatggttagaattctatacagatagtgagcattctttccaagtagtaagagttctatcaaaaagatagtgagatgtttatccagagagtaagaattctatccagtcagtgagagttctactagatggtgagaattctatccagacagatagcgagagctctatgtagacagtgagaatctatctagatagggagaattctacccagatggtgagagttatttccatatagatagtgaggttctatccagagagtgagaattctatcccgatagatagtgataattctaaccagatgtgagaattctatccggatagtgagagttctatccagagagtgagaattatatccagataatagtgagagttctatccagagagtgagaattctatccagatagacagtgagagttctagcagagagtgagaattctatccagattgttagagttctatccagagggtgagaattctaacagacagatagtgacagttctatccagagggtgagaattctatacagcagatagtgaggttctatccagagagtaagaattctatccagatagtgagagttccatccagagggtgagattctatccagagagattgtcagagttctacccagatggtgacaattctatccagataggagagttctatccagataggtagtgagagttttatcgagatagacagtgagagttctctcagatggtgagaattctatccagatagtgagacttcaatcgagagagtgagaattctaacagatagatagtgagagttctatctagagggtgagagttccatccagaaagatagtgaggttctatccagagtgtaagaattctatccagatagtgagagttctatccagatcgtgagactgtaccaaacagagagtgagacttttatccagatagtgagaattctatccaaatagtagagttctatccagagggtgagagttccgtccaggaagatagtgagagttctatccagatgtaagaattctatccagatagtgagagttctatccagatcatgagaattctaccagaggtgagagttttatccagatggtgagaattctatccagacagatagtgagagttctatccgagagtgagaattttatccagacagatagtgagagttctatccagaggatgataattcttccagatactcagagttctgtccagagggtgagaattctatccagatagatagtgagagtctatccagaggatgataattctatccagatactcagagttctgtccagagggtgagaatctatccacattgatagtgagagttctatccagagaatgagtattctctccagacagatatgagagatctatccagagaatgagaattctatccagatagatagtgagagttctatccgagagtgagaattctatccagatagtgaaagttctaactagatggtgagaattctatccgacggatagtgagagttttatccagcaagcgagaattctatccagatatatagtgagaggctatccagagggtgagaattctatcaagatagatagtgagagttctatccagatagtggaattctatccagatagtgagagttctatctggatggtgagaaatccttctagatagtggagttctatccagagggtgagaattctatccagattgatagcgacagttctatccacaggtgagaattctttccagacaaatagtgagagatctatccagagagtgagaattctatccgatagatagtgagagttctatgcagagtgagaattctatccagatagtaagagctctatcagatagatagtgagagttctatgcagagtgagaattctatccagatagtaagagcgcttccagatggtgaaaattctatctagacagatagttagaatcccgtgcatgcagatggcggaattctatccagatagtgagaattctatccagagggtgagaattatatccagacagaggtgagagttgtatccagagtgtgagaattctatccagatagtgagagttgtatccagaggagagaattctatccagatagacagtcagagttctatccacagagtgagaattctatccgacatttggtgagaattctatccagacagtgagaattctatccagaaagttctgagagtacagttctatccagacagatagtgagagttctatccagatggtgagaattctatccagaagatagtgagagttccacccagattttgagaattatagccagacagagagtgagacttcatccagagactaagaattctatccagatagacagtgagagttgtatccagagggtgagattctatccagatagtgagagttctatctagatagatattgagagttctatccggagtgtagaattctatccagatagatagtgagagttctatccagagggtgagaattctattgaaaagatagtcagagttctatccagagtgagaattctatccagataggtgagagttctacccgacggtgagaattctatccagatagtgagagttctaaccagagtgtgagaaatctatccgacaggtagtgaaagttctatccagagagtgggaattccatccagatagatagtgagagtctatacagaaaaatagagttctatccaaatggtgagtagtctatccagacagatagagtctatccagatggtgagaattctatcgagatagatagtgagagtactattcagagaatgcaattctatccagattgtgagagttctgtccagatatatagtgagagttctatccagagcagagaattctatccagatagatagtgagaattctatccagatgttgagaattctatccgatagtgagagttcctcccagttagtaagagttctatcaagaaagatagtgagagtttttccagagaataagaattctatccagttagtgagagttcaattcagatggtgagatttcttccagacagatagtgagagttctatccagagagtgagaattctaaccagatagtgagagtctgtccatatggtgagaactctatccagacaaatagtgagagttctatctagatgttggaattctatccagataaatagtgagagttccacacagagagtgagaattctctccagatgtgagagttctatccagatggtaagaattctatccagatatatattgagagttctatctgagagtgagaattctatagatagatagtgagaattctatccagatggtgagcaatctaccagatagtgagagttctatccagagagtgagaattatatccagattgatagtaagactttatccagagatagcgaattccatacagattgtgagagttgttcatggatggtgaaaatttatctagacaggtagtgagagttctaacgacagagtgggaattatatccagatagatagtggaaatctatcctcagatgttgagaattctatccagatagtgagagttctctccaggtgtaagagttctatcctgaaagatagtgagagttttgtccagagagtaagaattctaccattattgagagttctatctaggtggtgagaattctatccagacagatagcaagagttctacgagagagtgagaattctatccagatagtgaggattctatccagatgttgagaattcttccatatagatagtgagggttctttccagagtgagaattctatccagagagatagtgagattctatatagagtgaggattctatccagatagtgagagttctatccagagaatgagaatctatccagatagatagtgagagttctatccagatggtcagagttctatcgaggaatacggagagttctatccagagagtaagaattctatgcagatagtgagaattctacacagatgggagaattttatccagaccgatagtgagagttctgtccagatggtgagaattctatccagcagatagttaagagttttatccagagagtgagaattctgtccagatagatagtgagagtctatccagagagtgagaattctatccagatagatagtgagagttctatctagagagtgaaattctaaccagacagatagaattctatgcagatagtgagaattctatccagacagttatgagagttatatccagagagtgagacttctatccaggtagatagtgcgagttctatccaagggtgagaattctatccagaaagacactgagagttctatccagaaagtaagaattctaccagatagtgagaattctatccagatggtgagaattctaccagacagatagtgagagtttatccagagagtgagaattctatccagatagatagtgagcgttctatccagagggtgagattctatccagatagatagtgagagttttatctagagtgagaattctatccagatagtgaacttcttccagatggtgagaattccatccagatagatagtgagagttctatccagaaatgagaattatatccagatagatagagagttctacccagagagtgagaattctatccggaagagagttctattcagatgggaaaattgtatccagatagggagagttctatctacatgggagagttctatccagatagaaagtgagatttctatccagaaagtgagagttctcttccccacagtgagagttttatacacatggtgagagttctatccagatagtgagagttctatccgatggtgaaaattctatccagttattaacagttctatctagagagtgagagttctatccgacagggagtgagagttctatccagacagggtgtgagagttctatccagacagggagtggagttctatccacaaagagagtgagagttctatccagagagtgagaattccatccagatttgagagttctgtcaggatggagagaattctatccagacagatagtcagagttctaccctagggtgagaattctattcagatagatagtgagagttctatccagaaagtgagaactcttccagatacatagtgggagttctacccagagtgtgagaattctatacagatagttagaatgtatccagagggtgagaattctagcaagctagaaagtgagagttctatccagagagtggaattctattcagatagtgagagttctatccagatggtaagaattctatccagatagatgtgagagttctatccagagagttataattctatcccgagagtgagagatcaatacacatgtgagaattctatccagacagatagtgagagttctatacagtgagtgagaattctatccgatatacactgagagttctatccatagagggagaatcccatccagatagatagtgagagtctatcctgagagtgagaattatatttagatggtgagagttctatccagagagtgagaatctatctagatagtgagagttctatcccgatggtgagaattttatccagacagtgagagtctatcctgatggtgagaattctatccagacagatagtgagatttctatccagagagtgtaattctatctagatagatagtgagagttctctctggagggtgagaactgtatccacaagatagcgagagttctaactaaagactgagaattctttccagatagtgggagttctatccgatggtgagaattctatccagagagtgacagtcctatgcagagggagagaattccatccgatagatagtgagagttctgtccccagagtgagaattctatccagatagacagtaagagtctatccagagagtgagaattctatccagatagtgagagttctatccagagagtgagtatctatctcgatagatagtgagagttatatacagagagtgagaattctatgcagatagtggagttctatctagatggtgagaattgtattgagatagtgagagttctattcagagggcgcaattatatccagatagatattgagagttctatccagagaatgagaattctatccagatgtgagagttctatccagatggtgagaattctcactgaaaattaataacttggcctcccagcaccctgccgaaagcaggagaatgtctggctggagggttctagggaccggccaacttcggtagatttctcactgaccccttggtcggctgctctgccccaggagggagacagcacactggctgtagacccaatctgatcagcccctgcctcctaaatcccagggatgctaacctgtgggagcaccaggcaaccccacaccacagctgtcctcttgcagtgcctctgccttctaccccaaggccctggcaatgccagaaaaggcaaactgagcccagccacagccaggatctcccatacccagctcagtctaggaccatgcatgcctgcccaccctcccttcattccttccccaaaccttggcttggctagaggttccccactcctctctcttccccttccctcctcccatatctttttttttttttttttttgagatggagtctcactctatcgcccagactggggtgcagggcacaatctcagctcactgcaacctccgcctctcaggttcaagcaattctcgtgcctcgcctcccaagtagctggtactataggcaagcgtcacgcacccagctaattcatatattttattagagacagagtttcaccatgttggccaggctggtctcaaactcctgacctcatgtatctgcctgcctcagcctctgaaagtgctgggattacaggcatgagccactgcacccggccttcctcccattttcataacacatctcaagacaagataatgtctaggtggggtcttataaccatgatgtggccccctagtgtgcagcactgtagctcaaaacatcagatttttgggtacccaggccccgtgtagctcttgcatcccaggttggtgagaggttcctgccccagggctgcaggccagagccccttccagtaacaatataaaatgtaaaaaagagttttcaggtttgcgtggacacttgacttctggtaacccctctctggggttactttaaattattccccgatggcaggtcggcaggtgccttttggcccctattctggggatggctggcctgaggatgacacacgtcaggaagccaggctgccacctgagcacagggagggaggtgacctttctgtgagttctgcagaatgtgagtacagagggcgaggggcggcctgtcctcctgggggaaggatggtgggaacttgggacactaggaggagggtgtgggctgctggacgaggagtcacagccagggctggcaccagtcccagttctgtgccttacaactgtgctggaacaggtgtttagctctgcaactccaggcttctcatctgtaaagatggagatggccttggcctggccggggcttgagagtaaacaggagaccctttgagcctggcatgtttgggccccatgtttgccttcaaggagatgtcgctgttgtcctgtttactggtggggtccttgctacagtttgccatcctgggtggaagtgggggctcaggcgacctatagcataagccatgacagctgtctccctgggacctggtacaccatgacgcctgtccagcagccatgcccttcctcagcactcaggatttcaggccaggtcctgggaaggcaactgtcccctgcagaatgaaggaagcggctcatgctccctgagtgtatatgctgagtgttcaggacccaagcaaagggcaagcctggggctgccagagcaattttccatctagagattccctggccaaggccaccaccctgggcccccctctgccaccctgcacctcaggctccctgccactgtgggaacaccagggcatgttttaagatctggtgacttcttgccttaaaggttgtttccctactgagtctgaataaagactctgatatttattgatccccacctcttgaattccatgccctcccatctttggagtttgcaagtttctaatctatcatgcaagaagggtagctctttgtcagaagcttctatttccaggccctcatttctagcatttgatcctggcaaaccaccccatgttcttccccatcattgctcctcctctcctgaaacctctggagtttctcccctgaatctttccagcaagcttgggcagggtttaagcatcggggaggcccgtgtgccagggccctggctgctggccttggggactcaccatagaagtcagcaggattgcgtagcgaggacaggggtagccgatggctgtgaaatactggaccatgtgctgggccgccctaagtagatgggggtgccagacgtcatcaggaggaccagatcaaacagcctgaagatgtagagcgaggctggtggagggagatgagcaccagccggttgcctttggccagcctggacaggtcttcaccaggttgtgggctgtgaagctgtcgagcccagaggtgggttcgtcgagaaaaggattcctttccaacacagagaggagcctggtgagtcggtggggctctggccagaccagccaagcctgaggggaccgcacaggtccctctgcccccatctgccccccaggccctcactgggttccacaggagctgcaccccaatgctgactctcctgcgctcaccccccgacaaccccgcacgtacatgttgcccacgcgggtgtcagcgcactgcctaagccgcagctccgcgtcacgtcctccacctgtgggccagaaggagctttgaggccacctcaggggcctccttcaggctggacacattgtgaccccaaggataaaggcgcccgctcctccggctgggtttgaaatgaagggagacagctccagcacttgagttccaagctgcaacattggttcccctgattcttccacaggtcccgaggggcctcgacgtgctgggcatggtgccctgtgttaggaacgtggagtgtattggggaccatggctctctacccacatggaggcccagaaaacacacaaacaaaacactcatcccacatcttgacaagtgcagtgaagggaaccaatgggctgagctagcttcggcgggctgtggggtttgaaaggagggtggagggtgggctgcagcccagggctggcggaggcaagctgagttgttcaaactcgacctgcggctgggtcctgaggcaaggcagcaggggggagcggggcatggacactgtagcttcttggacctgggggtcaccactggggccagttattacccttttgtcacgctgggcctgggagaaggttctgggcagccgcatctgggcaatgaggccaaggtctctcgcacagtcaagttggggagcagctggttgtgctggcgcacgtggccacacacttcctcaccagctgaggcgagctgggctgcccattgatccagatctggcctacttgatcttgccgccgtgacctcggccagtgatcacatctagcaaggaggctctcccaaacctgcaaagccaccagggatatccctgagagcggagcttctgtgggggccaggctgtagccactgctccccatacactctccaggaccccggactactctgtccgtgcagatgtgacagcccctagagaggtggcatagtccctggacctagatggggtgggcccaggacatggactccaagccttctgtctgcagccaacgtgagcacccctgtggggctgcaaggcatgatgcgctgggggttcaggccaggccagccagtggtggcctgacaggagaaagctagagtcctgatgccacagggccagctggtgcctggagcatttgtcccctcctgccacccaccaaggcctttctccccaaggcaggctggtgttaacataactatttttggctggcaaacatgccagaatgtctcattattcaatgtcggttggctcagaagctggctttgtgaggactaatttgggcatttatagagcgtcttttaaacatgcaaaaccaaatctattttgagaaataatggagaaaaaatagagaaataatagaagtggaaacaatttaaaactacagcacagtgtacatattgttctgactgtatctacacccatctctcttcttttcatcagtggtacttttacttttttttttttttttttttttgagacagagtcccactctgctgcccaggctggagtgcaatgggtgatctcagctcactgcaatctctgcctcccgagttcaagcaattctccctgcctcagctcctgagtagctgggattacaggcgctaccatgcccggctaatttttgtatttttagtgagacagggtttcgccatgttggcgaggctggtcttgaactcctgacctcaggtgatctcccgcctgggcctcccaaagtgcatcagtggtatttttaatactcttttttaaaaaaggttcacctaactgagggtggaggatgggaggagggagagcaggaaaaaacacttgggtacaagcttactacctgggtgattaaataatctgtacaacaaaaccccgtgacactagtttactatataacaaacctacttgtgcatccccaaacctaaaataaaagttaaaaaaagattcttgcactcaagttaacagcaccctcttctgaatgatgtactaattattattgatttgagaagtaagcatcagattggatccagtttccaaaaactttcggtgagcctctgtctgtgacgctgttcaagctgtgaatgcggattgggctcaggctcagaacatcttcctaccgtggagtaggaatgagctctttccactcccgcagatggagtgttttctgcttgtttgcttgtttgtttggagatggggtctccctctgtggcccaggctggagcactgcagcctctaccatccagttcaagagattcccctgcctcagcctcctgagtagctgggattacaggcacctgccacgtgcctgccaccacacccgccaccacacccagctaatttttgtatttttagcagcgacgggtttcaccatgttggccaggctggtctcgaacccctgacctcaggtgatccgcctgcccggcctcccaaagtgctgggatgacagacgtgagccaccgtgcccggccccagatggagtttgatctccaaaaaccaagaagcttcttcacatgatctttctggttactgtgcagaggtctcagggtagaaggggcctgtgcaccacctctgggtgtacctcatttaagatccctgaaacatgagtggaacaaaatagccaggagagaaacctgggagagaagcttcagagccaggtccagggacacagaggacttcaccaacattcacagggaccacggattcccactcagaaacaggaaggccacgttttctgagcaaaactttgtgagagcggtggggagccttccaatggggatgcctgtggcatctggggagactctctgatatggtttggctctgtgtccccacccgatctcatccgaaattgtaatccccacgtgtcgagggagggatctggtgggaggtgattgatcataaaggtagatttcctctatgctgttctcatgatagtgagtgagtttaaaaagttacactcttatggtttaaaagtttttggcagttcctcccctcattcttctctcctgccacatgtaagatgtaccttgcttcccctttgccttccaccatgattgtaagtttcctgaggctccccagccatgaggaactctgagtcaattaaacctcttttctttataagttacccagttcaggtagttctttagagcagtgtgaaaacggactaatacaccttccatgaactaagacaaacacccactggcattcaagacccttattcaatggctggaatctccaaatcaataaaccatcaattggaaaccacttttggcattgctgagagtataaaagaaactaaaatgcctaggctgctttcttttcttttcctttttttttttttttttttttttttagacagtgttttgccttgctgcccaggctggagtgcaatggtgcaatctcagctcactgcaacctccacctccgggttcaagcgattctcccacatcagcctcccaagtagctgggattacaggcacgtgccccacgcccagctaattttttgtattttttttttagtagagacagggtttcaccatgttgccaggctggtctcgaactcctgacctcaggtgatccacttgcctcagcctcccaaagtgtgggattacaggcatgagccaccgtgcccagcctggctgttttctttgtattttaaaaatatggccagcgttcttttgtgtgtatgttgggcagggggagagggggatggcagtaaaatcacaggaagtgtagttgatgaacctttctaataaatcattttaataatttcagctgctagttaaactaaatttggcctgaggctgcctgcatactttgagttcccacagagcaaactcaagcaaacttagtatgtaaacaaactgcaacttatcttagcagtatattctcttaagaagagactggctgagacaagttgctgagtctcagccaatcatggcagccaagcatcagccatcacaggctaccgactgatgagctcctgtccatacccaacacctgatcacatcaccctaaataaataaggtgaacacccaactgtaaccaatcagctatttctgtagggcacttccttttctgtctataaatactgcctgaccaaattgcttgggggagcctctgaactggtcctgttttgagtgctgccagattcattaatcactatttgctcagacaactctactatttattttctaaagttgtttgttgttgttttgttttttgtttttgttttttttacacaggcaagtaacctgaagccaaacaacactgaatctataaacaaccaggagatgctcggtgcagtgactatgcctgtaatcccagcactttgagaggccaaggcaagcagatcacctgaggccaggagtggagatcagcctggccaccatggcaaaaccatatctctacaaaaaatacaaaaaaaaagagccaggcatagtggcacccacctgtaatcccagctacttgggaggctgagacatgagctcgcttgaacccaggaggagcgggttgcagtgagccgagatcacaccactgcaatccacctaggcaacagagagagactgcctcaaaaaaacaaaacaacaacaacaaaaaaaacaaacaggagactattcagtgtaatttattcattcctttctaagagacgggatcgtgctctgtgcccaggctggagtgcagtggcgcgatctcgactcactgcaagctccacctcccaggtcacgccattctcctgcctcaacctcccaagtagctgggactacaggcacccaccacgaccccagctaattttttgtatttttagtagagacggggtttcaccgtgatagccaggacggctcgatctcctgacctcgtgatctgcccgcctcggcctcccaaagtgctaggattacagtatgagccactgtgcctggccgggatctacttttttcttatttaggtcaggattgcaggacagggacagagtgagagggacttcatgactgtgatgctgtttcagttacaaagtgcattatacataagatttcatttgatctttggttatacagtaaacagaacttatctaccagacggtgtaaaagtttggagcagaatgtttaaaaaattgagtaatctctacctctggaaatgttaattaaaagatataaaatgctctctccagcactatgtaagggtgtcccagggagaaagtcttgatccgagaatgatgaaaccaaagttctagttctagctctgcattaaatatgtgccttacgagaatccctcaatttctttggatttgagtctcctcatctgtcaaatggagggagtgtgtgtgtgtgtgtgtgtgtgtgtgtgtgtgcgcgcgcgtgcaggaggatactctaacacactgaggagtagggagtttgaacaccttcctctgaaaatgcttccaaactggtaggagaaagaaaggtggaacatgatgagaatgacctctgttccccaagccccctttcagctagacattctctcattttaaatttggccatggaaatgacaatttgaggcactccaagaactggctctttgcagatgagtgaaagttgtgctaagtaagacgctggagaggctgtctgagggtgagagtgtggcaggggctgtctggccataatcagaatgtgattgtggaggaacaactgaaccaatgcccctcatggctggaggagtctgaaaagaacattacatgctggagctgttgctgatctctccgtccaggtgttagccaaagtcagatgctctggccacagcctcgggtgacaagaggcgcactcatgactcttaacaacagcacctaccctcaagccagcaaatggagagccaggatttgagcccaggtctgtctgacccagaacctgtgttctcagccattctgcgtattattctactagtcagcaaagagctccataagaagcatccatttgtccaaaggaccttctgtatcccaggagagaaaccattgcccagcgatttgcctttccggtacctgagctcctatgatggccagcatctgcccacttctcactttgaagcttaggttctggatgcccagccacaagaattctggcagctgggagatgtccagggcatcttgaactgagccagctgctcaaccaagggacctgagaggccaggtccacctgtggggagatatcagaaggttccttagaggctgaatggttcagagggcttcagcaacttctgttcagcatcttcgttccccaggtggccctctccacagaggatatgtcctcacctacacacaataggccccaacccaggttctaccaacacggaagcaggacccatgctgagaacctgtagctgctgtttctaggtctgaagatagaagaatgaaaagcatgtacaggccaggcatggtggctcatgcctgtaatctcagcacttggaaggctgaggcaggtggatcacctgaggtcaggagtttgagaccagcctggccaactggtaaaaccccgcctctactaaaaatacaaaaattagccaggcatggtggtggttgccgtaatcccagctacttgggaggctgaggcaggagaatcacttgaatttgggaggcagagttgcagtcagccaagattgcaccactgcatcccagcctgggtgacagaatgagactccactcaaaaaaaaaagtaaggaaaaaagaaaatcatgtgcaatagtggtacagaaataaaataaaacacgaagcaaaatgtcttcacttgatactagtaatttactaataatttatcagagtttactatgtgcaagacattgtgttaatcacttaacatccatcaccttattcaatcctactgcaaatctataacatagatatgatcagaatccttgttttacagatgaggctcagggagttaagcaacttgctcaaggtcacacagctggtaagtggcagagcagagaaaggctcatggcttgtcccaactcacacccacaggaagccagactcaggcctctgaagttcaccatccagaccccaccatgtcccatctgggtccctggggagctgtgggaatatggatccttgaactgaccagggggttcctgggtgcctctgaaaggtcagtcattgtctttgcactctggatttttataagctccagggatagtacattttacaaaaaaaaaattatatatatatatatattaacacacacacacacacatatatatataactaatgaaatctgaataaagtctgtagttatagcattgtacattgttcatttcttagtgttcataattatactatgggtatgcaagatttaacattaggggaagctggacaatgggtatatggaaacactgtgttatttttgcaatttttccaaaatctaaagttatttcaaaatatagtttaaaaagagtcccagagacattttttataggttcacgcattttgttttatgtttatacaacagttttattctcttttcaagccttcaacctccagctctgatatatgccattgatgacacctattgcacctgacacgtgaggctcaatgtggactggactctgtccttgcgggcagagggcctgcaagttgggcccaccctttatttccacccggggaatttcctggctgtccctgcctgctcctctccccttgaacccagcgtgcctctacctggtagttgaggtctctgacctccagggtgttgggctggccactgtagtgaagtacaggctgttgtcactttcagaggagaacaatctatcctggaggccctgtggagacaggagagatgaggggctcctttagaagctgctgagaacataggagaagacaagaagaaaccaacaggtgagagcaacttcttagagccgacgtggttaaatctcaaattggcaaagatgggattgcacaggtggaacctcagggctttgggaaaataggagtgctgacaagggccatctcctcttcccttcagagagaggtttggggcttctcccggggcaccttcccagagacctcaacctcaggctggtggagcctgaagccaagcagcttctggtaaagagacccagatctggaccggagagagttctataaaaaaacctctgtgctctgagaagacctgactggaggggcaaactctttgcctttaactttctcttccctgcagctggcttaatatctcctgaggcaaacagacatgacacttgcagcatgtgagagggaagcagctgttgagagttaatgcccatattcatgaagataccaccctgagaaaaattctaaccaacatcttagtcctcactaactctggcatacttctcctcatatctgattttgatgaagagttcatgcaacaaagtgatggaaatgctgctgggagctttgagaggaagtccctctcatcatcatcatcatgttgttgttttgtcgaagtggtggtatatttgaatgtacattaaaaaatcaatgtttcatggtgtcggtgatacctttgaatggtattaaccatctgcagatctcaattcctcctattttgacaattaatcatttaaaccattgaggcccaaacaaagaagcaacaggaagtcccccatcatttcttttctttggattgggtctcgctctatcacccaggatggagtgcagtgacatgatcacagtcactgcatcctcaacctctcaggctcaagcaatcctcccacctcagcctccccaccaccccagctaatttttgtattttttgtagagacagggtttcaccatgttggtctcaaactctgggctcaagtgatccacccacctcagcatcccaaagtgctgtgattacaagggtgaacacctcgtctgacctccattttttactgcattcaatttttcttacatttctgtcaggcagaacaagtacactttcattaacaagttcccatagactttcctcctcaagctaccattctccactatacattccttcaatcaaccatgcacccaacaaacacttatggggagcccagaaccccttcaggcttggaatttgggatgtgacaatgaaaaggccgttgaaaagcttagatttggcagatgagacaggtgattacgatggagcgagacagaccaggcagagagggaggctgactcaagcatctgaccagggtttattttcactatgtacacaatgcacgcacatgctgtagtgaaactaacatgacttatgccttacgtgaaaataacaaataacatacagcagtcttctgtcaaagtacccctgcaatgatgggggccagaagttctcggaaagaacattccaggtcatggaggtggagggaaagaaattcggtgacagtatgccgcaggcgtgctgtggggaaccctagagttctgggagagtatgaaaaacagcagacgaaagtgacttccattgcttaatgttgaattatcaccataaagacccaaaattatacagaaaaaaaatgggaaagataaacacctattcaggagaggggttatctctggggagcggggagagatgaaaggagaaaggggacacataggagtgcggggatcaagcttcaaagcttttggtaattggtggtgtgtacatgagagtctttaagctgatttgtgtacgatatttcacaatatgttgtcaaattgagagagcaagccgtgagtagaactccagatttccattcccacctcaaccccagttgccaaagcccccaagcggagggaggttgagggagaggaggtaagaaggtctgtgccccaagctcctgaggagattaaagcagctcggacagatgctggactcctggcagatcagcccttcggccttgcccctcatcgccctctccgctgtcactgtgcacattgcttcattgtcccatttttgttgttgttgtgaatcatcaaaaaatcttagccattgccagctgtgcgcagtggctcatgcctgtaatccagcactttgggaagctgaggagggcagatcacctgaggccaggagttcaagaccagcttgccaaaacagtgaaaccctgtctctactaaaaatacaaaaaaaaattgccgggcatggtgcacacccctatagtcccagctaccctactcaagaggttgaggcaggagaatcacttgaccggcaggtggaggtgcagggagccgagatcgtgcctctgcactccagcctgggccacacgtgagactctgtcaaaaaaaaaaaaatcttatccatttctaagagactcatgtgggctacatgcatcttgctgttgttgtttttaaaacaaatatctgcaggagggatattagacaagtaaatgagctgagaaattacttctgctggccaaaacatccccaggtcggatttaggcaggaggaggcgctgaggaaggaaggtcagacatttggagtctggagcaatgtgtggaggtacctgcagcccaactgggttccactgtgtggtgctttgagaaggggagggagctggcagcagaggaggcagagcagaaactgggtaagaggaaggggagaggtgcctggttgcttgttcaaggctcaccccaagccccttcactgtggcctgggaaggcaggtgtgggccagccctgctccaaccaccattgagggattgtgccttccaggagttgcacaggcagctcatctttcgaggaagaaaattcgtgcctgggttggggacgacctctgttccattttaaaatattttcctggctcccaggaaggatttgttagactcttcctgaggttttgacaaactctctgtattttcaaatacttaagtatctattcggctgacatcttaatcagtacgactgtcagaacatcattgaatttctgacaggtgacacccaaaaaagcaaaagcaggtttatttgtaggtaaccactctgctcatgctgggctacattgtaatttctcctcgtattaacttctgatcaaattccgagtcagatgcctaggcaagaaggaaactcacagagcacatgtttctagttctgagatgggagcctatgccccggggggagtgatgtgctgacactcacggctggagggttggcaagagacacgcaggacttgttcctggctgaagaaattttatcgaaacattcagcctaggtcaccacagctctgcctgctgccagggtttctcttgtccttctctgttgctgctcctgcccatgcatgaggagtttgtgggttaagggcacttgccactccaggtgcccaagatgccagatatctctgtgcaaatggccccaagtccatccccagggtctgtacacctcttcccaggcccacctcctgaggacttttaggccagagaagtatatgtctgtgcagggcagggctgcaatgcggtaggcaggagggtgaccatccagggtgttgagggccccatggagtgggatggagctggggggccagaaaagggggacaggttgtggctcgggctggaagtggctcccccgtaccaggcattctagccaagttgccttagaatttctcaatttacacatggcctttcaggttgtgagaagatatgtcaagataagaggatagaaactattttatttaactgttcttatagcttgatgatgacttttatatatctagacataggaaatgtgaccctcatcctcttgttccaagaccacaggtgttacgggcagaccgtcactcagcacctggagtgacaggatcggacagaaggaagcagaaatggcagggcctgcgtgcatttctggtgtggtcctagcatttctttgcctccaagctgtggtggctgaatcgtcagccctcccaggcaggaagtgttcccaaagtcccgcgactttctattctattcaggctttaaacatttcccgaagtggtgggccccacagggtatcagagagcagagctggtcagatgtggtggttgcagaactgactagaaatggtgggctcctgggtctggccgagtcaagtcctggaaactcaaggccagtccaggttgttttccccattggtgtggaatcctcgatcatgcttgtctttctctcctccctcctacccacaacaggcaagatggaaaggtaggatggggtgaggtggtgggagtggggatctgcttctcgcttgtcttcagtttagcctcctgcttcaaatcctgccacatcccgaattcagtcaaaggctatttctgagtaaacacttctcaggtaaaatgaggaaggaaacatacctccacctcctgccacctgctgcttctactccttccagctttctcgcagaacttacgattgcctgttagagccacacagctgatgttcccacaaaagccgtctgtcaccctgtctcacccatcacttcattactgagccaacctgacagccacatggatggaggagacaccagtggagtccctggcatgtgtgagccatttctatgatggagtctcatttggaaaaagcgaaactggccaggcacggtggctcatcctgtaatcccagcactttgggaggccgaggagggtgggtaacctgaggtcaggagtttagcctgaccaacatggtgaaacactgtctctactaaaaaatacaaaatttgccaggtgtgtggcaggtgcctgtaatctcagctacttgggaggctgaggcaggagaatcacttgaactaggaggcagagcttgcagtgagccgagatcacgccactgcactccagcctgggcaacaagcgagactccgtctcaaaaaaaaaaaaaaaaaaaaaaaaaaaaaaaaaagagaagaaagaaaaaagaaaaagtgaaattgtcccacatcacacaaaagaacatcatttccctaaaaggcatttcttagggcaggaagtgacctcagaggcctctgggaccctgaatctgttcccctcgccctttgacatgcaggaaacagtcctgcggccatgtcctcacactgcttgatgtccggtggtgctaggacagaaggctcctgagggaagagagaaaggtttgatttctcctacccgccaccaggcctgggccgacttcccattgctcactcaccgaggtatcctggggagtggccctttcggcagccctctctcctctgccgccttcccggccatggggcccacaggtctgtgacctgggctgcagctctcttagacccagctgctgcctgccagggccagtgtcttcactcttttcctggagcagggacacctcggcctcctgccctgggcccgtctctcccagcattcctgctggcaagcccacctacaaacgtgtgtgttctgcccactgtcaagataaggacgcgctgctaaaggtacatcagataatggtctccgtggccaagtcccagtcctgctgtcccaaggactccggggtcaggtggagcaggcagggcagtctgccacgggctccccaactgaagccatctggggagggtccggccaccagaaaatttgcccagctttgctgcctgttggccatggggacctctcatctttgacccccggagggtccatgggtctccaagtaaacagaggctcccaagctccctggagggggctcctgccaccgccccggagcctcacagcctgggcatcctccagcctcctacagcgtcaggtaaggcagagcccttgctgctgctgctcccccaggagtgcgggcccggcgctcacccctctgctgcctttcttcactctttaagtgccagtctgggcactcgggctccctctttagtggatcgggtggagagaggagagggagaagggctgtgctgggaacatggagcgacagtgaatggcccctccccctgcccagggaagggcctgggcataaacaagtggcagcagtgccctgccaacccagtgtctacggcctgccctctgtggatgggaatggggtactgcgaatgcaaggagtcttgaaacctggtgaaagaatgcagggacagccacctgcagccaaacggacaggacattcagagcaactccagcacaggccccctccctacgtggcgacagcctcagtcgctatctgccaggttctacagaggagggcgcagagactgaaacacgtaggagcctgtccggagactactggggtggggcacaggtaggatcaatgctggggacctggtgtggccccttccagggccccaagctgcctttgccttcctggggtttcctttaaagcaccgcgtgaggccctggtgggacatcacatcttgccggcagcagtggaccaggcagatctcaaagatgtctccttgtacgtggagagcgggcagatcatgtgcatcctaggaagctcagtaagcttgggaaggaggattctaaaaaggatttggcttgagttaaactccacattgaaaaacagattaagttgtaacaagaaagccacaggtttgatattagaatgaattctattgaatctgactgtgaatggaactgctaccaatgtgaaatctttagaaagatccttgaaagagataaaattctgcctaacatgtacgtgaattcatatttcaaaatataaaaagcccccacattccatggcatataaaagtactcaggaaacacaatttcccctatctgtacactgcctaggacaggaaaaggattaaataagcacaaaaatgcccattaagcccctatctttgattccatggtgcttttttatgatggtatattttggacatacaatcaagaatagagaataggctggcacagtggcttatgactgtaatcccagcagcttgagaggctgaggtgagaggattgcttagcccaggagttcgagagcaacctaagcaacatagtgggaccccatctctacaaaaacaacaaaagttagccaggcatggtggtgcatgtctgcggtcccagctacttgggaggctgagtgggaggattgcttgagcccgggagattaagacttcagtgagctgagatagtgccactcactctagcctgggcaacagagcaagaccctgtctcaaaaaaaaaaaaaaaagactggaaataatatttaaaagttcatgtattaacatcgggccttatcagatcttatctggtcgttttcttttctttttttttcttttttgagacagagtctcactctgtcacttaggctggagtcagtggtgcgatcttggctcactgcatccttaacctcctgagctcaagtgatcctcccactcagctgggactacaggtgcacaccaccatgtccggctaatttatttttatttttatcttttttgtagagacagcgttcttgctatgtttcccagactctttttcttttttaaggaataaacattacaaattgcactgaggtcatccactgcccgttctccacatcatccttctcccctctttcccagggtagctgcatttgagcctacagtcggtgtttgtgcccctgcatcagcagtcattgccccagagagtctagcctttggtgagacagctccttgtggccgagggcaatccctgggagggtccctgtggtgaatcttctgcagctgacgttctcagcagctgggggaggctgcattggccctgaagaggggttctgtgtggcacaccacagtgtctgctacactggttaccatctacattttaaggttaaaagcttctgacaaattggctccacagaagcctcttattgagctattgcttgcaaattgttgacattcactgccactctctacttgtgttattctttcaatggagatggggactccattgaagtctatgaccaaatgtaggcatggtcagcctcttagactcagggaattgaatccatggctattcacctgctacagcaggtgcacaaccagagccaacagtagtgttgttaagaggaattcccaggccgggcacggtggctcatgcttgtatcccagcactttgggaggcagaggcgggcggatcacttgaggtcaggaattcgagaccacctggctaacatggcaaaacccgtctctactaaaaatgcaaaaaaaaaattagccaggctggtggcaggtgcctgtaatcccagctactcgggaggctgaggcaggagaatcccttgacctgggaggtggaggttgtagtgagccaagattgtgccactgcactctagcctgggcagagtgagactccatcttaaaaaaaaaaaagaagaggaattcccagactgtctcagtccaccaggctgctacaacaaaataccatagactgggtggcttataaaaagcagaaattttttttcacagttctaggggctgggaagtccgagatcaagggggtcaacagattcagtgtctgggagggagacttcctcctagacagccattttctcaccctaaccttgcatggcagaagtgggaggggtctctgaggcattcatctgaattgtaagagctctccataacctaatcatctccaatatcacctccttgcatgccccacctcgtaatatcataatcttgggtgtgaagatttcacatatgaattttagggagacataaacattgagactatagcactgactaaagctgttaccttttcaaagactttgtcagttcttatttccatttttaaccaacatctagctatacacagtaccgtaacatccagggtcattctcagcttccttttgataaatacagtgtgcttctttaaaagaaaaaaaactgcctcttctcctttaacaaattttcacctgttgcagtccttataagaagtaaacaaggtggcatttagcacccttctcagaagtgtgtcccacttctaagaacacaagaaatggaaccccccatctcagaagtgcaccccaaaggccaatgctcagaagtgcccccaaaggccaatgttgtgtttcatgcacatacagcaggacagcaggaggggctcttgttggggtgggggagtgggctgatttctgatgagatgcctaattacggctttgggacaatcctacactttatactgaaatgaatccacagtgggctgcaagttctacaagggcagggacgtattctactgtatccttatcacctagaacagggtcggtcacgtagtgggtgcttaataatatttgttgaataaaggagtaaaataattttatgaattactccatagtattgcataaatgacaatttcattggtgtcttatctcaagcagtattatctatcaaatcttcattagcgagcaaaagatgatgacatatacgttcaaagtctcactagagtatagtctaaagcaagcctcacagagccatccaactccaggggaactccaacttatttgaattgttatttgctgttgagagggcgtagactctgggttagatgcttctttgcagattatttagttgcaaatgtcatattttatcgccctttagggcattaaccttatgatccatccgccttggcctcccaaagtgcgggattacaggcatgagccaccacgcccagcctctcatatcctcttttgaatgagcttttcatcttgctggttccctcattaatgagttaacaaatacttgacacatttttttaaaaactaaattcattattataaaaaaaaaagtatcccaaaatttagtggcttaaaacaacaccttcatgatctctcagaatgtctatggatcagaactctggaagtgacttggttgggtagtctgtcttgggatccctcccagagaagtatacactggatttggcaacaataaagtggcttaatatccctggggaggccagttttgatgaagtggtggggctgggacccaggctgcaggaatttgcagcttctgccagagttcagattggatccaaaaaatgtaaagccaggatggctcggttagaagaaccacacgactgggaaattacagggcacattttgaaagacaatcccaataagtcacattttgtttctttataatgggttttcctctctttccccactctgtccacctctgaacacgcaggggctatttctgagttttgtcaatgatgcattagaaaagaagacaactctaagggagttgattcatctttgtacctctcacagcaacaagcaagtttctttaaaatattcaacaagggccaggtgcggtcgctcacacctgtaatcccagcaccttgggaggccgagcgggcggatcacctgtggtcaggagttcaagaccagcctggccaacgtggtgaaacccgtctctacaaaaatacaaaaattagccaggtgtggtggcacacgcctgtaattccagctttcgggagactgaggcaagataattgtttgaacctgggagacagcggttgcagtgagctagatcttgccactgtactccagcctgggcaatagagtgagactccatctcaataaataataaataaagggctgggcccggtggctcacgcctgtaatcccagcactttgggaggttgagcgggcagatcacgaggtcaggagattgtgaccatcctggctaatgcagtgaaaccccactctactaaaaatacaaaaaaaattagttgggcatggtggccggcgcctgcagtcccagtactcaggaagctgaggcaggataatggcatgaacctgggaggtggaggttgcagtgagcgagactgcgccactgcactccagcctgggcaacagagcgatacttcgtctcaataatataataataataataataataataatatttcaacaaaagatctctttggctctgcacaagcatctcatcagtagatttctcttgctatcttcccagatagttcagaacttcctgcctattctctgttatgagtcccaacttctcagcctccttggataggaaaggcctgggaggtctatctgtctccatgaactctgggcctatggtaaacttgtgtccaatatgactgaggggccacaggttcttgtcctaaaggcatcacctaacctttaaccttagaaaaaagcagtggctcagcctgtaatcccagcactttgggaggctgaggcgggaggatcacctgaggtcaggaggtgagaccagcctggccaacatggtgaaacctcatctctactaaaaatacgaa

(The sequence listing continues in the following parts.)
